United States Patent Application Publication US 2005/0228172 A9 - sequence listing, part 197

SEQ ID NO: 891119 - DNA, 669 bp, Homo sapiens
ggtcaatatctaatgctttatgacttttagttacaagaaaatggttaaagtgcagcctgattaatgcttcattttaactctatttctgtccagaattcttgttaacgctgtgaagacggcttcaatgcctcttagctgttccyaacccacattgtctcacctagggttttctgcttttgctgttccttctgcctagaaggctttcccccaacaatcagcatggcctggatgctcaccttgttctggtctctgcttacattttgttttgcagagattgttgccaggtccttctccactgccttacctggctttgcttttactctgataatttgctgttacccgtcattgtatcgtgtttgtgtctcttccactggcaaacatgccccatgccaactttgtctcttttgtctgacactagtttattagaccctggaacagtaacaagcatagggtagggctactagaataaatattttccagtaaatatctatctattcaaaaaaatgaatgactggttgaagggatgaagcagatctcttttatttgattggtttcaataatctctgtgccaagcagtttactctcatatttagtccttttaaaaacagtgtggctactgctatcctccggattttacagacaaaggaatgcaagtgcagagaagacaag

SEQ ID NO: 891120 - DNA, 666 bp, Homo sapiens
gctagcacagtttttatgtctcagtttggcagtttctatctagaggtgccacaaattaatgttattatcagcttaaaagtttggtgaaaagtgttatacattcttattctttgaaaggtgagagagagaaaataagattccgaggttttgtgtacaggaaaaaacttggaagctactaggtaccaggcacggtgaatagtcattttgcttttcttatctcatttaagtttcacaataaatatgtaaagaagttattattaagtatatttttttagtcttgaaaaaactggattcagagagattaaaaacttgtccaaactcaaagagctaagaaaccatgctgagactaaaactaaactttctgactccaaaagtcaccctttcccataaatcaaatgagakttttgctttaattgcacctgtttttttcaatcacatgcacagagggtagcctctgacattgaggggatacttgcatgactaatgctgattttcttgataaatctttaaatagctattttcaacattcaaatgatatcatgaagatggttgcggtcatcatcttaaggatatgcaagttagaaaattctttctatgcaatattcaagcagcattgatatgtacattccaagaaaaaaaatcataaaggcttaattttaaaagaga

SEQ ID NO: 891121 - DNA, 637 bp, Homo sapiens
ataatgttgtgcggtgctataaactaacagtactgtgaataataactattaaaatgagtgtgaaatgacttaatgtgaataaatgaagaaatgctgtgtgtgagtgtgaatgactatgaaggctgccagctgtgagcaacaagakgattgcaagaggaaatcaaaggacacagcttcacaggtgagagcacagaggccagagaacagaactagcacaaggttcccagacctgcagggaactgactaaggaagagctagaagcttctgtcaggctgggaaggggcctcagcatgaacagaaagtccccctccactaggctcagagagggctggtacctcaggggtcttcttaaggaaaagctcagctgaatagagcaagttcttgccaataaaactccccagacgattccatgtcaaccacagctgcaaatggagagtggtcatctctgaatgatggggttgataggaagtatttatctctgtttagaatattcatgtgctaagctttctatggtaaacatgtgtggcttttataatcagaaaagaaagagtgaaagaaataagacaaacttcggtaaaagctgcccctttcttttctcttcctgtaagaataaataaatcatcttaggataacaatt

SEQ ID NO: 891122 - DNA, 637 bp, Homo sapiens
ataatgttgtgcggtgctataaactaacagtactgtgaataataactattaaaatgagtgtgaaatgacttaatgtgaataaatgaagaaatgctgtgtgtgagtgtgaatgactatgaaggctgccagctgtgagcaacaagaggattgcaagaggaaatcaaaggacacagcttcacaggtgasagcacagaggccagagaacagaactagcacaaggttcccagacctgcagggaactgactaaggaagagctagaagcttctgtcaggctgggaaggggcctcagcatgaacagaaagtccccctccactaggctcagagagggctggtacctcaggggtcttcttaaggaaaagctcagctgaatagagcaagttcttgccaataaaactccccagacgattccatgtcaaccacagctgcaaatggagagtggtcatctctgaatgatggggttgataggaagtatttatctctgtttagaatattcatgtgctaagctttctatggtaaacatgtgtggcttttataatcagaaaagaaagagtgaaagaaataagacaaacttcggtaaaagctgcccctttcttttctcttcctgtaagaataaataaatcatcttaggataacaatt

SEQ ID NO: 891123 - DNA, 668 bp, Homo sapiens
ctggtgggcggtgattgaatcatggtggtgctttcctccaagctgttcttgtgatagtgagcaacttctcacgagatctgatggtttaaaagtgtgtggcagttcccccttcaagctctctctctcttctcctgccaccatgtaagatgttccttgcctcctcttccccttccaccatgattgtaagtttcctgaggcctcctcagcaatatggaactgtgagtcaattaaacctctttactttataaattacccagtctcaggtagttctttatagcagtgtgaaaatggactaatacagaaaattgatgctagaagagtagggtactgctataaagatacctgaaaatgtggaagcaactctggaactgagtaacaggcagaggttggaacagtatggagggcttgggagaaaacaggaagatgtgggaaagttttgaaattcctactgactgttgaatkgttttgaccacaattctgatagtgatatggacaatgaactcaggctgaggtggtatcagaaggagattaggaacttattgggaactggaataaaggtcactcttgctatgctttagcaaagagattggcagcattttcccctgccctagagatatgtggaacttggaacttgagagagataatttagggtatctggaggaagaaat

SEQ ID NO: 891124 - DNA, 608 bp, Homo sapiens
ttacttctgtctttttgtttgtctgtgccctgcccctagaggtggagcctacagaggcaggcaggcctgcttgagctgtggtggggtccacccagttggagcttcctggccgctttgtttacctaagcaagcctgggcaatggtgggcgccccctccccaagcttggctgccggcttgcaagtttgatctcagactgctgtgctagcaatcagccagactccgttggcgtaggaccactcctgagccagttgcgggatataatcccgtggtgccgccgtgttttaagcctgtcggaaaagtgcagtattcaggtgggagtgacccgattttccatgtgggtctgtcacccctttctttgactcrgaaagggaactccctgaccccttgcgcttcccaagtgaggcaatgcctcaccctgcttcggctcgcgcatggtgggtgcccactgtctagcgctccctagtgagatgaacccggtacctcagatggaaatgcagaaatcacccatcttctgcattgctcacgctgggagctgtagaacagagctgttcctattcggccatcttggttcctcctctcttccacatttttatcaattactcaagtt

SEQ ID NO: 891125 - DNA, 608 bp, Homo sapiens
ttacttctgtctttttgtttgtctgtgccctgcccctagaggtggagcctacagaggcaggcaggcctgcttgagctgtggtggggtccacccagttggagcttcctggccgctttgtttacctaagcaagcctgggcaatggtgggcgccccctccccaagcttggctgccggcttgcaagtttgatctcagactgctgtgctagcaatcagccagactccgttggcgtaggaccactcctgagccagttgcgggatataatcccgtggtgccgccgtgttttaagcctgtcggaaaagtgcagtattcaggtgggagtgacccgattttccatgtgggtctgtcacccctttctttgactcggaaagggaactccctgaccccttgcgcttmccaagtgaggcaatgcctcaccctgcttcggctcgcgcatggtgggtgcccactgtctagcgctccctagtgagatgaacccggtacctcagatggaaatgcagaaatcacccatcttctgcattgctcacgctgggagctgtagaacagagctgttcctattcggccatcttggttcctcctctcttccacatttttatcaattactcaagtt

SEQ ID NO: 891126 - DNA, 699 bp, Homo sapiens
cccgcttaactcttattttattcctctgtccaacaatatttgttgactccccagcaaaatcaaataaagatcaaaatttcacatgctccatccttgcctttacagctcccctacacataacctaggtaatggaccaatcattsttctacatgctctgtgtttttctgcttctacacattgtttactctgctttttcatctgggacactacctaccatctatggctgtctaaattcctcccacccatcaaggccaaactcagatgccatcttctccataaaagcttccctgaaacctctagttggaaatattattattacctcttctgcactttcattgccactgactctgctgatggttgcacatagcacccgttttcctgctatagctatctgacagtgtcttaaatctccttctagactgcaaatgtcttgagaacaagaaccatgtcttattcatcttttaatcttatatggtgcctggcatagtgccttgtaattagaaggtacacaataaataatggttaaatgaatggatggataaatgaatttgagtataactgtacctgattaggtgaggaacaacttaaatatagacagagattttaatatgcctgtgcataaaagaggaagtacgaacctggaatatgtgatgagcttgggggcagatgtcagagatgaaaggtgcagtaactcataac

SEQ ID NO: 891127 - DNA, 640 bp, Homo sapiens
gagacatacaaggccccaatataggaaactggtgcctgcaagaaactgcaaagccaagacagcccaagtgtagaggcagagggattgttaggagaagaagatggagggtaggtgaggacttgatagtgtggggccctccaggtttcttagaagtctaggtttcttctaagcacagtaggaagtcactgaaggatttcagcagagaaggaacataatccacccttcactttkagtgctgcatggagaaagattggacccgctacagagttaagttaggagactgtggcagggaagattttagactaaaggagtggcaatggatgtgcagagaagtgacaatattggagaaatattttgggagatataatatttgagatacagttattgccaccaaatttcttgaatgtattttcttatttattgtcaatgtttcacaattagaacataagctccatgaggacaaggacttgtcttatacactgctgagtcccactgcctacaacagtgcttggcatatagtgggtattgggtaatatttgtcaaatgaaattatgatggaatgacttataaatttgaggtaaaaatgaaaaggaagaaggtgtagagagagaattccaggattgaaggtgatatttattga

SEQ ID NO: 891128 - DNA, 646 bp, Homo sapiens
tacagagttgctaagaaccagaaaaatacttcctttacttcccaaccacagggttttttcaactcctggagtaatcctggctttgattaaatccccccctatcacataactgtaacaaccagaaatcagtggaggtgtggrgtttgtccatacacctcagggaatgtgcctgtgaggtttaaactgaggtgaccccggagttcaatggctgtggagtgtcagtttccctgtaccaggccttcccaaaccccaggtttttgtttgtttttgaaacagagtttcactcttgttacccaagctggagtgcagtggtgtgatcttggctaactgcaacctctgcctccggggttcaaacgattctcctgtctcagcctccccagtaactggaattacaggcacccaacactactcccagctaatttttttttctttttcttttacttttttttttttttaagtagtagagacggggtttcaccatgttggccaggctggtctcgaactcctgacctcaggtgatccacccgcctcggcctcccaaaatggtgggattgcggccaagagccaccatgcctggccaaccccaggttttttatgctgcaagagatgactcagtgcttcaccacctctagctaaataaaccatg

SEQ ID NO: 891129 - DNA, 558 bp, Homo sapiens
tttgagatgaaaataaacattaaccatagtcaagagaagaaagagtcaataaaacacacctagagatagtgtagacaggaattttaaaatatcaataaatatgcttaaaggatgtagtggaaaaggtaaacattgtaggaaaacagatgagagttttagtatagaaatagaaactatgaaaaagaagtaaaagaaatgctagtgagattttgcttctgattgagatggagtaatcatgacttgattaactcttctrtgtgaaacaaatgaaaaaaaaatcaaacaatagcaaacaatgatttccaagacaatgggcattaaacaacaagagcagtgatgcctcagacacagataataaaattgatgaatcctacaaatgttccagtttattgccttgtaacagattccaggctgtgacacagagaaagagacccagctgcagcccagaagactcctgagttgaagagatggagtggaaagtctgggataccaacttagctagagtgtgtaggacagaataccagagagggaaattgaataaagaaataactctggaga

SEQ ID NO: 891130 - DNA, 646 bp, Homo sapiens
tacagagttgctaagaaccagaaaaatacttcctttacttcccaaccacagggttttttcaactcctggagtaatcctggctttgattaaatccccccctatcacataactgtaacaaccagaaatcagtggaggtgtggggtttgtccatacacctcagggaatgtgcctgtgaggtttaaactgaggtgaccccggagttcaatggctgtggagtgtcagtttccctgtaccaggccttcccaaaccccaggtttttgtttgtttttgaaacagagtttcactcttgttacccaagctggagtgcagtggtgtgatcttggctaactgcaacctctgcctccsgggttcaaacgattctcctgtctcagcctccccagtaactggaattacaggcacccaacactactcccagctaatttttttttctttttcttttacttttttttttttttaagtagtagagacggggtttcaccatgttggccaggctggtctcgaactcctgacctcaggtgatccacccgcctcggcctcccaaaatggtgggattgcggccaagagccaccatgcctggccaaccccaggttttttatgctgcaagagatgactcagtgcttcaccacctctagctaaataaaccatg

SEQ ID NO: 891131 - DNA, 656 bp, Homo sapiens
ttttcagatgtgattaatatttactatcagttgaccttaagtaaaggagattaccctccatagtatgggtgggcctcgtctaatcagttgaaggccttacaagcaaaggctggtttcccaaagaggaaggaattctgcctccaggctgcaatacagaaattcttcctgcatttccagccttcagactcaagactgcagcatcaatccttacctgctaatatatacatgacatacttacatctcctgttggcattggcctgtttctctggagaatcctgactagtagattctacaccttgaatggcctcctctctttcacccatctagtccagctcacccttcaaagcctggctcaactgcatctcctccaggaaggcttcctgacayctcagtgactgcagcactcatagcctgttccaccccaagggacttaatgctgttttcagaactctcctaatgcaatatctacccaccacagctgttagctcatagggcggggcggggaagagaggaggggatgagggcccaggccatgtcttgtcttttgtgatcccactggcactaagtagtgcttggcccacagcaggtgctcatccatgtttagatggtgactggcttgccttttgttctgcgcacctgtgtggtctactgaagtc

SEQ ID NO: 891132 - DNA, 555 bp, Homo sapiens
gctccttgtatcttatgcaaatttctgcagccagcttgtattttttcccagaatatgggtttttgttttccatcacattgtcaggctgcaaattttccaatcttttatgctctgcttcccctttaaatataagttccaatttcagaacatatctctcaaagttccacagatctctaggacaggggcaaaatgcctccagtctctttgctaaaacatagcaagagtgacctttctattccagttcccaacaagtttcttatctccatctgagaccacctcagcctggacttcattcttcatatcactatcagcatgttggtcaaaaccattcaataatctctaggaagttccaaactttctcacatcttcctgtcttcctctgagccctccaaactgttccaacctctgccygtttcccagttccaaagtcacttccacgttttgggtatatttatagcagcaccccactctactggtaccagtttactatattagtcctttcttgctgctataaagaactccctgagactgggcagtttataaagagatttaatt

SEQ ID NO: 891133 - DNA, 575 bp, Homo sapiens
cagcaattccactcctatttacccaagatatttgaaaatagatgttcaaacaaaaacttatacataaaatgtgcatagcagcactatttatagaagccaaaaagtggaaaacaactctcaaatgttgatcaaagggtyttcaaaggaaacttctcattaccaaactaaaattgattctcaatatatgaaaggaaattccattttcaggagttcagactcaaagtttcattcctatctataagtagataaacaaaatatacatccatacaatgacatattattcagccacaaaaagaatgaagtattgatatgtgctaccatgtggatgaatctttaaaacattatactaagtgaaaaaaaaaaaaaaccagacacaaagggtcacatgttgtgtgatttcatttatatgaaatatccaaaatttttaaatccatgaagacagaaagcaaattgttgttttccaggagctgggggaagggtttaatggggagtaactgcttaatgaataccgtatttcctttagggatgatgaaaatgattttgaacttgatataggcagtggctgtacaacattg

SEQ ID NO: 891134 - DNA, 695 bp, Homo sapiens
aaaaattgtcggaagacttgtgaagatctaggatacaaatgtaagataaaccataaacacacaatgtaatgcagaatactgaaattaaatgttaatatttagtcacttcttcaattgttgcttgtttcttttaatgatctaatatcagtatgccagatgttgatcataataatgagttaattacaagtattccattgtgagggaaatagtcaaagaaaatataagttccaacaaacatttgttgaacattcagtggagccggayattatcctgggcaatttctgtacgtgatactcaggtcaggagtgaactatttcttggacatacaccaggacagtaacctctctcccctctctcttcaccccaaattccaccctcctttcttggttgcagaataaaacctccatatttggcacttatttgttcttaggaacaggaactggtagttttcttcattttcaaagcatctctagtctcaactacaggaatcagaatggctatatatcaaagagcattggctgctccagttgtttagcagcaaaaagcacaaaagaaatgcagcctcagcacgtttgaggttattatcccattaagaaccactaagtgtgagctataaaaatctcataactgtctccacttccaccactgcatttggctctgtagtactgtcctccccacaagctgttacctgcaga

SEQ ID NO: 891135 - DNA, 695 bp, Homo sapiens
aaaaattgtcggaagacttgtgaagatctaggatacaaatgtaagataaaccataaacacacaatgtaatgcagaatactgaaattaaatgttaatatttagtcacttcttcaattgttgcttgtttcttttaatgatctaatatcagtatgccagatgttgatcataataatgagttaattacaagtattccattgtgagggaaatagtcaaagaaaatataagttccaacaaacatttgttgaacattcagtggagccggatattatcctgggcaatttctgtacgtgatactcaggtcaggagtgaactatttcttggacatacaccaggacagtaacctctctcccctctctcttcaccccaaattccaccctcctttcttggttgmagaataaaacctccatatttggcacttatttgttcttaggaacaggaactggtagttttcttcattttcaaagcatctctagtctcaactacaggaatcagaatggctatatatcaaagagcattggctgctccagttgtttagcagcaaaaagcacaaaagaaatgcagcctcagcacgtttgaggttattatcccattaagaaccactaagtgtgagctataaaaatctcataactgtctccacttccaccactgcatttggctctgtagtactgtcctccccacaagctgttacctgcaga

SEQ ID NO: 891136 - DNA, 671 bp, Homo sapiens
ccaagacaatcctaagcaaaaagaacaaagctggaggcatgacactacctgacttcaaactatactacaagactatagtaaccaaaacagcatggtactggtaccaaaacagatatatagaccagtggaacagaacagaggactcagaaataatgccrcacgtgtacaaccatctgatatttgacaaacctgacaaaagcaatggggtaaggattctctattgaataaatggtgttgggaagaatgggtagacatatgcagaaaactgaaactgaactccttccttacaccttatacaaaaattaactcaagatggattaaatacttaaatgtaaagcctaaaactataaaaaccctagaagaaaacctaggccatactattcaggacatacgcatgggcaaaaacttcatgactaaaatggtaaaagcaatggcaacacaagccaaagttgacaaatgggatccaattaaactaaagagcttctgcacagctaaagaaactatcaccagagttaacaggcagcccaaataattggagaaaatttttgcaatctatccatctgacaaagggctaatatccagaggctacaaggaacttaaacaaatttacaagaaacaaacaaggaacttaaacaaatttacaagaaacaaacaagcaaccccatcaaaaa

SEQ ID NO: 891137 - DNA, 616 bp, Homo sapiens
ttacccaactaatattataaggcttgcattaccctgatactaaaaccagacaaaagcatcacatgaaaaggaaactacagactatattccccgtgaccataaactgaaaatccataatttaaaaaagtacttaatgaaatattagcaaattaaattctgcaacttacacaaagartaatacatcaaagccaaatgagatttatgcaaagaatgcgctgttggcataacatctgaaaaatttgtcaatgaaattcaccagtttagacaaaaaaggagaaaacccttctgatgatctcagtaaatgcagagaaagcatttgacaaaattcaaaacacattcatagtaaaaacttagcaaactaggagtggaagcttcctcaacgtaataaatagcatccaggaaaaacctacagccaaaattatattcaatggtgaaagataatacttcccctctgaaaaatcagaacaaggcaaagaatgcctgctctctgcatttatatgtaacattgtactgaaagccttagtgcaataaagcaatgaaatgaaataaaagtcataagattagggaagaagtaaagttgtttttatttgcagacaacctgatcattaagtagaaa

SEQ ID NO: 891138 - DNA, 632 bp, Homo sapiens
caattaaacctagtttctttataaattacccagtctctggtaggtgtttatcagcagcatgagaacaaaataatacaataggtatttttgtatatagatatttttattttacttttgaaaaagactcagaagtgtgaagaaacttgtcaagrtccttcctatatattggtttagttgaggcctggttttaaacccaacccaactttgtccggctctgaaaactgggctcttagccaccacatgattctgctaccttatcatctatatgttcctatcttttccttttcttccagaataaaagagaaaaggggaggaaaaaaaacccatttttttcaggcaaggattaatttttaatgacatcctttcctgtgttaaatgtgaagtctcttttgtctcaatgccagtcaagtatttagttttcagtttctttatactatttgtattcaaaatatacttgatcttaaaaaagtaggggaacacttaatttcatctgttttcagattcctgccattaatttggcacacattcaaaatggttagatgatttaattacttactatttttatgagtttagttattctaaagtagtttccaacctgtggatcttagtttctaggagtctttgaagttact

SEQ ID NO: 891139 - DNA, 609 bp, Homo sapiens
ccaaggagtatttatggtcatgtgacactttagcaccagaaaggtcccccccacccaggaaagatccacacaggatatattatctgtcagcttctaaaggaacttatgattttttttggcataactggtaataacagccatacagtttcaggcagtcactgaaacatagcaaaacaccaaagcaacaattaagaaggaaaagacacagcatgtttacaatatctgaatttaaaagtgctcttttcttggtggtctctggacttcctcctacttccctgaagtttcaggrgagagaagtagccaacccttaacatggcataaaaaaaagctcacttgtgtaagttcgctcagtaactggaagaaggatgaatctgcttggattgatgggcaaacggatcttgttctcaggaaaggaggcagaactgacattagatatagatagtatccctctaggtttttcctgtgtatgccagttctaatcttctttctttaggaacttagtatagcacacttggttaaggtcatagtgtaacatatttgttttgcattttgttttcattcactcattccatgaaatttattgagcgcctactaaatgcacagtgccat

SEQ ID NO: 891140 - DNA, 558 bp, Homo sapiens
gaagggcattatctcttcctaggagcaggtgaatgagacatgaggggcaggatattttgcttatgaaaccacaaacacatgaaaataaaaaaatgtaaaattctagaaatagttgtaacctggcggtctaggtcttaaaattcactgggctttcccttaaaactctagagtgggcctgcatgttcatgtcatcaaatcagaagaagagaaaacctgcttctttactgtatttcttaataaaacttatttgaaaagcaccacrgccttagtcttgaaaatgtgggaatgattgtcttatagatgtgattctgagagtatttagcaggacttctgatgcatttagtccacatgcatgtttgatgaagcatatatacacacagatgtgtgcatttttaatgaactgagaaccgtaagtaatgtccaccttagccagattcattagctattatcaaaaacgtatttgaaaaatagtcagcaaatactgtgtctaactaccagcgtggctatcagcttcttacactttgctgcttctataaataatgcttttgttaactccag

SEQ ID NO: 891141 - DNA, 623 bp, Homo sapiens
taaaaagtaggggcatgaatcaatctttatatgatctcattgtgaactggggacagtatggcccagcctttgcacagttgtgccacatgacatgaaggcacaactccaactccgggagctttgaagaataacatcaatttttactaatcgttttcttgaaagtggttaacccaagattttattcaatgtagcaaacaggaagtatcccagaaaaaaatgtaccaaacaggaagtatcccagaaaacctctctagatattattttttctctccaaagctccatagtcatgacagtcattgaaaatccctgtattagtttgttttcacactgctgataaagatatacctgagagtgggcaatttacaaaagaaagaggtttgattgaacttacagttccacgtggctggggargcctcacaatcatagtggaaagcaaggaagagcaagtcacatcttacatgaacggcagcacgcaaagagagagagcttgtgcaggggaattcctctcactagcatgagatcagcatgggaaagacttaccccatgattcaattaccatatcaatccctcttgctattttttgtcattctatcttctctcccactaccctgctctcccaccta

SEQ ID NO: 891142 - DNA, 612 bp, Homo sapiens
ctcagctctggaccaagtggacctaacagacatctacagaattctctaccccaaatcaacagaatatacattcttctcagcacctcatcgcacttattctaaaagtgatcacataattggaagtaaaacactcctcagcaaatgcaaaagaacggaagtcataacaaacagtctctaagaccacagtgcaatcaaattagaactcaggattaaaactgacagaaaacctaacaactacttggaaactgaacaacctgctcctgaatgactactgggtaaataataaaattaaggyagaaataaagttgttcattgaaaccaatgagaacaaaaacacaacataccagaatctctgggacacatttaaagcagtgtgtagagggaaatttatagcaccaactgcccacaagaggaatcaggaaagaactaaaatctataccctaatatcacaattaaaagtactagagaagcaagagcaaacaaattcaaaagctagcagaagacaagaaataactaagatcagaacagaactgaaggtgatagagacatgaaaaacctttcaaaaaatcaatgaatccaggatctgattttttgaaaagatcaacaaaatag

SEQ ID NO: 891143 - DNA, 595 bp, Homo sapiens
aaacagcatggtagtggtaccaaaacagatatctagaccaacggaacagaacagaggcctcagaaataacaccacacatctacaaccatctgatctttgacaaaccttacaaaaacaaccaatggggaaaggattccctattaaataaatgttgttgggaaaactggctagccatatgcagaaaactgaaatgggaccccttccttacaccttgtacaaaaattaactcaagacggattaaagatttaaacataagaactaaaaccataaaaaccctagaagaaaacctaggcaataccattcaggacataggcatgggcaaagacttcatgactaaaacaccaaaagcaatggcaacaaaagcccaaattgagaaatgggatctaattaaacaaaagagctcctgcacagcaaaagaaaccatcatcagagtgaacagggaacmttcagaatgggagaaaatttttgcaatctatccatctgacaaagggctaataccaagaatctacagggaacttaaacaaatttacaagaaataaaaaccatcaaaaagtgggcaaaggatatgaacagacacttttcaaaagaagacatt

SEQ ID NO: 891144 - DNA, 603 bp, Homo sapiens
gcattctttccctagcttcaattcatgcccttctcatatgcaaaatacattcatttcatcccaatagcctcaaaagtctttacacattccagcatcacctcagaagtctaaaacccagagcatcatctaaagatcatctaaatcagatatggagagactcaaggttccctttattctgaagcaaatagctctccagctgttgacttgtgaaatcaagcatgttatatgcttccaaaataaaatggcgagataggcataggatagacatgtccattccaaaaaggagaaataggaaagaaggaagaggtaatgggtcctgagcaagtccaaaaccttaagggtcaaaaataacttctttggcgtgaaactgtgccgtctgggcactctggagcagtggctctgtcttccaggcccactgggatgatggccctgtcttctaggcttgggtgkctccacccatacggcagttccctgcagtaaccccacctctgcagcagcaacgtgcctgggtcgtgtccctgtggctctcctgggctggaattgcacatctatagatatactggtctgaaatttaggggacaccaccaccctcaaactggtttt

SEQ ID NO: 891145 - DNA, 579 bp, Homo sapiens
taaagatcactcagccagtaaatatggtggatctgggattgaacccaaattgtcccactccagagcttgtgcctcatgtgacttgctggccaagggcccagccctgactctccaggaacccctgaaagagttaacmtgtaatcctttggtgccaccgtctttgtccatctgtgtggctataaatgaatacctgaggctgggtagtttatgaagagaagaggtttatttgattcatgcttcttcaggctgtgcaagaagcatggcatcagcatgtgcttctggtgagggcctcagaaagctttcacttatggcagaaggtgaaatgcagcagacatcacatggcaagagagggagcaagagagaagtgagggagctgtcagcttgtttttcacattcagttctcacaggaactaacagagcaagaactcactcactaccacaaggatggcaccaagacacaaggaaggccaccagggcccacctccaacactggggatctaatttcaacatgtgatttagaggggacaaagagttaaactatattaccacctttcctgagttcctgcattagattcctag

SEQ ID NO: 891146 - DNA, 579 bp, Homo sapiens
taaagatcactcagccagtaaatatggtggatctgggattgaacccaaattgtcccactccagagcttgtgcctcatgtgacttgctggccaagggcccagccctgactctccaggaacccctgaaagagttaacctgtaatcctttggtgccaccgtctttgtccatctgtgtggctataaatgaatacctgaggctgggtagtttatgaagagaagaggtttatttgattcatgcttcttcaggctgtgcaagaagcatggcatcagcatgtgcttctggtgagggcctcagaaagctttcacttatggcagaaggtgaaatgcagcagacatcacatggcaagagagggagcaagagagaagtgagggagctgtcagcttgtttttcacattcagttctcacaggaactarcagagcaagaactcactcactaccacaaggatggcaccaagacacaaggaaggccaccagggcccacctccaacactggggatctaatttcaacatgtgatttagaggggacaaagagttaaactatattaccacctttcctgagttcctgcattagattcctag

SEQ ID NO: 891147 - DNA, 616 bp, Homo sapiens
  misc_feature 369, 384, 506: n = A,T,C or G
ctcagtaacagtcggctatggctgtttgagtctctgccagtccatccgtttttgttttcttatgtcctgaagtacatgagagtctaacactgtcttatagatactttagtatgtattaatcttgtttatccaagaagactgtcagctccttgtgggcaaaggccatatcttaaaattattttctatttcatagtgtttttagtctatattaggcatatragaggggcttggtaaatttttgattattggttgactcttttttaaaaaaatgtttaacttgtgtaaaaactatttcaaggagggtactcaaatgccacacttttgtgacttttgctgtccttaccaaaatgaaatatgggtggtggcttnccctctaaggctgantacaatgcctttaatctaatctgcagggtgtgtaaattacaaaccccacttgctgactctctgcccccgtctgtcatgcttttacaccaaggtgaacaacagctttgaatcatgctaaatgnaacccttcctgcccattagttgattgctttccattctgtaaatacaggagttatgcagaattgattgtatcaaagtgatatatttcaggttgcagtataatatcttatgt

SEQ ID NO: 891148 - DNA, 657 bp, Homo sapiens
tgaagaaataatcacaggcacaaacgaggtatctgttaatagagatcctaggaatctgtgactgtcaatatgaattacaaatatgaaaattatttgttgaatcaacaaagtggaaataaaactattttttcttagctgatttggtaatgactaacagtcaacatacctattaagtggttttggttgaaataatttaatttgttgtcaatactagttcccccctttaaatttaatgatacagttccaatatctagatgaacaaataaagataggagaaagawttctatattttagtcatttctgcttatggcctcaatttcagattccagaaatccatagctaagtagttataaagcaattacagttgttagagtagcccaggatggctggacaaagttgaatatttcatgactaaaaacaacaacagccaggcacagtggttcacacctataatcatagcactttgggtggctggcttaagcctggagttcgagaccagcctggcagtaaactgagaccttgtctctataaaagatacaaaaattagttggtgtggtggtgtctgcttgtagtcccagctactttggaggctgagatgggagaatcacctgagcccaggaggttgaggttgcagtgagctgaaatcgtgccactgca

SEQ ID NO: 891149 - DNA, 563 bp, Homo sapiens
actcaggaataatagtttattataaaactttaagaagtgcaacatcttgaacactctctgcccctagatgtacaaccagagacagattatacctattggactcaaagtgtggcatggtgttacaacatggaggtcagatgmtctggttgtgccaggtgacaaagagatttgtatcaatttttggctaaaataggcatgttacttcaatacaaagaaaaacatctcaccacctttcaccagcaaagcatgaatacaggtttagccttttgggttgacattaacacgtcccatgaaattttaacttcctacgaagttgttcacatgtcattttaaaagaagtcataccactcagtttccctctcaaaccaattttctgaaatgcaaatgaaacacttccaaaactgtagatctgaagactgaatggcaaaagaaaaaaaaatctcagatttcaaactttatgcagtgcacttacagggttcaattcacactctgatttaatgtaatttgaataaaaactacaaatggaatttactgtactacacttcactgaaaagtaaatttta

SEQ ID NO: 891150 - DNA, 624 bp, Homo sapiens
tgcaatctcacatggcaggagtgaagaaaggaaagaaccctcaatttgtagtattgagaaattagcttttgtggtgcaggggagattccctaattttttattgaaaataaaacaggtttaatgcacttgtttttaatgtctcttgctctacaatgaggttttgtggctgattttcacaccgtgggtcactgcaacctttaggtctttycttttctatactcacactcaatcagccagtgctcaagctataccaatgttgcacacacctgagtgtgtgtatgggaaggtggggctgggggttgaatacatccctttgcatgtgtctctagtgagtttagttctggtaggttctgacctctcctctggccttttgaatggaatcagtctgctgctcacaaacttggctttgtttgaaaatgaataaaccactcttcatcccacagtccatttaggaaaccaaaacagccctagacccagggtagactggtacagcacagctttggcacaatctccacccaccccttctcttcacaagggaccatggaaaatgcattgaaaatgcctcctggattcccagttccaagccatcttgagccatgcaacaaagagaaatggtcgttttaa

SEQ ID NO: 891151 - DNA, 565 bp, Homo sapiens
ctggccatgtgatgtgcaagttcttcctcacgttccaccataattgtaagcttccacaggcctccccagaagcagagccccacgttatgcttcctgtacaacctgtagaactgtgcgccaatgaaatctatttcctcataaattacccaatctcargtatttctctatagcaatgcacaaatagcctaatacacagtacattttaactcattgtataatgctagcattactctaaatcaaaaccagatgatattattacaaacaagagaactgccttatgaacatgattgcaaaaattcaaccaatttgtgaggcaataatgataaccttagaaagatgagtgtataaactgtgctatagtcatacaatggaatattactaaggactcaaaagagatgaactatcaagctatgaaaagacatgaaaagacttaaatgcatatttctaaaaatgacattatccagaaaacaaaattatgtatagatagagtaaaaagatcagtggttgccaaagggttgaggaataaagtcgtgtgctgatatcctgtgttttttcagctttcaga

SEQ ID NO: 891152 - DNA, 596 bp, Homo sapiens
gtgaaatctggtcatttaaaagtgtgtgggctgggcgcggtggctcacgcctgtaatcccagtagtttgggaggccgaggagggtggatcacaaggtcagaagatcaagaccagcctggtcaacatcgtgaaaccccatctctactaaaaatacaaaaattagctgggtgtggttgcacatgcctataatcccagctactcgggaggctgaggcaggagaattgcttgaacccrgtaggtggaggttgcagtgagccaagatcatgccgctgcactccagcctggcaacaaagcgagactccatctcaaaaaaaaaaaaaaaagaaaaaaaagaaaagaaaaaagtgtgtgacacttcctccctccctcgttctctctctaactcctgcattcctcatatgatgtgcctgctcctgctgcaccttttgccatgactgtaagcctcctgagggctcctcagaagcagatgccactctgcttcctgtacagcctacagacctgtgagctagttagactttttttcttataaattatctagactcaggcatttctttatagcaatgtgagtatgaagtagtacagttggattcagtaaa

SEQ ID NO: 891153 - DNA, 596 bp, Homo sapiens
gtgaaatctggtcatttaaaagtgtgtgggctgggcgcggtggctcacgcctgtaatcccagtagtttgggaggccgaggagggtggatcacaaggtcagaagatcaagaccagcctggtcaacatcgtgaaaccccatctctactaaaaatacaaaaattagctgggtgtggttgcacatgcctataatcccagctactcgggaggctgaggcaggagaattgcttgaacccagtaggtggaggttgcagtgagccaagatcatgccgctgcactccagcctggcaacaaagcgagactccatctcaaaaaaaaaaaaaaaagaaaaaaaagaaaagaaaaaagtgtgtgacacttcctccctccctcgttctctctctarctcctgcattcctcatatgatgtgcctgctcctgctgcaccttttgccatgactgtaagcctcctgagggctcctcagaagcagatgccactctgcttcctgtacagcctacagacctgtgagctagttagactttttttcttataaattatctagactcaggcatttctttatagcaatgtgagtatgaagtagtacagttggattcagtaaa

SEQ ID NO: 891154 - DNA, 657 bp, Homo sapiens
ttgaatctttatttctcccctagagctatatcatttcattgcttcatctctgattgcctctgaatttacagagaatatttttctctgagggttactcagacattcccaaagctcacaattgccttagagtcttagagtcctgagttgcgggatgtaacttctyaatgtcctttcttctccgcccaacttccactccctacatacacataacacagagtgtggcacatgagaagagacgctggcctggcatcttatcctcctaacagccctcatcaagagctaccactcccctgccaccattcccctcaaaaaaaagggcccatgtatggtagagatgctttctcagtgattcacaccacgggcacctgggaaccagatcagaacttactctgctgatacagtctcctattcaaacagcaacacatcagagtccacacttagcaaggacaagtaatgaacaagatgatccctcagagccatgccggctcgaatttcctgtgatgacaacatttttaatactcatgagctatggccagtggtgcaccggagcccacttgcactggtttacaagcgccagttattaacttttcaggattttcgtgagtcagtcattaaataaagccagtatcgaaagttaaattatatatacttataatc

SEQ ID NO: 891155 - DNA, 649 bp, Homo sapiens
tgtgatccttattagtttttttaaaactaacctatttgcaatttttaaaaattaaaagtattagcatggatgcttagctggttgtattttaggttgaagtagcattttctatttaaggaagataatatttgggggaaagtaatacatggacagctggaacagcaaaatttgatatatgaaatttgaatccttttcctggtagcttttaagttckagtttttgttgttgagttttattactaaaattatactttcactaatttttattttttgtttaagattgctgatatgctttattcacttttacaggccctagatggtcagaatatttataatgcctgctgtaccctaaggattgatttttccaaacttgtgaatttgaatgtaaaatacaacaatgataaaagtagggattatactcgacctgatcttccatctggggatggacaacctgcattggacccagctattgctgcagcatttgccaaggagacatccctcttaggtatgatttttattgtcttaaccacttttctcccattttgccaaatggaaaagtaccagtaagtataatgaatccccccattttggaccttaccaaattgtgttaggtttcgtgagttttctttttctcaagtgagaaggcatat

SEQ ID NO: 891156 - DNA, 580 bp, Homo sapiens
gtcttatcagattccaactatggaacaaagttccgtcaaagccaatttaaaaggcctatgtccaggcatggtggctcacgcctgtaatcccagcactttgggaggccaaggtgggcggatcacctgaggtcaggagttcaagaccagcctggccaacatggtgaaaccctgtctctactagaaatacaaaacttagctgggcgtgatagcagatgcctgtaatcccagctacttgggagactaaggcaggagaatcgcttgaacccgggaggtggaggttgcagtgagccaagatcacaccactgcactccagcctaggggacagagcaagactccatctcaaaaaaaaaaaaagaggcctatgtaacaaataattattcttgctgtattgtrtgcaaataattaaaccaagtataataaagcaaaccagtcctactgtgatttcttttaataaaaatgggaaactggagaaagaaaattatgtttcaaaaactattgcacacctgttgctaaattctagtgttgcctaatgttcttcaatttttattattttctactgtttaaattacattccaatacc

SEQ ID NO: 891157 - DNA, 715 bp, Homo sapiens
ttaagtttaataagtaaatgaattactaaatatagtacatatgaaatatataaaatagtacctgggcccatagtaaaaattaaatatattattgttctcattattgtttttaaaatccgaagaaaatttaattgcctattttggtgcctagagtctcatgtaatggggctgggggatggggtakgaagacattaagacttttaaataaaccataagaaaagccacctcaaagcctaaatagctcagggctaggagtcagtcttgtctgaagcccatcaccaatgacctatcacaaaggcctttaacccatctgaatcctagtcgcttcaggcttggcttaccatttttgctatgtgagcttcctaagtcacttgtcttttctgagactgactttctttgcttaaaacagcatttgttattttgtatcctgcacaatttttgtcatttccttgtgccacttataccatttaaaaatattttttctttaattggctcactttttatttaaataaatctatgtaaaaaggaaactttacatattgccataaatggaaaattaataacatagtagttccccaaaatagggtgacaataaagtttataataatacttaaaaacaatgtaataaactctgtctggatattattgcctgacaaaagttctgaggcttaaagtctgttatgtttttatgaaaatggagatgtgttctaaaggt

SEQ ID NO: 891158 - DNA, 617 bp, Homo sapiens
atgatcttgttcttttttatgactgcatcatagtattctatgctgtatatataccacactttctttatccagtctatcattgatgggcagttaggttgtttccctgtctttgctattgtgaatagagctacaatgaacatacacgtgcatgtgtctttataatagaatgatttatattcttatgggtatacacccagtaatgggattgctgggtcatatggtatttccagttctagatacttgagaagtcgccacactatcttccacaatggctgaactaatttacactcccagcagtgtagaagtgttcctttttctaaacagccctgccagcatctgtggttttttgactttttagtaatagccattccgacttgtgtgaggtcatatctcattgtggttttgatttgcatttctcttacgatcggtgatgttgagatttttttcayatgattgttggccatatgaatgtcttcttttgagaagtctatttaagtcctttgcccacttttttatagggttgttttattcttataaatttaagttccttatagatactgaatattagacctttgttggatgcatactttgcaaaaattttctcccattctgtaggt

SEQ ID NO: 891159 - DNA, 637 bp, Homo sapiens
aatgttatagaagaatcttaaaatcatctttttagaaaaattccttaaagtactttacacaaattatcaactttgatttgtgagttgaaggaaactttaggtattggctgtgttcaatctttgtatcttaacatgataaaaccaagattcagaaacagagtcaggacactaaccctttctcttggcttttacacaagtatttcttcaattgtattatgcctcccatggaaatattgctcaattgcattctaagttataggtttttgagttgtagcagttttatcacaatgtagctagatggatcatggaaagagtaaatctttcagcttgcctagtacatgtgaatagaagtgatcattgaagcccaagaataaaagtgagtattaaagatagaaagtaactctagaaggaaaagccttggacagatcctagggggatacttatattagggggcagaagaaacaaaagagcctgtgaacragataaggaagatgcctttagagcttaggaaaagaaccagtgacacaatggaggttggaagtcagattgaaaagtgggggccattagagaagagaagagagaaaagcaagtattgaagagaatttagaagagaaaagaaggggaaaaagggagggga

SEQ ID NO: 891160 - DNA, 622 bp, Homo sapiens
cttaaaaaccctagaagaaaacctaggcaataccattcaggacataggcatgggcaaggacttcatgtctaaaacaacaaaagcaacggcagcaaaagccaaaattgacaaatgggatctaattaaactaaagcgctactgcacaacaaaagaaactaccatcagagtgaacaggaaacctacagaatgggagaaaatttctgcaacctactaatctgacaaagggctaatatccagaatctacaatgaactcaaacaaatttacaagaaaaaaaacaaccccatcaacaagtgggcaaaggatatgaacagacacttctcaaaagaagacatttatacagccaatagacacatgaaaaaatgctcatcatcactggccatcagagaaatgcaaatcaaaaccacaatgagataccatctcacacctgttagaatggcgatcatagaaaagtcagraaaaaacaggtgctggagaggaggtggagaaataggaacacttttacactgttggtgggactgtaaactagttcaaccattgtggaagacagtgtggcaattcctcaagtatctagaactagaaataccatttgacccagcaatcccattactgggtttataccca

SEQ ID NO: 891161 - DNA, 626 bp, Homo sapiens
attaaacatatgaagaaaaggatagtttactatatgtacccgtatctcttctcttttctttattcattgttccttcctgatgctgaaacatttcttcttttatcattgtctgcctattagaagaacctccgttagtggatctttaargggatatctattagaaacaaattattttacttttcctttttccaagaatgttttcatttcctctcattcctgaaggatatttttgccagatatagtgaaattcagagttgacaattcttttatttccgcactaaagattgcaccacttgctttttgtctccaagatttcagatgagatacctgctatcatctgaactggtatttttaagtaacacattgtttctctctagttgctctcaagatttttatctttcattttcaaatgtttaattatcatgtgtcttggtatgaatttctttgttcatcctgtgtgagcttcactcaggttggatgtataggtgatatggtttggccatgtccccacccagatctcaccttgaattgtaatagtccccacaagtcaaaagcggggccaggtggagataattaaatcacaggggtggtttctcccatactgtcctcacggtagtcaataagtc

SEQ ID NO: 891162 - DNA, 626 bp, Homo sapiens
attaaacatatgaagaaaaggatagtttactatatgtacccgtatctcttctcttttctttattcattgttccttcctgatgctgaaacatttcttcttttatcattgtctgcctattagaagaacctccgttagtggatctttaaggggatatctattagaaacaaattattttacttttcctttttccaagaatgttttcatttcctctcattcctgaargatatttttgccagatatagtgaaattcagagttgacaattcttttatttccgcactaaagattgcaccacttgctttttgtctccaagatttcagatgagatacctgctatcatctgaactggtatttttaagtaacacattgtttctctctagttgctctcaagatttttatctttcattttcaaatgtttaattatcatgtgtcttggtatgaatttctttgttcatcctgtgtgagcttcactcaggttggatgtataggtgatatggtttggccatgtccccacccagatctcaccttgaattgtaatagtccccacaagtcaaaagcggggccaggtggagataattaaatcacaggggtggtttctcccatactgtcctcacggtagtcaataagtc

SEQ ID NO: 891163 - DNA, 662 bp, Homo sapiens
  misc_feature 355: n = A,T,C or G
agatatctccatccattgatccatccatgcaataattacatcttttaattcatgcaattgatttttattaggttacctggctctgtagttggttcaacaggaaagagtacaaagcaatcataaaaataaaacactagaaattccaatgagctcactacagagtcatttgacatgcttcctttatgccccaagtataaccctaatttttcaaacccctttatttagggaatgagccattatttctggcttgagacatcaaacaacactttaagaattcttgcaatttttctgctaggagcaataaatggcattgcatgcaagtatatctaaataggttggataaatattacaaggnccgagtgtatacatttaagcctggactatgcacagaagagagagttytaggagagtggcttatacaaaaaaaaacaatgctgcaaatgaaatgatttggtgtttttttttttttttttctcattataagttactctaaaaacccaagaaattgttagtgcctgacctagaactctagctctctcacctaggaaaaaacttgatgtgtctttattttaatcacttgtacactggacttgaaatgtaccagggcttcctgctgccaaaaattaatttgcacatgcatcagggcatgtactgagtgcatg

SEQ ID NO: 891164 - DNA, 602 bp, Homo sapiens
caataaagtgatactggagctgaaggacaaaatagccagtattaaaatgaatctaacaggtccgacgagctgaataacacaatacaagaatttcacaatgcaattacaagtgttaacagcagaataaatcaagctgaggaaagaatctcagaacttgaagattggttctctgaaataagacagtcagacaaaaataaagaaagaaaaacactaaataaaaagaaatcagcaaaacctccaagaagtatgggattatgtaaagaggccaaatctatgaattgttggcatccaccgaaggtgggggagaaagcaaacaacttgaaaaacatatttcaggatatcatccataaaaacttctccaactttgctagagaggccaacagtcaaattaaggaaatacagagaactcctgcaagattctacacaagatmatcccaagacacaaaatcctcagattttccaaggtcaaaatgaaagaaagaaaaaatgttaaaggctgctagagaaaaaagggcaggtaacctacaagggagccccatcaggcttaaagcagacctttcagctaaaaccctgcaaaccagaagagattaggggcttatatt

SEQ ID NO: 891165 - DNA, 627 bp, Homo sapiens
tttaggcctagtgtgcattggctgacatttactctccactgaatgtccagtgcctgtcttaaatttacttctgtcctctaatttagagaaataaaaaaataatttagaagagccccctcaaaagtcttgtaaggtaatggatgcacatatgtttcttaattcaaggccttcaaaatttcttttaagattaattactgaagaagaccaaaattattaaggtatgaaaatgctagaagtgtaaaagctaaaatcaaagtttactttattattaggtttctaagagggcaaacagttctcaaacatctcagcacttagtgatgtaatgtcagcatttaaaacactgttgatctactgaaatggtaggtcaaaatgaaaagactctagctgaatgctgagaaaattctgaaaaattccaatattaactgttattatagaatttcaaattgtgcatgtgtgtgtgtgtgttttaacatayaccaggtagaatgaggaaacattaataacccaaactcttctgtaaacctttaactttcctgagaaaaagagattgtttttcataaaaggagaaaagctgaaaagcaattgtcaatttctgttcgtgatttgattttgagcacccctaaaaat

SEQ ID NO: 891166 - DNA, 636 bp, Homo sapiens
ccttttaataatggatgggcagcaagctatttcctacatttaattacagtaatcatgatttgtttttagtatatgtaaggaataacacacctgacttttgaaagaatattacatatttttgttagaagtataaattattaaggcatgtgttataaccatttagattcagagcaaataggttatagagtattctcttatgatttgtcttcctgaaataatttctctgaaaacaaaatggcccataagcttatcatagaatgttattttccaactcccataaatacatagtacctagctacaaaaatatatattgaaacttgggattccagaagacagctttattttcttatacataaaatgagagaattaaacccagtgattttcaaattgcagagcacagagtttcatgtatrtgtgtccgagggggcttcttaacatcctcagaaagcttctgagctaccatgcagatgggtctgctcaacctgctctgatcagaaaaatgttgctttatctatttaagttatatctctctcttcattgctttcaacacgtatttgttgagcagtcattgtactaagagcttttctagctgccagaaatagagagatgaatgaggcagacaaaggctccattaca

SEQ ID NO: 891167 - DNA, 631 bp, Homo sapiens
catttggccaccagcaaaatcaggggtctgatacaaaatttaatatctaacaaaatccttttccatttctttgacattaagagatgtggatctagtgaaggctgatgcaattctgtatcagttactcacacagacacacacacaaacacacacatgtgtgtgcatacataaatctaacaaagttaatttcgggttcattttcttcctgagctttttttggtcagagcttcagctgcagcatgtttttctttgcaattgratgcactgctttttaattttttaaaatccaaactaaaattaaattttccttttataattttaactagtatgtgccacattagtgtgtgagaacacatttgcattaatactctacatcacaaagtcttcctgcttccactctgtcttcctgaaataagtacggtcttcaccaggttctttggaaatccagatgcttacctgttttaaaaactctgtgctgagtccttagagacctacaaagagacttagactcccacacaataataatgggagactttaacacctcactgtcaacagtagacagagcaacgagacagaaagttaacaaggatatccagtaatagaattcagctctgcaccaagcagacctaat

SEQ ID NO: 891168 - DNA, 628 bp, Homo sapiens
gccaggcacgggatataatctcctgatgtgctgtttgctaagaccattggaaaagcctggtatttgggtgggagtgtcccatttttccaggtgcagtctgtcacagcttccctttgctaggaaagggaaatcccccaaccccttgcgcttccttggtgaggcgatgccccacccacyttgcttcagctcaccctccatgggctgcacccactgtccaagcagtcccactcagatgaaccatgtacctcagttggaaatgcagaaatcacccgtcttctgcatggatcacactgggagatgcagaccagagctattcctattcggctgtcttggaacggctggaagttactttcaaaaaagaaacgcctgtatgccttttactagctttccacagaattcggatatgctgtgtgtactacagctgttttggtttgtgcattgtctttcatactgcaccagcatttttgaacactcattagaaaatattggcaccttgtgctcttaaaattgattgctttaagtaaggatttggagaagtattcctgacatactgacacgtgttggctatcaataattgagagggagaaacagtattaaatgtactatgatgatggatttcttcatttct

SEQ ID NO: 891169 - DNA, 655 bp, Homo sapiens
atatgactcaacattcacagatctcatagagactgctacagtaatggtgtagcacagaaaacactggctaaactggatatttctactcagtctttcatgagaggttatactggctaaatgatcaaacctcacattaaagagacttcagtttttgcagactgatgctcttttgcttatttcttgttttagctttaacagggaaaattattctacaraattaacctatataatttatcagattcatagaaaattaaaatgtacaattttaggatgacaaacctttaagatttttgaggttcagcgttatctagccattatcgttttatactgttgggtctgcagcaaccactttatgtatgtatatatttgatttcccaagtttatttgcctagagttagtggtagagcccaaataagatgcaatcaaagcttactttccactcttctagaccagaggtcagcaaactttttatataaacagccagatagtgaatgtttcagttttgcaggttatgtagactttgtcacaactacttaactctgcacttactgtatgaaggtgaacacagacaacacataaaagaatgtatgcagctggattccagaaaacctttatttacaaaactggcatagttttccaatgcgtttaagtctag

SEQ ID NO: 891170 - DNA, 481 bp, Homo sapiens
tcttttcttttctttctttcttttttttttttttttttttttgagacagtgtctcgctctgttgcccaagctggagtgcagtggcacgatctcaactcactgcaaactctgcctcccgggttcaagcaattctcctgcctcagcctcccaagtagctgggataacaggtgcacaccaccatgcccagctaatttttgtatttttagtagagacagggtttcaccatgttggccaggttggtctcgaactcctgacctcaggtgatctgcccacctcagcctcccaaagtgctgggactacaggtgtgagccaccrcgcccagccctggatctgattttccacgtagtctttcctttactacaagtaaaaggtcttataactgtaatgccaaatgaagggaagggttattatcattccactaactaccagcaatgaggtcctaattgcattcacgtaggtgaggaatcaagccctgaaatca

SEQ ID NO: 891171 - DNA, 655 bp, Homo sapiens
aaataaataaataaaagcaaaataactcaataaaatgaaaacaagaaacacaaagaacacataaaaacaattaaaaaaaaagaatcaaaaacaaaacaaaaataatcaaatactcttccaatctttgcagattggctctttgctgggacatgccaacactttggtagtcttacaataaattctgataagctcaaagtgcaagtttggggttttcagggcttttcagagaatatgtcttgctttaggyatatgtgtgggtttctcaattcccccatataaaagggtgctgtgaatgttctagtttccccaaatctctcccagtatttcctccaggttttaggcaatttttgtatgttgagatggtaatactttgctctaataatctgtgggttgtttgtcttggtgagtttttaagcaatgcccacattttttttcaacctgtgttgtgagttaagcaaaatagagtctagcaactttcaataacctgtaggtatccacaatcacattaaacagacaaacacaattactgactaataagatctgcccatctccctcccaaaccaggcaccagggtctcagactgggaatgtgagcgtctcccttcaagtttgctgatgtgatgggaagaaagttgagtaagggtaagtaaatgcca

SEQ ID NO: 891172 - DNA, 652 bp, Homo sapiens
aggctaagtaattttggaagctgtgccaagtcttatgggacaccaatgtagcatttaattttctaaagaaataaattactagagtaaatagcattcaaatggcaagccagttttcccaatactgtgtattgaacacrttgtctttttcctagtgtatgttcttagcatgccttatcaaaacatctcatgcaccccataaatatacacacctactatgaacccacatacaataaaaaattttaaaatagatataaaaacataaatggcaagtctccaagtgcgatggaatacaaatgaaacagtaattccaagccccccccatgtaattttaaaaaattttataatttatatttagataatataaataaaacaacatgttgtaatgttggccctgagctcaaacttcgcttttctgttactgcttttagcagaaagggaaaacttattggcatgtggtcaggagtaaatgagataatgcacataacgatttgcagagtgcctggcatcttaaagtttctgatcaaatattaacatcttcccagattccctgagctggaaatctccttacttttcacagaacttctgaagctcatctcttgtggacctctcctgtggcacttgccacttgctaattatacgagtgttatttgtt

SEQ ID NO: 891173 - DNA, 599 bp, Homo sapiens
tacaataaacagggggtaaatgtgagaattaggattgttacatgggtgtaggggagccagctagtgagcatagtacccaatgggtagtttttccacccatgtactcctctcatcctcctccctctagtagtccatagcgcctgttgttctcatatttatgtccatggttgctcaatacttacctcccacttataagtgagaacatgagtatttggctttgggttctagcattaattcatttaggcttatggcctccagccatatccatgctgctgcaaaggacatgatttcattcttttttayggccatgtaatattccatggtctatatgtacagcattttatttatccaatccaccattaatgggcactcatattgatttaatgtctttgctattgtgacaatgaacatatgattcaatgtgtctttttggtataatgactatattcctttggatatatggccagtaatgggattgctgggttgaatggtagctctaagttctctgagaaatctccaaacttctttggggtggggtggttgaaccattcccaccaacagtttataagcattcccttttctctgcagtcttgccagca

SEQ ID NO: 891174 - DNA, 653 bp, Homo sapiens
tataagtatatataatttaactttcgatactggctttatttaatgactgactcacgaaaatcctgaaaagttaataactggcgcttgtaaaccagtgcaagtgggctccggtgcaccactggccatagctcatgagtattaaaaatgttgtcatcacaggaaattcgagccggcatggctctgagggatcatcttgttcattacttgtccttgctaagtgtggactctgatgtgttgctgtttgaataggagactgtatcagcagagtaagttctgatctggttcccaggtgcccgtggtgtgaatcactgagaaagcatctctaccatacatgggcccttttttttgaggggaatggtggcaggggagtggtagctcttgatgagggctgttaggaggataagatgccaggccagcgtctcttctcatgtgccacactctgtgttatgtgtatgtagggagtggaagttgggcggagaagaaaggacattragaagttacatcccgcaactcaggactctaagactctaaggcaattgtgagctttgggaatgtctgagtaaccctcagagaaaaatattctctgtaaattcagaggcaatcagagatgaagcaatgaaatgatatagctctaggggagaaataaagattca

SEQ ID NO: 891175 - DNA, 636 bp, Homo sapiens
caaatgaggacagactcctaaatcttaaaaaaaaaaaaaaaaaagacaatgcatccttgttttcaagcacttatttcccctcccccccacccaatcaatttccagttaaaagcatgtggcgttttttttttggtggtggttaaayggaaactatgtgtgttaaagataggaatagaagtgaaaatgagaaaaatcagtccttaaaacatcttcctgactggaaggctcccacagcattcagaagccgttcagtggtcctgacaagttaaatcagtggcataattattcttgcagaggaaagataagtcgtgatttcaaaagaatatgaagaatgcttacagaaatctgcatatttatcttattcttaaacctactcttttcaactcccactctcatcatatttatggacaaaggaaagggtgaagagacaatttaaaaggccacatgatgtgcaggctgattaaaaatgaaagccagatctgctgacaattgacaaaagatcaggtcatcatttatttaattggactctgagtgacaagaagaggagatgattatcgaagagatgactcctttgttccagcctcacagtttaagtcatttcaaatagacagggaactttttcaatttctctaggac

SEQ ID NO: 891176 - DNA, 597 bp, Homo sapiens
tgtgaaatctggtcatttaaaagtgtgtgggctgggcgcggtggctcacgcctgtaatcccagtagtttgggaggccgaggagggtggatcacaaggtcagaagatcaagaccagcctggtcaacatcgtgaaaccccatctctactaaaaatacaaaaattagctgggtgtggttgcacatgcctataatcccagctactcgggaggctgaggcaggagaattgcttgaacccrgtaggtggaggttgcagtgagccaagatcatgccgctgcactccagcctggcaacaaagcgagactccatctcaaaaaaaaaaaaaaaagaaaaaaaagaaaagaaaaaagtgtgtgacacttcctccctccctcgttctctctctagctcctgcattcctcatatgatgtgcctgctcctgctgcaccttttgccatgactgtaagcctcctgagggctcctcagaagcagatgccactctgcttcctgtacagcctacagacctgtgagctagttagactttttttcttataaattatctagactcaggcatttctttatagcaatgtgagtatgaagtagtacagttggattcagtaaa

SEQ ID NO: 891177 - DNA, 624 bp, Homo sapiens
ttcattgttccacagaatggattttatgtccattttctgcagctactctgagattaataacagagctacaagttgccctagcaacatctagttcactacgtgtaagtcttcctctgaggttgtccaaaggcactggactccaggctgccatttctcctacactgtactttcctctgagatgccaatggtcccttttactcatccatttacttggacattgagagaatattgatgagcaccataagtccaagacttggagacaatatgacatgcactctaccctctagcagcttacagctcatgggcatggacatgaacagctcatacaatgtgacraaagtgtgattaagggacaagatccaagtgctacttgaagttagccatgttaaccacattgaggcattagggaaggcctctaaggaggtcatgtctgagctgtcaggacagcaaggaagttttccttgtataaaaagttggatacagaatcctagctggcaggaacatatgagaagaggctggaggcataagggctaccaggagcttcgtgcagttggagatcagggtgtgactctagagagagctgtagccaacatatcagaaagtctctggtatcttattcttcag

SEQ ID NO: 891178 - DNA, 669 bp, Homo sapiens
tcattttaatcactactctcataaaatgtcacaaaaagtgcagtttcataattaagtaaattgtctgaatggaaaatatgggcttgttataatgttttggtacatcgagttatgtttagcacaggacttaattcagccgttgctgatggcagatctgctccccttccgggctaagagaagcactctgtgtgtctcacagagcataggagcctccacttagataggcccttgcacttttccatacaggctttggaggagagaggtctcagagaagtcctgaagttttcaggacatgttaacttctctggagactgttacagttgggagaagaggggataatgaatttcactgtggctgcatagaaggtattgtggctagcaacaatccaaatgaaaccacattaaagagtgagttcgcagctattagttttaatcaggagagagacatgggattcagaattataagtgttttgtarcaacattagttcaatgtgctgtttcagccataaagggcagtaaaatgtgagatactgtcaagaggaggattgaaagcaacagcttctgccattaaatctagatttagtgaatctttgattgaatacctgctataggtctgcgtattgtaagtaagttctgcttactgcaatttaaaatagattcagacatttat

SEQ ID NO: 891179 - DNA, 633 bp, Homo sapiens
tgcacagcaaaagaaactatcaacagggtaaacagatgacctacataatggaagaaaatatttgcaaactatgcatctgacaaaggactaatatccagcatctataaaaacttaagcaaatctataagaaaaaaactcattaaaaaagtgggcaaaggacatcaacagatgcttctcaaaagaagacatacatgaggccaacaagcatatgaaaaaaagctcaatatcactgatcattagagaaatgcaaatcaaaaccacaataagataccatctcacaccagtcagaatagctatgattaaaaagccaaaaaatagcatactggcaaggctgcagagaagagggaacacttatacactsttggtgggagtataaattagttcaaccattgtgggaagcagtatggtttctcctcaaagagctaaaagcagaactatcactcaacacagcaatcccatttctgagtatatacccagagaaatagaaataattctaccatagagatacatgcatgtgaatgttcattgcagcactattcacaacagcaaagacatggaatcaacctaaatgctcatcaatgacagattgggtaaagaaaatgcagtacatatacaccacggaatattatgcag

SEQ ID NO: 891180 - DNA, 668 bp, Homo sapiens
aaatattgtcagtacctggcatacatatagtaagtattcgatatatttcctactttttattttttttttgagatggagtctccctgtcgcccaagctggagtgcagtggcgtgatctcggcttactgtaatctctgcctcctgggttcaagtgattctcatgcctcagcctcccaagtcgctgggattacaggcttttgcgaccacatccggctaatttttatttatttatttatttattttcagtagagatgaagtttccccatgtgggccaggctggtctcactgacctcaggtgatccgcccrtctcggactcccacagtgctgggattacaggcatgaaccaccgcgcccagcctgtttcctgcttctgatgtaagcagtcttcagtgaggttaggcaggcaggagcagggtagaaaggaggaagtggaggagggcaggcaactgttcaggacaaggtgcacatgagctagattgttaatttcaatagtcttcatggatcaaactgtcttattatcttctgcagttaagcatcttgacaaaagcagttatttcttccccagctcctcccttttgatgacattcgtggctgttaactcattaatttatgcagtgtcaccaattctcagaaaaggatgatttccattgaggctaatgaggtgacac

SEQ ID NO: 891181 - DNA, 578 bp, Homo sapiens
cctggcaccagcatatgctccataacattgctcgctagtgtgattatcattcgtattttccaacctagtcagtaacagccacccctgcatttccgagggtgccacggagaatacaagctcccagagcctcggctcgaagtgccttgcyacgcgcggcccctagagggcgcccagaactcactcgttctgggtttctgtgaccaagtcccaggtccagctcccacttctgggtggctgctgaatcacggccgcggcctccagcttttgggtcttttggctcttctcgcagcaaccaaagaaatgtgggttctgggtccgtagggcataaaacaggaggggcaggagcagctcccaccaaagcctttccccaaggaggcacacagtggcagggggccccccgcacccctcacaatcttctcgcacacaaggaggccagatttccccaggctttgggcaggcagtggcggccgctggaccttctgggccttgctagggtcctcagccagtatctaaggtggccgctgctatccccaagctcagccttaggcacatggggttcccttaccacccgagctgca

SEQ ID NO: 891182 - DNA, 578 bp, Homo sapiens
cctggcaccagcatatgctccataacattgctcgctagtgtgattatcattcgtattttccaacctagtcagtaacagccacccctgcatttccgagggtgccacggagaatacaagctcccagagcctcggctcgaagtgccttgctacgcgcggcccctagagggcgcccagaactcactcgttctgggtttctgtgaccaagtcccaggtccagctcccacttctgggtggctgctgaatcayggccgcggcctccagcttttgggtcttttggctcttctcgcagcaaccaaagaaatgtgggttctgggtccgtagggcataaaacaggaggggcaggagcagctcccaccaaagcctttccccaaggaggcacacagtggcagggggccccccgcacccctcacaatcttctcgcacacaaggaggccagatttccccaggctttgggcaggcagtggcggccgctggaccttctgggccttgctagggtcctcagccagtatctaaggtggccgctgctatccccaagctcagccttaggcacatggggttcccttaccacccgagctgca

SEQ ID NO: 891183 - DNA, 578 bp, Homo sapiens
cctggcaccagcatatgctccataacattgctcgctagtgtgattatcattcgtattttccaacctagtcagtaacagccacccctgcatttccgagggtgccacggagaatacaagctcccagagcctcggctcgaagtgccttgctacgcgcggcccctagagggcgcccagaactcactcgttctgggtttctgtgaccaagtcccaggtccagctcccacttctgggtggctgctgaatcacggccgcggcctccagcttttgggtcttttggctcttctcgcagcaaccaaagaaatgtgggttctgggtmcgtagggcataaaacaggaggggcaggagcagctcccaccaaagcctttccccaaggaggcacacagtggcagggggccccccgcacccctcacaatcttctcgcacacaaggaggccagatttccccaggctttgggcaggcagtggcggccgctggaccttctgggccttgctagggtcctcagccagtatctaaggtggccgctgctatccccaagctcagccttaggcacatggggttcccttaccacccgagctgca

SEQ ID NO: 891184 - DNA, 578 bp, Homo sapiens
cctggcaccagcatatgctccataacattgctcgctagtgtgattatcattcgtattttccaacctagtcagtaacagccacccctgcatttccgagggtgccacggagaatacaagctcccagagcctcggctcgaagtgccttgctacgcgcggcccctagagggcgcccagaactcactcgttctgggtttctgtgaccaagtcccaggtccagctcccacttctgggtggctgctgaatcacggccgcggcctccagcttttgggtcttttggctcttctcgcagcaaccaaagaaatgtgggttctgggtccgtagggcataaaacaggaggggcaggagcagctcccaccaaagcctttccccaaggaggcacacagtggcagggggccccccgcacccctcacaatcttctcgcacacraggaggccagatttccccaggctttgggcaggcagtggcggccgctggaccttctgggccttgctagggtcctcagccagtatctaaggtggccgctgctatccccaagctcagccttaggcacatggggttcccttaccacccgagctgca

SEQ ID NO: 891185 - DNA, 506 bp, Homo sapiens
ctcctgctctttctcctcttaataaacactgggctcatggtgtttcctttaacatgccaggcatgcttgaccctgtcctgtctcagggccctgctgttccctctgcctggaacattcttcccatagtgtctgcatggctcrctctctcactgctttggattgctgctcaaaagtcaccttatcaaaggcctttcccaaaggtttaaaaatcattctactataaagacacatgcatacatatgtttattgcagcactattcacaataacaaagacttggaaccaacccaaatgcccatcaatgatagactggataaagaaaatatggcacgtaagcaccatggaatactatgcagccataaaaaagaatgagttcatgtcctttgcagggacatggatgaagctggaaaccattattctcagcaaactaacacaggaacagaaaaccaaacaccgcatgttctcactcataagtgggagttgaacaatgagaacatacgggcacagt

SEQ ID NO: 891186 - DNA, 506 bp, Homo sapiens
ctcctgctctttctcctcttaataaacactgggctcatggtgtttcctttaacatgccaggcatgcttgaccctgtcctgtctcagggccctgctgttccctctgcctggaacattcttcccatagtgtctgcatggctcgctctctcactgctttggattgctgctcaaaagtcaccttatcaaaggcctttcccaaaggtttaaaaatcattctactataaagacacatgcatacatatgtttattgcagcactattcacaataacaaagacttggaaccaacccaaatgcccatcaatgatagackggataaagaaaatatggcacgtaagcaccatggaatactatgcagccataaaaaagaatgagttcatgtcctttgcagggacatggatgaagctggaaaccattattctcagcaaactaacacaggaacagaaaaccaaacaccgcatgttctcactcataagtgggagttgaacaatgagaacatacgggcacagt

SEQ ID NO: 891187 - DNA, 531 bp, Homo sapiens
gccgtgcctcagctcaagagtttgtgtttggtcgtcggttccaccttaatcccgcccatcagttctacttaggggttcaacaacccggggtggagcttaatctgtgaccacgcctcggcagtgctagtcacacctccaagttttgccagctcctccccctcattccgggcctctcgggatcagctcttcctattggctatgggccccatcggtcgatagaaaacgggcggtgattggtaaaggggtgggctctacttcccggcggggtcctgcggagttggcggaggctcctccagggactggggcacmgatctgcgtagaaacgggtggcggggaagagaggggaggagagctctgagtgggaagcggagccgggggcctgggacccgtcgcgtcagagccaggtaaaggctccttccctcttccttttcttcctcccggccgccgggctggagccctgactgaacaaacccgggctggggcgggaaggagagggcgcccatgctgctcgcggcatcgccttagcggtgc

SEQ ID NO: 891188 - DNA, 659 bp, Homo sapiens
tctggtttaatccttacctcaacccagggaatgggtattattgtcaccttccattcaccatataaggaaactgaggcttagagaggatgagaagcccttccaaggtcacacagccaaaccatggcagcttgacttcattcctttattcattaactatttattgagtgcttgctgtgtgttctggcgattggccatacagctgtgaagaagaaaaagtctctaccctcgtggagcttatattctggaagctgggctctctatggaacagcacagaatttggagacaaagggcctgcgatctggtttggctctgccycccactagctagaagccctgggtcagaattattatgagtgtcagctttttgtgtgttatatgggactcatggtgctgccagacttacttctcttacagatgccaagataaaaagaaaattgctgtaacagctatgcagtttggtttggttgttaagtgcaatttttagagtcaaagtgattcaggtttaaatcttggttctgccagtagctagcctttcacttcaggcaagttacatgacttgtctgagcctcagtttccttatttggaaaataggtaaaataaaatacatttcctaagatagtagtgagttgttgatgagatatataaattatttagaacagt

SEQ ID NO: 891189 - DNA, 585 bp, Homo sapiens
tctgatttctttgagcagtgttttgtagttcttgttgtagagatctttcacctccctggttagctgtattcctaggtattttattttgagtgtgtggcaattttgaatgggatttcattccaatttggctctcagcttgactgtgtataggagggctagtaatttttgcacattgatttagtatcctgaaattttgctgaagttgtttgtcagcttaaggagcttttggaccaagactatggggttttctgaatatargatcatgtctgaaaacaggaatagtttgacttcctctcttcctatttggatactatttatttctttcttttgcttgattgtcttgtgctggttttcaaggaaaatgcttctagcttttgcccattcagtatgatgttggctgtgggcacttattattttgagctacgtcctttcgatacctagtttattgagagtttttaacatgaagtggtgttaaattttatcaaaagcattttctgcatctattgagacaattatgtgggttttgtctttagttctgtttatgtgatgaatcctatttatcaatttgtttatgttgacccaacc

SEQ ID NO: 891190 - DNA, 570 bp, Homo sapiens
ctatcctctagtatcttcccttaagatgtgtgaatataacaaaatatgcacccttttgtctttttttgttcaaggaaagaaacaatgccttcaatagttcctcacatgacttaattttagagccttcagaattctggttactctgtttgaaatgtatttttgtttagtttatatctttcttaaaatgaatgtaattccagaaatagatgtcattctccaagtatcatctaaacagaggaaagtatgagaagaamcttccttataaattatgaaagattatgcagttactgtagaattattttgtgtaatttgaaaaaaaaaagcttatctatctatctagaaaggaaaataaaatcttagggccccagactccctatgtcaaagggaaaagtcaagcttgggaactgagtcatgcaaagctgcctcccattttttcctaaatagatagctacaaagataaaaggctacatacgtctctcacagtttgctcacaagtaaattccttgtgggccccaagatatataaataagagacagaggtcttactctgtcacccaggctagagtacagt

SEQ ID NO: 891191 - DNA, 604 bp, Homo sapiens
ttgttaacgtgccctatcctgggaaatgctatccatattttttctaattgagtgtttttgttttttatgataaaaaatcatgattaagaattctttatgtgtaaaaatcaaaagcctaatcattaaaaacagtttaatcatactgagcttctaacaccaaaggacctggattgtatttatcatggccagttgaatatatttaatctttttctttccttacattggccatttcaatttaaacagctgaatggccactgagtagatttcaaaagcaatagatattttggaagtctttaaaatttgaaaaaaaaaaaagtacaaatgaatacaatgcattaccyttaagttaaccactgaaaatagaccaaattatttctagttagcagttgtaaatggcacaaggcagcatggtgatcacctgttttcacagggtcagaacctttctttgtagctctgcatccccagatacatacatgctgtattgaagggtaagttagcatatcaatctacagtgtcatttgcctagagatagctccttgttcagggtattggcactggttggccagagtaatgtacaagctgattttcttttggcaagtcacag

SEQ ID NO: 891192 - DNA, 698 bp, Homo sapiens
cctcaccagagtatacttctgttctcctttcccaacatttgttctattgttgttgtccattccactcatgttataaacctcatactactttatttttagtatcaaagtcagttttcttttaaagataaataataagaaaacaattatatatttacacttgtggttaccatttctattactcttctttccttggtatagattcaggtttctattggctatcatcttccttttgcctaaaggatttcctttgtcatttcttataatgcaggtctgctggtgatgaaatcttccagcttttttatgtccaagaaggtacttattttgtctttattttgaaagatagtttttccaagtatggaattccgagttgtctggggttttttttctttcattactttgtaattgttgctccactgtcttgtcatccacattgtttctcttgagacatctgctgtcattctctttgttactctatacagtgaatacagakaatgtctttttatttctgtacacttttaatattttctcatggttatagattttgattaccatggcccagacacagttttctttatgtttcatgcataaagttcactgagccttttcctgcttctttgcaggcatggtaattttttattggatgacacatgtgaattttaccttcttgggtgttggatgttttttgtattcctataaat

SEQ ID NO: 891193 - DNA, 621 bp, Homo sapiens
ccctctatcattttttattgtgtctatttcattcttctctcttttcttctttattagtctatctagcagtctatctattttattaattttttcaaaagattcattgattttttgaaggatttttcatgtctctatctccttcagttccactctgattttggttttatttcttgtcttctgctagctttgggatatgtttgctcttggttttcwagttctttcagttgtgatgttaggatgttgatttgagatctttttagctttttgatgtgggcacttagtgctataaatttccctcttaacactgttttagctgcatcccagagattctggtatgttgtatcttagttctcattgatttcaaagaatgtcctgatttctgccttagtttcattatctacccaggaatcactcaggatcaagttgttcaattttcatgtagctgtgtggttttgagtgagtttcttaatcttgagttctaatttgattgagctgtgatgtgagagactgttatgatttcagttcttttgtgtttgccaaggagtgtttcacttccaattatgtaatcaattttggagtaagtgccatgtggcactgagataattgtataatctgttgttt

SEQ ID NO: 891194 - DNA, 666 bp, Homo sapiens
ttccatctgttcttgtttgatatcttctgttactcactactgcttcctaaaataatttcccaagtaaacaacttccatctaagcctatgtcttataatgaattttcagagttcccaggctgaaatatatttcagagaataagcaaagacttaaaagaaatagttaaatttcttttatcaccataacaattagtggtacttaaaatatatgataaataccttttaatgtttaggcaatgagtatattatcttccgatattccttcttttacatgcatctaatttatctataaatatccaatgattgttttgtgcattgacagtagtcagtttcatcagattaaggtaatttatgttcttgtgmaagccattgcaaatcaaagatatttatcaaggttgaatttccacaaaatcaatgtggtaacataggcatgctgcagaaaatccctttgattgataaagaatgaaggtagtcgagatagtcatggaatctcccagttgtattgtactacttccaaaatgagagtctaacctttctggttgagctgactgtgtttactgtagttgtgattatgatcattgtgggagtcaatgatcctcctgaggcagccactgaggtttcttggtatatagttttaatttgtggtatatttcatttgtagtgttta

SEQ ID NO: 891195 - DNA, 684 bp, Homo sapiens
tcagcagcacatcaaaaagctactctaccatgatcaagtaggctttatccctgggatggaaagttggttcaacatatgcaaatcagtaaacattattcatcacataaacagaactaaagacaaaaaccacctgattatctcaatagatgcagaaaaggctttcaataaaattcaacagtccttcatgttaaaaactctcaacaaactcagtattgaaggaacatacctcaaaacaataagagccatctatgaraaaccgacagccaacatcatactgaatgggcaaaagctggaagcattccacaagacaagtatgccctcttttcaaccttcttattcaacatagtgttggaagtcctggccacagcagtcaggcaagagaaagaaataaagggtatccaaataggtcagagaggaagtcaaactattcctgtttgcagctgacatgattctctatctagaaaacactatagttttagccgaaaagcttcttaagctgataaacaacttcagtaaaacttgcacgttgtgcacatgtaccctaaaacttaaagtataataataataaaataaaattttttaaaaatcatcatacaaaaaccactagcacttctgtacacaaacagcagctaaaccaagagccaaatcaggaacacaatcccattcacaattgccacaaaaaga

SEQ ID NO: 891196 - DNA, 632 bp, Homo sapiens
gtcctgcccctgggaatctggaatgggatcacagcattgggagttgagggccaagtcctgtcaatgatggctgcagagaagagaagtccccaaacctgtccaatccaactcttccttgaattcctcgagaagccccaacatcttttcgataatttcccttcttcattccaactgcctcaagtcagtttattttgcccatagaaagaagaaactgaactgatgcagatcyttaaggtctggtatgtttaagtgctccctttctttggcactagctaatgtgcagcagcaactatgatggtggtaggtaagccaggcactgaggccagacttccagctggagctccctcctctgggcatccctttctttaccgtgaaaatcagaaggtggccctcttctcccccaaccccagcttagcaggcctggattctagggctgacaccaagttttgccagcaacaaacataaatcctgtgggggaaggaggacagaggtagagaatgttttttcaacaatgggcaccccatgaatgcaagcctcagaaattgcatttagatgatataattaaatgcttaaaaaaaaagacaagaatgagatccagtcatctttccagatatttttccactcaataaaag

SEQ ID NO: 891197 - DNA, 640 bp, Homo sapiens
aactgtataaccttggataaatgaccacaatctctctgtgtctgttttctcatctatgaaaatgagataatcacagttcctatattacagagttactatgagtattgatgtcaaagtgcttagaatagtcactgacacatagtaggtaaccaccaacgttataataattccacaaatagttattattgaaatgattctggctgggcatggtggctcatgcctgtaatcccagcactttgggaggccaaggtgggcagatcacaaggtaaggagatcaagaccatccgggctaacatggtgaaaccccatctctactaaaaatataaaatattagctaggcatcgtggtgggcacctgtactcccagctactcaggaggctgaggcagaagaaaggcgtgaacccrggaggcggagcttgcagtgagcggagatcgtgccactgcactccagcctgggcaacacagcaagacttcatctcaaaaaaaaaaaaaaaaaaaaagaagaaagaaaaaaaagaaagaaatgattccacaaataccactctgttctaggtgcagaggaaagagttcctggtccaaagagctctcatttcatgggcaagacagacagaaataagcaaattcaccacctgtcatgctc

SEQ ID NO: 891198 - DNA, 570 bp, Homo sapiens
ggcatcagcctccaggcctctcctgggaaacatacccactcagtggggctggatccctcctcttccggaagaagccattccagcagcctgtgtgtgctaagtcccagggaaatgagagacttggctccaggaaggaggaagtcagagtgtatcccaaaaggtcacccggctgccaggattcaagcccacgtctacctggagccaaagcmgaggatgctccataaagcagcaggcatcctccagcagcctccccagttccctcccaactactgaatggaaggaaggttctgctctcccagttggcactgagcaggctactctcacctgcaagagaattactttaaactcaggaaatgcaaaccagttttggcatccatcaaaataaaagttcccttcccccagaaataaaggacataatctcttaggccgccttgaggtgcttgcattttgaaataggaacttggtgaaggcatggctctggaatggcagactccaagcacattggcagtggatgagcgatggaaatatttcgggcaggggcccttcccagcagccatcattcacaccata

SEQ ID NO: 891199 - DNA, 605 bp, Homo sapiens
gcccagcaatccccattgaagaccagcactgactcctgtggggtcccattggcccagttagagtcacatgctcaactctgaaccaatcgatgtggccagaagaaggagtggttctgattggacagggctggaacacatgcccattcctggagcaataaacgagaggatcccactaaagacacctggactgasagggaggaggctttgccatcccaggaagccagagtaatcttatgggaagtaaaggagatgcattctgggcagacaatacctagatggatatttatgtatatttatgctttagatggcaccactacatccccacccttgaccactaccacattcacagctcccaaattcggagctggcccatgtttcagtcaaccccagaccaaggcaaagcatttatcagccagacggttgactacagcacaagatcttggcaatagtcaactgaaatacagggaatcacagatgttaagtcactaagtccaaccttaccaccacagcctccctgagaggctggcagtacttctggggactcgctcctcctgggcagctttgtccactagaaggtgggttccttgagggcaaggactttgttc

SEQ ID NO: 891200 - DNA, 618 bp, Homo sapiens
atttttgtttgtttgttttttaatgcatcccacctaccaagtctggcccaagccaaaatcctatgtgtgatctttcaggcctgaccacaggcaattacagggctctgcctgacaggccttatgggggaaagctgtacttgccaacgagacccagtacatagtcagtgcactgcagttctctgaaggaaattgcagtcaaggactcaggctcagccaaatccatttagagacttccatattggaagttccaaggcacttyacaggagcctctcccaaggcctctttatcaaaggccttgacttttcttcactctgactcaaaattctgtcgcttcttgtggagaaaagggaagctttatgcactggtggtggtactatcaattagtacagtcatttcagaaaatagtgtagaggtttcccaaaaaaacaaaagttagaattaacataggatccagcaattcccctactgagtatatatccaaaggaattaaaatcagtatgtagaagagatatctgcccttccctgttcattatagcattactcacaatagccaagatacggaaacaattgaagtgtgtatcaacagatggatttgtaaaaattggtattaaacacagt

SEQ ID NO: 891201 - DNA, 624 bp, Homo sapiens
tcacatcacactggataaaacaccctgctttagtgaagcaacatatactcgagagaggaaaagaaagcttgtcacagtaaacaaccttctggcattgccctcctcctcaaggtgttacatttgtgttttctggagcaggaatttaaaagccaactaggttaacagaaactttaaatatatataaatacacatatatatggaayagaatggaacttgacatatatatatgtatatacgtatatacatatgtatatacgtatatacatatgtatatacgtatatacatatgtatatatgtacacacatataggtatgtgtatatatgtgttatgcgtatgtgtatatatacatatgcatgtgtacctatgtgtgtatatacatatgcatgtgtacctatgtgtgtatatacatatgcatgtgtacctatgtgtgtatatacatatgcatgtgtacctatgtgtgtatatacatatgcatgtgtacctatgtgtgtatatacatatgcatgtgtacctatgtgtgtatatacatatgcatgtgtacctatgtgtgtatatacatatgcatgtgtacctatgtgtgtatatacatatgcatgtgtacctatgtgtgtatatacacata

SEQ ID NO: 891202 - DNA, 550 bp, Homo sapiens
tttgctcttgtgaaaaacagaaaatatgcattttcttttctcactttcaaataaagaatactatgatgatttacgataccatataatccatccaatctatgtccaattaaaatggatttggccatttcttaaacagaactttgaatatgactgccctttttttaatttttatttatttatttcatttatttattttttcgagacagagtcttgctctgtaacccaggctggagtgcagtggtgcaatctaggctcactgcaayttccagctcccgggttcaagcaattctcctgcctcagcctctcgagcagctgggattacaggtgcccacgaccacacccagctaatttttgtatttttagtagagacggggtttcaccatgttggccaggcaggtctcaaactcctgacctcatgatccgcccgcctcggcctcctaaagtgctgggattacatgccctttgtatatatggaaaatctaagttcattcatggcttcattcattcaataaatatttatttagcatttgccatatgtctggtcctaggt

SEQ ID NO: 891203 - DNA, 647 bp, Homo sapiens
aacctgctcctgaatgactactgggtaaataatgaaatgaaggcagaaataaagatgttctttgaaaccaatgagaacaaagtcacaacatactagaatctctgggacacatttaaagcagtgtgtagagggaaatttataacactaaatacccacaagagaaagcgggaaagatctaaaattgacaccctaacatcacaactaaaagaactagagaagcaagagcaaacacattcaaaaactagcagaaggcaagaaataactaagatcagagcagaactgaaggagatagagacacaaaaaaaccttaaaaaaataaatgaatccaggagctggttttttgaaaacatcaacaaaattgatagactgctagcaagactaacaaagaagaaaggagagaagaatcaaatagaygcaataaaaaatgataaaggagatatcaccaccgatcccacagaaatacaaactgccaacagagaatactaaaaacacctctacacaaataaactagaaaatctagaagaaatggataaattcctggacacatacaccctcccaagactaaaccaggaagaagttaaatccctgaatagatgaatagcaggttctgaaattgaggcaataattaatagcctaccaaccaaaaa

SEQ ID NO: 891204 - DNA, 607 bp, Homo sapiens
cctttatgcttgaacaagtgtatattactggaacaattctaaacaatatcattctaattattcatattttattttatgaataaaataaaaataaaataaataaaattcatattttattttattcataaataaaagcctatgtgaaagcatatcttttatctttagtcctccagagtctttctgggtcttcatctaatttcccttctaatgttacagcatattgctggcagaakgtgcatctgtgagtgccaagcctagatacttttttctctcttaaataaaaaaatcacaattaatatataattcttagaggaaaaattctaaaatactgatatatataaagaataaaagagagtgcacttatactcccaccactgaatgacaatctctgtttgcatttggatgtatatcttcttccattttttttttttttttttttttttgagacagagtctcactctgttgcccaggctggagtgcagtggtgtgatcttggcccactgcaatctctgcctcccgggttcaagtgattctcctgcctcagcctcctgagtagctgagagaacaggtgtgcaccaccacgcccagctactttttgtatttttag

SEQ ID NO: 891205 - DNA, 607 bp, Homo sapiens
cctttatgcttgaacaagtgtatattactggaacaattctaaacaatatcattctaattattcatattttattttatgaataaaataaaaataaaataaataaaattcatattttattttattcataaataaaagcctatgtgaaagcatatcttttatctttagtcctccagagtctttctgggtcttcatctaatttcccttctaatgttacagcatattgctggcagaaggtgcatctgtgagtgccaagcctagatacttttttctctcttaaataaaaaaatcacaattaatatataattcttagaggaaaaattctaaaatactgatatatataaagaataaaagagagtgcacttatamtcccaccactgaatgacaatctctgtttgcatttggatgtatatcttcttccattttttttttttttttttttttttgagacagagtctcactctgttgcccaggctggagtgcagtggtgtgatcttggcccactgcaatctctgcctcccgggttcaagtgattctcctgcctcagcctcctgagtagctgagagaacaggtgtgcaccaccacgcccagctactttttgtatttttag

SEQ ID NO: 891206 - DNA, 623 bp, Homo sapiens
ttaataatagccatcctgactggtgtgagatgttatctcattgtgattttatttgcatttccctgatgattagtaatgatgagcattttttcatatttgttggctacttgtacatcttcttttgagaagtgtctgtacatgtcttttgcccacttcttaatggggttattttgttttttgcttgctgaattaagttccttatagattctggatattaaacctttgtcagaggcattgtttgtgaatattttctcctatcctgtaggttgtttatttagtctattgatagtttcttttgctgtgcagaagctttttagttygattaagtcccatttatcaatttttgtttttgttgcaattgcttttgagaacttagtcacaaattctttctcaaggccaatgtccagaatgatgtttcctaggttttcttctaggattcttatagtttgaggtcttacatttaaatcgataattcatcttgagttaagttttgtatatggcaaatggggtccagtttcatttttccacatatggctagacaactaccacagcaccatttattgaatagggagtcctttccccattgcttagttttgttggctttcttgaagatcaaatggctg

SEQ ID NO: 891207 - DNA, 665 bp, Homo sapiens
ttaaatgtatgtttgctgtaactacagttatttagaattcagtacttgtttaaaaagtttcaaacaattctgaaatacatgctgtcgaagtaaaagtggacactattctgctgccctcacaaaaagattagatgtagaacttctgaagacattctccaataactagaagctacagacaacgaataataatttagatgacagaatcaggctcttactttaatgtattatatacctagcttcaaagatagtttcaatatgtatcaaaatttaatccagtaattccacttctaaaattttctctaaggagagagcaaaatttttcaaaaaatcatataaaatttttatcccagagtttcttaaaatagggaaaatgtaaatagttgaaaagtttatgaatatgatatatgtatccaatktagttattgaaaaatcataatatagatgagggattgccatgctatgggctgcaggccaaatttggcctgtgtcctgtttctatatagcatgcaagctaagaaatagtttttatatatttaaagtaccataaaacaaacaagaacaacaaaacaaaaggactatatgcaatataggctgcatgtggctcacaaggctaaataaagtatttgttatctatgctattagaaaaaaggtactgacttctgtga

SEQ ID NO: 891208 - DNA, 603 bp, Homo sapiens
gttcttacatttcaccaaactaaaagctaaaatggattaaagacataaatatcaaaaacaaagctttaaaatgtctagaacataaagaaatgttctgctaactttaggattggagaggattttttttgtttgttttgagatggagtctcgctctgtcacccaggctggagtatagtggcgcgatctcggctcaccacaacctctgcctcctgggttcaagcaattctcctgcctcagcctcccaagtagctaggattacaggtgcttgccaccacacctagctaatttttttttgtagttttagtagagtcagggtttcatcatgttggccaggctggtcttgaactcctgacctctagtgatccgtccamcttggcctcccaaagtgctaggattacaggtgtgagccatcatgcccagtccaagaggattttttaagatacaaaatgtgttacacctaagggaaactacaagtacatttttttacattaaaataaagaatttctgcctaccaaacacaccttaaagaacctaaaaagagagtttacagcctaggaaaagataattctattacaaatacctgacaaagtactagtaaccaga

SEQ ID NO: 891209 - DNA, 609 bp, Homo sapiens
aacgttgatataccattaacaatgacaaatagctgtctctttgaacccagatcattcatagttcttaatcttttaattaatataaaggaatataaaaaattagactataatgaattgtgattttctttccatttcaggtgttataaaagtctgggtatgctgtttyccaaaagagacagtaaagatcctctcaggctgggtgtagtggctcatgcttgtaatcccagcactttgggaggctgaggtgggtggatcacctgaggtcaggaatttgagaccagcctgaccaacatggcgaaagctcatctctactaaaaataccaaaagtagctgggcatggtggcgtgtgcctgtagtcccagctatttgggaggctgaggcatgagaatcacttgaatctgggaggtggatgttgcagtgagccaggatcacatcactgcactccagcctgggcgacagagtgagactctgtctcaaacaaaacaaaacgaaacaaaacaatcatttctacactctttttaattctgcatctttggctgagatcgactattgaatcaatacatcaaggaattaatcttatcttgccaaggaaacagccctgttgatcta

SEQ ID NO: 891210 - DNA, 653 bp, Homo sapiens
cttctttctgtggtcacagattcattttctcctgcattcctcctccttggctttgtgttccatagactagactactgccctgtttgttgattttgcctgttttcccatctccagaatttgcctgaagatcctttcctcttcaatagacttgccaagtgatattcaatccaatcaaacaatgtgtcaktgtttcccaaactccaatcattctggtacactaccacaatgttttacccagtattcttaatatttttattttaagttaacttcgtatatcaaaaacagaaaatctgcctgggtgcagtggctcatgcctgtaatcccagcactttgggaggtcaaggcaggtggatcacttgaggccaggagttcgagaacagcccggccaagatggtgccactgcattccagcctaggcaacagagcaagattctgtctcaagaaaagaagaaaagaaaatgtatcattattgtaagtgggaaagcaaagttacttttccataaatagaaggtaactataataaaaataaatacataggtatctcctacctgtgtggtgtcctttccccattgtttgctgcagtgccttcgctgctgcagaatattcctggtctcagactgtacagctttagcctgccaaggaacagcccctgag

SEQ ID NO: 891211 - DNA, 615 bp, Homo sapiens
ttttacatgcatgggcattaataagaccaaattagattagtgctttcttctgtggagggaggaaagaggatggaactggggagtaatatataggcggtattaactgtattgataatgttttgtatcttaacctacgttgtggttacatagttttcattataatattcttargattttgtgtttatattttaaatgttgccctataaaaattttaaaatttattaaataatgataagtgctctgaagaaaataaacatctgaagtgattgagagtgactggggtttggttgggggtactggagattgggtggtcaaggaaagtttctcagcagaggtactgggttgagctgaatcatgactgacatgaagggagcagccataacagtatctaggggaggagcattgcaggtggagagaacatctaatgccaagggtcgtgaattgtaaaggacctaagattttaccctcctcgcaagatagcaaggtagcctgacttagtagtgtggatgctgacagaagacacaagactactgggtcagagcaagatatgttattattcacagcagcaggcagcatgcttttcctgttcacactgcttctccttgttcccctccc

SEQ ID NO: 891212 - DNA, 615 bp, Homo sapiens
ttttacatgcatgggcattaataagaccaaattagattagtgctttcttctgtggagggaggaaagaggatggaactggggagtaatatataggcggtattaactgtattgataatgttttgtatcttaacctacgttgtggttacatagttttcattataatattcttaggattttgtgtttatattttaaatgttgccctataaaaattttaaaatttattaaataatgataagtgctctgaagaaaataaacatctgaagtgattgagagtgactggggtttggttgggggtactggagattgggtggtcaaggaaagtttctcagcagaggtactgggttgagctgaatcatgactgacatgaagggagcagccataacagtatctaggggaggagmattgcaggtggagagaacatctaatgccaagggtcgtgaattgtaaaggacctaagattttaccctcctcgcaagatagcaaggtagcctgacttagtagtgtggatgctgacagaagacacaagactactgggtcagagcaagatatgttattattcacagcagcaggcagcatgcttttcctgttcacactgcttctccttgttcccctccc

SEQ ID NO: 891213 - DNA, 586 bp, Homo sapiens
tttaacagaccaccagatgagggatgccagcaagtatgaggaccatggctctaccccgtgctggctgacacaactttgagttaaaaattccctcttggcaaagtagagtcttcaggtgagtcctattagtaagacacaaaccattttcaactttcttaattaagtatacttcctcgcagtgatgcaatcattccattatttttttggttttaaggcctcagaacagcaagaggatctataagcctccccgaccactatttctaactttgaacacagttgtcacatgactgcatttaatgaacacataaaagarggttaataagagcttggggctgcagtgagaaggaagaaaattatccttacttttctagacaccactgatggctggggggctgtgctgatttgccctgatcgtgatgctgcagcagaaattagtgtggggtgtgcttggggcagaagaagtgtctggtgtttctggtccctagaagaccctccattccaaggggcggcaggctgaaatggattttacgttccttccaagggcttccttcctcttcttcattactcagtcggttccctgcaagca

SEQ ID NO: 891214 - DNA, 593 bp, Homo sapiens
tatgaaaaatttggtagaattgacccaaaacttctactcacttttctcttgggacgggataaagggggaaataagaggaagggcagagtgctgttgagttcagcacttcggtctatcagctttttcagtgaccacagattgaacttctaatgcagccaactctcccaaaatacttgtttttggtcacaaagggaaacaaaatgagggtgtatgagtcactctacattctttaaagttacttgcaaaacaatcttcttaagaggggagcggtagtgtcatctttatcttgaaagaccgtatcttcaataattgaataatatgagcaaactaccataagagatgatgcagacatttaattttaattatgggttctrgctatatcctttgctaggactaaccacagcaaaatagcagaaattctagagtttactagatacctcctaagaaatccaactgtcaaagaacagccttctgcacccagaacacagctgctagctatcaccttgaagcagttgtttctgtggtggaattagttgaaagaagatagtgctttgagactagggccagaaactttccccttgaaaaagatgtgc

SEQ ID NO: 891215 - DNA, 649 bp, Homo sapiens
ttcctaatacctggattccacatttatggtaaatttagcatctttctggccctgcttgtccttattcccctgcttttaatgtctcccatgcagatgacactcccaaatagatgttctgggtctgcactgaaatttctacctagcagctcttggctgctgcagttgcttgtttctcakcaaaagtttctcccggagtagaggaaggctgtattccatcacctgggaaggtcttttcatcacctttgctcttgttattttttgttcagttccaaaataatttatttctgttgctgccaccactctgactacctccgatatcagagaaaaggacccatgtcttctagaagacataagattttatttctcttgatatgcagaaatcagagaccatatgttattaatttttaaattccaattccactaatagtaattaatacatggtgaataaataaatagaagtcccaatgttgctgaatacacattttagacactatccaattctctaataaataagaagaaataagacttttactaattcattcatttctttttatgttcattttataaattccacttatagttatcttcactaatagatgagaatagaaaccataaattcattaatatgcaactgaccagcccatttcac

SEQ ID NO: 891216 - DNA, 573 bp, Homo sapiens
accacatgccacaacaatgaggctcctgacccaggtatggggcaggaataggccacaaaagtctctctgaaggaggtaacacctgacctgtaccttaaagaacaagcaggagttgaccacaaggcataggaaagggaagtgtgctgggaagggaaggaggagcagcctgtgcagaggcgaaaggctccaccctgggcaaatcgcctcaaccagaacccakcaggggcaccttcctagaacaagacctggaccagctctctcatctccttggggctggaggcgcaagagcaggaggagttgggaagctcctcccatccttgcaccccaccacccactcaccaccatgcacctgggagccacaagcctgtaatctgcactgactgccagtgatcttaggttcttatcatttcctactcataattgccttctaacaggcctccttgcttccagctctcatctccccacctctcccagactcaatctttgtataattcaagtctggtcttgtctctcccctgaggaaatcttgcagttcctctccaatccttcctttagtagggggatgcctggctc

SEQ ID NO: 891217 - DNA, 555 bp, Homo sapiens
taaaacttttatcaagcttaagatacaatttttaaaattctcatagttcttttgtgtctcccaaacagatccagtgattcccagaagtctgcagaccccaccccaattaagaaattcaagcaaatttcagacaggyggccacatgcacaataatatggcatatagtgacatctattggtcaattgtgatattgcatccaacttcctttcacaggaaatttaacaggagctggttgatgtggaattatactagtctcaggtataaatcaaaataagaaaaattcctttcatacagagaaagcagaagggagatcttggaatctccatgttcagttaaaggtctgagtcctagtcctgattttaccataaataacttggtatagacttggttaagtcacttggtctcaggagcctcatcttcaatcaaacagggtcacgccctctcagaggccctcaaaacactaaaggacaccctcagggccctctaggaaaggcagagtcaagtgagtgtggctactgtcttcactcccacatctaggcacatctattattatct

SEQ ID NO: 891218 - DNA, 580 bp, Homo sapiens
tataaaattaggaaccttatttatgtatgtaaagaggccttctgcatgcacaatcaataaatgtgagctcaaaatgaaccctttctctcctacgaggcactcacttcccttgcctttcctgggttatcttctatttcattgtccctrgtagctatgttctaatcaccaaggcaggggttttactttttggaggtcagagaaccctttgaatgctacagacacattttacagaaaaaatgcacacaaatacacacacattttgcacacaaccaaggtttatgggcttctgattaaaaccactttaccaaggaaaagacttctgtgaccatccgccacccccatacacacacaccactaattcctacccttcactagcagtgactcatccatgcctttgctgccagacaccagtaaaataaacctggttcctctctcctaatatttgttatgttgagagatagaaaaacaaaaacacaaagcatccccaacaattataggcagttacacttaagacccattaaaagtgtcccccattagaacacttccccaaggcaaacactttataatttcctagattact

SEQ ID NO: 891219 - DNA, 592 bp, Homo sapiens
atttttcaacttaatccacagattcaatgtaatccctatcgaaatcccagctggctttttaaggaaattgataagctgattgtaaatttgatgtggaaattcaggggactcaaaaaggccagaacattattgaaaaagaaccaagttggaacactcatatgtcctgatttcaaaacttactacaaaactacagtaatcaagacactgaggtacttgcataaggatagatacagcaataaaaggaataggatttatagcctagaaataaaatcattgtattcagttgattttcaacaaaagtgccaggataatataatggataaaaaatakccatttaataaatggtgctgagacaacagactagccataggcaaaataatataattgaactcctagcttaaaccacacacataaaaatgcctcgtaatggatcatagagctaaataaactaaaattatgaaaactttaggagaaaatactatataagagcaaatatttgtgacttgcacaagacaggggtttcttatgcatgacaccaaaacacaagtgacaacaaattacaaaattggacttcagcaaaatgtaaaacttc

SEQ ID NO: 891220 - DNA, 679 bp, Homo sapiens
acaaaccacacttactattttcattagtatcatataacaacttcagaagctaagtagtgtgagtatattattgctattttaattatgagtaaacaggcatgaagcctcccaaatgccatatgagagacacattgtattgttttctgtgtataatgtcactcaatattttgrtcaaatgcatgcaacaaatttacagattaaataaattcagtaatttcaatctttttaatccagcccaaagagcctaccccttggtaaacagcaaagaaacatagtcgaaattagaggattgaggtactaaaacacaaccacccaatatccctttcttgtatatgtatttaatttatctgttctaaaactactatgatgtagtccttatgatgaattaacaataaaggcagaattatagaacccaaatggctaaatagaaatattttatggaaggagaaaagaaaatacccagtcttctactattaacattaatgcaagttggctcaattggttacctcattttatcttgaaatattgagaaagggatcttgaagaattgatatagacagatcagagactatcaacggcacagaggtgagagaacagaggccagagaataggggcaacctttctaagcctcttcaacatgaatcccatactaaatatctggtccaagaaagggcaagtg

SEQ ID NO: 891221 - DNA, 659 bp, Homo sapiens
gttttctatggtatatatgtagcatattatctttacccagttgatggacatcttggttgagtacccatctttactaatgtgatgaatatatgagtgcatgtgtcttttcggtagaacaatatatatattcctttgggtaaatatccagtcatgggactgctgggtcaaatggtagttctgttttaagttctttgagaaatctccaaactgcatggcacagaggctgaactaatttacattcccaccagtgtataagtgttcccttttctctgccactttgccaacatctgttattttttgacttttaataatagccattctgactggtgtgagatggcatctcatagtggtttgatttgcatgtctctgattagtgatgttgagcactttttatatgcttgtttsctgtatgtatgtcctcttttgagcagtctctgttcatgtcctttgcccaatttgtaattgggttgttttttgcttgttgaattgtttaagttccttatagattctgggcattagacctttgtcagatgcagtttgtgagtttttctagttttaaatcatcttgtgatactaataaaatttttatttgattaactggagacagatcctgcagaaagaatatggatctgtatatgttaacttgaaaaacagaagtt

SEQ ID NO: 891222 - DNA, 619 bp, Homo sapiens
gtactaaaaaataaggaagattaaagactaaaaagtctgtttaattctatatagaaacatctactttcacttgaaagagaaaaatgttcccccagaagtagcagctatttgtagaataatgtcacccttattgcctgatgttcttagtgtcagaactaaggtatagtttttttccatggtgttagatggtcatgattaacacgtatatttagtaattacctttaagaaatacacatggattaggaaatggattaaaaatggattatattagtgcaaaagttgcttctctttaaaaagtttgtaactgaagttaaggttgtggtcatcaaacagcaacataagaaaggcctctatgcttccacttttgattggggtaactgaagaaaaaataattatatatcaaaagaagatctcatatatayacacacacacacacacacacacacacacatatatatatatatatagagagagagagagactatataaagcattacataatttctttaatttttaatatttctgttattaatcttcctgtgagtaaagaaggaaaactgctaaaggtgagaatatgctcagaatattctgaaccaaataccaaggtattcaaacaaat

SEQ ID NO: 891223 - DNA, 650 bp, Homo sapiens
gtttattatgttatgtacttgctcttcaataatttggaaagataaatgataattgaaataaattttaaataagaggttaatatgtgaaaatatattttggcagagtttgaagtctagagttgtagaacctaggaacttttcataacctcagtattgaagcagaagtttttttttcagagttttacaaaatataagtactcatttctattgtaaagaaatatatttctggctgggtgcagtggctcatgcctgtaatcccagcactttgggaggccgaggcgggcggatcacraggtcaggagtttgagaccagcctggccaatgtggtgaaaccccgtctctaccaaaattacaaaaattagctgggcatggtggcgtgcacctgtagttccagctactcgggaggctgaggcagaagaatcccttgaacctgggaggtgcagattgtagtgagctgagaccgcaccacttactccagcctgggcaacacagcgaaactccaactccaaaaacaaaacaaacaaacaaacaaaaaaaccaaatatatttctttgcaagtaaatcctcttcctgctagaggcttctgtatggagaacagcacttcagtaagattacttccaaatatttctatttattgatatgttccatgt

SEQ ID NO: 891224 - DNA, 650 bp, Homo sapiens
gtttattatgttatgtacttgctcttcaataatttggaaagataaatgataattgaaataaattttaaataagaggttaatatgtgaaaatatattttggcagagtttgaagtctagagttgtagaacctaggaacttttcataacctcagtattgaagcagaagtttttttttcagagttttacaaaatataagtactcatttctattgtaaagaaatatatttctggctgggtgcagtggctcatgcctgtaatcccagcactttgggaggccgaggcgggcggatcacgaggtcaggagtttgagaccagcctggccaatgtggtgaaaccccgtctctaccaaaattacaaaaattagctgggcrtggtggcgtgcacctgtagttccagctactcgggaggctgaggcagaagaatcccttgaacctgggaggtgcagattgtagtgagctgagaccgcaccacttactccagcctgggcaacacagcgaaactccaactccaaaaacaaaacaaacaaacaaacaaaaaaaccaaatatatttctttgcaagtaaatcctcttcctgctagaggcttctgtatggagaacagcacttcagtaagattacttccaaatatttctatttattgatatgttccatgt

SEQ ID NO: 891225 - DNA, 650 bp, Homo sapiens
gtttattatgttatgtacttgctcttcaataatttggaaagataaatgataattgaaataaattttaaataagaggttaatatgtgaaaatatattttggcagagtttgaagtctagagttgtagaacctaggaacttttcataacctcagtattgaagcagaagtttttttttcagagttttacaaaatataagtactcatttctattgtaaagaaatatatttctggctgggtgcagtggctcatgcctgtaatcccagcactttgggaggccgaggcgggcggatcacgaggtcaggagtttgagaccagcctggccaatgtggtgaaaccccgtctctaccaaaattacaaaaattagctgggcatggtggcgtgcacctgtagttccagctactcgggaggctgaggcagaagaatcccttgaacctgggaggtgcagattgtagtgagctgagaccgcaccacttactccagcctgggcaacacrgcgaaactccaactccaaaaacaaaacaaacaaacaaacaaaaaaaccaaatatatttctttgcaagtaaatcctcttcctgctagaggcttctgtatggagaacagcacttcagtaagattacttccaaatatttctatttattgatatgttccatgt

SEQ ID NO: 891226 - DNA, 614 bp, Homo sapiens
cctataatgacaaaataatgttttactagtaaaagcagctctgtacctcacactgtgaaacaattttacagttcttcaaaaaagagttcttcaagcacatctaggggatctagaggcccgtctggaacatcgaggttccagaggcacttctaggcgaaatggcattgtcagaatcccttcatgtggaggcagaattggggctcagcttttgtcttagtgctgtttttacccccaagagattcacttatgcttccataatkcaggaagaaaccttcgctttggttttctgtgttccctcagctactatttttgatcacttcattttggtgagatgcttgagcagtgcaatatggtgttacggttttgctggagctcaacaccaagctttgtcttttattaagttacacacccctagggatgaagatgttgaccctttagcatctcctgagttattgcattcaccccttggcatgctcataatgaacatgtaatgaaattcagtaattaacttacttaatttatgtattcatttaatgtgtgcccttaatatctgccttatgatctaagaaaatctctacaattctgttgtttttgattgtaagattctagaagac

SEQ ID NO: 891227 - DNA, 616 bp, Homo sapiens
atagtttttctgtggtaagttggcttcaaggataaatctcagaacctgagatcctggattttatttttttaaaggaaatgtgtacaaacagtcagtagctatttgccatagatgtgagaagaagaaaagtttcttttaaaatgtaaattgatgactctaaaaattaaaacaaagctgaaaraaatatatattgagcacctagtatgtgacaggtgctgtgatgaacagaaataacttcaggtcaaatgcctgattgtgtttagttaaaagggacactaatggcaactgcatgtcatgtgccatgctttgtactttcatagcacatctcgtttaatccttacaactcagagaaaaatacatataatggatctcatctatgttacaaaagtcatatatgtttaaaagtaacatcttaatgtatttcctatatataattaaatatatatgttttgcagttatattatggcatggagatgtaaagttggagccattctgctttgatttaaatatttgtttcaccagttattagcttcgtgcccttgaacaaattagtgagcttctctaagtatcggttctttccctggaaaaacagagatattcatgatctgtatctcac

SEQ ID NO: 891228 - DNA, 622 bp, Homo sapiens
aatacaagaaggcaacaaggaagagtgtggctatcctcaccttctggcatttagaggtctctataagaaggctttgtgttgaagctatgtataaataagtgtgctgcttaacacaagtttctggggaacactatctcctttatgacactgtcttggggcattgttgagagagtctcagttttatatgtttcatctttataaaagtcaaacaggtggacgcacgatgttttttaactaagaattgtgaatctaagctttaattccctagttttcacttttaaaaagcttcaagtccccactctctggagtctcatctttcatacactatttaaataatggaatctaagtaacatttaaacaacactaactaagctattttataatakttattgaaggaaatatttaattatttcatgaatagtctgtttgatttatctgtattggaagtagatttacatagctcaacaccgattgcatatgtagtataaacagatgtaatgaaatatatgaaggtcctggaacatatgaaaacagtagttattataatgagtgtgcccatttaatatcaacaaaaagtctaaaatatattattatatggaatcaagattatagcatgacttta

SEQ ID NO: 891229 - DNA, 624 bp, Homo sapiens
aacatatgaaaaaaagctcatcatcactggttattagagaagtgcaaatcaaaaccacaatgacataccatctcatgccaggtagaatggcaatcattaaaaagtcaggaaacaacagatgctgaagaggatgtggagaaataggaatgttttacactgttggtgggagtctaaattagttcaaccattgtggaagacagtgtggcgattcctcaaggacctagaaccagaaataccatttgagccagcaatcccattactgggtatatacccaaaagattataaatcattctactataaagacacatgcacatgtatgtttattgcagcattgttcacaatagcaaagacttgaaaccamcccaaatccccttcagtgatagactggataaagaaaatgtggcacatagacaccatggaatactatgcagccataaaaaggatgagttcatgccctttgcagggacatggatgaagctggaaaccataattctcagcaaactaacacaggaacagaaaaccaaacaacgcatattctcactcctaagtgggagttaaaaaatgagaacacatggacacaaggaggggaatattacacactggggcctgtcagggggtgggggg

SEQ ID NO: 891230 - DNA, 624 bp, Homo sapiens
aacatatgaaaaaaagctcatcatcactggttattagagaagtgcaaatcaaaaccacaatgacataccatctcatgccaggtagaatggcaatcattaaaaagtcaggaaacaacagatgctgaagaggatgtggagaaataggaatgttttacactgttggtgggagtctaaattagttcaaccattgtggaagacagtgtggcgattcctcaaggacctagaaccagaaataccatttgagccagcaatcccattactgggtatatacccaaaagattataaatcattctactataaagacacatgcacatgtatgtttattgcagcattgttcacaatagcaaagacttgaaaccaacccaaatccccttcagtgatagactggataaagaaaatgtggcacatagacaccatggaatactatgcagccataaaaaggatgagttcatgccctttgcagggacayggatgaagctggaaaccataattctcagcaaactaacacaggaacagaaaaccaaacaacgcatattctcactcctaagtgggagttaaaaaatgagaacacatggacacaaggaggggaatattacacactggggcctgtcagggggtgggggg

SEQ ID NO: 891231 - DNA, 582 bp, Homo sapiens
gacctattgggacaaaatacacattactaaatgattcttcattaaagaaacatagtttacctaggctaggtgtggtggctcagacctgtaatcccagcactttgggaagctgaggcaggtggaccacttgagctcagaagttcaagaccagcctgggcaacatggtgaaacctcatctctactaaaaatagaaaaaattatccaggcatggtggcccatgcytttgtttccagctacttgggaggttgatgtgagaggattgcttgagcccaggaggtggaggttgtagtgagccaagattacgccattgcactccagcctgggtaatggagtgagatcccacctcaaaaaaaaaaaaaaaaaaaaaagaaaaagaaatatagtttaccaaaagaaatacttcacatggcaaactcctctcacacattaatatgtaattcagttaatagacattttactcacacatcgattttgtgaagcaggacagtttgagttaggtaggaaggtctggcttatcaacctgctgtacctactgacatgtctcccaaagtacttcctaactgcacattttgttgatcgtgt

SEQ ID NO: 891232 - DNA, 610 bp, Homo sapiens
gattgttatacagctctaatggatgcatgtttcaacactccctcaccctcttgtgttgaggagactctgagtgggatgttcagtagttggtatatcattcctagttggccagattccatataatcaccaaatggtagaaattatctcaatgtgttacaaaaaaaaagaaatatttgacatgtaattagactgtacttatttagtaaattatattgggagcagagggaaattgcgtttggaataaatataccaagaagctagtattttaccctaatttgtagtttcactatggttttccattcamctgtgactaggaaattatctcacgcagtgaattctaaatatagaaaaaaaattaaaaacaagaagcaattcatttaaattctaaatttcttacaaatctttttctgttggtaaaaatacgaataatatttcatagtctaaaaccccataaaaagtcacttggcacccagatatactgtcttcagaatgctatgaaacctaagggaatcataagtttttgctatagttagtgatatgtttggacaagaacaaaccattggttcagtttaagtcctcttctattcatgaatctgttgatccactagga

SEQ ID NO: 891233 - DNA, 690 bp, Homo sapiens
aggtaacagcttgtggggaggacagtactacagagccaaatgcagtggtggaagtggagacagttatgagatttttatagctcacacttagtggttcttaatgggataataacctcaaacgtgctgaggctgcatttcttttgtgctttttgctgctaaacaactggagcagccaatgctctttgatatatagccattctgattcctgtagttgagactagagatgctttgaaaatgaagaaaactaccagttcctgttcctaagaacaaataagtgccaaatatggaggttttattctkcaaccaagaaaggagggtggaatttggggtgaagagagaggggagagaggttactgtcctggtgtatgtccaagaaatagttcactcctgacctgagtatcacgtacagaaattgcccaggataatatccggctccactgaatgttcaacaaatgtttgttggaacttatattttctttgactatttccctcacaatggaatacttgtaattaactcattattatgatcaacatctggcatactgatattagatcattaaaagaaacaagcaacaattgaagaagtgactaaatattaacatttaatttcagtattctgcattacattgtgtgtttatggtttatcttacatttgtatcctagatcttcacaagtcttccgacaattttt

SEQ ID NO: 891234 - DNA, 690 bp, Homo sapiens
aggtaacagcttgtggggaggacagtactacagagccaaatgcagtggtggaagtggagacagttatgagatttttatagctcacacttagtggttcttaatgggataataacctcaaacgtgctgaggctgcatttcttttgtgctttttgctgctaaacaactggagcagccaatgctctttgatatatagccattctgattcctgtagttgagactagagatgctttgaaaatgaagaaaactaccagttcctgttcctaagaacaaataagtgccaaatatggaggttttattctgcaaccaagaaaggagggtggaatttggggtgaagagagaggggagagaggttactgtcctggtgtatgtccaagaaatagttcactcctgacctgagtatcacgtacagaaattgcccaggataatrtccggctccactgaatgttcaacaaatgtttgttggaacttatattttctttgactatttccctcacaatggaatacttgtaattaactcattattatgatcaacatctggcatactgatattagatcattaaaagaaacaagcaacaattgaagaagtgactaaatattaacatttaatttcagtattctgcattacattgtgtgtttatggtttatcttacatttgtatcctagatcttcacaagtcttccgacaattttt

SEQ ID NO: 891235 - DNA, 583 bp, Homo sapiens
caatgttgtacagccactgcctatatcaagttcaaaatcattttcatcatccctaaaggaaatacggtattcattaagcagttactccccattaaacccttcccccagctcctggaaaacaacaatttgctttctgtcttcatggatttaaaaattttggatatttcatataaatgaaatcacacaacatgtgaccctttgtgtctggttttttttttttttcacttagtataatgttttaaagattcatccacatggtagcacatatcaatacttcattctttttgtggctgaataatatgtcattgtatggatgtatattttgtttatctacttatagataggaatgaaactttgagtctgaactcctgaaaatggaatttcctttcatatattgagaatcaattttagtttggtaatgagaagtttcctttgaaraccctttgatcaacatttgagagttgttttccactttttggcttctataaatagtgctgctatgcacattttatgtataagtttttgtttgaacatctattttcaaatatcttgggtaaataggagtggaattgctgggtcatag

SEQ ID NO: 891236 - DNA, 615 bp, Homo sapiens
aatatatatttcataaggctatagctaccataaatagtgattcttttcatggatccatgtaaagtaaatttaaaaccttctgaaaaggtttcaccattctagacaccattaggaacaattttaattcatggggaaaaaagtcaaaatatcaaaattaaaaggagtttggaagaagttgattccaaccctcatggatcacttggaagtgttcaagacttcagtgaaggaagtaactgtacatgtggtggaaataacaagagaattgaaattagaaggggaacctgaatatgtgactgaattgctgcaatcttatttaaaaaaaaaaactttaatgagtgaggctttgcttcttatgaatcagcaaaaaaaaaaaatggtttcttaagatgaaatstgcttctggtgaaggtcccataaatattgttgaaatgacaatagaggatttggaatattccttcgatttagttgatacagcagtggcagggtttgagcagattgattgcaattttgaaagaagttctgctgtgggtaaaatgctattaaatagcattacatgctacagagaaatcttgatgctgcaaacttcatcattgtcttatttgaagaaattgtcat

SEQ ID NO: 891237 - DNA, 702 bp, Homo sapiens
ggaaacaacgctgaaatcccggtacccaaattccaatccagagtctctggcatactgcatgtcctccaacaaaccctcccagttctagtctcccaaaccataaaacagccaaacccatcaccattcctcaactctataaacaatgcactgttcttcatagtaaacactcaaaaattatatgaggaacaaacaaactaaacagagacatggtttaaaaaaaaaagaagagagagatcctagcaagaaagttgctacgctctatcaatatgaacaaaacaaatgctgtattctaatacttctttaggaaataactcgattgccaggtaacctactttagtttcctgccagaatcttttgctgtgaggggtactcatattgactgtaacactggagaatttaaaagggaaaaggactgctgctcaggaagctcaggtgacagcatcactggagccctggagttcaaagctgcagtgagctatgatccagccmctgtactccaatctaggtgacagagtgagaccctgtcactcagtcatacatacatacgtacatatatacacacatacatacatggaaaaggaaacaaaaattgggaaaagtgcacctccataaatgaagccttcccagtccttacccttactctgtttatcaactgttatcaaaatcagctgcatcatcttaaggattctaaacttggtggga

SEQ ID NO: 891238 - DNA, 636 bp, Homo sapiens
tcatgtatatctagatataggatttctgggtcatataaaattatatttaaaaattttttagaagctgccatactgttttctacagtgactacatcatttgacattccctccagcaatacacagggttccaatttctccacattcttaccaacacttgttattttctgcttttttctttgtttttatatatatataatagccattctaatgtgtatggagtctcattgtggttttgacttgcatttccctaatgactagtgatattaagcatcttttcatgtcctcattggccatttgtatatcatttttggagaaatatctattcaagttctttgtccatttttgaactgggttgcttattattttgctgttgagttgtagaagttcttttatgttctggatatgaattccttatctggcatatgatttggaaatattttcttcyatcatgtgggctgtcttttcactctcttggtagtgttctttgttgaataaatgtttttaaatctgatgaagttcaatttatttttcttttgttgcctatgctttgggtgtactatctaagaaataatcaccaaatccaatgtcatgaagctttcatcttatgttttcttctaagagttttatagtttttgt

SEQ ID NO: 891239 - DNA, 669 bp, Homo sapiens
agtttttactgagcacctatttttcttttttcttttcttttcttttttttttttttggagacagagtcttgctctgtcgcccagggtggagtgcagtggcacttctgcctcccaggttcaagtgattctcctgcctcagcctcccaagtagctgggactacaggcgcccgccaacacacccagctaatttttgtattttttgtagagacagggtttcaccatgttggccagcctggtcttgaattgctgacctcaattgatccacctacctcgtcctcccaaagtgcggggcttacacatgtaagccactgctcctggccttgagtacctatttttgaaaatcagtctcagcactgggctagacaacrtacggacatataaaaataaaatatgacccctactctcaagtttacaatctacttaagaaagataagcctgaagtctaaaatagtaggaaataatacaagacagaataagcaaattaacaaaaacctaaatagtcaaagggaggcttcatggagatggatcttaaaccagagcgcaagtgtaagcatcctctcccattccctcctatgacacaaggggagctgttctgcctcccaagactggtctccttgcatgtgctttggattcccactcttcttgccatcttatgaatcttacactgtt

SEQ ID NO: 891240 - DNA, 664 bp, Homo sapiens
ttcttatttctacttcctaaatcctgcatttttctttattctatattctatagcatctacttccttattgccaaagccaaaccaaaggaaaccaagaaaatgtttaagcctaccttgactggcttacactgacacattgtgactactcacacattgcagatttcctaaagccattttattattggacatattttgagggaagaaaatggcaaatgaaggcaggttagctttcttttcttccaaaatatacacataaatgcatttatgttatgtttacagttgcaaggattttataagtttttaaaaacagaatatgaaaagcattttatcattcaagtcagtgaaatatttttcactgyaggccttagttaagaaaagagctggcctaagagatggaaatctggactttgaactgggctttgcctgtaattctgggagtcctttaaagttctctcacttccctagtccattgtgtgtaaatgagaggtagaagtaggcactgataaaagaatattctagatctggttatttacgatctggtacagggcataggaatcaaggaaaacttctggtaatgcatagttattatgtttaacccattgtttaaaattttttttagattaccttttagatacagtttacaacaagacatattttctgtgca

SEQ ID NO: 891241 - DNA, 579 bp, Homo sapiens
catctttgagagactacagagcagggccaaagatggaggtgccctggccggatggcttccaaagaccctccccacctataagtaatttcttaagaacctggccaggctcggtggctcaagcctgtaatcccagcactttgggaggtctaggtgggcggatcacctgaagtcaggagttcaccakcctgcccaacatggcgaaaccctctctctactaaaaatacaaaaataattagccgggagtgttggcgggcgtctgtattcccagctactcaggaggctgaggcaggagaatctcttgaacctgggaggcggaggttgcagtgagccgagatcgtgccattgcactccagcctgggcgacaggagcaagacttcgcctcaaaaaaaaagaaaaaaaaaaagaacttcctgctgttgaacctttgactgtcccggagaccctccctcttccgttttcaatgtgtccctatcctcctagctaggctttaagaaagaggagggacagctggggccctaggagctccccctgagggtctgtccctgggaacggggcgctaggacgggcactccttctggc

SEQ ID NO: 891242 - DNA, 652 bp, Homo sapiens
tcttttagggcaggcctggtggtgacaaaatctctcagcatttgcttgtctgtaaaggattttatttctccttcacttatgaagcttagtttggctggatatgaaattctgggttgaaaattcttctcttgaagaatgttgaatattggcccccactctcttctggcttgtagagtttctgccaagagatccgctgttagtctgatgggcttccctttgagggtaacccgacctttctctctggctgcccttaacattttttccttcatttcaactttggtgaatctgacaattatgtgtcttggagttgctcttctcgaggagtatctttgtggcgttctctgtatttcctgaatctgaatgttggcctgccttgctagattggggaagttctcctggataatatcctgcagagtgttttccaacttggttccattctccccgtcactttcaggtacaccaatcagacatagatttggtcttttcacatagtctmatatttcttggaggctttgtttgtttctttttattcttttttctctgaacttcccttctcgcttcatttcattcatttcatcttccatcgctgatatcctttcttccagttgatcacatcagctcctgaggcttctgcattcttcacatcgttctc

SEQ ID NO: 891243 - DNA, 641 bp, Homo sapiens
tgttggtgggaatgtaaattagttcaaccattgtggaagacagtgtggcaattcctcaaggatctagaactagaaataccatttgacccagcaatcccattactgggtatatacccaaatgattataaatcattctactataaagacatacgtacatgtatatttattgcagcactattcacaatagcaaagacttggaaccaacccaaatgcccatcaatgttagactggataaagcatatgtggcacatatacaccatggaatactatgcagccataaaaaagaatgagttcatgtcctttgcagggacatagatgaagctggaaaccatcattctcagcaaactaacaaaggaacagaaaaacaaacactgcatgttctcactcataagtggtagttgaacaataaaaacacaggaacactgggaggggaacatcacacaccagggcctgttgggggttggggcacaatgggagggacagcattaggacaaatacytaatgcatgcagggcttaaaacctggatgaggggttgatgataggctcagcagaccaccatggaacatgtataactatgtaacaaacctgcactttctgcacttgtatcccagaactgaaagtataataaaaaagagaagaa

SEQ ID NO: 891244 - DNA, 661 bp, Homo sapiens
gtggtattttgatgggaattgcattgaatttgtagacttcttaggcagtatagtcattttcacaatattgattctactcatctatgagcatgggaagagtttccatttgtttgtgttgtgtatgatttctttcaacagtgttttatggttttccaagagggacattatataatgataaaaggatattttccagtggggaaacatcacaattctaaatatatatgcaccaaacactggagctcccaaatgtataaaacaattactaacagatgtaacaaattagatggccacacaataatattgggggactgtaatactccactgacaacactagccaggtcatcaagacagaaagtcaaccaagaaacaatggacttaaactattccctagaacaaatgggcttaacacatatttacagaacattttacccaacaactgcagaatatacattccattcatcagcacatggaacattctccaagatagaacatayaatatgccacaaaacaaattgcagtaaatttaagaaaatcaaaattatatcaattactctctcagatcacagttgataaaactagaaatcaatacaaaaagggacactcaaaaccatgcacatacatggaaattaaataacttgctcctgaatgatcattgggtcaa

SEQ ID NO: 891245 - DNA, 661 bp, Homo sapiens
gtggtattttgatgggaattgcattgaatttgtagacttcttaggcagtatagtcattttcacaatattgattctactcatctatgagcatgggaagagtttccatttgtttgtgttgtgtatgatttctttcaacagtgttttatggttttccaagagggacattatataatgataaaaggatattttccagtggggaaacatcacaattctaaatatatatgcaccaaacactggagctcccaaatgtataaaacaattactaacagatgtaacaaattagatggccacacaataatattgggggactgtaatactccactgacaacactagccaggtcatcaagacagaaagtcaaccaagaaacaatggacttaaactattccctagaacaaatgggcttaacacatatttacagaacattttacccaacaactgcagaatatacattccattcatcagcacatggaacattctccaagatagaacatatawtatgccacaaaacaaattgcagtaaatttaagaaaatcaaaattatatcaattactctctcagatcacagttgataaaactagaaatcaatacaaaaagggacactcaaaaccatgcacatacatggaaattaaataacttgctcctgaatgatcattgggtcaa

SEQ ID NO: 891246 - DNA, 667 bp, Homo sapiens
tgtagattggattttattttctcaaccattcagtcactctatgtatttaattggagaattcaatccatttacattcaagatatttcttattccccagatttggaaatcttttgatattagttctttaaataagctttcagctcctatgtctctctcttcttctccttgaaattgtgtaactcaaatgttttctcttttgatgctgtccccaaaatcttgaaagttttcttagtttctttttatgctttatttttctcttctgtgtgtgtttgtttcaaatagcctgtggtcaagttcacaaattgtttcttctgcttaataggttctgctattgatactctctattgtatttttatttcattcattatatttctcatctcctgaatttatgtttgattttttaaaaaataatttcaatatcccttttaaatatcttatttggtcaattattgttttcctcatttyattgaattgtttctctgtatattcttgaagtttgctaagcttccttaaaacatttattttgatttatttgtcagacagtctatatatctccatttctttggtgtcaaccactgggaggttattgtgttatttgggtggtattatgtttcattgctttcatgttacttgttgccttacactaacatctgtgcatttgaagaat

SEQ ID NO: 891247 - DNA, 661 bp, Homo sapiens
agccctcactgtcctgaagtcagctccagcatcatggtgatgtcctctgaaccccaactctaagagtagtttctcagttccattttataataaacttggtttttaattttcccttgataagtgtcacttgcatttattatgtacatttaacatattatttcatggtttattcacatcactgtgcactatagaggaaaatatgatgtagctttattaaaacagctaagtgtaaacaataaagaggacagtaaatgaagctgcagaacaagattcttgatttcagaaaattagcaagttggtacccttctcactaacctcaattaatgcttactgtgacaatttccctcctgcagagcttgagtaaaacaacttttctcttacccagaattcggatattrctgtccctttcttccctacctcacctctagtgcaaactacttaactctctttgactgttaagactaattaaaatgataattttgacattgttatgatctcctctgcttgaatttacttaacttggtgacattttttttgtttgtttttttggatgtgagagcttcactttggtttcacatggaatcaaagtacccattagtggttctcttcatggctttcttattatattccttcgcacttgtgagtcctctttctagaaatt

SEQ ID NO: 891248 - DNA, 619 bp, Homo sapiens
ttaagttacttaccctctctgttccttcacttataaaaaacataatagcaccttcatgataaggtcattatgaggattgaaaagattcattcacataatatccttaaaacagtgccttctataatagaaagactggawggaactttaatcttcccaacaagaccagctccaagtacttttattatcagcctcattttgtagataaggaaactgaggctcagcaaggctaagtgacttattcatggatagcatattagtccgttcttccactgctataaagaaatatctgagcctgggtaatttatacaaaaaggagatttaattggctcacagttccacaggctgtacaggaagcatgatgctggccatctgctcggcttttgaggaggcctcaggaaacttacaatcatggtagaaggggaaggtggagtgagcacttcacatggccagagcaggaggaagagaggaagagggaggaggtgctacacactttcaaacaaccagatctcatgagacctctgtcatgagaagagctctaggaggacggtgctaaaccattagaaactgcacccattatcaaatcacctcccgccaggccccacttccagcattggggatt

SEQ ID NO: 891249 - DNA, 619 bp, Homo sapiens
ttaagttacttaccctctctgttccttcacttataaaaaacataatagcaccttcatgataaggtcattatgaggattgaaaagattcattcacataatatccttaaaacagtgccttctataatagaaagactggatggaactttaatcttcccaacaagaccagctccaagtacttttattatcagcctcattttgtagataaggaaactgaggctcagcaaggctaagtgacttattcatggatagcatattagtccrttcttccactgctataaagaaatatctgagcctgggtaatttatacaaaaaggagatttaattggctcacagttccacaggctgtacaggaagcatgatgctggccatctgctcggcttttgaggaggcctcaggaaacttacaatcatggtagaaggggaaggtggagtgagcacttcacatggccagagcaggaggaagagaggaagagggaggaggtgctacacactttcaaacaaccagatctcatgagacctctgtcatgagaagagctctaggaggacggtgctaaaccattagaaactgcacccattatcaaatcacctcccgccaggccccacttccagcattggggatt

SEQ ID NO: 891250 - DNA, 632 bp, Homo sapiens
aacaacaacaaacctggataagggaagagaatctggttcctagagtgccacattctattatttaagatgtgcaattttcataaaaaattaagagatggacaaagaaacaagaaagtattgtccatacacaagaccaaaaaagtacagtaaatagaaaatgttcctgaaaaagccaagacattggattttatagacaaagactttaaatcagctattttaaatattttcaaactgctaagaaaaaccatgcttaacaaactaaaggaaagtaataactatgtctcatcgatgacagaatatcaataaaaacatggaaattataaaaaaggataaaatggatattctggaatagaaatatayattaactgaaatgaaaaatttactagagaagctcaccaccacattggatcaggggaagaaagaatccaagaatgtgaatgcagattaattgatattattcagtctaagcaaacaggaagaaaaaaagtaaaaaacaaaataataatgtcctgtgaagcaatatcatgcacaccaacatacacataatgatagtgtaaaaaggaaagagataaagaggcagaaaaaaaattgaatagtgaccaaaccctcacaaatttgatgggaacgattat

SEQ ID NO: 891251 - DNA, 663 bp, Homo sapiens
ttacagatgtaattggtgcagtgagcacacgagatgtttttactcaactaattcttctctgaggaaaatagaaattatattcacttaaacaacacatttaactcaaaggataaatgcttgaggggatggatactcccttctccatgatgtgtttatttcacattgcctgcctgtatcaaaacatctcatgtatcccataaatatacacacctatgtacccacaaaaatttaaaaaaataaagaaccaaacaacacattaatgtgattttccacacaattgaacagaataaagcatttatatagtagaaaaatagtagcgaattatcacttttctgcttagattatttcttgctttgagatgagttttctgttgttatcatcgctgctcaackctaacagaagctcctgtgttggtgtttgttaatctcccgcattatgtgtatcgctaatgtcctaccttgaaaattttcccatcacttttctgttcaatgaaaatatttttttccatgaatctcaaccaacttgtgataaattttgcaatggaacttttccattgttaaacattgaataattctaaacacatttaagatagcagccatttttaaccaaagattctccaagtcacaaatggttacggctgatccccctagcagtgtgtgtttg

SEQ ID NO: 891252 - DNA, 645 bp, Homo sapiens
aagtctttattgtgtttggaggaaaatttttccattggatcagtttcctcaactcttcagtttgtcttggctatgaggcacagaaacattagctcagttaaaattaaaacccttaatgtaatgctaattctaccaggtaactaaatggtttgtacataaaagacactccagtcatttcagagcaatttatgtcaactcatgcctaatgcatgtcagtgtatttgtgaaagtttcttgatatggatgccattgccacagttcccgttgggagcataaacaaataacaacaaagattattgttaattaacaacaatttacaacaagaaagaagattttattgtttttagagtcctacaagtgcaataaccayagttctcattcctccttatccctttggtgttttcaattccacttggaactcattatctcaacaaagtcacttggacatgttggcccctttgataactacaggagaccaaaacatattctaactgaaaaagtgaaaatttctttttgaatcatctggctgttttgtcaaaatgatgccaaacatctggatatttgggatgcctccagatgattgactgaatttttcattttcaaccaacatggtttctggtgtcgtggaaacacagcatcaggttt

SEQ ID NO: 891253 - DNA, 600 bp, Homo sapiens
ttaaagctttgttctagaggtaacctcactactgctgaggtaggactctaaaatgccttttgaattatgaggttgctccattgatgggaacaggtactattctcagccctattggagcaccaggaattgttttctctaatcctttagagtggttccttgtttagcctgaatagtttccttacctgtatatgttggtcactactaaactgactttagttcaatttaagtaagcctctgcagatttctgcaattcattctctatgtagctctcttctctctggtactctgctytttgtactctagctgacttgtcctcctgacctcttaaagtctgcttatctttgggaggccaccaagctctttctggggccttcttcaatacactgtaggctggaaacattctctagaaagtaagatgggtaatcatagcactcatgttatttgtttctcatcttctaggcaacaaacccagttgtttctgatgtccaatatctcgacaaccattaattagtcatggtgttcagttttttagttggaaggtgaattcaatccctgttactccatcttacccagaagttataactgagaaacatgaacttc

SEQ ID NO: 891254 - DNA, 643 bp, Homo sapiens
gagtccctcattttcaattgtttgtaatagtttcattagaaatggtaccagatcttctttgtacctctagtagaattcagctgtgaatctgcctggtcctgggcttttttggttggtaggctatttattaatgcctcgatttcagaactcattattggcctattcaaggatttgatttcttccttgttcagtcttgggaggctgtatgtgtccaggaatctatccatttcttctagattttctagtttatgttcatagaggtgtttgtagtattctccaatggttggttgtatttctatggagtcattgatgatattccccttatcatttctgattgtggctatttgattcttaygttttcttttttattagtctaagcagtctatctattttattaatttttttcaaaaaatcagctgctgcattcattgatttttgaaggatttttcatgtctctatctccttcagttcagctctgatcttggttatttcttttcttctagctttggggtttgtttgctcttgattctctagttcttttagttgtgatggtagtgtgttgagatctttctagctttttgatgtgggcatttagtgctataaacatccctcttaccaccactttagctgcatcccagagatt

SEQ ID NO: 891255 - DNA, 595 bp, Homo sapiens
acatatgcacatatatgttaattgtggcactattcacaatagcaaagacttggaaccaatccaaatgtccaacaatgatagactggattaagaaaatgtggcacatatacaccatggaatactatgcaggcataaaaaaatgatgagttcatgtcctttgtagggacatagatgaagctggaaaccatcattctcagcaaactatcgcaaggacaaaaaaccaaacaccgcatgttctcactcataggtgggaattgaacaatgagaacacatggacacaggaaggggaacrtcacacaccagggcctgttgtggggttgggggagaggggagggatagcattaggagatatacctaatattaaatgacgagtcgatgggtacagcacaccaacatggcacatgtatacttttttaactaacctgcacattgtgcacatgtaccctaaaacttaaagtataataaattttaaaaaaagttaaaagaaaaacaatatgaattcttgcaatccatgaacacaggatatctttccatttatttgtgtcctgtttactttctttaataagtgttttatagatgatgatatatgttttgt

SEQ ID NO: 891256 - DNA, 451 bp, Homo sapiens
ttttatacgtgtttggtagttcctcctgcattcattctacttcctgccaccttatggagaaggggtcttgtttctcctctgtcttcctccatgattgtaagttccctgaggcctccccatccatgctgaactgttagtcaattaaaccttttgmctttataaattatccagtctcaggcagttatttatagcagtgtgaaaatggattaatacagcaaattggtactgagttaggggggtgatactataaagatacatgaaaatgtgaaagcaactttggaactgggtaacagccagaggttgaaatagttaggagggttcagtacaagacaggaagatgcaggaaagtttggaacttcttcgagacttcttgaatggctttgaccaaaatgctgatagtgatatggaaaatgaagtccaggctgcggtattctcagagggagatgaggaa

SEQ ID NO: 891257 - DNA, 579 bp, Homo sapiens
ttgcattgccagataagacagtctgttaaaaatcgtgctaattaactgtattactgaaagcatagttaaataaactaaggcaatagaatagaaactatataccgtcatctattcataacaaagatgacacaacagttcaatgggtgaacctatagtctttttggtaaataactccgggtaacattgaaaaaaatatatattrgtccctaaaccatatacaaaattcaaactcaatggattgcagatttaaatataaatgtcaaaacactaatatatttgtatctaagagatacgtaaaaacatctctgtgattctggaaaatacaaagttttagcaaacatgaggcaaaaactgccaatcataaagcaacatttttaaacactgaattaaattaaaaacttgtaattttgttcaccaggagataccatttaaaaatgaaaatataacccatataattaaaggagatattttcaatgcacatagaataaaacatcttacatcgaagatataaaaggaaattttacaaattaataatatttttaaaatgagcagagaacattaagaggtacttcacaaaag

SEQ ID NO: 891258 - DNA, 599 bp, Homo sapiens
attgagcttcagatttgacaaagctataccaactccaaataaaatgtcatttatttttggaaaatgttatgttttccattctttgttatgccaagtagatatttgtgcgaattatttaaataaacaaaaaaaactttagataaaatataattgtgttatttgttaaacaattacattctccacaaacttttctttttttttctttctttttttttttttttttttgagatggagtctcactctgtcraccaggctggagtgcagtggtgccatctcggctcactgcaagctctgcctcccaggttcacaccattctcctgcctcagcctcccgagtagctgggactacaggtgcctgccaccaagcctggctaattttttgtatttttttagtagagacgggtttttaccatgttaaccagaatgttctcgatctcatgaccttgtgatccacccacctcggcctcccaaagtgctgggattacaggcgtgagccaccgcacccggacctctccacaaacttttaaaagtaaaagaagaattcagagaaggggtgggatgccatgtcatatgaggatttatagccattgtttagatatt

SEQ ID NO: 891259 - DNA, 644 bp, Homo sapiens
tcctgaataaggtcctctacctccctttccttagagcactaactttagataattttgagctgtaacttttttcttttctgctttgtgatgtaaatctacttctagcttctggtcaatttcaaaacccaggaatgtctttctcaagggcctgagaaccatccctgtgaaatgtaatcagcaaggctatctccagctttctatggttggatagaagcccaatttctrtaagcaacaattggcaattactaatgagccaggcacagagaaaaacattggtaaactcagaattaatggcgaaattaacagcaaatcagtgtttttcttttgcttataaaattctgtaagaggagacttttgaaaacacatgtaaacagtagaaaatcaaagctgttttatgcatcatagaacattaaaaaaatctcaaactccattaaattctaaaaaaactgtttactcatgaatcaatagatccaatagatcaataggagatagtagatggagggcttgaattgtataacattacatacaattttgctgtgaatatatttccctctttccaaatttcccctgaatgtcccatattcttctttgactgtcctgaaggtcattctctcaattctctctttccaggatctgtttctcac

SEQ ID NO: 891260 - DNA, 631 bp, Homo sapiens
aaatggcataaaaagcaaaacagtatagttcataatataataacatgtagaaaaaattattttcacattttactatctgtctctcagggcatgatcttagaatatgaagaattttcaagtagtttaggtatcatcacagtgtaaatacaacacattaaagaaacccccaactctttttggacctttattgttcactttattggaattaattttgcctacatttgaggtaatctctacagatataagtctgagaaattaatacacaaacaaatatctttagtaagtgttattaaatcacaatgcctgtttggcagaaggaaaaataaattaaaatatggaaaataaaatgaaaaaatactattcaaaatgtcttcaagaaatgtttagtaataaaggrctccacaaaccataatgtttcaaataaaattttaggttaaaaatggtcttgattttctgagactatgtgtccttgtctatgaccaagttgaaggactcttttcctggagggctgacaaatgctccagagatagtgaatagcatactattttaggcagaaggaaatacattcttttagagttaggatttaaacctttgtttttctccccaaaaggtctttgtgaaatatgcatag

SEQ ID NO: 891261 - DNA, 574 bp, Homo sapiens
tgcttttctccaccttctgctgctggcaattactctgggtgtctatcaaagaacgtttctctaccaagggctccatctttccacttgcagctgaaaagctagtctcactactccaatgttccagagccacttattttattataytttaataggacacacacaaactgagcagcaacaaagtcacactgaaaatgaaccaaagcttaaccaaaatgtagcccaagagaaggcccccaaaggaatagcaacatccactacaagtaaaataatgggttcctctctgcaaggacttagcaataacccctaggctctgggtctatgtgagtcccagactgtctggatcttctgtcccaaaccccatatccccccatctcatcagccagaagcccccctcactagtaaattgttagaaatgtgctgacaataatgaatattaataggtgatcattgctttcactcatttataggacaaatattttttatcaactacagtcatgaatgacataatgatttttggctaatgacagatagcatatataatggtggtctcataagattataataccatattttt

SEQ ID NO: 891262 - DNA, 589 bp, Homo sapiens
aaggactaggggctccccttcccttagttttttttctattctaggattttcttcctctgttttcatttcctgactccttaggccaatgcaagtggacttttctacttgagttctgtttgttacagactgtacagacccagaagtgcactgatatggtttggctgtgtccccacctaaatctcatcttgaattgtagcttccacaattcccacctgtcatgggagggaccaggtgggaggtaattgagtcatgtgggcgggtctttcttgtgccgttctcrtgatggtgaataagtctcacgagatctgatggttttataaaggggagtttctctgcacgattctgttattgtctcttgtctgctgccatgtaagatgcgtctttcaccttgcgccatgattgtgaggtctccccagacatgtggaaatgtgagtccattaaacctatttttctttataaattacacagtctcgggtatatttatcagtgtactaatatgtgcacttagggaaaaagctaaataaatgcgcatagcaaaaatgtagttaccttcttcgatcacatcctctctgttgtcagcttgcttttg

SEQ ID NO: 891263 - DNA, 608 bp, Homo sapiens
catctataaaaaaattaggtcctattcatgaatagacacttctcaaaagatgacattcatgcggccaacaaacatgaaaaaagcctcaacaccattgatcattagagaaatgcaaatcaaaaccacaatgagctactatctcatgccagtcagaatggcaattattaaaaagccaagaaacaacagatgctggcaaggctatggagaaataggaatgattttacactgttggtgggaatgtaaattagttcaaccattgtggaagacagtgtggtgattcttcaaagaccaagaaccagaaatacatttgacccagtaatcccactgggtatatacccagtgstatatacccaaatgaatataaatcattctattaaaaagatacatgcatgtgtatattcattgcagcactattcacaataacaaagacatggactcaacctaaatggctatcagtgatagaccggataaagaaaatgtagtacataaaaccatgaaatactatgcagccataaaaagaacaggatcatgtcctttgcaggggcatggatgtagctcaaagccattatcctcagcaaaccaatgcaagaaacagaaaaccaaacact

SEQ ID NO: 891264 - DNA, 583 bp, Homo sapiens
acagaggtttccggctggaaaagtgacacctgaatgatcccgagacaccagcaccatttattgaataggaagtcctttccccattgcttgtttttgtcaactttgtcgaagatcagagggttgtaggtgtgtggcattattttagggctctctcttctgttccattggtctacatgtttgcttttatatcagtatcatgctgctttggttactgtagccctgtagtatagtttgaagttgggtaatatgatgtatccagttttgttcttttttgttaggattgtcttggctatttgggcattatttggttccacatgaagtttagagtagttttttctaattctgtaaagaatgtcattrgtagttttataggaatatccttgaatctgtagattgctttgggtagtatggccattttaatgatattgatttttctatctataagcatgaaatgttttcttgcttgttgagttcttgttgttgagatctttcacctccctagttagctgtattcctaagaattttattatttatgtggctattgtgaataaaattgtatttccgatttgggtcttggcttaga

SEQ ID NO: 891265 - DNA, 587 bp, Homo sapiens
gagatttcattccttgcaaacttgtattgtaagaaataagaaaggaagtcgttttgtttaaacacaagcgacatcagaaagtaattcccatgtacacataaaaatcaagaacactgaaaaaggtaattatgtaggtaattatgaatgacagtataactgaatagttcttttcatttcttctcttatttaaggagtaattgtataaaacaatatgcatataattgcattgttaggcctgtgacatatagaaatgtaatatattggtaaaaaaaaatagcacaaaggagacaggtgggaacaaagctgtatggaagtgagaaatggaagtgaaaaaatgcagtgaatggtaamtcaaatacaaagtatgaaatgaagagaacaaaaagtggtaaagatgaaagttaacaccataaatacaaacttgtttgctttctgtactagtctgttctcacactgctatgaacaactacctgagactgagtaacttatgaagaaaaaaagtttaattgactcacagttctgcaggcttaataggaagcatggctgggaggccttaggaaacttgcaatcatggcagaaggcaatgg

SEQ ID NO: 891266 - DNA, 550 bp, Homo sapiens
tgtgttgataagtgcagcaaaccaccatggcgcatgtatacctatataataaacctgcacattctgcaaatgtatcccagaaattaaaaaaaaaaaagagaaatggttcaagtggacatctttgttttataacctgattttaagaggaaagcatttagtctttcaatattaaatattaggtatgatgttaactgttgaatrgttgacacagcttttaaaacttttattctataagttatctctgtgtgtgtgtgtgtgtgtgtgtgtgtgtgtgtgtgtgtcttgtgtgtctctgtctcttctactctctttccctgttctgtcccatccccacaccttactcactcactgattttctctgcatatttttctccccctgagggtaaacctttgcctgaagtagtaagtgaaaatagaatggtagctggagaaagctaactggtacagttcttctacacatttgcaattaatccttttcttttagattttatcctgactcacgtctacctcccccaggaaggtcaattctaacatttctcacatgggtatt

SEQ ID NO: 891267 - DNA, 604 bp, Homo sapiens; identical to SEQ ID NO: 889974

SEQ ID NO: 891268 - DNA, 548 bp, Homo sapiens; identical to SEQ ID NO: 889973

SEQ ID NO: 891269 - DNA, 642 bp, Homo sapiens
tttattgcacctcaggtcctgccagctcccctttcccaggtttctaaattgccgaacactcaaactccttttgtacttccttctatgggacttaaacttatattgtcagatcttacaaggccaaatggtgtcatgaataaagtggcyatgggtggcaaggatggaggtcatgcatgggctcagccaaatgtacttctacttaccaaggtggacctggttacagcaaccactgaatatatacaaactgttagcaatagaggccaacactcagctccaatgtggtaccattccctggggtgatcagctagctacctggtggcaggagattgagttatggtatagggacatgtgtttgggtgccaagttgacaaggggtggacttaattgtatgtgtcaactctactgggttaagagatgcctgggtagctagtaaacattatttctggatgtgtctgtgagggtgtttccagaagacattaggatttgaattagtagattgagcaatgaagatttgccctgagtaaagaaaacttgaggacatcatcccatcctttgaggaccctgatagagcaaagaggggaaggaagagcaaatcctgtatttctcttcttgaactgggacatctgtcttctcatgccctca

SEQ ID NO: 891270 - DNA, 582 bp, Homo sapiens
actgtctacttgttcacatctatatacctagcatctggaacagtggttgatatttagtatcagtgaaattagtgaatgcaaacatcctgtagagaaaatatattcctataatactatcacacataaaattgatattaatcttttaatgggtatttatatatataccctaatatttttccttttccctaacaggtggttgcaagagakattactatatttgaatagtttatttaacttaggattttccttttctgttttcattgaataggtaggaatttattgataagaggacatagagaaggcggaaggtattccaaacggaaaaaggtgcagttaaaatggggaaacgaatatttcagaaatagtcagaactgacaagacttagtgaagaatgaatgtaggatacaaagggaaagataaaatctatgatgactaccactcccacagacagctatcctagatccagatccgtattatattagctttctagtatgtccttctgctgtaagcctttccttttcctaatttagcctatttattacaatgtattttatagacagttttaacagaataaaactaatc

SEQ ID NO: 891271 - DNA, 582 bp, Homo sapiens
actgtctacttgttcacatctatatacctagcatctggaacagtggttgatatttagtatcagtgaaattagtgaatgcaaacatcctgtagagaaaatatattcctataatactatcacacataaaattgatattaatcttttaatgggtatttatatatataccctaatatttttccttttccctaacaggtggttgcaagagagattactatatttraatagtttatttaacttaggattttccttttctgttttcattgaataggtaggaatttattgataagaggacatagagaaggcggaaggtattccaaacggaaaaaggtgcagttaaaatggggaaacgaatatttcagaaatagtcagaactgacaagacttagtgaagaatgaatgtaggatacaaagggaaagataaaatctatgatgactaccactcccacagacagctatcctagatccagatccgtattatattagctttctagtatgtccttctgctgtaagcctttccttttcctaatttagcctatttattacaatgtattttatagacagttttaacagaataaaactaatc

SEQ ID NO: 891272 - DNA, 601 bp, Homo sapiens
tgttgagttgtaggtagtttgccttctgttagtgagttgtaggagttctttatatattctgtgtatagacccttaaaagacatgtgatttgcaaatattttctctcattctgtgggtcgtctttctttctcatagatagtatgctttgatgcacaaaaattttcaattttaatcaaatccaatttatcttttatttttgtattgttacctgtgcctttggtgtcatattgaagaatccagtgtcaaatcaaaggtcacgaagattttyccctatgttttcttctaagagttttacagttttggttctcaaatttagagtctttgatctgttttgagttaatttttgtagataatatagagtaagggttcaacttcattatttttcacatggctatccagttttctcaacacaacgttgaagagaaagagttctgttttttggatttggttttgttttattttgttttttgagagagggtctcgctctgtcacccaggctggagtgcagtggcacaatctcggttcactgcaacctccacctcctgggttcaagtgactctcctgcctccatgtcatcaatgttgtacttttgatcatttta

SEQ ID NO: 891273 - DNA, 632 bp, Homo sapiens
cacaaaatggactaagacagggatggatggaagcagcttggacatgtatacaaagactcccttgacagtctcacagtgcaggatagagccaagggtaggaagaaaaaggggtcagttctctccctcccatctcccccatgttttgtcagaactctaaggatctgtgaattctaaattttaacccagtcttcttctttttttttttttttttgaggtggagtttcrttcttgttgcccaggctggagtgcaatggcgcgatcttagctcactacaacctccgccttctgggttcaagcgattctcctgcctcagcctcccgagtagctggtattacaggcatgcgccatcacacctggctaattttgtatttttagtagagatggggtttctccatgttggtcaagttggtctcaaactcccgacctcggtgatctacccgcctcagccttccaaagtactgggattacagccatgagccgccgtgcccagcctcaacccagtcttctaagtttgcatgaagatatatttggcaagataggagaattgagtcgttttttttttttttttgagatggagtctcggtctgtcatcaggctggagtgcagtggcacgatcttggctcactgcaacc

SEQ ID NO: 891274 - DNA, 670 bp, Homo sapiens
ccatcactgccttggggccacagtctctgagtgacaggacactttttctgtctgtcttcttctcctctgctcagtcccaagggaatctcctctattcatccccaggaatgaagaaatgaaagggttcattgattttcatcacatcatcctcaagagctgcccaagcccaagagagtggactccagaaatgtcctcagggtcatttaagattctaattccagaatatgacctgggagctccctactactatttcagttcttctctgctttttaggggatgtctgtttggcaatcatttttcattgttttcaatggcagtactcaggaatctgagttatagatcccagtaacttagccatcattattggaaacattctttcctgttgatcttccctactgactgatatcacactttaattctgagagtgactacyttaatataacttttattgatatgtaataggtgtacatagttttgggggtgcagatgataattagttcatgcatattatttgtaaaaatcaaatcagtgcaattgggatatctatcaccttaaatagttgtcttttcttcatgcttgaaacattctcattcttctcttctggctattttgaggcatgcaatagattattgtaaacggtagtcaccctactgatctatcaaacactagg

SEQ ID NO: 891275 - DNA, 576 bp, Homo sapiens
tcatttctctcaaatggcactcagttttgtagagtgtatcatgataattcagaatgtttttcaaatactattaaccatccttcacattcacagcattgttttctttcaaaatgataactagaagcaagcaattctagaaatggaaatttaaggtttttttttaattatactttaagttctagggtacatgtgcacaatgtgcaggtttgttatggatgtatacatgtgccatgttggtatrctgcacccattaactcgtcatttacattaggtatatctcctaatgctatccttcccccctccctacaccccacaatgcagccataaaaaaggatgagttcatgtcctttgtagggacatggatgaagctggaaaacatctcagcaaactatcacaaggacaaaaaaccgaacaccgcatgttctcactcatgggtgggaattgaacaatgagaacacttggacacagtaaggttattttttaagtaaaggtgaaatcctaaataagttagttaattgaaaatattgaggaactactaaacatagagcaatgtgttaggtatgctgcagtaaagag

SEQ ID NO: 891276 - DNA, 632 bp, Homo sapiens
tctgtcactttggtgggtatggctagtagcctaggcacagcagggactgtcaacaagagcacttcatgtgcacactttatcacagtggtctcaggtagtcagatttttttcctgatggatcagggatcccaaagaaaatattctaagagtcctgggcaaaagctgtaataattattgtgaaatattcttggaagttccagaacgttactttggctgcatttttgttgttgttgttcacataagtctttaaggctagtccaaatacaaggtaaggggaattggacccaatctttgaattggggarttatcaaagaacttgtggctatctttcaaccaccatacatggggaatgacaaaccagattctcacccaacgttctctttttctcttctgatttgccttagctagagatgctgagcatattaatgattcaaaataatatgtcgagtggatataattttactaactatgattaaacagacgtaaagggctacaattttttttttagtgagctgcaataaagtagaatgctggtgacaaaaaaaaagaaaaaagaagaatgcgatttgatggcaatatcacagacaatagttcgttaaaatgtatgtagatgtgctgtacttgagtttgaa

SEQ ID NO: 891277 - DNA, 642 bp, Homo sapiens
gagaataaaatacctaggaattcaacttacaagggatgtgaaggacctcttcaaggagaactgcaaatcactgctcaaaaaataaaagaggatacaaacaaatggaagaacattccatgctcatgggtaggaagaatcaatatcgtgaaaatggccatactgcccaaggtaatttatagattcaatgccatccycatcaagctaccaatgactttcttcacagaattggaaacaactactttaaagttcatatggaaccaaaaaagagtccacattgccaagacaatcttaagccaaaagaagaaagctggaggcatcatgctacctgacttcaaactatactacaaggctacagtaaccaaaacaacatggtactggtaccaaaacagagatatagaccaatggaacagaacaaagccctcagaaataatgccgcatatctacaaccatctgatctttgacaaacctgacaaaaacaagaaatggggaaacgattcccagtttatgtaatttttaagagctcctagaaaacttacacaataaaaaatccttcgtatttttattagatacctcaaagatatttaataaaaattatagtgaacatcattattaatagtgaactattacaagcatcatttggca

SEQ ID NO: 891278 - DNA, 527 bp, Homo sapiens
atcctgagatcaaccctccaccccttcaggtaatgatcctcctgctcttagtcatttatatcctttggttcatagatattttgagtcaagtgccttctaaccgctgagctacataatatcccttggtttttaaagataatacaaagtggattttagcaacaatcttgagtcatcacagaagctaatgaatttggggattccatgaagccatccaagcacataaagcccatttcctgggtccctttcccttagctcaaggccacaaaaatcagaacatgaattccagcccatatttgcattatgtctaaataattatgaattataaatgaagctaaaaatagctaaatatgttctattcttctacttcmataactataccgccataataacccacaaggtcaaagtcgagtgtagaattctctgagttcttggtgctctgcacgggaatgtgttagtaaagggagagctgatcctcagccccaggctatttttttttctttcatcatagctagccctgtccttacttg

SEQ ID NO: 891279 - DNA, 638 bp, Homo sapiens
ccttctttggaaatggaatatcatcacaaaaacaagacagaagaattcccagaaacttctttgtgatgtgtgcattcaactctttttttctatagaacagtttagaaacactctttttgtggcatctgtaactggacttttggagtgctttgaggcctcaagtgaaaaaggaaatatcttcacataaaagctagacagaagcattctcagaaacttctttgtgatgtttgcattcaactctcagagttgaatattccttttcatagagcagttttgaaacacactttttgtagaatctgcaagtggacatttggagcgcttggargactatggtgaaaaaggaaatatcttcacataaaaactacacagaagcattctcagaaacttcttctgatgtgtgcactcaagtcgcagaggtgaacctttcttttgatagaacagttttgaaactctctttttatggaatctgcaagtggacatttggagtgctttttggccttcgttggaaactggaatatcttcacataaacactagacagaagcattctcagaaacatctttgtgatgtgtgcattaaacttacagatttgaacattccttttcatagagcagttttgaaacactctttttctagtatg

SEQ ID NO: 891280 - DNA, 622 bp, Homo sapiens
tctttttgcagaatctggaagtggacatttgtagcgctttgaggcctatggtgaaaaaggaaatatcctcacataaaaactatacagaagcattctcagaaacttctttgtgatgtgtgcattcaactcacagagttgaacatttctttgatagagcagttttgaaacaatctttttatagggtatgcaactggatatttggagggctgtgaggcctatggtgaaaatggaaatatcttcacataaaaactacacagtagcattccaataaacttcttttgttgtttgctttcaactcacagagttgaatattccttttcatagagcagttttgaaacactgtttttcagaatttgcaagtggatatttrgactgctgtgaggccttcgttggaaacgggatatcttcacataaaaagtagacagaagcaatctcagaaacttctttgtgactttcatgtcacagagttgaacattccttttcatagaacaattttgaaacactctttttgtagaatttgcaagtggatatttggaccgctttgaggccttcgttggaaacggtatatcttcatataaactacacagaagtactcccagaaacttctttgtgaggtgtgctt

SEQ ID NO: 891281 - DNA, 593 bp, Homo sapiens
cttttgatagagcagttttgaaacactctttttgtagaatctgcatgtggacatttggagcgctttgaggcctgttgttaaaaagggaatattttcacataaaaattacacagaagcattctcagaaacttctttgtgttgtttgttttcaactctcagagttgagtattccctttcatagagaagttttgaaacactctttttgtagaatttgcaagtggatatttgtactgctttgaggccttcattggaagtgggatatcttcacaaaaaccagacagaagcattctcagaaacttctttgtgatgtgtacattcaactcacagggttgaacatttcttttgatagagcagttttgaaacactctttttgtagaatatgtaaatggaaattggagctcgtttggrcctatggtgaaaaaggaagaatcttcacataaaaactacacagaagcattctcagaaacttctttgtgatgtgtgcattgaactcacagagttgaaccttacttttgatagagcagttttcaaacactctttctctagaatctgcatgtggacatttggagcgctttgaggcatgtggtgaaaaa

SEQ ID NO: 891282 - DNA, 575 bp, Homo sapiens
cacataaaaactagatagaagcattctcagaaacttctttgtgttgtgtgcattctactcacagtgttgaaaatttcttttgatagagcagattggaaacactctttttgtagaatttgctagtggatatttgtacagttttgaggtctacrcaggaaatgggaatatcttaatataaaaactagacagaagtattctcagaaacttctttgtgatgtgtatactcacctcacagagttgaacatttcttctgatagagcagttttgaaacactctctttgtagaatctgcaagtggatatttggacagctttctggcttcaatggaaatggggatatcttcacataaaaactagacagaagcattctcaaaaacttctttgtgatgtctgcattcaactcacagagttgaacattccttttcatagagaagatttggagcactctttttgtagaaactgcaagagaacatttggagcacttcgaggcctaaggttaaaaaggaaatatcttcacttaaaaactagacagaagaattctcagaaacttcttcgttatgtgtgtactcaactcaca

SEQ ID NO: 891283 - DNA, 682 bp, Homo sapiens
atttggacatctttgaggccttcgttggaaatgggatttcttcatataaaattagacagaagaattctcagaaacttctctgtgatgtgtgctttcaactcacagagttgaaccttcctttcgatagagcagttttgaaacactcgttttgtagaatttccaagtggatatttagatcggcttgaggcctatgttagaaaagtaaatatcttcatataaaaactagacagaatgattctcagagactactttatgatgtgtgcgttcaactcacagagtttaacctttcttttgatagagcagttttraaactctcttttgtagaatttgcaagtgtatatttagagtgctttgaggcctatgtaagaaaaggatttatcttcacataaaaaacagacagaagcattgtcagaaagtattttgtgatgtttgcattcaactcacagagttgaacattcctcttgatagagcacttttgaaacactctttttgtggaatctgcaagtgaatatttggacttttttgaggccttcattggaaacgggctttcttcacataaaacttgacagaagaattctcagaaacttctttgtgatgtgtgcattcaactcacagagtttaacatttattttgatggagtagatttggaacactctttttgtagaatttgcaagggtatatt

SEQ ID NO: 891284 - DNA, 678 bp, Homo sapiens
gtgcctaagcactgctcttctgcatttttgtaggaggaaattagctcattatttaggatctgctgtgtcttcctaactctctgatctccttggagcctttgccttggccacctgtagagtctttaggttgatgcttacatgttggtggagtttctaggcattctgcttctccctctgataggtcactacagttcttaaagttgaaggrgaggcagaggctattggcaaaggcaagatactgtgtggatttcagagttccttgtcatttgttgtattttcaatctgaacagaaaccaaactgaagtctccaaatcctaggattcgagagggagtcatttttgcaaggagtctatgattccctatgtttgtggggaagcattttatgtggaaaaccaaaaacccatggcctggtatatacagagctttcaggaaatggcagctgtaggcccatgactgagaagtttggcttcccacaaaagctgggccttgtgctgaatgtgactgatactgatggagtttcagaaggattgcagtggagacgagtgtatggtcagaattacattttctagccagattatcagagtctattatgcatttatatggccaagaaggcaggcagaaagagcagttgggaagcaatttgtgatagtgtaggagagattttgggggctattgtgt

SEQ ID NO: 891285 - DNA, 678 bp, Homo sapiens
gtgcctaagcactgctcttctgcatttttgtaggaggaaattagctcattatttaggatctgctgtgtcttcctaactctctgatctccttggagcctttgccttggccacctgtagagtctttaggttgatgcttacatgttggtggagtttctaggcattctgcttctccctctgataggtcactacagttcttaaagttgaaggggaggcagaggctattggcaaaggcaagatactgtgyggatttcagagttccttgtcatttgttgtattttcaatctgaacagaaaccaaactgaagtctccaaatcctaggattcgagagggagtcatttttgcaaggagtctatgattccctatgtttgtggggaagcattttatgtggaaaaccaaaaacccatggcctggtatatacagagctttcaggaaatggcagctgtaggcccatgactgagaagtttggcttcccacaaaagctgggccttgtgctgaatgtgactgatactgatggagtttcagaaggattgcagtggagacgagtgtatggtcagaattacattttctagccagattatcagagtctattatgcatttatatggccaagaaggcaggcagaaagagcagttgggaagcaatttgtgatagtgtaggagagattttgggggctattgtgt

SEQ ID NO: 891286 - DNA, 679 bp, Homo sapiens
tatgtgctcaggtacaggtagaagatcctttctccaaggagtgctccccttctaccaggtcagctcctcagccatcacctggacagctgctgaatgtcacctagagtttattccttcctttcagagtgtaacagccttagtatactccagggtgacttgggtgtaaaagaatgcaaagtgaataatgttattatcartaggtgtcatgtaaacctagtggtttttctagctgatttttaagcatgtctggaatttttcatgactttatttatttatttattattttaatttttgtagaaatggggtcttgcttcattgccctggttggtctcaaactcctggcctcaagtgatcctcccgccttggcctcccagactgctgggattataggcataagccaccacacctggcctcatgaatttttttttttttgagacagggtgttactctgtcacccagactggagtgcagtggcatagtcatagctcactgcagtcttgaacttgggctcaagcaaatctcctacctcagcctctgagtagctgggactacgggtgcatgccaccaagcctgggggatttttttttttatttttaatagagatgaggttcctccatgttgcccacgatggtctcaaactcctgagctcaagcgatccacctgcctcggcctcccacag

SEQ ID NO: 891287 - DNA, 611 bp, Homo sapiens
gggtttatggactcttgcatttcatagagatactctgcgtggtgaagaagctattgaaaggcaataccaaaaatcaaattgtttctgtttgagagtactatataaaaaggttttaaataaatacttaattatattggttaattaggtacctgcaatattagggcaattttctgatgtaagacaattctgaaagtatgcaaattaaagaagtaaaagtacaatggtggaagcatgtccagattatataaatgaattaaaaattttcaacttgtcgctaagcagattkcttgctttcttttaaatatacagaaaaagcatatggattctcaagataaaccacatatgaaaaagttttagctttttttaaaatttttacagcttcactgaaatgtcattcaagacatattagtaaatttgtgatttaaatttagaagccatcaccacaatccaattttagaacttttctagcacttcccaaatttccttcaatttcaccttttaaggagtgttaagagcagaaaacacacacaattatctgacttaaagagaaaagaaaaatcacctagttccacctagtggtgtataagtagatagcgagttgattttggaat

SEQ ID NO: 891288 - DNA, 608 bp, Homo sapiens
tgaacataattcccaatagaaagtttttcatcttgccctcttttttccctcccacttttggagtccccagtgtctataattcctgtttttatgtccatatgtagccaatgtgtagttcccccttagaagtgagaacatgtggtatttggttttctgttcctgtgttatttcacttaggataatggcctctagctgcaaccatgttgctgcaatggacatgatttcattcttctttttgtggctgcatagtactccacaatgtatagcgtaccacatttttaaaatccaatccactgttgatgggcacytaggttgattctatgtctttgctattgtgaataatgctgcaataagcatatgagtgcaggtgtctttttggtaggaagataatatttgaatatctttactaactaacacatccaccttattgattcctcctaacttcacaggttgggtttaatttctagtttaatagaattataccctatgtgcacaattctttgttatttccttataggtgaaaaaacagttatcaaaaactgtgtactgagaagttctttcttggggccaggtgagggcactcctgtcatctcccaaatacctctcag

SEQ ID NO: 891289 - DNA, 669 bp, Homo sapiens
ggctgcacgcttagttcatctgatcatgttcaagttatgtgaccttcaacgtgggggtccatagcaactgtaaaagaactcacaactttgttacagaaaagttgttacaaaccctcccttttttatgtccattcctcaatcttgagagaaaaggggtaaggaccattctagatacttcctgctgattaggatcacagaccttgtttaaagaactgaaattgtttttattatcatatctgccatgctgatctgtgatcagtgatcgtggatgttactattgtaattgttttgggggtgccacaaaccccatccatataagacagcaaacaattgttaaatgttatgtgtgtcctgactgtccccccaatcatctatttcccttctttttccctctccttaggattccttattccctgagaccaaaaaaaaaaaaaaaaaaaaaaagctatggaaattaggccacttaaaaaccctacaatgacttctaagtgttcaagtgaatggaagagtcacacatccctatctatamattaaaaactgattaagattagtgaggaaaatatgtcaaaacccaagataggccaaaagctaggccttttgcaccagacagtgagccaagttgtggatgcaaggaaaagttttcgaaggaaattaaaaattctactccag

SEQ ID NO: 891290 - DNA, 664 bp, Homo sapiens
atgaggggatggtggtagtactagagaagtggaatcaaggacttatgtattaagacttttattaggcttgagagcaagagttagaagaaacctccaaatgtccttctagtgattaggactggttcaggataggaaaagggaaagagtttcagagcaaggatctgcttcaggaaaaaaaaatatatatagatagatagctgggtcttgaaactggttcaagagaatgaaccttatatggsataatattaattttcagaggaaccagttgtggagaagacaaattctattcttgaatgactttagtaacttaattgttcaacgcaaagaaagttctgggggagattagtggtaagagctcgctctctgaatgctaaaattctagctggagcgatgtccctacagttgtattaaaattaagaagataagcctttgggataggtaacatgacctatgcctcaagacattcaacatctccatcttggtttctctatctctaaaatggtatttacagtatgaacccttcccatatgttgttatgggatgaattatgtctcttccaaaatctgtatgttgaagttcttattcccaccactttagaatgtgcctacatttgcagatggggcttttaaagagggaattaaattaaagtgaagctgttagggtg

SEQ ID NO: 891291 - DNA, 707 bp, Homo sapiens
atcattacaagtctgcacaaacaagctttttattcttagctccactgtggggtcttttatttccattttcaaaataataggccaataatagggtggattttatttcaggcaattccaatctaaatatttgttgaagttagctatttgcaaaaagcatcagagcagctagtatagtgtagtagttataaagacaaacatgatgcagtgttgtactgcaaggagtttgttgtgaaaatggccatcygtttatattctcaaagcaactatcttgaagaaaccaattacagtggatgtggtgaggcactaccatgaccttcctttcaggatcaagtcactcattcccccagctgccaggagtgttgctggctaatggcttacagctgttctcaagctgcacccaagactgggtaatttataaaggaaagaagattaattgactcacagttcagcatggctggagaggcctcacaatcatggctgaaggcaaaggcacgtcttacatggtggcaggcaagagagcttgtgtaggagaatatccctttataaaaccagcagatctcatgagacttattcactatcatgagaacagcaccagaaagacccaccccatgattaaattacctctcactgggtccctcccacaacacgtgggaattatgagagctacaattcaagatgagatttgggtggggacaaaccacatcaca

SEQ ID NO: 891292 - DNA, 707 bp, Homo sapiens
atcattacaagtctgcacaaacaagctttttattcttagctccactgtggggtcttttatttccattttcaaaataataggccaataatagggtggattttatttcaggcaattccaatctaaatatttgttgaagttagctatttgcaaaaagcatcagagcagctagtatagtgtagtagttataaagacaaacatgatgcagtgttgtactgcaaggagtttgttgtgaaaatggccatccgtttatattctcaaagcaactatcttgaagaaaccaattacagtggatgtggtgaggcactaccatgaccttcctttcaggatcaagtcactcattcccccagctgccaggagtgttgctggctaatggcttacagctgttctcaagctgcacccaagactgggtaatttataaaggaaagamgattaattgactcacagttcagcatggctggagaggcctcacaatcatggctgaaggcaaaggcacgtcttacatggtggcaggcaagagagcttgtgtaggagaatatccctttataaaaccagcagatctcatgagacttattcactatcatgagaacagcaccagaaagacccaccccatgattaaattacctctcactgggtccctcccacaacacgtgggaattatgagagctacaattcaagatgagatttgggtggggacaaaccacatcaca

SEQ ID NO: 891293 - DNA, 543 bp, Homo sapiens
tacccttccatcttagtcttttggtcaatgggttttctttaatttctccacatgttttgtagttttctctgtgtcttgtatatttttcacttttaggtatttggtgttttttgatatttttgttattttaaaagtattcgtttttaattgtttttctgttatgtagaaaaaaatttccttctttgtgtattgctcctacatctrgcagccttgctaaatttacttatattttctaatctcttatctgtagatttttctatgtatacaatctagtgttaaatgaataaagacagccctctatttttgaatactcacatctttatttttcttgtcctactattcttacgtcatttaattatctgaataaataatgaataattaggatgtcataggacatacttttctctgactaatttctcaagtttctgttttctttactagattaaaactgagacttgttcaacaatgacccttaactactctacaatctgctgtcagccagagttaggagtgggtgacaacagagttgctaagagttatatc

SEQ ID NO: 891294 - DNA, 543 bp, Homo sapiens
tacccttccatcttagtcttttggtcaatgggttttctttaatttctccacatgttttgtagttttctctgtgtcttgtatatttttcacttttaggtatttggtgttttttgatatttttgttattttaaaagtattcgtttttaattgtttttctgttatgtagaaaaaaatttccttctttgtgtattgctcctacatctagcagccttgctaaatttacttatattttctaatctcttatctgtagatttttctaygtatacaatctagtgttaaatgaataaagacagccctctatttttgaatactcacatctttatttttcttgtcctactattcttacgtcatttaattatctgaataaataatgaataattaggatgtcataggacatacttttctctgactaatttctcaagtttctgttttctttactagattaaaactgagacttgttcaacaatgacccttaactactctacaatctgctgtcagccagagttaggagtgggtgacaacagagttgctaagagttatatc

SEQ ID NO: 891295 - DNA, 556 bp, Homo sapiens
attggtattaattgtagtcaccaagataaacaacacatctcttgaacttatttttcctttctaaaaaatttgtgtcctttgaccaacatctttccaatctccttccttaagccagcctttgggaaccaccattttcctctctctttgtatactaacttttttacacttcacgtataaatgagatcatcttcctgtggctggtttattttgcttactatagtgtcctctaggttyttccatgttgttgcaaataatgggatattctttttttcttttttaagggtaatattctattgtgtatatataccatattttcttttttttttttaagttctggggtacatgtgcagaatgtgcaggtttgttacatacgtagaagtatgccatggtggtttgctgcacctatcaacccatcacctaggtattaagccccgcatgcattagcccttttccctaatgctccccaacaccctttcctgacaggcccaagtgtgtgttgttgccctccctatgtccatgtgttttcattgttcagatcccacttataagtgagaac

SEQ ID NO: 891296 - DNA, 624 bp, Homo sapiens
tttttgtgtctctatttccttcatttctgctctgatcttatttatttcttgccttctgctagcttttgaatgtgtttgctcttgcttctctaattctgttaattgtgatgttagagtatcaattttagatctttcctactgtcttttgtgggcatttagtgctgtaaatttccctctacacactgctttgaatgtgtcccagatattctggtatgttgtgtctttgttctctttggtttcaaagaacatctttatttctgccttcatttccttatgtacccaatagtcattcaggagcaggttgttgagtttccatgtagttgagcagttttgagtgagtttcttaatcctgagttctagtttgattgcactgtggtctgagagacagtttgttataatttctgttcttttacrtttgctgaggagtgctttacttccaactatgtggtcagttttggagtatgtgtggtgtagtgctgaaaagaatgtatattctgttgatttggggtggagagttctgtagatgtctattagttctgcttggtgcagagctaagttcaattcctggatatccttcttaactttttgtctcgttgatctgtctaatgttgacagtgggatgtt

SEQ ID NO: 891297 - DNA, 624 bp, Homo sapiens
tttttgtgtctctatttccttcatttctgctctgatcttatttatttcttgccttctgctagcttttgaatgtgtttgctcttgcttctctaattctgttaattgtgatgttagagtatcaattttagatctttcctactgtcttttgtgggcatttagtgctgtaaatttccctctacacactgctttgaatgtgtcccagatattctggtatgttgtgtctttgttctctttggtttcaaagaacatctttatttctgccttcatttccttatgtacccaatagtcattcaggagcaggttgttgagtttccatgtagttgagcagttttgagtgagtttcttaatcctgagttctagtttgattgcactgtggtctgagagacagtttgttataatttctgttcttttacgtttgctgaggagwgctttacttccaactatgtggtcagttttggagtatgtgtggtgtagtgctgaaaagaatgtatattctgttgatttggggtggagagttctgtagatgtctattagttctgcttggtgcagagctaagttcaattcctggatatccttcttaactttttgtctcgttgatctgtctaatgttgacagtgggatgtt

SEQ ID NO: 891298 - DNA, 624 bp, Homo sapiens
tttttgtgtctctatttccttcatttctgctctgatcttatttatttcttgccttctgctagcttttgaatgtgtttgctcttgcttctctaattctgttaattgtgatgttagagtatcaattttagatctttcctactgtcttttgtgggcatttagtgctgtaaatttccctctacacactgctttgaatgtgtcccagatattctggtatgttgtgtctttgttctctttggtttcaaagaacatctttatttctgccttcatttccttatgtacccaatagtcattcaggagcaggttgttgagtttccatgtagttgagcagttttgagtgagtttcttaatcctgagttctagtttgattgcactgtggtctgagagacagtttgttataatttctgttcttttacgtttgctgaggagtgctttacttccaactatgtggtcagttttggagtatgtgtgstgtagtgctgaaaagaatgtatattctgttgatttggggtggagagttctgtagatgtctattagttctgcttggtgcagagctaagttcaattcctggatatccttcttaactttttgtctcgttgatctgtctaatgttgacagtgggatgtt

SEQ ID NO: 891299 - DNA, 678 bp, Homo sapiens
gaggatacaaacaaatggaagaacattccatgctcatggataggaagaatcaatatcgtgaaaatggccatagtgcccaaggtaatttatagattcaacgccatccccatcaagctaccaatgactttcttcacagaattggaaaaaactactttaaagttcatatggaaccaaaaaagaacccacattgccaagacaatcctaagccaaaagaacaaaattggaggcatcacactacctgacttcaaactatactacaaggctatagtaaccaaaacagcatggtactggtaccaaaacagagatatagaccaatggaacagaacagagccctcagaaataataccacacatctacaaccgtctcatctttgacaaatctggcaaaaacaagaaatggggaaaggattctctatttaataartggtgctgggaaaactggctagccatatgtcatatgtagaaagctgaaactggatcccttccttacaccttatacaaaaattaattcaagatggattaaagacttacatgttagacctaaaaccataaaaccctagaagaaaacctaggcaataccattcaggccataggcatggtcaaggaattcatgtctattgttgagttttaagagttctttgtatattgtgaatacaattcctttatgtggtatgtgttt

SEQ ID NO: 891300 - DNA, 668 bp, Homo sapiens
ttctctacttctcagtccaaatggcagaaaacccagcaaacatttaatcatagagaaagaggagtggagacacagagagaaaagagagagagagagacagaatttctttctcctaatcccagttgtgacatttctggattaactcaactgctcaaccctagaccaattctggtcttaagggagatgacaacaggttgcaaaatggttgttcctacactaactatgtgaggggaggggtgagatgtgggcagagttcacagaaaatgggtcaggagctgggcaggcccaatagtaaggactagtagaggagctttaagagacatatctggccaggcaccatggctcaggcctgtaatctcagcacttcaggggaccaaggtgggcaggttggttggccccaggagttcaagaccagcctgggcaacacagtgtgtcttcatctgtacaaaaaataaaagtaaagttagctgggcatggtggcacacctgtagtcccagatacttgggaggcygaggtgggaggattatttgagctcgggaggttgaggctgcagtgagatgttattgtaccactgcactccatccagcctgggtgacagggtgagaccctgtctcaaaacaaaacaaaatatccaaacatttctagtttccacttagatgtagatagct

SEQ ID NO: 891301 - DNA, 612 bp, Homo sapiens
ccaggcatgggggtgcacacctgtactcctagctacttgggaggcacaggtgggaagatcctttaagcccaggagttggaggctgcagtgagccatgatgaccactgcactctagcctggcagacatagggagactctgtctcaaaaaaataataaattgaggccaggcgcagtggctcacgcctgtaatctcagcactttgggaggctgaggtgggcagatcacaaggtcaggagttcgagaccattctggctaacacggtgaaaccccgtctctactaaaaatataaaaaattagctgggcatggtggcatgtgcctgtaatccccacctactcgggaggctgaggcaggagaatctcttgaacctgggagcccgaggttgcagtgagccgagatygcaccactgcactccagcctgggcggcagagagagactctgtcccaaaataataataataataataataaagtaaaatgtggaggttaaaacaaggcagactatttgaatgacatctagccaattcatagtcatgtgagaatggatgtccagccctctggatctacagttcccaagcacctgcaagccttgtatcatatcactgctctgcccag

SEQ ID NO: 891302 - DNA, 651 bp, Homo sapiens
accctagagcattgtttgctgacccctgacagaaagaaaactactgtacctcctcacataaaatggaggtgagagagttcatttcataggtttgaagtaactcagactaaccaaggtaatgtaacatacttatgagagtatgtagcctgctcgagacattacatgcagctatcattatgatggaggcaagtgaattaatgtttaaactcattcacacaatattctctatggagcaaaatgcaatgttaggcaagagcatgaaagagagctaattatttaactaacaaaagactgagattatgaaggagctctagccttaatgawattcatgtcgaaagttttctattctaagctctatttctcgaagatttagtagtagtattttttctataagcgcagaaaatttgaaatgattctttcaagaaaatacaacaaacagccattggattctctaaatctaggtaagcttcatcactacaaaacagaaaagaagtctaagtttatattataaattgttctcactgctagtaattactgactgcttctttaatggctcataatgaattccatgcatttttctaagaattattttgttcccagagttatgtggattaatttatgtatatttaatttaaaaattagcatcacttt

SEQ ID NO: 891303 - DNA, 651 bp, Homo sapiens
accctagagcattgtttgctgacccctgacagaaagaaaactactgtacctcctcacataaaatggaggtgagagagttcatttcataggtttgaagtaactcagactaaccaaggtaatgtaacatacttatgagagtatgtagcctgctcgagacattacatgcagctatcattatgatggaggcaagtgaattaatgtttaaactcattcacacaatattctctatggagcaaaatgcaatgttaggcaagagcatgaaagagagctaattatttaactaacaaaagactgagattatgaaggagctctagccttaatgatattcatgtcgaaagttttctattctaagctctatttctcgaagatttagtagtagtattttttctataagcgcagaaaatttgaaatgattctttcaagaaaatacaacaaacagccattggattctctaaatctaggtaagcttcatcactacaaaacagaaaagaagtctaagtttatrttataaattgttctcactgctagtaattactgactgcttctttaatggctcataatgaattccatgcatttttctaagaattattttgttcccagagttatgtggattaatttatgtatatttaatttaaaaattagcatcacttt

SEQ ID NO: 891304 - DNA, 636 bp, Homo sapiens
ataaggtccatacatcaagggaggaagtaatttagaaaaagaaagctgatttgacttttgtgtgagtctgaacatatggttagggcacagctgggttatcattctatacattcttacaagagaaaagaaccaaatcaacactttggagaaatgaacctatcaccacagtcttgaacctgaaaccctcaaaaccatctatcgttcttcatcagttgagaaggactcaaggttattttgcatttgtttaargtagtatttaatcacaagaaaatccagtcaagtgtcattatttgatgaccttggtagcttcgaactaatctttatatgaaggtgtcttttccatagaacaggaattggctcaattaagagagatctgtgatgtagtcagactttcatacgtgaaattccttcttcttgattgagcagttcattgttaaatctataagctctaaagtgctacagcctatatttgccacagctgcctctactctataaagagccagtctgtcttccaagaagttaatcatcatgaaatgagtcttgggtgtaaaaattaggaagggtaagtggggaagaaccttgtgaaatttctgtgcatttatttgactggagaaaagaagttaatgatgtgacatg

SEQ ID NO: 891305 - DNA, 656 bp, Homo sapiens
tttaaagagcagaaagaagcagctgtcaacccagaattctaaatcctgtgaaaatatcatttaaaattgaagatgcagtaaagatatttcgctccaagcataattgtattacaagaattctaaaggaagttcttcatgaccctagatagaaattcagatctataggaatggatgaacagcctctagaatggtaaatagaaaagacttcatactttacattttttcttctaatttttcaaaagtcatattactggtaacccaaatagtatctcactgctttgtgaggtttataatgtacgaatatataatatatatgacaacaatacagaaagcagtgcaaggacatgtaagaaaaagggagttaaaatgagatactaaaamattttgactagtccaaaagaagtcaggaaaggaggaacagaaaaacaaaataccgaaaacaaatagcaaaatgctatccccaagtcaaaccacgtcatcacattacaagcaagggttatccagagcttagcatctgctatcaccatggatcctttctttttgtttttcctaaagttaattgccttatttgtcctattagattagtttttgtgtagccatttgtaatttttcccattccttaaaagaggctctcacacaattttaagccaggctaa

SEQ ID NO: 891306 - DNA, 595 bp, Homo sapiens
aaatatatatgcacccaatacaggagtacctagattcataaagcaagttcttagagacctacaaagagacttagactcccacacaataatagtgggagactttaacaccccactgtcaatattagacagatcaacaagacagaaaattaacaaggatattcaggacttgaactcagctctggaccaagaggacctaatagacatctacagaactctcyacccaaaatcaacagaatatacattgttctccagcaccacatagcatctattctaaaattgaccacataatgggaagtaaaacactcctcagcaaatgcaaaagaatggaaatcataaccaacaatctctcagaccacagtgtaatcaaattagaactcagtattaagaaacttactcaaaaccacacaactacgtggaaactgaacaatctgctcctgaatgactactggctaaataacaaaattaagacagatataaataagttctttgaaaccagtgagaacaaagacacaacgtaccagaatctctgggacacagctaaatcagtgtttagtgggaaacttatagcactatatgcccacaggagaaagcagga

SEQ ID NO: 891307 - DNA, 595 bp, Homo sapiens
aaatatatatgcacccaatacaggagtacctagattcataaagcaagttcttagagacctacaaagagacttagactcccacacaataatagtgggagactttaacaccccactgtcaatattagacagatcaacaagacagaaaattaacaaggatattcaggacttgaactcagctctggaccaagaggacctaatagacatctacagaactctctacccaaaatcaacagaatatacattgttctccagcaccacatagcatctattctaaaattgaccacataatgggaagtaaaacactcctcagcaaatgcaaaagaatggaaatcataaccaacaatctctcagaccacagtgtaatcaaattagaactcagtattaagaaacttactcaaaaccacacaactaygtggaaactgaacaatctgctcctgaatgactactggctaaataacaaaattaagacagatataaataagttctttgaaaccagtgagaacaaagacacaacgtaccagaatctctgggacacagctaaatcagtgtttagtgggaaacttatagcactatatgcccacaggagaaagcagga

SEQ ID NO: 891308 - DNA, 600 bp, Homo sapiens
ttccatctcgtcagctgggagggcacctggatggcccttgttttcttagctgggacgcgggggtagcactgaattttgaactgcccttcctactggctgtggaggtgtcccgctgagactgagcggggtggcgctgggccgcaccctcggcaggaaaaggccttccgccccacacctgttgaatycataaatccagacgacttggttcacccttcctgggccctcgcttgaggtgagaccccggggaagttcccggggaaggctcccaggatcttaggtgagccgtaagggtgggatataactaaacaaaagttcagtgagaagctcttctagctagtggcaaggaagtccaaatatctcagggctcttgcaggccacttaacttctgggcctcagtttttccatctgaaagagatcacttttgtcacttcctctagggaaggaactatctattcagcatactatgccagacatgggtatttatttgttgagtggataagggaatactacgtggagacagaaaagtggaggagaaaatcagcaggttcttagccaaactactttaagcgtcacggaccttatagccctgctggttactca

SEQ ID NO: 891309 - DNA, 600 bp, Homo sapiens
ttccatctcgtcagctgggagggcacctggatggcccttgttttcttagctgggacgcgggggtagcactgaattttgaactgcccttcctactggctgtggaggtgtcccgctgagactgagcggggtggcgctgggccgcaccctcggcaggaaaaggccttccgccccacacctgttgaatccataaatccagacgacttggttcacccttcctgggccctcgcttgaggtgagaccccggggaagttcccggggaaggctcccaggatcttaggtgagccgtaagggtgggatataactaaacaaaagttcagtgagaagctcttctagctagtggcaaggaagtccaaatatctcagggctcttgcaggccacttaacttctgggcctcagtttttccatctgaaagagatcacttttgtcacttcctctagggaaggwactatctattcagcatactatgccagacatgggtatttatttgttgagtggataagggaatactacgtggagacagaaaagtggaggagaaaatcagcaggttcttagccaaactactttaagcgtcacggaccttatagccctgctggttactca

SEQ ID NO: 891310 - DNA, 483 bp, Homo sapiens
tatgccagtagctgtcttttttttttttttttttttgagttggagtctcactctgtcacccacactggagtgcagtggcgtgatctcagctcactgcaagctctgcctcctgggttcacaccattctcctgcctcagccttccgagtagctgggaatataggtgcccaccaccaagcccggctaattttttgtatttttagtagagacggggtttcaccatgttagccaggatggtctcaatctcctgacctcatgatcctcccrcctcggcctcccaaagtgctgggattacaggcatgagccaccatgcccggccacagctcactgtctttattacattaaatttgcataaattctgatgtcaggaagtatgaatcttctgatcttttccaagattgctttgcctcttccaagtcccttgaacttccatatgaattttagaatcagtttgtcaaattttgcaaaaatgccagctgggatta

SEQ ID NO: 891311 - DNA, 565 bp, Homo sapiens
ggggagggatagcattaggagaaatacctaatgtagatgatgggttgatgggtgcagcaaaccaccatggcacatgtatacctatgtaacaaacctgcacgttctgcacatgtatcccagaacttaaaagtataataaaaaattwaaaaaaaaaaactttctaaagccaccttgtcaaattgtagtcaaactctgggaagtttagtaaacccagaatttccttaaacagaaatatgctgtcaaatatttcactctcttaatccccttataaacatgcgtctatctttttttcttaatcctcttcccctccagctcttacttgatctctctccctcccactctgggatagctttctcaaaggtagtctacactctgccttctcatcaatttccatttccttcctagtttattccactctactgttcttctgtcacctaggctgaatcccataggcattttgtggaatttctcgttgcttaattcttctgcaccacttgttgatcatttctttttttaagcattgttacctcgcttttgttcttctctacctctgtgcttgagattc

SEQ ID NO: 891312 - DNA, 543 bp, Homo sapiens
catgaaacgcacatttgtagtcctcctgtgtacctggctgcggtgcggggaggcagagtgggaaggggagaagactggtctagctcaaaaggccagtcctgggcttcaatttccaacactgggctgactctgctgggacaagcaactgcctctgttcttgtctcttcctcctcgggccctgattgctggcctggactagcccattcaatggatattgggccaatttcccttttttccacttcccctttcttccccttgtgttctcaaaatgtgataaatggaataggcacaccccagatccaagttgcttttctgagaaacttcccgcagtacttaggtcctggccccccggcctcagaacagagargcacggtacacacaccactccccaccagggcactgcagacctatgtccaggctgccaccccttcccaagggcatgagggaggcagtgggggagagttcggagatgcaggtagaacctccgccagcagccccttcccctgaagcttgcactcattgttcagatgattgggtgttgcc

SEQ ID NO: 891313 - DNA, 612 bp, Homo sapiens
gctgttggcgcagcttcagcagacttaaatgttcctgcctgccagctctgaggagagcaatgtatctcccagcacagcgctcaagctctgctaagggacagactgcctcctcgagtgaatccctgaccctcatgtctcctgatagggagacacctcccagcaggggtcgacagacacctcatacaggagagctccagctggcatctggcrggtgcccctctgggatgaagcttccagaggaaggaacaggcagcaatctttgctgttctgcagcctctgctggtgatacccgggcaaacagggtctggagtggacctctagcaactctagcagacgtacagcagaggggcctgttagaaggaaaactaacaaacagaaaaggatagcatcaacatcaacaaaaaggacgtccacacaaaaaccccatccgaaggtcaccaacatcaaagaccaaaggtagaaaagtccacaaagatgaggaaaaaccagcgcaaaaaggctgaaaattccaaaaaccagaatgcctcttctcctccaaaggatcacaactcctcaccagcaaggaaacaaaaatggacagagaatgagtttgatgagttgacagaagtaggc

SEQ ID NO: 891314 - DNA, 504 bp, Homo sapiens
aatgtgattcatttaatattcagaacagatcattaattgagaggtgtaatatccattgaatatttttcaactgaaatttaaaagaaatctgtttttaaaatttactgtaaattagtatgtgtgtgtgacctatcacttctacatcgttccttttacrtaggcaaaataagaagtttaggttaccagttgagaaggtaaataaattggttgtaaaaatttagagataagaaagtgatctgggtagtcttgggcaacaaatctgaaacatagagaatttcacggaaattagaattattcaaataatatgcctcttacatttttatactgtttaattaattgctgcaaaattcttatggtgaagaaacaaatctattttgaatttaattaggcttcaaatcatagaaatgactttgacagctttggaggacacagcaggatttttctatgcttattaattagataatattagtgaaacactctaaagatgaacagtgttatataaac

SEQ ID NO: 891315 - DNA, 568 bp, Homo sapiens
ggatcatgagaaggcttcccccgtgctgttctcctgatagtgagttctcaggatagttagttaatggttttaaaagtgtttggcagttctcccttggctctctcctgctgcctagtgaggaagatgcctgctttcccttcgccttctgctgtgattgtaagtttcctgaggacttcccagccacgaaaaactaagtcaattaaacgtcttttatttataaattacccagtctcacatagtatctctatagcagtgtgaaaacagatgaacataagtatcatttcaaaaatgcccagtgtactaaagtaatagactttctctatgtaagcatcagtgtggggctattcaggaagatcatcaatacctcacttcctattasttgggaaagccacagtgggagtgtaccttggtggtgggagagaaggggttaccttaggaacagaatacagagtctgcagtccctgattgggactgtgtgagttaagtggagtaggtggatgcgtaaacagaggaaaggaagaaaacttcctttctttactggtttatctatgctgcttacgtaaatcat

SEQ ID NO: 891316 - DNA, 659 bp, Homo sapiens
agcctgtgattgttactttacatgactaataatggctttgcagatgtgattacatttgtgattttgagataaggagattattgtggattatcccagatgggtcctaaatgcaattacaagtatccttatgagagggagatggaggaaggtttgacacagacaaaagagaagaaggcaaagattaaagtgatgtaaccacaagctaaggaatgctggcagccatcagattctggctgaatcaaggaatgaattgtccattagagcctctggagggagtgaagtcctgacaatgccttgaytcagatcctactaaagtgattttggacttctggtctgcagaattgtgaaatgataaatttctcttatttaaaactaataaatttatggtaagttgttttaacagtcacagaaaacaaatacgataagtttagaaaataacaaagttgaattttttttattccagaaactctccctaggccttcccttcccttaccacatacttcccagaacctcagattttacttttttgtgaccttcaccatatacgcttttagctatcttatctctgtatcccaaaatgtccagtaaaacaactggcacatagtaggagttcaataaatacttcttaaatgatcaaatagagctcaaggtacatggtc

SEQ ID NO: 891317 - DNA, 654 bp, Homo sapiens
tatttgtctaatggaactgaaccaagtaaattgaaagccttctggagaaaatttatcattctagatgccataaagaatttgtgatttgtagaaagaggtcaaaatatcaacatcaacaggaatttggaagaatttagttccaaccctcatgcatgatcttgaagggctcaaggcttccgtggaagaagtcactgtagatgtgatcgaaatagcaagagaattagaattgggagtggagcctgaagatgggactgaattgttataatctcatgatcaaacttggatggatgaagagttgttcttatggacgagcaaagaaaaacaatgttgaaatgacagcaaagaacttagaatattacataaacytagttgataaagcaatgtcagggtttgagaggatagaccccagtttggaaagacgttctactgtgggtaaaatgctatgaaacaacgttgcatgctacagagaaatagttcatgagaaaaggagtcaatcaatgcagcaaacttcaccattgttttattataagaacttaccacagccaccacaatcttcagcaaccactaccctgatcagtcagcagccatcaatgtggaggcaagaccctccaccagcaaaaatattacaactcactgaaagctcagatgatggtc

SEQ ID NO: 891318 - DNA, 635 bp, Homo sapiens
atgtctgaaacctggggattaatttgggtatcctttccttcttccatgcccagtgatggcaaacaggcaatcacagaaaccatggcccaccaaaggccaggcaactacaggctcaactccctatgcaaactcttatgctagaaaaatgttgttcataaataatttaaaatgttgaaaaaagaggaagaattaaataaaggaaaaagtgaaacaaaaatgaagcaaagcagaaagggttagagcacctttaaaaaactgtgagaatctatagcacttgattctggggatgaacttagtgcacactctttttagtaactacatgttcttaccatgtttacagaatgactgtggattttctgtcagtggtaggttggtactaratcaatgctggtatttttgtttcatttgcacttctgtgctggtttcctgcagtgagttgtgtggaggtgggtccagaataattgtttcattggtgtttgtttattcattcactgagtgttttatttccatctataccaagtgggttgggagctcgaaagaagaaaaaaagaacaattgttcataacataaattcatgttaagaaccactgataaacaacttaattatctagtaattccacgaatcctgaatttta

SEQ ID NO: 891319 - DNA, 607 bp, Homo sapiens
ctagaattaataaatgacttcatcaaggtcacagtacataaccacacaaaaatcaattgcatttctatacactgccagtgaagagtctgaaaatgaaactaaggaaataattccactctcaatagcatcaaaaagaacataattcttagtattaaatttaaccaaaaatacgtaagagttgtatgtcaaaaaagataaaacatcactgaamaaaattttaaaatcttaaacaaatggaaagacaatttatgctcatgactcaggaaacacatattgttaaaaattcaatactttccaaattaatctataaggtcaacacaatttatcaaaatccctgctggcttacatgcagatattgacaaagtgatccaaaaattcatgtggaaatacaaagaacccaaaataaacaatcttgaaaaagaagaataaaattgtaaggctcatacttctgatttcaaaacatactataaagtagccaagaaagtgtggtactggcatagggacagacatatatatcaatgttatataattggtaatccagaaataaacccttacttctatggtcaattgttttttaacaaaggtaccaaaaaattcaatgaaaaaa

SEQ ID NO: 891320 - DNA, 592 bp, Homo sapiens
tggtttgtgtatttgtttcctctggctgtcttgaacaagtcctcacaaactgggtaacttaaaacaacagaaatttattctgttagagactagcagtttgaaatcaaggcatcagcttggttggtcccttctggagggtctgagcgagaatctgttccatgcttctctcctagtgcctggtggttgctggcaatctttggtatcccttggcttatagacatatcactccaatctctgtctctattttcacatggaattctctcctgagtgtctgtgtctttatgtggcattctcctctctgtgtgaccaaatttcccatctcaccagttagagttaccctaatccagtatgattcctcttaatttgattacatctacaaataccctatttccaagtaaggycacattctaagattccaggtgggcataaattttaggggacactagtcaacccaatacatgatatgtatgtaaaaatcagtctcactttttaatagacattacagtacttacaaaaatatttttattttatccttattttgttccagacattgagttaaatttcctcttttgatcttcacagtaatcctgag

SEQ ID NO: 891321 - DNA, 621 bp, Homo sapiens
accagtaacaggtaattcactgctaacagatctctttccctaagccttgttagatactgagcaattcacaagtgtattttttgagtaacaaggaagacgagtaaaacagcaagtgcttcatttgttttctagcctgagttgaaactaagcagctccatgctggcagcactttgtgaagaactctgtaatttatattgctttccaaggaagttggaacttcctgtggattactgggtttttgacatataaagagaatgttctcatcacttaaactggtgagtgaagtccccattttataaatcaaataaacattttagaattttcttgggaaataaaaaatgttttacatttccaaaatatactatastatcatttcaatgagatttctataatgttttctgtaatatttgacatactcctttccttgaaagaatcttatagaaaaatatttatatgtatatatatatatatatatatatatatatatatatatatatatatatataggtgtatacacacacacagacttgcactggctttggggtttacttccatgtggtggggtgttaacgggtccttttgtcccttgtgatatctgtgtttatgttgattctcggatct

SEQ ID NO: 891322 - DNA, 575 bp, Homo sapiens
ttaacattaatctgagatctttctaacttcttgatgaaagtgtttagggctgtaaactttcctgtttttactgcttttgttacattctggagatgttatttcccaatttttattaattgcaaataattttttcatttctgccttaatttatatgtttacccagaagttgttcaggagcaagttgtttaacttccatgtatttgtgtacttttgagagatcttcttgatattgatttctatttctatcaatcttcttgatttctatttctattgtactgtggtccaataatatacttgatatgatttaaatttttwaaaatttattaagacttgctttatgaccaagaatgtgttcaatcttagaatatgttccatatgcagattaaaagaatgtatattctgtagttattggttatggtagtctgtagatgtctattaggtctaatcagtcaattgttgagttttaagtccagagatctttgttggttttctgccttgataatctgtctaatgctgtcagtggggtgttgaagtctcccaccattattgcgtggttctcgaagtcttttcatagg

SEQ ID NO: 891323 - DNA, 547 bp, Homo sapiens
atttggaccatttaaggtgatcaggaagatactttgtgtaggttaggccctatagttaattctaatgatatactttgtgtataacccgtcataattagaaattttaaaatccctttttcaccttgaacttactggggtagttttctccattgtcagtttatgctcaggcaatgcaagtgaaattttatattagtccattacaaacataattttattttattttattttatttatttatttttgagacagagtctcgctctgttgcccaggctggagagcagtggcatgatcttggctcactgcartctctgcctcccaggtccagtcaattctcctgcctcagactcctgagtagctgggattacaggtgcctgccaccacacctggctaatttttgtattttttagtagagattaagtttcacctgttggccaggctggtcttgaactccttacctcaggtaatctgcctgcctcggcctcccaaagtgctgggattacaggcatgagccactgtgcccggcctaaaagcataattttagatctgt

SEQ ID NO: 891324 - DNA, 625 bp, Homo sapiens
ttgagatttcgatctgacaacagccccaatcatatgggattcaaggtcaagtattctatagattatatatattttttaacttttattttaggttcaggggtacatgtgcaggtttgttatataggtaaacttgtgccatggggctggttrtaaagattatttcatcacccaggtactaagcctagtatctaatagttattttttctgctcctctctcttctcccaccctccaccctatcaaatgaaaacaacatcccatgctcatagatcggaagaatcaatatcattaaaatggccatactgcccccccaaatttacagattcaatgctattcctatcaaactaccatgacattcttcacagaactagaaaaaaactattttaaaactcctatggaccccagaaaaacccaaataaccaaggcagtcctaaactaaaagaacaaagctggagccatcacaatacctgacttgaaactatactacaggggtacagtaacgaaaacagcatggtactggtacaaaaatagacacatagaccaataaaatggaatagagagctcagaaatagggcctcacacctacaggcatctgatcttcaacaaagctgacaaaagcaagcaatg

SEQ ID NO: 891325 - DNA, 589 bp, Homo sapiens
gctcaaaacccttcaatgtcttcccatttgtatcagtttccttttgctgctctaaccaatgaccacaagtggtggcttaaaacaacagaaatctagtctcttaatgttctacagtgcacaagtccaaaaattggattttatggaactaaaattgargtgccaatagggctgcattccttctggaagtttcagggttgggagcagaaatctggctgcatgcccttccagtttctggaggctgcctgcctcagctcgtggcccctttcacgagtgactcaagcctcttgctcctgtcaccacgtcttctactcctacctctgaccctccttcctccctcttatgaggacccctgtgattacattgggctcacctgggcaatccaggatactctccccatctcaagattccaaagcccataagcaaagtctgtttccctacataaggtaacaaattctcatatactggtgattaggatgggagcatctatgggggtgtccatttcacacagagtaaaagcccaagtcctgacaatgtcctactagttcccaggtgaaccagaccccacttcctgtataagctcattggttac

SEQ ID NO: 891326 - DNA, 589 bp, Homo sapiens
gctcaaaacccttcaatgtcttcccatttgtatcagtttccttttgctgctctaaccaatgaccacaagtggtggcttaaaacaacagaaatctagtctcttaatgttctacagtgcacaagtccaaaaattggattttatggaactaaaattgaggtgccaatagggctgcattccttctggaagtttcarggttgggagcagaaatctggctgcatgcccttccagtttctggaggctgcctgcctcagctcgtggcccctttcacgagtgactcaagcctcttgctcctgtcaccacgtcttctactcctacctctgaccctccttcctccctcttatgaggacccctgtgattacattgggctcacctgggcaatccaggatactctccccatctcaagattccaaagcccataagcaaagtctgtttccctacataaggtaacaaattctcatatactggtgattaggatgggagcatctatgggggtgtccatttcacacagagtaaaagcccaagtcctgacaatgtcctactagttcccaggtgaaccagaccccacttcctgtataagctcattggttac

SEQ ID NO: 891327 - DNA, 585 bp, Homo sapiens
agcaagaaatttgttggcatataaaagaataaagtgtgttcacctatggccaataatttcttaatgcctgtgtactggataaataggtcaataagagtactttttaaaaggctggaaataagaatcctggctagaaaatttaagaattctgttagtgatttattaataaatatttttataaataactgattcggacttcctgggcaaatatcctgcaaagaattaataccaacatgggaggatacttttttttggcatgctatttaaaaagaaagtcaagtctcttagctaaatgtgaggcttgatctcatttaggtatataatctctctcagaatgttaatatgatgttactaagtccacttcagcccaayggtgtcacataacgatatatcaaatgcacatactgctgagctactaaggaatattcaaaaggagtctctaaagaaaaaattatctctgtccaataatttctcttggagtttaggtcctggcaaataaatttcactctgagaaggcaaagtatagtgttgaggagatttatagaactgaaagtttcttactcaggtagaagtttccagggggcc

SEQ ID NO: 891328 - DNA, 687 bp, Homo sapiens
tggaggagtctgttagacttctctaatttcacccttcaggtgatgcagaagtctctactgccgactacctgccctcacacacacatacacagaaggtggagcacatctagcttggattttagagccagtctacatgagtctgtatcctggctcaaccattcwctacttgtgtgaccttgggcaagtcctttgagctctctgagtctcagtttcttcatctgtaaaataggcataatttcaccgttgtgaggtttttgcaaataaggtaacacactgcaaaacattcagcaccactctggtgtatagttaagacctgataagtgtcagccattgtcttttatcattagggatgggcatctcttgccaccccagtgaaacagttccttgtcctgtctctttctttgcttctgcctcccggggcactcagcccaaggcaaatgtgcctgaagatgggggttagtcatcaggttcccctgcctcagaggatgagagcatgactgctgctctctgcccagtctcctaagaaatctgattcatgccttgccagtactctatgaatatgcatacttcacctgcagccctgtctcctttcacaatgagctcagtcatttgtacctcctgggtcatgtgcagacatcctcagtattacccactgatgggtgttggagaaactgctaagaagatgag

SEQ ID NO: 891329 - DNA, 579 bp, Homo sapiens
tttttattataataaacaagaagtcactaagtccctgggtgggggaagggagataggagggaaataaacacagacggcagcacaagacaaagttacctgtgtcacctgccacacccctcagccttggttcagcagcctcaggttcagcagcctcagcaagcactcagctccctgtctacctccgtgtgcaggaggccactctccatccctcagaacatcccccaccagaacacccaagctccgccaggcccagatcacagtgagtgaggcccagaaggatgcagaggccccttcctctgccaaagccctgccttcctgactcaggacctgccagaggatcaactccctctagcccsaaggcggggatggaaacagcctgccatactcctcctctcgtacccaggccagatggccctgctcatcactgagcccacttacagcctgggaatcctcaacacaggccccgctgaattcactggggtccttgggttccattaaccctaactgtcctccttgacttacggcctcagtaggacaaccagctcagatggtagtcccataaacccagataggagaggt

SEQ ID NO: 891330 - DNA, 587 bp, Homo sapiens
ctgctggggtttgggtgggggctgcagcccacctgtgggccagcgtcctgtggccaggcaaccccaccctgctcctctgtcaccagagaccaaccctgatgggcccagggtcagggaggaggggctcatcccccttgagtctgggtcaattgtgaggtgggggtgagcaacgttggactagaggccaagcagttccagaggttcagagagtctsaaaactgtgtccaggaccctcttgatttaggtgatgcctttttcatctcttttcaaagaactcaatcaatctttttgggaagacaggaaccacatatttcttgtgaagacaaggacacgcccttgtgtccctggcacctggcacatagtaggtgctcaacaaacatttgttaaatgaatgcactgtgcaaaacaaggtctaatctgtcctcccctgccctctgtagatggagtaagaccctcctccaccaccaccgcctgaggaacagcacagtagaggtcagaaaggttaaggggcaggcacagagcctggagtagaaccatgattccatacttaccggttaccaaaactctgcctcagtttccttgtctgt

SEQ ID NO: 891331 - DNA, 656 bp, Homo sapiens; identical to SEQ ID NO: 889819

SEQ ID NO: 891332 - DNA, 604 bp, Homo sapiens
actaattttttaaaataagtttttgtagagacagggtcttgctatattgcccagtctggcctctaactcctgggctcaagtaatcctcctgcctcatcctttcaaagtgctgggattataggcatgaaccaccatgcctgcccctcctccttcttttaagaccttgtgtcaggagaaaagagagggtccttgggcatggtggctytctagtttaaggggccatatgcttttgtctgcctagccgctaggtgccctactgggctcccaggccgtagtctgcctccagggagcttgtggtctgttcctctcatgcagagagcacttcctgtggctcctcctgcagattaagtctgtttgctccagttagagctgagaacactctgagttctggctgactcccatttagacacagcagagctggcccaggggatctgcccagtgcctcactgtacacccaccccccttatcttctgaaaaaccccttctagaaactttccagccagattatcaattactttcaggtttctggaaaactaaagctaagggtttggaaaagctaacttgagtctttccactatctgatcattctgcccctccaggttag

SEQ ID NO: 891333 - DNA, 647 bp, Homo sapiens
tggtcatgtgccatataatgatattttggtcaacaaggtaccacatatatgaccgtggtcccataagattaaggtcatgatgccatatttttactgtggcttttctatgtttaaataaatacttaccattgtgttacaattgcttacaatattcagtasagtaacacgctgtacaggtttgtatcctaggagaaatagcctataccatatagcctaagtgtatagtactttttaccacctaggtttgtttaagtacactctgtaatgtccatacaatgaaatcacctaatgatgcatttcttgtaatccatttttgtcactgagcaccacatgactatatgtaagttataatcaataggggatcagaaaatgtctttcacttactctgtagagccaagaattgagatgaaataaatatggcatagacactgcaaatttttcttacatgggaatttcctgcaaaattttcttacatgggaatcaagtccttgacttttttcaatcatatccaaatgtctaaaaggaggtataaattcaccatctggaattcttgtctagttgatgtatttgatgaagttttgttttgctttaccagaaaactttttccaccctggcctgtgccctctgtgtattgctaaagttgaaga

SEQ ID NO: 891334 - DNA, 626 bp, Homo sapiens
cggtggtgacaaaatctctcagcatttgcttgtctgtaaaggattttatttctccttcacttatgaagcttagttgagctggatatgagattttggattgaaaattctttcatttaagaatgttgaatattggtccccactctcttctggcttgtaaggtttctgcmgagatatccgctgttagtctgatgggcttccctttgagggtaacccgacctttctccctggctgcccttaacattttttcattcatctcaaccttggtgaatccaacaattatgtgtcttggggttgctcttctcaaggagtatctttgtggtgttctctgtatttcctgaatttgaatgttggcctgccttgctgggttggggaagttctcctgcataatatcctgaagagtgtttcctaacttggttccattctccctgtcactttcttgtacaccaatccaatgtatatttggttttttcacatggtcccgtatttcttgcaggctttgttcatttattttcactattttttctctaatcttgtcctctcactttatttcattaatttgatcttcaatcactgatatcctttcttccacttgatcaattggttattgaagcttgtgcatgtgtcac

SEQ ID NO: 891335 - DNA, 617 bp, Homo sapiens
actaaatatggaaaagaaagactattactagtcactacaaaaatacactaaagtaaacagaaaaatgacactataaagcaaccatgtaaacaagtttgcaaaataaccagctaacatcatgatgtcaggatcaaattcacagatattaatactaaccttgaatgtaaatgggctaaatgccccaattaaaggggacagagtggcaatatggataaagaaccaagacccattggtatgctgtcttcaagagacccatctcacatgcaatgatacccacgggctcaaggagatggagaaaaatgtaccaagtaaatggaaaacagaaaaaagggggggttgcaatcctaatttcagacaaaatagactttaaatttacaaagaccataaaaagacaaagaagggtattacataatggtaaagggtttayttcaagaagaagacctaactatcgtaaatatatatgcatccaacacaggagcagacagaatcataaagcacactcttagagactttcaaggagacttagactcccatacaataagaatgggagcattcaacaccccacggagagtattaggcagatcatcaaagcagaaaattaacaaagacattcagga

SEQ ID NO: 891336 - DNA, 637 bp, Homo sapiens
ttaatgatgataatgataatgagaacaatttgaattatatttcttaagctttgctatgaaccaataccatgttaggtgctttgcatatattttcttatgctttcttcagcttaccttgttagataatgttcatcttcctcrttttcagatgatttgatagagatttggaaagcttatatgacttgtttgaggtcacttacctggaaagtggcagaattaagatttcaaacaaggtctgccattctctaaaacgcaaactctgagttactacagtatgtaattttcccaagttaaaaatttaccacaaagagatttccctccaattttttaggcaccaactcttccataagaccaagaaacctgtagtttctctccactgccatcactgcaatacatcagtagtgtacaatctttaccattcagaaggtttcacatctcaaatcaatcacattttattttattcccattcactttaaacttttttctttcttttatcaaaaatgttcagaattccataactatatgatgccttataagtgccatttgactttaaaacttcaaattaccacattattattcatctgtgggcatggcccctagcatagaaaaaatagcaggcagaagttgaggtcccact

SEQ ID NO: 891337 - DNA, 540 bp, Homo sapiens
gcccagctaatttttgtatttgtagtaaagactgagttttgccatgttggccaggctggtctcgaactcctggcctcaagtgatctgcctgcctcagcttcccagggtgctgggattacaggcgtgagccaccgcacccagcttcagaattttctttcaccactgcccttcagtgtcaccctgatgggttacaactgatcttaccacttcagcctcccaactagctggggctacaggtgcacaccaccatgcttggctaatttttktacttttgtaaagatggggtctcactatgtttcccaggccggtcttgaactctggacctcaagtgatccacctgccctcagcctcccaaagtgttgggattacaggaatgagccacacccagcccagaggcatttctttcaactgccccctgaacaggaaaattcactcgctagctctcaaccttctcaccctcctctattcatctgtcttcattcaaggcagaatcttctgaaacatcctgcattcttcccttttcaatgactcccacattcc

SEQ ID NO: 891338 - DNA, 590 bp, Homo sapiens
ttccctaactcattttatgagaccagcatcatcctgataacaaagcctggcagagacacaacaaaaaaagaggattttagaccaatagccctgacgaacatcgatgcaaaaatccccaataaaatactggcaaaccgaatccagcagcacatcaaaaagcttatctaccacgatcaagttggcttcatccctgggatgcaaggctggttcaacatatgcacatcaataaacctaatccatcacataaacagaatcaatgacaaaaaaacacatgattatctcaatagacgcagaaaaggcctttgacaaaattcaacagctcttcatgctaaacactctcaatawactaggtattgatggaacatatctcaaaataataagagctatttatgacaaacccacagctagtatcatactgaatgggcaaaaactggaagcattccctttgaaaactggcacaagacagggatgccctctgtcaccacttctatattgttggaagttctggccaggacgatcaggcaagagaaagaaataaagggtattcaattaggaaaagaggaagtcaaattgtccctgcttgcagatga

SEQ ID NO: 891339 - DNA, 533 bp, Homo sapiens
aagggtgttgaattttatcaaaggccttttctgcacatattgaaataatcatgtggtttttgtcattggttctgtttatgtgatggattacgtttattgatttgcgtaagtggaaccagccttgcggatcagggatgaagccgacttgatattggaggataaactttttgatgtgctgctggattcggtttgccagtattttattgaggatttttgcattgatgttaatcagggatattggtctcaaattctctttttttgttgygtctctgcgaggctttggtgtcaggatgatgctggcctcataaaatgagttagggaggattccctctttttctattaagtggaatagtttcagaaggaatggtaccagctcctccttgtacctctgatagaattcgactgtgaatccatctggtcctggactttttttggttggtaagctattaattattgcctcaatttcagagcctgttattggtctattcagagattcaccttcttcctggtttattctggggagggtgtatgtg

SEQ ID NO: 891340 - DNA, 603 bp, Homo sapiens
aatacctaatttattgagagtttttagcatgaaggttgttgaattttgtcaaaagccttttctgcatctattgagataatcatgcggtttttgtctttggttctgtttatatgctggattatgtttattgattttcgtatgttgaaccagccttgcatcccagggatgaagcccacttgatcatggtggataagctttttgatgtgttgctggattcagtttgccagtattttattgaggatttttgcatcaatgttcatcaaggatattggtctaaaattctctttttttgttgtgtctctgccaggctttggtatcaggatgatgctggcctcataaaatgagttayggaggattccctctttttctattaagtggaatagtttcagaaggaacggtaccagctcctccttatacctctggtagaattcggctgtgaatccaactggtcctggactttttttggttggtaagctattaattatttcctcaatttcagagcctgttattggtctgttcagagattcaacttcttcctggtttagtcttgggagggtgtgtatgtcgaggaatttatccatttcttctagattttcttgttta

SEQ ID NO: 891341 - DNA, 606 bp, Homo sapiens
agatttttttgaccgaggatcactgtgctccttcaggatccaccagaaagtgctggttagcctgataggccctggtttgacttacatctagcaagaccttcatctggtttgcaggagtagatagggggtcacttggatgacagggactccagtccagaccccattctccctcattccctcctgcaaagttcaatcctcacagtcctctgaggctgtggcaagtgcagaaacagaactgcgcctatccaaagtgcctcccttcccctggactcatgccaaggcttcctccctctgacctgtcccttgtctttgcatctagggtggatgcttgccactgaccctctctccccaggtttccctgctagactgactttctgccsctgggattgggtggggcagccaatggaacctcatgcagaccagggtgaaatcaaagggccttggaaactcacagccccacatccaggccccagtcctttcagagtctcagatccaagtccccagtttatcagggatgtggctctgtgaaagccagagaacccggtccccagggctgctgccatctctctcctcctcatttactctggcccccatcagctcctctgg

SEQ ID NO: 891342 - DNA, 654 bp, Homo sapiens
tgtcagtggatctatcattctggagtctggtggccctcttctcacagatccactaggtagtgccccagtgggggctctgcgtggggctacaaccccacatttcctgtctgcagtaccttagcagaggttctccatgagggctccatccctgaagtgaacttctgcttggacttccaagtgtttctatacatcctctgaaatctasatggaggttcccaaacctcaattcttgacttctgtgcacacggaggcccaacaccacgtggaagctgccaaggcttggggcttgtaccctctgaaacaatggtctgagctgtacattggtaacggctggagcagctgggatgcagggcaccaagtcctgaggctgcacatagctgaggggcactggattcagcccaggaaaccatttttccctcctaggcctccaggcctgtgatggcagaggctgccctaaaggtctctgacatgccttggagacaatttccccattgtctaggtggtgaacattcaattcctcatgacttatgcaaatttctgcagccagcttgaatttctccccagaaaatggggttttcttttctatctcattgtcaggctgcagattttccaaacttttatgctttgctttgtcaaagcagttttctctgattt

SEQ ID NO: 891343 - DNA, 567 bp, Homo sapiens
catgatagaagccaatgaggggccgggctcggtggctcacacctgtaatcccagcactttgggaggctgagggaggtggatctcaaggccaaaagatcgagaccatcctggccaacatggtgaaaccccgtctctactaaaagtacaaaaattagctgggcttgrtggcgcgtgcctgtggtcccagctgcttgggaggctgaggcaggagaatcgcttgaacctaggaggcagaggttgcagtgagccgagatcctgccactgcattccagcctggcaacagagcgagactccccagtctcaaaaaagaaaaaaaaaaaaagaagccagtgaggaaaaaacaaaaactgcctgggtcagtagaggaagggggtggggatgtgtattgaaagaaaaggaagaaaaccagaagacgggggtgttttagagaccaagaaataatagaggttcaagaagatgaatagtaccaaacactatagagagggttaattaggattggaactaaaagacatttattgccttttttttttttctttttaaaggagtggggtaatttgggacttttcc

SEQ ID NO: 891344 - DNA, 591 bp, Homo sapiens
cacaatcttgttagtcatccctggttggaatagccctagttcactatggaaatttgctctgaaatacaggtaatgctgtatctggaattcagtggctatcctcaatggagtgagaacaaatagatagtaattgaagcaccagcctcaggcatataagrctccattgctgcttttttttttttttttttttttttgagacagagtttcactcttgttgcccaggctggagtgcaatggcgtgatttgggctcactgcaacctctgcctcctgggttcaagtgattctcctgcctcagcctcccgagtagcttggactacaggtgtatgccaccatgcccagctaatttgtgtatttttagtagagacagggttttgccatgttggccaggctagtctcgaactcctgacctcaggtgatcctcccgcctcggcctcccaaagtgctgggattacaggtgtgagccaccatgcccagcccattgctgctttttagacttcttgctgtccccagaattagctcccaccccatcccactgtgttctacctctcccttggcttggggtacatggtaggcttgggcatctaactgga

SEQ ID NO: 891345 - DNA, 641 bp, Homo sapiens
ttaagtattcatattactttatattattttttgtaatatatttcttatctaaatgcatatgtagtttattaaaattgtagtcataatgcccacgaaattttttttctgtatttttacttaatctgttatacaattttaaaattatttttaataactgcacaaaatattattgaagcaatatgctgtagttaattattcccatatgttggacatttaattktctcaaatttgtcatcactattttgtaatgaactttaaaaaatacatttttctgtattttggattacctccttagattctcagaagtggtactactgtgttaaagactctaatatattttattgtctggacataaactgccaatttgctacccattaatattgtggcaattcatgatgacagctaccctgtagaacaaatcagttttatgaaaaactttcaagtacttattattgttatttccaattttagctaacatagtatggctataatagcgttacatttctggtttttaaaatgtgttttaatacatctaaaattagatatttagtcaactgttcacctactattagtatttcttctcttgttgcatttctgtttaccatatcaattaatatggccttttagtattaaatttatat

SEQ ID NO: 891346 - DNA, 477 bp, Homo sapiens
ttttctttctagaagctttatagttttatgttttaaatgtaggcctacagcctatttgattattgtatatgatgggaggtatgaactacagtttttcattttttttttttttttttttttttagtttttgttgttacttttgcatgtggttatctgactgttttatcagcaatttctgaaaatccacttaaagatgcttttggctctttgtccaaaatcagttgtccatatttgtgtgggtctatttatgaactttattttgcctatcttcatgccaatatcacactctcttgactactgtagctgttcttccwaatagattattttcagtttatctcatttcctctgaaactccaatggatcttatgttagatctttttatcttgcatgtttattaaaatttctccccaattttctgtctttgttactgttcttcatttttttatagttttcatttgatcctatcatttgattatt

SEQ ID NO: 891347 - DNA, 641 bp, Homo sapiens
ggaggcagggagaggatgcgagcctggcactgctctgagactatctcagttctgctacttagtagctgtgtgactgtgggcaagctacttaacctctctgtgccttagtttcctcatctagacatgaactacctctacctcttgggattgtggtgaggggtaaatgagttaatgtggatgatccctggaccatgcccgacaaacagcaagtgccctgtgtgttagcaattattatgatgattccattattgtagaagacagggggagaggggctgcttcgcaacggccttgcagtcaccaggttgagcacacataggagcaggtggcccaagtcgcccaggtrtggtagtttcagtgctgcttccccagttggctccttgtccacaggtccacagcgatggcacagcagcagctccaggtcctggaggacagcccggctgggctctctgcctcctgacttctcctcttggttgtctgaactccttcgcttcctgacatctcccccagccctgccctttcagctcttctttatctaccctgtccgctctttcctgtggattctgatcctcagacgatggggcctggagtgtggctggggaggccttcatggtggtctgggatttggctggagtattcacagc

SEQ ID NO: 891348 - DNA, 631 bp, Homo sapiens
gtatcgctcctctaactttaaatgtgtatttctttacttctgtgtgaacagacagggggatagatttaaggtgaacagctggaaatatgggaagagaagatattccaaaaggaaggtacctgaatggacaaaggcatcgttwcctccaacagtactgatgccatcatctacccttttgtggattttactatgtttcagacaatacagttttatttattctgcacagaaaaccttaaaaaataagcacttctctaatcattttgtaagtgaaaatccaaattttcaaagaagaatcttgatttacttcattagggaaatgcaaatcaaagccacaatgagaagtcacttcctacctactaggatggctataataaaaaagatgaagaaaaaaataagtcttggcaagaatgtggagaaattgtcatcttcgtgcattgctggtaggaatgtaaatggtgcagctgctgtggtaaacagtttggcggttcctcaaaaagctaagtatagaattatgctatgatccagcaatttcactcttaggtatgtatctaaaataattgaaaacaggtcagaaagatacttctacactgaaggtcattgcagcattattcacaacagcctaaaggtggca

SEQ ID NO: 891349 - DNA, 647 bp, Homo sapiens
acctgacatgtaaaatgcaatgagtcaggaaagcatggcaccatgcagtgtgatgtgtgaggaggaaaaatgaaacctgtaaaacccagtgaccaaacagagcctagaagaataaacatacttgacattaagtccaacagctatttgcagaaagatgggagaggcaaggcttaaaggaatacctttatatgatgaattaatcccyagggtcagacgctggcctaaatccattgcttatgggaatcatatcatggtccactagccccaagcaacattcttacctcttagcctttgttcagaccatgtcacctgcctgaaatgccttaatcttttcttctgcatacatggatgttacccatcattcaaaacccagctgaagtgaccctctaagagcccagttcaaaatgccctctccctctcctgagccctcaactcccctggcaggcttctacttccttccctgacttcacgaacttcacccatccctaattctcatgacttttgctagatcataagagtcttctggaccaggaattgcttttatctcctctgtgtcctttttggtagctcagcaatttttgcaacagcaggagcctgacatatattgactgatacaagattaaaatagaaaccccagtaaagaggac

SEQ ID NO: 891350 - DNA, 695 bp, Homo sapiens
ctgtttggatctcagttatcagtttccccatccttcccagttcttgtattcacattttcacccttgtctcatgatagcacaaggcttaacttcaaggagcaatagagggaagatgagtatctagccccctggtaacctgatggaggccatgccctcatgttcaagccttttttggttgaaagtaatgaaaactcatgcaaacaagcacaaataataaataataaatgggggttattatgcagaaagagacatctgggaaatccaagggcaggcatctttgggtggggacaaaggtagatttgaagtccatttggatcacattgaaccctctgctatgcgacttattcattgatgaccggccaaggaccygaggcatctgaacttagatcttgatttacacccactgcatcaaagatatgtatctgagaacaatatatggagcaagaaatgacaattttccatctagacacaactgtctgattactatattagacaaattacttttctgtgtgccttgcttcagtttgtttttctgaaaatgggtatgacaaaacatatcatgaaattgtatgtttttctgaaaatgggtatgataaaacatctcactagagggagtgtgtgatagaagaagaatatattagaatgtcatctatttttgtgctataacaacatacccaagactgggtaatttataa

SEQ ID NO: 891351 - DNA, 569 bp, Homo sapiens
atggtgtgaatgatggctgctgggaagggcccctgcccgaaatatttccatcgctcatccactgccaatgtgcttggagtctgccattccagagccatgccttcaccaagttcctatttcaaaatgcaagcacctcaaggcggcctaagagattatgtcctttatttctgggggaagggaacttttattttgatggatgccaaaactggtttgcatttcctgagtttaaagtaattctcttgcaggtgagagtagcctgctcagtgccaactgggagagcagaaccttccttccattcagtagttgggagggaactggggaggctgctggaggatgcctgctgctttatggagcatcctckgctttggctccaggtagacgtgggcttgaatcctggcagccgggtgaccttttgggatacactctgacttcctccttcctggagccaagtctctcatttccctgggacttagcacacacaggctgctggaatggcttcttccggaagaggagggatccagccccactgagtgggtatgtttcccaggagaggcctggaggctgatgcc

SEQ ID NO: 891352 - DNA, 579 bp, Homo sapiens
gggaagggaggcgattgccattccatttccaaaaactcccaggttgcagaacggcaggaggaggggcaggtctggcagagatagatttccaggctgagagtagattcgggccgagagtagagaggagacttacccaaggccatgcggcttgtaagttggacccaggagtagaactggcaagccagggttttgaatcagtatttgtggggtggggtggactctgtgtgctctcttgtggacctcccgacactctgccatggcctggtccagctgtgggctctgcaccgccayggagggagagaaggccatgctgcccctccctccccacccacataagcgtgcacactccattctgctccagctgttggagagtctggggcgggccgcatgaggcacctgttagtgagatgatggatgtgccgtttgcttccaggagaaggagccacaaaaggggatccagggaagggacagcaccagggctgtgtgctgggagagggggtcctgctatggtgcccagcagccttttttggagtcactgacagatggggagtgcagaggagggcaggggcggagggaagg

SEQ ID NO: 891353 - DNA, 637 bp, Homo sapiens
tgtataaccttggataaatgaccacaatctctctgtgtctgttttctcatctataaaaatgagataatcacagttcctatattacagagttactatgagtattgatgtcaaagtgcttagaatagtcactgacacatagtaggtaaccaccaacgttataataattccacaaatagttattattgaaatgattctggctgggcgcggtggctcatgcctgtaatcccagcactttgggaggccaaggtgggcagatcacaaggtaaggagatcaagaccatccgggctaacatggtgaaaccccatctctactaaaaatataaaatattagctaggcatcgtggtgggcacctgtactcccagctactcaggaggctgaggcagaagaaaggcgtgaacccrggaggcggagcttgcagtgagcggagatcgtgccactgcactccagcctgggcaacacagcaagacttcatctcaaaaaaaaaaaaaaaaaaaaaaagaagaaagaaaaaaaagaaagaaatgattccacaaataccactctgttctaggtgcagaggaaagagttcctggtccaaagagctctcatttcatgggcaagacagacagaaataagcaaattcaccacctgtcatgc

SEQ ID NO: 891354 - DNA, 587 bp, Homo sapiens
tcatcctggtttaatttttgctgccactttatgggctctttcaatgtgcctcatcacataagtaatgtcattttcatttttgtaaatcaagtctcctagattgttcacctgaaagcctgattctcctttagagaaaaaaaatgctaaaaaaacaaaacaaaacaacaaaaaaaaaaacaaaacattatatatcgcattacaattttattcaacaaatacagagrtttccagaatagttaaaataaagtagaaaacaactctggtgttataagagcagtaggttcatatgcccactgtgcagtaatagaccaatacactaagacagcagtttgcaacaaagaatttaatgatcacagggcagccaaggggagagatatgagtagaccctcaaatccatctcctcaagaacttctgcgttagggtttttaaggggattgtggagggtgaggggttggaaaattaaggttgttgattgggcaggggaagggggatgaaatcattaggatttggaaactgcatactgagtcagttcctcagtggggtccttcagaccagctgacatcagtagtttcactggtacacaggat

SEQ ID NO: 891355 - DNA, 496 bp, Homo sapiens
tctttgctaaagcataacaagagacctttcctctagttcccaactagttaccatttccatctgagaccacctcagcctggactttattgtccatatcactatcagcattttggtcaaagccattcaacaagtctctaggaagttccaaacgttcccacatcttcctgtcttcttctgagccctccaaactgtttcaacctctgcctgttacccagttccaaagttgcttctacattttcaagtatctttacagcagtgccccactacccagtaccaatttactatattagtccattctcacactgctaataaagacatacctgagacygggtaatttataaaggaaagaggtttaattgactcacagttctgcatggccagggataccccaggaaacttacaatcgcagtggaatgggaagcaaacgtgtccttcttcacatggcagcagcaagaagtacagagcgaagtgggggaaaagccccttataaaaccat

SEQ ID NO: 891356 - DNA, 508 bp, Homo sapiens
actcccaaaagatcacagtagctcaccagcaatggatccaaaccaagatgaaatctctgaattgccagaaaaagaattcagaaggttgactattaagccaatcgaggaggcagaagagaaaggtgaagttcaacttaatgaaattaaaaaaaaaaaaaaatacaggatatgagtggaaaaaactccagtgaaatagatagcakaaataaaaagcaatcacaacttctggaaatgaaggacacagagaattgcaaaaggcactggaaatctcagcaatagaattgcacaggtaaagaaagaacttcagagcttgaagacgaggctttagaattaacccaatctaacaaagacagaaaaaaagaataaaaaacacgaacacagccaccaagaagtttaggattgtgttaaatgaccaagcctaaaaataattgttgttcctgaggaagaagagaaatcataaagtttagaaaatacatttgagggaataattgaggaaaacttctgcagc

SEQ ID NO: 891357 - DNA, 635 bp, Homo sapiens
aaaaaagtgctcaaaagcatcaaatgccaaaaagagggcaactaagatagtaactattcagtggcctttgggcttggtaattagtgagttattattagctttagcgagagatcatttcagtggagaggttcagctgcatatatacttatacaaatatatctatagttgtatatatatgtgtgtgtatatattagggaaacatcaaacatcatgactgggtaatcaaagttatcagtgaaaaacacctgtaagggataagtgtgtatgtacatatatgtacacacacacacacacgcacacacrtgcacataaacatatgctcatatatatagattttagaaatcttgcattcatagcaatatttataatctcttcattatctaagtctttctggtttgaagtattctttggtattagaattataacctcttactttcttattgtttcaatttctttgctaagtctttgtttatccttttatatttaaactctgaattatcatgttttaaccatatgccttacacagaatatatagttgggttttactttatgagccaatttaaaaatcttttccccttaataagcaagttaaacctgttcgtatttgttaaaatgacatgttttgtctcaattct

SEQ ID NO: 891358 - DNA, 578 bp, Homo sapiens
ttccaggcagaaatttaagataatcattgcttttatctcatttgtttccctcttctcaagaatcacagccctgagctgccttttgttcactctctgaaaactgttatatatatacaaactgtctggtatagctgtttatggtggaaggagcatttaataggacttactcttttgttggcaaaagtgaagattaaataggatttttcacagtggaaatggagaggatgagcaactcagggaaagagaaaattgtaagcaaagacagtaaggggcaaaattctgtgttgaaagaataatgtactgkttgggtcaccggagagaactagttgaagagggaaaagaattggagatatggcctaaataaattgattcattataggcttcaaatactactctagtttaatctttatagttaggcaataaagtgttctttaaagtaggtataaactatcaaatgtggtgctcaattacccttttgtttttgttcataaacaatggtgggcttgtgccagataatgagtgatgatggccttactggagaaacaagagcaaggagagaatgtggagaaaaaatgaaa

SEQ ID NO: 891359 - DNA, 527 bp, Homo sapiens
ccacaacacatgaaaacttgtgagatgcagataaagcagtattcagggagaaatttgttgcactactaccaataatacaattaaagacaggcctcaaatcaatgacttcagatactaccttaagaagttagaaaaataaagcaaagtttacctaaagtaagtgaagaaataatgaggattagattagttattgaaataagtaaaatggaaaacaaaatcaacaaatctgattctttcrgaagacccatgacttttataatcctctagccatactgaccaggaaaattacaagcgacactcacaagtagtttctacagggtagatgagttgaatcattcctcataggacacaaattcacaaatttcaaaagcatgtgctcatcttaatggaatggagaaatgtctaatatctattacttgtgaaaactctgggtaaatgaaacaaattcagcttaacctgataaatgatatcttcaaaaactctacatccgaaatcatatataacaataaaagactaatgtttttcct

SEQ ID NO: 891360 - DNA, 688 bp, Homo sapiens
tttggttttctgttcctgcattagtttgctgaggataatggcttccagatccatccgtgtctctgcaaaggacatgatctcattcctttttatggctgcatagtattccattgtgtgtgtgtaccacattttctttatccagtctatcattgatgggcatttcggttgattccatgtctttgctattgtgaatagtgctgcaatgaacatactcatgcatgcttctttgtaatagaattatttataatctttgggtatatacccagtaatgggattgctgggtcaaatggtatttctggctctagatctttgaggaattgctacactgtcttccacagtggttgaactaatttacactcccatcaacagagtaaaagtgtttctatttcttcacaacctcaccagcatctgtgatttcttgactttttagtaactgccattctgactggygtgagatggtaactcattgtggttttgacttgcatttctctaaagatcagtgaacacattctatatttgataaaggacttgtgtccagaagaatacttaaaatactactaagaaaacaaatgacccagtaaaatatggggaaaatatttgaatgtatattttaccaaagagatgttgatagaaaacaagcacatgaaaagatactcacgattactagttcttagggatatatggataa

SEQ ID NO: 891361 - DNA, 572 bp, Homo sapiens
gtctaaccaaatgaaaagcaacctgaaaaacagttctagtaatatgacaaaacaaggttctttattatccccaaaagatcacaatagcttaccagcaatggatctaaaccaagaagaaaactctgaattcccagaaaaagaactcagaaggttgattattaagtgactgaaggaggcaccaaaggtgaatatgaactcaaaggaatttcaaaaatgttacaggatatgaacagaaaaatctccagataaataaatagcataaataagaagcaatcataatttctggaaattaaggacacacttagaaaaatgcaaaatacactggaaagtcttagcaatagaatccaacaagtagaaggaagaacaccagagcttgaagacaaggcttttgaattaacccaatcaaacaaagacaaagaaaaaaaaaawttaaatgaacaaggcctccaagaagtttgggattatgttaaacgaccaaatctaagaataattggtgttcccaaggaagaagagaaatctaaacgtttggaaaatctatttgagggaataatcaaggaaaacgtccccaacct

SEQ ID NO: 891362 - DNA, 661 bp, Homo sapiens
ttttctactaacttttcttcaactcttttttataataaaatcttctatgactaataatgcacaaatctccatgaattaattctggaatgaaggatagaaagattgggcacacatcttgtgattcagaattacaacagtcacagcttggccaacatggtgaaacctcatctctactaaaaatacaaaaattaggcgggcgtggtggcacgcacctgtactcccagctactcgagagcctgaggcaggagaattgtttgaactgggaggcagaggttgcagtgagctgagatcacacygctgcactccagcctgggcgacagaaagactgtgtcaaaaaaaaaaaggaattacaacagacccactgggaaatggactttgagaaatcatgaactatgaatctactttaagattcttatcccaaaagaagagccctctgtccatctgtgcaatagatttggaaatagagaaatggagaagacaagtgtgaattctgtacctgatacattgagcttttagtcctgagggtggtcatggaatcttttgatttttagcttcatcatgtgcaagatgggaataatgaagcctgtctcatatagttattggaagactcatagtatatgtgaatgcacctagagaagaatagactttattttttgaggta

SEQ ID NO: 891363 - DNA, 506 bp, Homo sapiens
agcgttttcttctaccgcactctgggagacttactgaaataattgtgtcatcgctccagtgaaagcatcctcatttctgtcctcatagggactttggagaaactcagttgtctactttctcaaaacttttacttgaattgctttgcatccctaactgaaatcttccagcccccaaggtcagggctatgatataccatggtaaccaacttcacctgcccctcaatcctgccaagctttggtgagattcccagggtggcgtcccaccaccagcaagtaggttcctgatcacccctctyagcaaggactgtttcaaactgtcccccttctcagacaccaagccactccccctcccactcaatcacagcagaagactcggattcctatcttacacagaaaatggctgttactggtggctgccagacctgcaaacctcctgctattttccattctttcctgcttcccgccttcgtcctgtccaaggccaaggtctccgtctgtgccctaca

SEQ ID NO: 891364 - DNA, 621 bp, Homo sapiens
acatgcacacacataaatattatataaaatatatacccaaaattatataatacataatatataatatttttatttaatatatatgccaaaagtttcatgaaataacagttagcttcagttctatgtattctgatattttctattctatggtctatttcctttttaaaaaattactgattacaatccactaataattgatttcgtgatctgttaactggctaaaatccagtttgaaatacactggctcactgtctatttttccagggttcaaatgatccatccaggggttttccagaggggtttactcccagtctcataaaaacatgaaaagcatatcagaaaaccttgatatattatctcaacgtaagcagtatagggtaagaataaaaatgggtgggctgtggaagaaaaatggctggttttagatccagctcagaagtaaacttctctgagctttaaattttttttattttaagtatactkatgtaatgatagctaattcatagaaatattgtggggctcaaaaggaggatcttatataaaatacatagcacagttattttcctacaaagtaagcacttaacaaatggtagccgttattatcagtcttagtactggtat

SEQ ID NO: 891365 - DNA, 601 bp, Homo sapiens
acataactccatggctaaaaccaagtaaaagtacttcattcaacagtgccacagatcaaaactattcttaagtcttgcctcccttaagaattgactcgaccccaaataaaattgccaagtgagcgaaatctgtctttcacttactcrtctacattctatgtccctttttaaccctctatcacttttcactttccacatcccatagatattagcatactgcctgaggccataatccttgagaaagatatctgaaatcatgctaatacttttttgtaaattaatttaatattattctcatgtgtattgacacttttaaaaaagacttctgagttaatagccctctccttgaatgatgtccatggcttaaatggcaaaatctatattctagagtaaaatatgccaaacctatatttccagctctaaaatatcttgcaagctccagacatacattcctggctaagaaccatagccagtgtggggtaatgtggtgaataacactggtttaaagtcttatatgcacctcgtagttattaacttgcgtgtacttccacttgaatgttgtgcttgcatctcaaaacacaacccaaactgaaattatcat

SEQ ID NO: 891366 - DNA, 571 bp, Homo sapiens
cacatggggaatccatgaatgctctttccctcttctccatctggaaaaactgtattcattctttaaaagacttgaaatgttaactcttctgttcttatcatagtataaaattataattatgcccttatatgtatctctcacatatataataatgataatgataattagcaatagtagcaaactagtgctttgagtgcttattagtagtgccaggcaaattgctaaataatttttataatgaagtcttcattctattgctgtgacaaatactacaattatcacccccatgtatgaagatatatgyatatatcttcatatatgcatttatatatatatatctttaaatctatatatatctttaaatatatatatatatataaacacatatatatatctttaaatctattttaaaagagaacttatgtgccctaatattctaatattgtgttgggtatgtaccagtaaatatatttattcagagaatcatcacaatgtgttctaagaagtcacaaatttcttagtgtagcttatatttttgcttgatattttcacctttgttccttatctccaa

SEQ ID NO: 891367 - DNA, 603 bp, Homo sapiens
caaatcttattgaaatatgcagtacagattattttccatgttgtttgaactatgtttttggccttggttagcaggagcctccccagtgtgctgagcgatttccacagcttcagaaccaagttcattgcagttcacagcttgtaccgtatttcatcgatcctaagacacaaattttttttctgattatagcaacttgaatgaatttcataattatagcagccatagtttagtgagtggcatttttaaaagggttcgtaatggcatataaaataggaatgtcacttcagtctatagcatcttaggtttgatgcaatgctgtatcagtctttccaatatctaaygaatagaagcaaagctaggcttaagattcagatgcagaaatacgattatggaaccctctcattccctatcatctgatgtggattattcccgcctttatttactgatctccccaatctgagggcctggagagagtctgtatgtttgtcttaccttagatctgttctgtcacctatcaagatcaaaaccctctgcccaggacctcctttattcttaatctaggggcgcctgtttccttatctggaagcaagtgtaccataattc

SEQ ID NO: 891368 - DNA, 638 bp, Homo sapiens
tctttgcaatgggtttgaacttcctcttttagctcagagaagtttgatcgtctgaagcctttttctctcagctcatcaaagtcattctctgtccagctttgttacattgctggtgaggagctgcgttcctttggaggaggagaggygctctgatttttaaaattttcagtttttctgctctgttttttccccatctttgtggttttatctacctttggtctttgatgatggtgacatacagatggggttttggtgtggatgtcctttctatttgttagttttgcttctaacagtcaggaccctcagctgcaggtctgttggagtttgctggaggtccactccagaccctgtttgcctgggtatcagcagcagaggctgcagaacagcgaatattgctgaacagcgattgttgctgcctgattgttcctctggaagtttcctctcagaggggtacccggccatgtgaggtgtcagtctgcccctgctggggagtgcctcccagttaggctactcgagggtcaggtacccacttgaggagacagtctgtccattctcagatctcaagctgcatgctgggagaaccactactctcttcaaagctgtcagacagggacatttaagtctgcagaggtttctgc

SEQ ID NO: 891369 - DNA, 527 bp, Homo sapiens
ttaatagcctccttttaaaaatttcatgtagtttgtgcttaccttctacttaaaacagagtgagatgcaccttcccttttagttttgtgttgttaagtttccttttgaaataatttttcatgaaataaatgaattaagagaaaaaaagaaagcaatgaaagcatgcaggttcttcactgagatggtgaaaatcaagtaggaggggaggaagtaactaaagtttatgaaatattgccttgtctgcctgccttgggaagggaattggtacaaggaaattcaggagaccaccattaacatttccaaatagcttctttctatgggaatgaaagcaaattttctttctttggaaagaaaatatttsaaattgtttgttaagactttttcaaaaaatccattcttgccgttcaaaaatacttctacttgtcctttgccaggtcccatccaattactttcagagacttaacatttgcttcaaatgcacctcatgaactcactcataatccacttctaacccactccttcatcat

SEQ ID NO: 891370 - DNA, 551 bp, Homo sapiens
ctattgtagatgctgaatgaagacagaggggtgaacaagacaagtaaatccctgcggtcatggagctcacatcataggtggagggagacagaagcaaacatacaagtatataaagaggaatttcagatactgagaagtgctatgaagacaaaattgggggtgtaagagagagccctggggcagraggtgggtctgatttggatgacatgatcagggaaggacaaaaaaagaagtgactcaaaagttgagaagtggctaaaaacattttctataccacatgttgcagatgttattaacaagtattatatacataaaagtgtctcttatcagacgacctcacacactatgaagaaagttaaacagttttctttactgttgggtatcttagagcctttcatttgatagtgttcgttgtacatctttggaaaggagcacattaaaagcaattactactcaagcttctttgactttgggaccctttctcgtcaaaattcggagaggagatgatattccgtgggaaacactgagcttgtcagtagtttctagccctg

SEQ ID NO: 891371 - DNA, 624 bp, Homo sapiens; identical to SEQ ID NO: 887545

SEQ ID NO: 891372 - DNA, 544 bp, Homo sapiens
tcaatcctattttaaaacaccaaaaatgagacctgacatagttgcataatgattattggtttatgtcaatctgagtatgggactgttagggaaggtgggtctattgtttactaagagccttttagttccacacacagcaggttcctatccctttcccaaggcacaccagcccacattcagaattgcagccattgggtaatatgttctggggcagtgcagtctgcttgtctctacaccaagagggtcaaagtggagattgctgcccctactccggcccccccccccgcccccmtcattcatagcactctagggacactttgttcactaaccacttgaaacatgattcacatgcgcaagatcaccttttcaatggtgtgttagttttctattgctgctgtaaaaaaatggccataagtttagtggcttaaaacaacacaaacttatgattttatagttctggaggccaaaagtcccaaatcagtttcactgggataagttgaaggtgacagcaaggcttcgttctccctggaggcaatgaggaaga

SEQ ID NO: 891373 - DNA, 619 bp, Homo sapiens
caacctcattcttaactaagatttggtgctaataagaccaagggaggtcagtggttaggaggagatgaccttcaatttgagtcctcatatttaatagtaacaaagagaatcattaattactaaatggatgcacagattaagatgataatcatagaaaatcaatagttgatatgggccagacctaggcagatctcatcttaggtttaaccaaatgcctttcataatttcacttgccttttaataaaaatagccagaatttattgactattttctttgtgccatatgttgttcttagtgtttttttgtgtgtgtatttaaccatatgtgatatatactatcattgtctttatggcacaaacaagaataaacaagaagactcaagcttagggkatgcaagtaccttgcccgtagctaggaagtagtagtttcagggtttggacagaggtagttgagttctagggcctgaatttataagcaccgtacatagagttctatctatacatgctcctgttttagagctgaacccagaactgcaaggaaaatatgctgctcagctcaggaattcttaagtcctaaaattgagaatctggggtaatcaagttattggaattaaaaataa

SEQ ID NO: 891374 - DNA, 664 bp, Homo sapiens
gatctttctagctttttgatgtgggcatttagtgctatcaatttccctcttaacactgctttagctgtatcccagagattctggtatattgtctctttgttctcattggtttcaaagaactggatttctgccttaatttcattatttacccaggagtcattcagaagtagattgttcaatgtccatgtggttgtgtggttttgagtgcatttcttaatcttgaattctaatttgtttgagctgtggcccaagagactgtttgttatggtttcagttcttttgcatttgctacttcctcatacttcttgttcaacctgccctcatttcctccagccaccatgaccctttacaatccttagacaggtcaatcatgcttcccyttagggtatgtttgttatgttttccactcctttggattctcttgcctcagataactgcttggctgactccctctctaactcaagtcttcgcttaaatttcacctttgcaaagtggcctctactgacaatattaatactaaacttttaccatttccccttccaccatcttgctgtcctccaattccaaccttcctttctatggtaggtcatgctttacttcttctttattaccggcactaattaccttctacagcatataatttacttattattgtgttgtttgt

SEQ ID NO: 891375 - DNA, 612 bp, Homo sapiens
tcatactgtcattggtctgtgtacatcagtgtgtttttgtagtggctggtaatgatttttcctttccatatttagtgcttccttcaggagctcttgcaaggcaagcctggtgatgataaattacctcagcatctgcttatctgaaaaggattttattactccttcacttatgaagcttagttttgccagatatgaaattctgggttggaaattctttaagaatgttgaatatgggcccccactctcttctggcrtatagggtttctgctgagagatccactgttagtctgatgagcttccctttgtaggcaacctggcctttctttctggctgcccttaacactttttctttcattttgaccttggagaatctgacgattatgcgtcttggggttgatcttctcagggagtatcttactggggttctctggatttcctgaatttgaatgttggcctgtcttgctaggttgtggaagttctcctggatgatatcctgaagtatgttttccaacttggtttcactttccccatctctttcaggtaccccaatcacttagaggttcagtctttttacataatcccatagttctcagaggttttgttcatttcttt

SEQ ID NO: 891376 - DNA, 706 bp, Homo sapiens
tcctacacaaagactatactttcagggatcatttctatagttcattcaagaatgctacacaacaaccaagagttaattataaaattgtaacattttttcccacttactttcttcaagcacacaaactgtcctgcattcgtttctgtgaatattaaataacccagtccaaaggtgactagcatgcaaataactgtgcaacacaaaatgttctgctacaatcagataacagaacaagattaatcagagaaagcattttgacttcagataatctttgaatacttacctacagaaagtatttattttccttgatcaaatgacagatagtaacacaaacaaaatttacatgagggggaaaattatgttcgagaaagagtcggatttttaatatataaatctgtgcttcttaatctagcttcgagctacctatgacttgcctyttctccccaactcccctccccaaccacctgactaccttgatttattgcaagccactaaaaaaaaaaaaaaagaaaagaaaagaaaaaagaaaaaagtccactcactccaacattccagctgcagtgaccttattttggttcctcaaatgtgccagttttttctcaggttgaacccttcactccatctgcctcagtctccccagcacatcccctgctcagctgtctcctcatccagccggtcccagcctaagagtgttacttcttggaga

SEQ ID NO: 891377 - DNA, 722 bp, Homo sapiens
taaggaaggcgtccagttaaattttctgcatatgactagccagttctcccagcattgggagaataaagaatcctttccccactgcttgtttttatcctgatacataaatagttgtacacaagcatttatagtacctttatttgttaatggccaaaatctgaaataactcaaatgttcatccacaggtgaatggataaacacggtgtgaaataacctttgtcaaggatcaaatggttgtaggtgtgtggtcttatttctgggttctctattctgttccattggtttatgtgtctgttttagtaccagtaccatgctattttggttacagtagccttgaaggatagtttgaagttgggtagcrtgatgcctccagctttgttctttttgcttaggattgtcttggctatgcaaactcttattcagttccacatgaattttaaaatagtttcttctaattctgtaaagaatgtcagtgatagtttgatgggaatagcattgaatctataagttactttgggctgtttggccatttccacgatattcattcttcctatccatgagtgtggaatgtttttccatttgtacgtgtcatttctgatttctctgagcagtggtttgtagttcttcttgaagaggtccttcactttacttgctagctgtattcctaggtattttattctttttgtggcaattgtgaatgtgagttcattcatgatttcgct

SEQ ID NO: 891378 - DNA, 592 bp, Homo sapiens
tccacttcaccatggctgccttgccaacacaacctttcctaagcccagatgtgttgatgtgcattgcgccagatttctgaagactcaagtcacttcctgagataaattactcatataggaaagcagactagcagttattgtaaacaactctaagactctcatctaaagagcggatatgccttcytaaagggcgtgctccaaggcaaataaatcctttggatctaagtctaccttttagcacacacaagaacactttcagctcattgatccagaagtgataaaggaaatgaaaagttcagccaaccaaaatggggtgctcaaaggggttcttttaaggtccaggctgcacagggtagttctgttttgtccccaccaaagttagcctctgccaaagaattgctccgggctctggccaccacatgtgcctacaacccccaaagcagaaagcctgggaaagaatcacatactcataaaggccccataattaggcacattcactgggaatggtgtttaagttatcaatcatggggtacaagaagaattaataaaattctgtatatttttaaaactttttatagaattatacattact

SEQ ID NO: 891379 - DNA, 548 bp, Homo sapiens
atttattttacatgacaaatattcatatttttctccttttcaagaatgacatgctaattgttaggagtttaacttaactcaagttttctcaatatactttctcatgcctggtccattttatagtctgtccctttaaaatttggtgtaaatacaatatgtcatttattatggcgtttcttatttatttttatttaatagatccaagaattaccaagatttctgggtcccttcttaataaacaaaattgaaaattatgcacttaaataatcatatgcctatatgtaggcagcatgaattaaaaataaagttatcaataatttataaaaattaagaaattaaataaattgrtaaatataaattagatcattttatagcatttattaatttctataatgtatttcctaaatgggatgacatcctggtaatgactactcttcttgattatgcagaaagtgtttgttgtaacagaattcttctacataatgcaaacattttatgaatactgtggtgtggaactattattttgttatttttatagaatgtaaaag

SEQ ID NO: 891380 - DNA, 537 bp, Homo sapiens
agacaatagtgtcatttccaaaatttatgaaacagctttcacgtttcatgtaatcacaattgttttatgattatgattattgctatttaattcttccccataggtatgtatgcatatcatacatggtaagcaaatggtgaagactttggtgacaaaatatacatctcacattttttttaattagagcagaaaatgagaaagctaatgagttaccctgaaatttgcaaatctaaaatatttatttggcagatatattttaaacacatacattattttatattttgcatacacattttcyttgaactctaagttaagaaacataatttaggagttctgatcatgccagacatgcttgtattgaatatgtactgagctgataacaataaccaactctagatacaacataaaaagtaactatttaaggagaccctacaggaaggaactatagggatacaacactgaaaaaagataagcaaactctgatgtgtcatacataactagtctctcctgagaatactttccaggttatagggcttt

SEQ ID NO: 891381 - DNA, 641 bp, Homo sapiens
ttttcctttccatatttagtgcttctttatgagctcttgtaaagcagggctggtggtgacaaaatctctcagaatttgcttatctgtaaaggattttatttctcattcacttatgaagcttagtttgactggataagaaattctgggttgaaaattattttctttaagaatgctgaatattggcccccactctcttctggcttgtaggatttctgtagaaagatccactgttagtctgatggtcttccctttatgggaacctttctctctggctgcccttaacattttttccttaatttcaacattggtgaacctgactattatgtgtcttggggttgctcttcttgaggagtatctttgtggtgttctctgtatttcctgaatttgaatgttggcctgtcttgctagkttggggaagttctcctggttaatatcctgaagagtgttttccaacttggttccattctccccgtcactttcaggtacaccaatcaaacgtagtgtttggtcttttcacatagtcccatatttcttggaggctttgtttgttccttttcattctttttttctctaatattgtcttcattctttatttcattaagttgatcttcgatctctgatatcctttcttctgcttgaat

SEQ ID NO: 891382 - DNA, 383 bp, Homo sapiens
gtaggccaagtgcccctaagaaattcctcgtgaaacaatacaagctgaaacacctccaaatttgtaactgcaagcaatttattgtaacctatgaaaaagtactttcacatggaaacctcacatgtgttggaagaggggattgggtgtactgakgtctcttagttttacgcagatacaaatgttccaaagtagcttcatgcagatcaggttgggggagaatcacaagttcagaaagtattgaatactgttcctggcctctgctgccatggctgcccaaattagtttaaaccacatcaggaactagagtcagaagccactggaaatgtttccactccacaaagcatgtctggagtttctactgtgcactgtgtgggaaggtgact

SEQ ID NO: 891383 - DNA, 581 bp, Homo sapiens
accaacatagatatggagtttgttcaattcctcccttctacactcctatttcatcttgtttatatgtctattatagtattactaatcattatttttatgataaaaattagaacctatgtaaaaattatctttaaggcatatgctaaataatatkaggataaatatctctctgccttaacctcagttacttcaaaataactttacattagcagataattaataatcattgtgggaaacaattgatgtgagcttgcagcaagcaggcagtgcaatttaatgttcttgtagctccaacttatatgtgtacattgagagtgtgtattttcaatgcctcttagtccttttttttctttatttctccatgttcaatccaatttccagattcaagtacaaaatcaacaaaccaaagtataggtggaaaatataccacgtgagtttctcagacaccgtttgaatggagactggcatctctttaagaactacttccctttctccacagcttaacatcagaaacttgaaggtacagaatgatgttggctctgtacacatttataatctatggagaatgtcagtttcttaag

SEQ ID NO: 891384 - DNA, 466 bp, Homo sapiens
attgataataagttattggcacaaagtatattacattactcattcatctctgtatagttctattaattagaaattattatcctcattgaataaataaaaattaagagaaaagataaacatccttcccccaatatatgtatgtgtatatatatgtctgaatatatatktatataaataatacatgtatacatatacacatgttatatatatgaatatgtaacacacatacatatatatacatataaatatgtgtttttttatatataaccttatggatagacatgtatatgtgtgtatcaatttatatgcctatagtgcatggtattttcttgttggatgaaaaatacaataaacgggtgacacaaaattatgttttacaatattaagagagaaagagagttcatttcattgaaggatttgaagcaatgttataaagaagggtattttaatataaatggtatatata

SEQ ID NO: 891385 - DNA, 602 bp, Homo sapiens
atggtgaatccttctgagatccacaacacaccttagcctcatggaagctgcccagaatgggaggtcaggatcgctggcttggatcccagctctgccccaccatgcagaagccgaatgtccttggtcatttcacaccacttctctaagcctcagctttcttatttgtcaattgaaacaatttctcacctctcagggtttggggggaaataaaggacagagagcctgtgcaattgccaagcacggtatgtggcttgtcatgtcacattgttcatgtgttcatgtcacattgatgacagatacctgaatcttattgccagatgtggggrtaagaccttggaagtgactcaagccactgttgactctgccaatagcaaactgtgagggcagtgaggcatatgtcaccagaagattgtaaaaataagacccatacagggttatctattaggtcaaagatgcatagctgctgagagttggtgaccaaaggattcagtggaaggattactctccaggtatctagaatcctggactggggcatttctactcaacctccagtccttggcccctgaggcatgagatctagagccaggcagtaccctgccact

SEQ ID NO: 891386 - DNA, 602 bp, Homo sapiens
atggtgaatccttctgagatccacaacacaccttagcctcatggaagctgcccagaatgggaggtcaggatcgctggcttggatcccagctctgccccaccatgcagaagccgaatgtccttggtcatttcacaccacttctctaagcctcagctttcttatttgtcaattgaaacaatttctcacctctcagggtttggggggaaataaaggacagagagcctgtgcaattgccaagcacggtatgtggcttgtcatgtcacattgttcatgtgttcatgtcacattgatgacagatacctgaatcttattgccagatgtggggataagaccttggaagtgactcaagccactgytgactctgccaatagcaaactgtgagggcagtgaggcatatgtcaccagaagattgtaaaaataagacccatacagggttatctattaggtcaaagatgcatagctgctgagagttggtgaccaaaggattcagtggaaggattactctccaggtatctagaatcctggactggggcatttctactcaacctccagtccttggcccctgaggcatgagatctagagccaggcagtaccctgccact

SEQ ID NO: 891387 - DNA, 602 bp, Homo sapiens
atggtgaatccttctgagatccacaacacaccttagcctcatggaagctgcccagaatgggaggtcaggatcgctggcttggatcccagctctgccccaccatgcagaagccgaatgtccttggtcatttcacaccacttctctaagcctcagctttcttatttgtcaattgaaacaatttctcacctctcagggtttggggggaaataaaggacagagagcctgtgcaattgccaagcacggtatgtggcttgtcatgtcacattgttcatgtgttcatgtcacattgatgacagatacctgaatcttattgccagatgtggggataagaccttggaagtgactcaagccactgttgactctgccaatagcaaactgtgagggcagtgaggcatatgtcaccagaagattgtaaaaataagacccatacagggttatctattargtcaaagatgcatagctgctgagagttggtgaccaaaggattcagtggaaggattactctccaggtatctagaatcctggactggggcatttctactcaacctccagtccttggcccctgaggcatgagatctagagccaggcagtaccctgccact

SEQ ID NO: 891388 - DNA, 671 bp, Homo sapiens
ctcccttcctagggaagtctgctcaggtgggaccacagggaagctcttgctcagccagcatggctcagcggcagggggcatggacagcctgctttcacctctccacccctcccagtccctttcctgattctgtctgcctccagtcctctgcctccaggccagctggtattcaacagcctccacctccctgacttaactcattcactcaggtatttagagagctgaacaagacgtagcccctgcactcaaggagttcatggtctaatggaagcaacaggtacataagaagtaacactgatatagattgattacagccatgggggcagacttctggagaagagtggttcaggctaayggagcagcataattaaccaggcaggtctgtgtcctcaaggaagcccagggtctaattagggagacaggcacgttggcagtctgtgggacaagtgtcatgtgaaaatccaggatgaggggcagttggggctccttgagcaatcagagaaggcctcacagaggaggtgacattgaaactgagcacagaagaggaagaaactcacctgtggggcaaggagccacagggtgccctagaaacaggcagctactgtcctggtaagtctcctcctgatccctccacccactcttctgcccactcccctagtacaaccttcaat

SEQ ID NO: 891389 - DNA, 628 bp, Homo sapiens
tccctctaattgtctggagacggggggcaaactcaccaacagttgggaggactggcttttacagcacgtaagaaagccggctgtagcccagagcctcggtgggagagcagaattattaataggtcctactgaggcctcgggaaaaatgcaagactgcatggagtttaaaaggtcagcgtgaataacaaaaacagactttctggggagtcagaatggatttaaaatacactcagaggagcctggggctcctttgctgctgcgggcgcagtgtgaacgtcttttgtgtgttcgcaggcatgtgtgtatacacctccaggatctgcagacatttgtcagctcccagggagcttgcagcctcacagggtgtgtgctctgggcaacttttaggtgccaagaatggcagctcagtgacagagctgctgtatgctgggtgatcactyccccctctctttataaagagaggagagtggattaattggtcttaaggacatttccaattcgaaagtcgaagccgtggaggatggagagaacctttcaaatcaccagcgggtcgcaaactggctaggtgactctgggtgagttggcatgctccttggccctggtgtgtagttcccacccacagaaactg

SEQ ID NO: 891390 - DNA, 660 bp, Homo sapiens
gtggggcaggggcgagcacctgaaggagggccttcacacggagccatgaaagggcttcatctggcaccccaccctctctctaagaccatgttcaagggcaccaaagtcaccatttccattttccatctaatgggacagcgtatcttttgctaaatacacaaataccttcctcaatctaccaagcaatgccatctctctgctatcagtcatcaatactcagaagggaggtcctgaataaatggaaccaaacccacaatctatcagcatccctatcagcaaaaggagccccgtgcaggcaggaattcctcaagtcctggctggccattaacagccccgtggcctcaagtcagttccactctctaggctcacggcgcatgtcagacacgccagcagagaaaaagcacaaagttaggcaaggtaggtaagggctggacaggtcacccaggcttgcgtggtaccagcacgcacaggaagaaaggaaaggtgtaaaggccaygtctagggatgaataatcaaatgtgagaatctatgagatgaggggaatgggggagaatgacgggacaagatcattctacattcttccaggtaactgtggtaactggtcgccagaaatacaactcattcctaatatgatacagggacttcaaaatgaaagaggac

SEQ ID NO: 891391 - DNA, 671 bp, Homo sapiens
aatcacagtaaacaaattcaacacatagtacacaaaaggtttttcatttagctgtttctacagtaagaagaaatataattgtgtaatcttaaaattaaaattatttttacagactcattaggcttcgttggtcaagaacagcacaggagccttgaacatttagaatgtgaacctgagtacaacccataagaccttccagccagtarccatttcatattgtttctcatcaataccatggagacattaccagagcaggcactctaaggagaagcccggcaactgagaagatacattcagggaacacgagataccaccaaattcactgagagattaacttattaaaagatataaccttataatctcactgttggaaagacagaaaaaaactaccaattgctgtttgaatcctctcaacacacaatgaccaagaagtcttccagtctgttcctggactctgtcatccccatgtcaccctcatggtagaactaacacaataccgtttctcagagtgtctgcttacacactgctgagttctgtaggaactcagatgtatggatactgtttttaatgcctaccaattttaagagcataagaccatgagggtggaaatcaatgtattctcttggaagaggtccctcttgttttctgtttgactatattctggtctggaa

SEQ ID NO: 891392 - DNA, 539 bp, Homo sapiens
ggaagaacatttcttcagatgtagtgtagtgaggtcctctagcaagagggtacagctagagcaaaggccatatggtgggaaagtactgacacatgaaataaatgacaggtgagagtagcaggaaagagaatcagatcatctgaatgyagagcgtcataggcctttgtcatttactatgcacaaaatgaggcgccattgcaggattttgagtagaggagtgatgtgatctgacttaagttgtttttttgtttgttttttgttttgttttgtttttttgagacggagtcttgctctgttgcccaggatggagtgcattggcgccatctcggctcactgcaagctccatctcccaggttcaagcgattctcctgcctcagcctcctgagtagctaggattacaggtgcatgccaccacgcccagctaatttttgtatttttagtagagatggggttttaccatgttggtcaggctggtctcaaactcctgaccttgtgatctgcctgcctcggcctcccaaagtgctgggattacagatgtg

SEQ ID NO: 891393 - DNA, 539 bp, Homo sapiens
ggaagaacatttcttcagatgtagtgtagtgaggtcctctagcaagagggtacagctagagcaaaggccatatggtgggaaagtactgacacatgaaataaatgacaggtgagagtagcaggaaagagaatcagatcatctgaatgcagagcgtcataggcctttgtcatttactatgcacaaaatgaggygccattgcaggattttgagtagaggagtgatgtgatctgacttaagttgtttttttgtttgttttttgttttgttttgtttttttgagacggagtcttgctctgttgcccaggatggagtgcattggcgccatctcggctcactgcaagctccatctcccaggttcaagcgattctcctgcctcagcctcctgagtagctaggattacaggtgcatgccaccacgcccagctaatttttgtatttttagtagagatggggttttaccatgttggtcaggctggtctcaaactcctgaccttgtgatctgcctgcctcggcctcccaaagtgctgggattacagatgtg

SEQ ID NO: 891394 - DNA, 539 bp, Homo sapiens
ggaagaacatttcttcagatgtagtgtagtgaggtcctctagcaagagggtacagctagagcaaaggccatatggtgggaaagtactgacacatgaaataaatgacaggtgagagtagcaggaaagagaatcagatcatctgaatgcagagcgtcataggcctttgtcatttactatgcacaaaatgaggcgccattgcaggattttgagtagaggagtgatgtgatctgacttaagttktttttttgtttgttttttgttttgttttgtttttttgagacggagtcttgctctgttgcccaggatggagtgcattggcgccatctcggctcactgcaagctccatctcccaggttcaagcgattctcctgcctcagcctcctgagtagctaggattacaggtgcatgccaccacgcccagctaatttttgtatttttagtagagatggggttttaccatgttggtcaggctggtctcaaactcctgaccttgtgatctgcctgcctcggcctcccaaagtgctgggattacagatgtg

SEQ ID NO: 891395 - DNA, 649 bp, Homo sapiens
gaccaaaaagtggccatagaatcatttaattggatgaatcaaataccatgaaaaggagtatctagacacaaatatatctccacgtgcttgagggtcctgttcagctgagaactacagatagaaaataattaagcagcccaatgtatacatggcatttacatttaaaggatagctaagacccttttaaatctgttgagatactatcaggttcacttatccacttaataaatatttactgtactactactaaattatgagacacaatgtgaccgaaaaaaaaatgtaatacacagtctcttcccttcaggagtttacagcctagcacaggaaacaaaagagtgtgtacacagctctaagagtataatggcactcttctgatsgacgggcaggcctaagcggcacggcggtcaaccccagccaggggacaggagcactttgtaatcatggctgaagatgtgaagccaggacaggtaccaagaaggaacgccaaggatcctagtgggaaaacaggtactgaaagccaaaaaggcacaaagggcttgagatgggcagttagggtcaaaaagagcaaagaaataccaggaaatgaagcaagaaacagctgtgcaaaatgagctatcacacggcttctcaaacttttccctcaaag

SEQ ID NO: 891396 - DNA, 618 bp, Homo sapiens
atggcgaaaccccatttctactaaaaatacaaaaattagctgggcatggtggtacatgcctgtaatcccagctactcaggacactgaggcacgagaattacttgaaccccggaggtggaggttgcagtaagccgagattgcaccgctgtactccagcctgggtgacagagtgagaccctgtctcaaaaaaaaaaaaaaaaaaaaagaaaaagaaaaaagaaaagaaaagaaaagaaaaaacaasaaattagctcatgatagcagcttatattataattatgtgacactttggatatttcaaagcacattcacaaagtgtatgtcacttaaatacctcaaaatttccctgttatacatgcagatcattccccattcagccctggtatggactgaactgtgtaccaccccaaaattcatatgttgaagccctaaccaccaatgtgactgtatttggagagggtgactttaaggaggtaattaaggttaaatgaagtcacaaggaagccctgatccaattgggtctgtgtccttctaagaggaggagacacagagatctctcttgctctccctctctctctccacatgcacacaccaacgaaaggccacatgaggacactg

SEQ ID NO: 891397 - DNA, 684 bp, Homo sapiens
catgctgaatgcttcctgcccttgaacatcaaactccaaggttttcagcctttgtctcagactggcttccttgctcctcagctagcagacagcctattgtgggaccttgtgattgcgtgagttaatattacttaataaactcccgtgtgtgtgtgtgtatcctattagctctgtctttctagagaaccttgactaatacactcattgcgcaacccttgcctacattaaggcaacaaaatgtctagaaatgtcatcatttatcatacaaactacacttgagctcctgctttaaggtccataaatgctcctaaggaaaagccwccatggttcactcagtcttctcttgctgagacaccccgctgcgctcttttgcaatgttctttctttctaataaaaaacattctttttggagacctatagtgtcattggtcaattcttcttactgacctgcaagttgagcactttgcaatgacttcacccagcagtttctacagacagctctctctctctacctccaccctaaggtcaataactcttagatttgttcttttgaagccattttctaaatgtgctttattcttttttgttctgttttctcctttctcctgactgtatttccaagtagcccgtcttcaagctaactaattatttcttctgttgatcatttctgctattaggactatg

SEQ ID NO: 891398 - DNA, 654 bp, Homo sapiens
accactatcagcatttttgtcaaagccattcaacaagtctctagaaagttccaaaactttcctacatctccctgtcttccaagccctccaagtatttgagaatttccaaactttccccatttttctatcttcttctgacccctccagactgttccaacctcttcctgttacccagttccaaaatcacttccatatttttgggtatctttacagtagtgccccattcccrgaaccaatttactgtattagtccattctcatgctgctatgaagacatacctgagactgggtaatttataaaggaaataaatttaattgactgtccatttcacagggccgggaaggcctcaggaaacttacaatcatggtggaaggggaagcaaacatgcccttcttcacaaggcagcaggagagagaagaatgagagctgagaaaagagagaagaatgagagctgagcaaagagagaagcccctcacaaaaccatcagatctcatgaagaattactcattatcatgagaatagcatgggggaaactgcccccacgattcatttacctcccactgggtccctcctagaacacatgggaattttaggaactacaatttgagatgagatttgggtggaaacacagccaaaatatatcacagagaaagc

SEQ ID NO: 891399 - DNA, 690 bp, Homo sapiens
acccctgcttctcaggccttcagatctggactgcaatctataccatcggccctctggctctcaggttatacgaccagctttcctgggtcctcggcttgcagacagcagattgtgggacttctcaacctccatattcacgtgagccaataccttctcataagtccctttctagagatatatgtatacatagatcctattggttctgtttctctagagaaccttgactgatacagatttaatgctatggaatgagtgtgtccccacaaactcataacttaatggtatatcatgaacaacttctacattattacatatttttactacaacattttcttaaatcacaacatttttaaaagatctttggggccgggcatggtggctgacgcctgcaatcctagcactttgggaggctgaggcgggaggatcacctgaggtcaggagtttgagaccaacctggccaacatagtgaaaccccgcttctactaaaaataaaaaaattagccaggcgtgatggtgggcacccataatcccagctactcrggaggctgaggcatgaaaatcgcttgaacctgggaggtggagtttgcagtgagctgagattgtaccattgtactccagcctgggcgacagagtgaaactcagtttcaaaaaaaaagatctttggtattccatgctgaggttatactgagg

SEQ ID NO: 891400 - DNA, 566 bp, Homo sapiens
agtctaagatggaagatttctggtaacactgtacttgctggataaggacatgagctgctaatgatgcaggtgcaaagggcttgattattgctcctgctttctgttaaggaggtctggggagagagtggaatcagttttactggtagaaatgttttcagggccctcaatttgctactgcagaaatttttacataagaaaaggcttagtttgaagtttaaagtgttgtttttaaaagaagcagaacttagatttgtatcagsctggcattctataggacttagaatattttgcacacacagtcgtcatattttcaaacttaagaaaggctttaagttaaaggtcagtgtttcctagctttcaggatggaaggactttcttgtcattgcctctcagagaattatgcaaccaacaatgaaaggaaacttaagcctcaagttacattctttggagcttgggcaagactttggggaaaattctggataatgaatgaattcaaaaacattagccttgtcatgtaggacaattaagaatcctgctgttccacacgttttatgatggctcagtgg

SEQ ID NO: 891401 - DNA, 627 bp, Homo sapiens
aaatttaaaatgtttataaaattaaaaagttacagtgagctaagatttagtattaaagaatttttttataaacatgtagtgtaactctacagtgttaataaactctacagtagtgtacagtgacatcctaggccttcacattcactcatcactcactgactcacccagagcaacttccagtcctgaaagctccattcatggtaagtttcctatacaggcgtgccatttaaaaaatcttttaggccaggcacggtggctcacacctgtaatcccagcactttgggaggctgaggcaggcggatcacgagctcaggagatcgagaccatcctggctaacatggtgaaaccccgtctctactaaaaatacaaaagattagctgggtgtggtggcacgtgcctttaatcccagctactygggagactgaggcagaagaatgacttgaacccgagaggcagagcttgcagtgagctgagatcacgccactgcgctacagcctgggccacagagcaagactccatctcaaaaaaaaaaaaaatcttttatactatattcttaatgtaccttttctatgtttagatacacaaataccactgtattacaattgcctactgtattcagtacagtaa

SEQ ID NO: 891402 - DNA, 463 bp, Homo sapiens
gtccgcctctgtgtggcagatgaggaaactgaggctcagaaagaacaatgaatttgcccatgatcatagaactagttaacagtggagccaagactgaaatccaaggcagcctgtctgtgtctccctacctgcagggatggagaagatggtccagcagtcattcccccactggtcctgctgcacttcctggatgctctggctccaaggaagaggggtcttctgaggcccaccaggtatcagtgatgaggacttgtctcatctggaagcaattctgctcagccccactatgctggagcctgggtggatgactwgctgtcagttcccaatgatgccaatgtcagggtggtggggagggggctggtgggagtgggagtgagtgggtagagcaggacagcaggcctcctgtggatgactgattgttggcccagctcatgtgttcccatgtgcctcttactggtggaag

SEQ ID NO: 891403 - DNA, 653 bp, Homo sapiens
ggctcaggggctgttccttggcaggctaaagctgtacagtctgagaccaggaatattctgcagcagcgaaggcactgcagcaaacaatggggaaaggacaccacacaggtaggagatacctatgtatttatttttattatagttaccttctatttatggaaaagtaactttgctttcccacttacaataatgatacattttcttttcttcttttcttgagacagaatcttgctctgttgcctaggctggaatgcagtggcaccatcttggccgggctgttctcgaactcctggcctcaagtgatccacctgccttgacctcccaaagtgctgggattacaggcatgagccactgcacccaggcagattttctgtttttgatatacgaagttaacttaaaataaaaatattaagaatactgggtaaaacattgtggtagtgtaccagaatgattggagtttgggaaacamtgacacattgtttgattggattgaatatcacttggcaagtctattgaagaggaaaggatcttcaggcaaattctggagatgggaaaacaggcaaaaacaacaaacagggcagtagtctagtctatggaacacaaagccaaggaggaggaatgcaggagaaaatgaatctgtgaccacagaaaga

SEQ ID NO: 891404 - DNA, 615 bp, Homo sapiens
aaattcaatggtagcttgatgggaatagcattgaatctataaattactttggggcattatggccattttcatgatattgattcttcctattcatgagcatggaatgtttttccatttgtttgtgtcctctcttatttccttgagcagtggtttgtagttctccttgaaggggtccttcacattcccttgtattcctaggtattttattctctttgtagcaattatgaatgggatttcactcatgatttggccggccctctgtcttttgttggtgtataggaatgcttgtgatttttgcacattgactttttttcctgagactttgctgaagttgcttatcagcttaaggagtttttgggctgagacaatggggttatctaaatatataatcatgtcaactgcaaatagagacaatgtgactttctctcttccaatctgaataccctgtatttctttcttcttgcctgattgccctggccagaacttccaatactatgttgaataggagttgtgagagaggacatccttgtyttttgccagttttcaaagggaatacttccagcttttgctcattcactatgataatggctatggttttgtcataaatagctctta

SEQ ID NO: 891405 - DNA, 536 bp, Homo sapiens
ggcaaaaagaggatgagagccaagtcaaaggggtttccccttttaaaaccatcagagttcgtgagacttattaactatcatgagaacagtatgggggaaccaccctcatgattcaattatctcccaccaggtccctcccacaacatgtgggaattatgggagctgcaattcaagatgagatttgggtggggacatggccaaactatatcacctctctattatccatcaacatgattctcaatcattaaaatcctgttccactaccttcggtcacacttgcttggcaaaaaattcagttttgtctcaatccaactgaytgttggattccaaatacaaaataccaagtactgcatgaaaaaaaaatgatacactattaattcatggttaacaatatcagcaggaccctcactgctgcctcaaatacattttcctggcttctcatctctctgtctgctcctacttcgtctcttttgagggttcctctttctgtcaattatttaaacactggtattcctcagcattcttcttcatatgtc

SEQ ID NO: 891406 - DNA, 665 bp, Homo sapiens
acaagccactgctcaaggaaataagagaggacacaaacaaacggaaaaacattccatcctcatggataggaagaatgaatrtcattaaaatggccacactgcccaaagcaatttatagatttaatgctattccgatcaggctaccattgactttcttcacagaattggaaaaaactactttaaagttcatatggaaccaaaaaagagcctgcatagccaagacaatcctaagcaaaaagaacaaagctggaggcatcatgctacctgacttcaaactatactacaaggctacagtaacacaaacagcatggtactggtaccaaaacagatatatagaccaatggaacagaacagaggcctcagaaatcatgccacatatctacaacaatctgatcttcaacaaacctgacaaaaacaagaaatggggaaagggtaccctaattaataaatggtgctaggaaaactggctagccatatgctagctgaaactggatccctaccttacaccttatacaaaaattaactcaagatggattaaagacttaaacctaaagccataaaaaccctagaagaaaacctaggcaataccattcaggacattggaatgggcaaaggcttcatgactaaaacaccaaaagcaacagcaacaaaagccaaaatagaca

SEQ ID NO: 891407 - DNA, 665 bp, Homo sapiens
acaagccactgctcaaggaaataagagaggacacaaacaaacggaaaaacattccatcctcatggataggaagaatgaatgtcattaaaatggccacactgcccaaagcaatttatagatttaatgctatyccgatcaggctaccattgactttcttcacagaattggaaaaaactactttaaagttcatatggaaccaaaaaagagcctgcatagccaagacaatcctaagcaaaaagaacaaagctggaggcatcatgctacctgacttcaaactatactacaaggctacagtaacacaaacagcatggtactggtaccaaaacagatatatagaccaatggaacagaacagaggcctcagaaatcatgccacatatctacaacaatctgatcttcaacaaacctgacaaaaacaagaaatggggaaagggtaccctaattaataaatggtgctaggaaaactggctagccatatgctagctgaaactggatccctaccttacaccttatacaaaaattaactcaagatggattaaagacttaaacctaaagccataaaaaccctagaagaaaacctaggcaataccattcaggacattggaatgggcaaaggcttcatgactaaaacaccaaaagcaacagcaacaaaagccaaaatagaca

SEQ ID NO: 891408 - DNA, 641 bp, Homo sapiens
gccaggcacgggatataatctcctgatgtgctgtttgctaagaccattggaaaagcctggtatttgggtgggagtgtcccatttttccaggtgcagtctgtcacagcttccctttgctaggaaagggaaatcccccaaccccttgcgcttccttggtgaggcgatgccccacccacyttgcttcagctcaccctccatgggctgcacccactgtccaagcagtcccactcagatgaaccatgtacctcagttggaaatgcagaaatcacccgtcttctgcatggatcacactgggagatgcagaccagagctattcctattcggctgtcttggaacggctggaagttactttcaaaaaagaaacgcctgtatgccttttactagctttccacagaattcggatatgctgtgtgtactacagctgttttggtttgtgcattgtctttcatactgcaccagcatttttgaacactcattagaaaatattggcaccttgtgctcttaaaattgattgctttaagtaaggatttggagaagtattcctgacatactgacacgtgttggctatcaataattgagagggagaaacagtattaaatgtactatgatgatggatttcttcatttcttcctgtaattctg

SEQ ID NO: 891409 - DNA, 581 bp, Homo sapiens
agtaatttgttcagtactgtatggttctggatttgcaaagtaaatttgaggagatctacatgactaacgaacactcttgctgtacctaggcaaataatccacataaacctaatgaaatttgctttttactgatcaggaatacttgtggcagattccttttgatgaaaagtaagagactgttaagaaacactgtcaaagccttgaaaaaggatacaataaattattgggcrtccctttagtggtgtgctaggtactatctaatggatcctctgcatattatctgatgggatatgtaccattgtctttttattggacagactgttatacaattgtaaatgtagatgttaaattgtaaaaaaaaaaaaaaaaaaaaaggaaagtaatgcaactgaaccttaactacaactaatttctgctctgtagaaaagatggtcccattaggtttattgccctataccagtgatccccaacctttttggcaccagggaccggttttgtggaagataatttttccacagacacagtggggggtgcaaggggagatggtttggggataaaaatgttctcagatcattaggcat

SEQ ID NO: 891410 - DNA, 618 bp, Homo sapiens
atcttctcatcatatccagcctgatttctcctcgaaagaagttgtggcaggggcaaaaggatgatgtaaatatttggttaatgagattactgacaaacatggaaggaaataagactaggaattgcagacaaagggggttgaggcattacatggattggtgcataaagggctccttaaaaaagccagcgaggccgggcacagtggctcacacctgtaatcccagcactttgggaggccaaggtgggcagatcacgmtgtcaggaaatcgagaccatcatggccaacatggtgaaacactgtctctactaaaaatacaaaaattagctgggcatggtggcacatgcccgtaatcccagctactcaggaggctgaggtaggagaatcacttgaactaaggagtcaaaggttgaagtgaatcgagatcacgccactgcactccagcctggtgacagagcgacactccgtctcaaaaaaaaaaaaaaaaaagacagcgaactggagctctccatctcctccaagggcaggtccagaagaaatgagcttgcttcccaacagaggggaagactgtcctaataagaaattaagaatagagttctaaaggaggaagaaaggtgcctg

SEQ ID NO: 891411 - DNA, 533 bp, Homo sapiens
tgtactcagattgtgaaaccttcctgcccagcaaatccatggcttccaggccacacaccttctcactgggtatcacaaaaggagtcacccaattctcatgcttctgactagagcacatgccatacccactctcaattctggccatgagagcttcttctccacttgatactagatcacaaattctagtctggagactcctcaaacctgtgactgctgcttatgctggctggcaggtttctgctcagccacctacaagtgaggatcaggaatggcttccttctattgggactggggtcttgggagtacatgtgtaggacctcctgctgctgctccttcttacattctccccactgctccccaggtcagatccagtgcttggtaggagcaagaatmtcccctgtggcctggattgcctagctcctaagtggaaataagaatcacagagacttctgctgtcccatcacacactgtggattcactcatattttttccaccagacccacagtgcaggctgcttcctgacttatatttca

SEQ ID NO: 891412 - DNA, 637 bp, Homo sapiens
ggcaggaggaacccatcaagtgactccactgtcaaagtagacttttgtaccatcagaatatacttttcaaaatttaaggtaaaataaatatttttcacacatgaaaatgctgaagaaattcaacaccagcaaaattcaattatttttttttaaatgtaagagctttaggcaggagaaaaataatatcatgtaaatgacataaacacttcaatcaaaggcagtgatgatcagattccatgaagaaccaaaacccaactatatcctgtgtttatgaatgttatattaagcagagagaaacaaagagattmgtgttaaatcagaagctgggaagagaatgaggtactgagatgtcaccctacatgtacagttatactctaaatagataggtgtattgatagacaggtacgtagatatatatattctagcagaaatagtgtactgagtcagagaccagagcacatagtttatttactcaaagcaaaacagaatggaaagtaacattatcacaatgtcccccatacctagcaccctgcaagtggcatgaagagaggcaaatggataatcctatctctatggtaggagcaaattacaggaaacataagtgtgaatctgagagttagtgtagaagagaggcaat

SEQ ID NO: 891413 - DNA, 472 bp, Homo sapiens
gagcagtcaatgtggagcgggccttcgccatgcttgcagaggagcgattcctaactgtaacaagtattacagtgtaggagacaaccaagaggagaaaggaactcagagaaagaaagccactatctgcaactattagtaagctgacaacataagtgtctatgcaggctaacttggtcactagaggaaggtcacagaaaaaactgtctaccttattaggaccacaaaatggcagattaacagtgaatgccaactggctggtagtatggatgaagcccacaaaccatgaaatgaggacgagcacaacacatacacgacggctcatgaytgtcatgtagtggagaggtttgcatatagcaacataacggtcataggccatggaaactaggagcaccatttcactgccagtgaagagatgaacaaagaaaatctgggccaggcaggcatcaaaagaaatagtcttgcgctcaaccag

SEQ ID NO: 891414 - DNA, 545 bp, Homo sapiens
tcagttctagaagactggccttcacttcagatgccagttgcaagtctgggtctctgggataagtcaggattcccacaacgccctccttgaattcaattaatttgccaaagtggctcacagaactcaggaaatacttacttacatttactggtttattataagggttactacaaaggacacagataaagaagtgtatagggtgaggttatgtgaggaaggggcacagaatttccatgtcctctctgggtgcaccaccttccaggaccctccacatgtccagctatccagaagtcccctgaacccagtcttttggcagggttttatggaagcctcattrcataggcatgattgattaaatcattgatcattggtaatcaacttaaccttcatcccctctccactctccagaggttgtgggatgggctgaaagtcccaactctttgctcatgccttggactttcctgtgatcatcccccatcctgaagctacctggagacttccaaccatcagccaactcattagcatacaaaaagacattgctttgg

SEQ ID NO: 891415 - DNA, 600 bp, Homo sapiens
cactgaggttgggcatggtggctcacacctgtaatcccagcacttagggaggccaaggcaggaggatcacttgaggccaggggttcgagaccagcttggccaacataatgagacccctgtctccacaaacattttttaaaaagaaaaaagacaatgaggagatgtcatggctttggtgctatgagtctgtaatacaaaagccatctctccacgctagcagtggccaggatttttcctccytcatacagtgtctatactcaccaaaattccaaggggacttacctgcaggggctcctgtgttcttttgaactttccactaaaatggagtgcactgggcagtagtccacctaatgtcatttttgtttttcaacttaaagaaaacacatttaaaaattatccaaatttcttaatgaggtcgcaaatgcttaggaatgaattattctaaccttgtgcattacttgagtctatagaagcactggatgcaacacagaaaaaagtagactctaaaggtatcatgatgcaatggctcacacctgtaatcccagcacgtagtgagactgaggagggaggactgcataaacccaggagttggaggccagt

SEQ ID NO: 891416 - DNA, 610 bp, Homo sapiens
gtgagtgactggaaatctgaacccagccaggcagctcgagagtctatactcttaactgctacattatactatatttccaattggagatgccatctttggcatcacatctctcataacacttatccaggcagtgggatttgtctagagctaggcttactcagaacccttccaggccaggcgtggtgtctcatgcctgtaatcccagcactttgggaggccgaggcgggtggatcacgaggtcaggagatcaagaccatcctgggtaacacagtgaaaccccgtctctactaaaaaattgaaaaaattagccaggcatggtggcgggcacctgtagtcccagctactcaggaggctgaggcaggagaatggygtgaacccgggaggcggagcttgcagtgagcttagatcgcaccactgcactccagcctgaggaacagagcaagactctgtctcaaaaaaaaaaaaaaaagaacccttccagagattattttttttaactgagatgagaaaaaaaaaagtgaaatagagaaagcctcagttactctataatggagaagctgtaagattttaagccaagagatattaattaccctgtctttcactgaactgc

SEQ ID NO: 891417 - DNA, 610 bp, Homo sapiens
gtgagtgactggaaatctgaacccagccaggcagctcgagagtctatactcttaactgctacattatactatatttccaattggagatgccatctttggcatcacatctctcataacacttatccaggcagtgggatttgtctagagctaggcttactcagaacccttccaggccaggcgtggtgtctcatgcctgtaatcccagcactttgggaggccgaggcgggtggatcacgaggtcaggagatcaagaccatcctgggtaacacagtgaaaccccgtctctactaaaaaattgaaaaaattagccaggcatggtggcgggcacctgtagtcccagctactcaggaggctgaggcaggagaatggcgtgaacccgggaggcrgagcttgcagtgagcttagatcgcaccactgcactccagcctgaggaacagagcaagactctgtctcaaaaaaaaaaaaaaaagaacccttccagagattattttttttaactgagatgagaaaaaaaaaagtgaaatagagaaagcctcagttactctataatggagaagctgtaagattttaagccaagagatattaattaccctgtctttcactgaactgc

SEQ ID NO: 891418 - DNA, 610 bp, Homo sapiens
gtgagtgactggaaatctgaacccagccaggcagctcgagagtctatactcttaactgctacattatactatatttccaattggagatgccatctttggcatcacatctctcataacacttatccaggcagtgggatttgtctagagctaggcttactcagaacccttccaggccaggcgtggtgtctcatgcctgtaatcccagcactttgggaggccgaggcgggtggatcacgaggtcaggagatcaagaccatcctgggtaacacagtgaaaccccgtctctactaaaaaattgaaaaaattagccaggcatggtggcgggcacctgtagtcccagctactcaggaggctgaggcaggagaatggcgtgaacccgggaggcggagcttgcagtgagcttagatcgcaccactgcactccagcytgaggaacagagcaagactctgtctcaaaaaaaaaaaaaaaagaacccttccagagattattttttttaactgagatgagaaaaaaaaaagtgaaatagagaaagcctcagttactctataatggagaagctgtaagattttaagccaagagatattaattaccctgtctttcactgaactgc

SEQ ID NO: 891419 - DNA, 587 bp, Homo sapiens
ggcaggaagtggtgaataatgtcaaagctgttgagagtaactcaaaggggcaacaaaagtccaagagatttggacaacacggaggtcattagtaatcttgaggagactgttttcagaggacagaggagtgacaaggaagggtgtaaggggagataagaagtatacatgaccctttcaggaagtttgactgtgaattaggtataaaaggcagtgaaaacaagagtattttttttaagagatggagacttacggattttttcatgattttgagaaagaacagcggagaggagattgaagactcaacaagatgacaggataattgttagagagaggtgaggagatgggaggagatgagatttccttcaagatggaggaatgggctcaagtcagtraagagacaagttccattttaaccagaaaaatgaaatgccggttacgatgaatttccaggtttgcaggtgagaagttggggtgtttctatctggtgttctccagactttccttgaggccaccaagcaatgatggggaatggctatggaggaaggaaaagcagtagcagagcagtgaaacgggagtcaatgggaaag

SEQ ID NO: 891420 - DNA, 614 bp, Homo sapiens
ggtgacatacagatggggttttggtgtggatgtcctttgtgtttgttagttttccttttagcagtcaggaccctcagctgcaggtctgttggagtttgccagaggtccactccagaccctgtttgcctgggtatcagcagcagaggctgcagaacagtgaatattgctgaacagcaaatgttgctgcctgatcgttcctctggaggttccttctcagaggggtactcggccctgtgaggtgtcagtctgcccctactggggggtgcctcccagataggccacycaggggtcagggacccacttgaggaggcagtctgcccattctcagatctgaaactccatgctgggagaaccactactctcttcaaagctgtcagagagggacatttaagtctgcagaggtttctgctgccttttgtttggctatgacctgcccccagaggtggagtctacagaggcaggcaggcctccttgagctgccgtgggctccacccagttcgtgcttcctggctgctttgtttacctactcaagcctcagcattggcgggcgcccctcccccagcctcgctgccgccttgcagtttgatctcagactgctgtgctagcaatgagtg

SEQ ID NO: 891421 - DNA, 539 bp, Homo sapiens
acctttactttgcacttctctttcctgctgctatgtgaagaaggacatgtttgcttccctttccaccatggctgtaagcttcctgaggcatcccgagccatgtggtaactgagtcaattaaacctttttgctttataaattacccagtcccaggtatttctttatagcagcatgaaaacaaactagtatagtaaattggtactgaagtagtgggacacttctataaggatacccaaaaatgtagaagtgactttggaactgggtaacaggcagaggttggaacagtttggagggctcaaaagaacacaggaaaatttggaacttcctagrgacttggagggttcagaagacagaaagatgtgggaaagttgagaacttcctagagacttgttgaacagccttgaccaaaatgctgaaagtgatatggacaatgaagtccaggctgagatgttctcagatgcagatgagggacttgttgggaactggaataaaggtgactctcgctatactttagcaaagagactagcagaattttgccc

SEQ ID NO: 891422 - DNA, 539 bp, Homo sapiens
acctttactttgcacttctctttcctgctgctatgtgaagaaggacatgtttgcttccctttccaccatggctgtaagcttcctgaggcatcccgagccatgtggtaactgagtcaattaaacctttttgctttataaattacccagtcccaggtatttctttatagcagcatgaaaacaaactagtatagtaaattggtactgaagtagtgggacacttctataaggatacccaaaaatgtagaagtgactttggaactgggtaacaggcagaggttggaacagtttggagggctcaaaagaacacaggaaaatttggaacttcctagagacttggagggttcagaagacagaaagatgtgggaaagttgagaacttcctagagacttgttgaacagccttgaccaaaatgctgawagtgatatggacaatgaagtccaggctgagatgttctcagatgcagatgagggacttgttgggaactggaataaaggtgactctcgctatactttagcaaagagactagcagaattttgccc

SEQ ID NO: 891423 - DNA, 579 bp, Homo sapiens
aaaccatcagatctcatgagacttattcactaccatgagagcagcatgtgggaaaccacccccatgattcaattatctcccactaggtccctcccatgacataagggaattatggaagctacaattcaagatgagattttggtgggaacatagttaaaccatataaagcactaagccctttttgcrggatatgcccccatgatccaaatacctctcaccaggccccccatataatactgtggatcacatttcaacatgatatttggaggggacaaatataaaaactatgtcactgcctttagcaactttgttgtgctgtgctctcaatagtttgccagaccccttctgcaaagccttccctattaattcctctgtagttgctcccctctgagttcagtccttcctttattgaagctgacaattagacttcatctgtcaatatccttctcatgctgtccaggtgtctgtgctcttttttggatgcactcttgaccccaaggatattaggctagttctgctggttttcttcacttaaagtggtaaagggcagggagggatgtgtcccgtactatgtggcag

SEQ ID NO: 891424 - DNA, 676 bp, Homo sapiens
acccagctctggatcaagtggacctgatagatatctacagaactctcccccaaaaaacaacagaatatacattcttttcggtgccacatggcactgactctaaaatcaatcacataactggaagtaaaacactcctcagcaaatgcaaaagaaatgaaattgtaacagtctcccagactacagtgcaatcaaattagaactcaagatttaaaaactcactcaaaaccacacaagtgcatggaaattgaacaacctgctcctgaatgactcctgggtaaataatgaaattaaggcagaaatcaakaagttatttgaaaccagtgagaacaaagacaacatactagaatctgggacacagctaaagcagtgttaagagggaaatgtacggcactaaatgcccacattgaaaagctagaaagatctgaaattgacaccctaacatcacaactaaaaaaactacagaaccaagagtaaacaaaccccaaagccagcagaagacaagatataattaagttcagagctaaactgaaggagatagagacgtgaaaaacccttcaaaaaaaatcaatgaatccagcagctggttttttgaaaacattaataaaatggactgtaatctaggctaataaagaagaaaagagaagaatcaaatacacacaataaaaacggatatgga

SEQ ID NO: 891425 - DNA, 676 bp, Homo sapiens
acccagctctggatcaagtggacctgatagatatctacagaactctcccccaaaaaacaacagaatatacattcttttcggtgccacatggcactgactctaaaatcaatcacataactggaagtaaaacactcctcagcaaatgcaaaagaaatgaaattgtaacagtctcccagactacagtgcaatcaaattagaactcaagatttaaaaactcactcaaaaccacacaagtgcatggaaattgaacaacctgctcctgaatgactcctgggtaaataatgaaattaaggcagaaatcaataagttatttgaaaccagtgagaacaaagacaacatactagaatctgggacacagctaaagcagtgttaagagggaaatgtacggcactaaatgcccacattgaaaagctagaaagatctgaaattgacaccctaacatcacaactaaaaaaactacagaaccaagagtaaacaaamcccaaagccagcagaagacaagatataattaagttcagagctaaactgaaggagatagagacgtgaaaaacccttcaaaaaaaatcaatgaatccagcagctggttttttgaaaacattaataaaatggactgtaatctaggctaataaagaagaaaagagaagaatcaaatacacacaataaaaacggatatgga

SEQ ID NO: 891426 - DNA, 676 bp, Homo sapiens
acccagctctggatcaagtggacctgatagatatctacagaactctcccccaaaaaacaacagaatatacattcttttcggtgccacatggcactgactctaaaatcaatcacataactggaagtaaaacactcctcagcaaatgcaaaagaaatgaaattgtaacagtctcccagactacagtgcaatcaaattagaactcaagatttaaaaactcactcaaaaccacacaagtgcatggaaattgaacaacctgctcctgaatgactcctgggtaaataatgaaattaaggcagaaatcaataagttatttgaaaccagtgagaacaaagacaacatactagaatctgggacacagctaaagcagtgttaagagggaaatgtacggcactaaatgcccacattgaaaagctagaaagatctgaaattgacaccctaacatcacaactaaaaaaactacagaaccaagagtaaacaaaccccaaagcyagcagaagacaagatataattaagttcagagctaaactgaaggagatagagacgtgaaaaacccttcaaaaaaaatcaatgaatccagcagctggttttttgaaaacattaataaaatggactgtaatctaggctaataaagaagaaaagagaagaatcaaatacacacaataaaaacggatatgga

SEQ ID NO: 891427 - DNA, 689 bp, Homo sapiens
tattggggtcttctctctttgtttcttagtctggctaaacacttgtcaattttctttaacttttcaaaaaatcaattttttgttttgttaatcttttatatgagttttcctgttttaatttcatttatttctgccctaacctttattattcccttctaaaaatcttggatttggtttgtgcttgcttttctaggtccttaggttgtttatttgaagttttttcacttttctgacatagaaaaacaytttttcacttttcttgctgctataaactttcctctcattacttctttcattgtatcccacaggttttggaatgttgtgtttctgttttcatatgttttaataaatttttcaatttccttcttaatgtcttcattgagtcactggtcattaaggagcaaattgtttaatttccatttgtttatatagttttcaagattcctgttttgattgatttctagttttattctattgtggtcagagaagacatttgatataattttaattttgggaggggcattttttaagacttgttttgtgacctaacatattgtctatccttgagaatgagccatgtgctaaggagatgaatatgtattctgtagccatcagataaaattttctgtaaatatctattaggtccatttattctgcagtgcagattaagtccgatgtttttttcttga

SEQ ID NO: 891428 - DNA, 649 bp, Homo sapiens
acagagatatcaagactagttaaactagattgcattggttgagtcacaaaagataggtgatgacacataaatactcataattatgctacaaagttgacaatccatggagaaactagttaaagttcacttttctttgagtaatcataatttaatctttccgcaaaataggaaacgtcacggtatttggcttattcttaatcaggtgttactaccatcatcatttacatgtaatatttacaaaatatttaatgtaagctttggaaccagatctcagaaacaatccatctgcataaacatttgcaaaaatgaaagtatagcctacagaaaacaataacgtctcagaatatcaccagtaacaatcctcaaatctcaggaattaacatatttttattactgttggctgtgaattcaaccttaaatttttgtccagrttagaaaaaatatatacatgaatacatttattcacttcctcttaacttttctgtattttcttgttttcggaaagccaattatttgtgatagctgtagctaacaagcacatttgtttacttctcagctctagcatgtctagggaaggtttaaggatttgagtgctttctttctctgacccaaagtagagctattaattgcagagaacactatctgctgc

SEQ ID NO: 891429 - DNA, 558 bp, Homo sapiens
actggagttaacaaaagcattatttatagaagcagcaaagtgtaagaagctgatagccacgctggtagttagacacagtatttgctgactatttttcaaatacgtttttgataatagctaatgaatctggctaaggtggacattacttacggttctcagttcattaaaaatgcacacatctgtgtgtatatatgcttcatcaaacatgcatgtggactaaatgcatcagaagtcctgctaaatactctcagaatcacatctataagacaatcattcccacattttcaagactaaggcygtggtgcttttcaaataagttttattaagaaatacagtaaagaagcaggttttctcttcttctgatttgatgacatgaacatgcaggcccactctagagttttaagggaaagcccagtgaattttaagacctagaccgccaggttacaactatttctagaattttacatttttttattttcatgtgtttgtggtttcataagcaaaatatcctgcccctcatgtctcattcacctgctcctaggaagagataatgccctt

SEQ ID NO: 891430 - DNA, 586 bp, Homo sapiens
agttgtacatcttttgggggtatgtgtgataatttgataaatgtgtataatgtgtaatgaccaaatcagggtaattaggatatctatcacctcaaacttttatcttttctttgtgttacacacactccaattattatagctatttttaaaaatatacaacaaattattgttaacagtagtctccctgctaccctattgaatactagaacttactccttcaacctaactgtatttttgtacccattaaccaacttctaccctctccccactctcattcccagcctctggtacacactaatttttatatatggagtgacacacgaatctgattttttacttatttttatacacatatagatgtcatacccatttgttaaaagaaaatcctctaccatttgttgaaagtayatacatttttaaatatttttctttttcatgtttgtcaaatatctttttatccatatatgcattggtttatttttggactgtgtattttgttcctattttatcaatctttttttcttttcttttctttttttttttttttttttttttgagacagagcctcattctgtcactcaggctg

SEQ ID NO: 891431 - DNA, 615 bp, Homo sapiens
caatgtagcttttgtcattggttctgtttatgtgaaggattacatttattgatttgcctatgttgaaccagccttgcatcctaggatgaagctgatttgattgtggtggataagcttatttatgtgctgctggattcmgtttgccagtattttattgaagatttttgcatggatattcatcaggaatactggcctgaaattttcttttttgttgtgtctctgccaggttttgctatcaggatgatgctggcctcataaaatgagttagggaggagtccctctttttctactgtatggaatagtttcagaaggaatagtaccagctcctctttgtacctctggtagtatttggcatgagtctgtctggtcctggactttttttggttggtaggctattactgcctcaatttgagaacttgttattggtctattcagggatttgacttcttcctggtttagtcttgagggggcgtgtgtatgtatgtgtccaggaatttattcatttcttctagactttctggtttatttgcatagaggtgtttatagtattctctgatgatagtttgtatttctgtgggatcagtggtgatatcccctttatcattttttgttgtg

SEQ ID NO: 891432 - DNA, 615 bp, Homo sapiens
caatgtagcttttgtcattggttctgtttatgtgaaggattacatttattgatttgcctatgttgaaccagccttgcatcctaggatgaagctgatttgattgtggtggataagcttatttatgtgctgctggattcagtttgccagtattttattgaagatttttgcatggatattcatcaggaatactggcctgaaattttcttttttgttgtgtctctgccaggttttgctatcaggatgatgctggcctcataaaatgagttagggaggagtccctctttttctactgtatggaatagtttcagaaggaatagtaccagctcctctttgtacctctggtagtatttggcatgagtctgtctggtcctggactttttttggttggtaggctattactgcctcwatttgagaacttgttattggtctattcagggatttgacttcttcctggtttagtcttgagggggcgtgtgtatgtatgtgtccaggaatttattcatttcttctagactttctggtttatttgcatagaggtgtttatagtattctctgatgatagtttgtatttctgtgggatcagtggtgatatcccctttatcattttttgttgtg

SEQ ID NO: 891433 - DNA, 613 bp, Homo sapiens
tggtttcttgttaggttgctagaatagatttgtaagagttccttgtttacccatgtctgctgaagtttgaattcttagccatatgatttcttttcttgtaaattgagcagcttggagaaaactggccctgttgctatgcaaaaagatgtaaacttaatttctactcaaagcaagtttgaatttgaaactagggcttccactgtttcaatgttgkactgtcactacctcaggcatgtgtcccaaagtgctcctgtctctgccgtactcaggataaagttaagatggagcccagcaagccaggtttccttcacttctaggttccctcaacagttttctccactttagagaatgcattgaatatattcttgttctgcttctgtgtttgggctttggaatgatgtgatgcagctcaatggttcctacccccaagttgatcagagtaagaaacatctggaaggtcagtgcaaatacaagatcattgtcctccttgcagggattctgattcagtgcgctcagttggggcctggaatgtgtttgttaacgacttagatgtgcagtcagactggggaccctctgataccacggaccttacagtttatgggatgattctgtt

SEQ ID NO: 891434 - DNA, 539 bp, Homo sapiens
tgacaagaaaaatgttttggagtgagtgaaaatttggttttgttcaaggaatagaaaaaccatggtgtgtggaaattagggagcaaggcgaatgattgacatgcggtcagcaagggagcaggggccagatcacatgggcacyggaggccatgagaagggctgagggtattttttaaagaatattttctattcacaagagcaaaaacatggaatcaacctaaatgtccatccatggcaggctggataaagaaaatgtggtacatatacaccatgaaatactatgcagccataacaaaaaatgagatcgtgtcttttgcgggaatacagaaggagctggaggccattatccttagcgaactaacacaggaatagtaaaccaaatactgcatgttctcacttgtaagtgggagctaaatgatgagaacacatggacacatacaggggaacaacacacactggggcctatcggagggtggagagtgggaggcagtagaggatcaggaaaaacaactaatgagtactaggcttaatacctgggt

SEQ ID NO: 891435 - DNA, 524 bp, Homo sapiens
tacattgcaaaaatttttccccattctgtaggttgcctgttcactgtgatgatagtttcttttgctgtgtagaagctctttagtttaattagatcccatatgccaattttggcttttgttgccattgcttttgatgttttagtcatgaagtctttgcccattcctatgtcctgaatgatattgcctaggtaacaaacctacacattctgcactcgtgtcccagaacttaaagtaaaaaaaaaaaaaaaaaaaaaaaaaaaagatgtgtgtgggctaccataccaaaagcagataattacatagtgaaagtgagaactggtaaccttcttcctaccttctcatatgccagcattagtcttkgtttccttttgggcttcgaattgaagaaacacagttgtcttattagattacagattctttcctattattttctgaagagggagccacctcagaagcaaagttcctgtcatagatttttttacattattgctttctgttttacttttcattattatttaacctga

SEQ ID NO: 891436 - DNA, 524 bp, Homo sapiens
tacattgcaaaaatttttccccattctgtaggttgcctgttcactgtgatgatagtttcttttgctgtgtagaagctctttagtttaattagatcccatatgccaattttggcttttgttgccattgcttttgatgttttagtcatgaagtctttgcccattcctatgtcctgaatgatattgcctaggtaacaaacctacacattctgcactcgtgtcccagaacttaaagtaaaaaaaaaaaaaaaaaaaaaaaaaaaagatgtgtgtgggctaccataccaaaagcagataattacatagtgaaagtgagaactggtaaccttcttcctaccttctcatatgccagcattagtcttggtttccttttkggcttcgaattgaagaaacacagttgtcttattagattacagattctttcctattattttctgaagagggagccacctcagaagcaaagttcctgtcatagatttttttacattattgctttctgttttacttttcattattatttaacctga

SEQ ID NO: 891437 - DNA, 657 bp, Homo sapiens
tatccttaataaaaggattattttatgcaagtagctcttcatgtgtctcagaatattattttcaaagcattcacagatgactgcaagtggcctccagcctcttatgacacacattaagagacaagacctcaactctctatggaatactgaaaggataagctcagttccaccagtaccagaargaactcctgcttcccccacttttctcgcactatcagcaggacaatggggaaaggcattttttttttttttttaaggagaggagactttgcaaattgtgcagtacacagaatattttcctatctaaagagagattcaaatgcctctggtaatgacagaatttcagagacatttaaaggtctcaattcttgatgtaaacattgagtcaagattgaaatagctatcctgaaattatctaggttttggaaactttagcagctctccacagagcacagagtgtccttcttcactgtggcaacactcagggaatcccctttcctggacaagaggcacacatcacatgtttccaggaactttcgtcttttccatcaattaaaaaaaagtacaaggtgcagacaccagtctgggtcttatcttgtataggaaaagttcattttcatctcccagaagtcagggaagtaaataaaacaaaacaaa

SEQ ID NO: 891438 - DNA, 573 bp, Homo sapiens
tggagaagacttagtgtgaggactgagtctcggataaatcaaatttagttgttggtagcagaaagatgatcaagcaggagacactgagaaatctgggttatagttagaaaaataattgtgatgaagataatcacccaagttattgttccttctatgaagaaacgaacaccaaatcacttcaggcttcatatcataagagttaaatactttaatggtaaaaccaacttagaatctatactttaattattaaaagctcttgaatggcatccacgatggcttttattttgaactcaatttatttttgcatatgtgttcattcatttatatatcaaatgtttattgactaatatttgtgcagtaaagaaggygaatggtagattaccaaggatgagagacagaattcctacattccaggaggtacaaagccaaaagaatataaatcaaggaaaatgactgaggggagtcataattattttagaggtttattttgccaagattgagaatgtgtccaaaaaggaacattgtgatcttcccaaagagagttttgaagacttcaatatttaaaggagaaag

SEQ ID NO: 891439 - DNA, 576 bp, Homo sapiens
atctaggcaaggccaggcgcagtggctcatgcctataatcccagcattttgggaggctgaagtgggtggatcacaaggtcaggagatcgagaccatcctggctaacatggtgaaaccctgtctctactaaaaatacaaaacattagctgggcgtggtgcacctgtgatcccagctacttgggaggctgaggcaggagaatcgcttgaacctcggaggcggaggttgcagtgagcagagatcatgccactgcacttcarcccctgggcgacagagcgagacgttgtctcaaaaataaataaataaaataaaataaagaaaatctagacaatactatttaggacataggcacaggcaaaggttttatgactaaatcgccaaaagcaattgcaacaaaagcaaaaattgacaaatggtatcaaattaagataaagagcttctgcacagcaaaataaactatcatcagagcaaacaggcaacctacagagtgggagaaaagttttgcaatctgtccgtctgacaaatgtctaatatccagaatctatgaggaatttaaacaaatttacagggaaaactac

SEQ ID NO: 891440 - DNA, 576 bp, Homo sapiens
atctaggcaaggccaggcgcagtggctcatgcctataatcccagcattttgggaggctgaagtgggtggatcacaaggtcaggagatcgagaccatcctggctaacatggtgaaaccctgtctctactaaaaatacaaaacattagctgggcgtggtgcacctgtgatcccagctacttgggaggctgaggcaggagaatcgcttgaacctcggaggcggaggttgcagtgagcagagatcatgccactgcacttcagcccctgggcgacagagcgagackttgtctcaaaaataaataaataaaataaaataaagaaaatctagacaatactatttaggacataggcacaggcaaaggttttatgactaaatcgccaaaagcaattgcaacaaaagcaaaaattgacaaatggtatcaaattaagataaagagcttctgcacagcaaaataaactatcatcagagcaaacaggcaacctacagagtgggagaaaagttttgcaatctgtccgtctgacaaatgtctaatatccagaatctatgaggaatttaaacaaatttacagggaaaactac

SEQ ID NO: 891441 - DNA, 576 bp, Homo sapiens
atctaggcaaggccaggcgcagtggctcatgcctataatcccagcattttgggaggctgaagtgggtggatcacaaggtcaggagatcgagaccatcctggctaacatggtgaaaccctgtctctactaaaaatacaaaacattagctgggcgtggtgcacctgtgatcccagctacttgggaggctgaggcaggagaatcgcttgaacctcggaggcggaggttgcagtgagcagagatcatgccactgcacttcagcccctgggcgacagagcgagacgttgtctcaaaaataaataaataaaataaaataaagaaaatctagacaatrctatttaggacataggcacaggcaaaggttttatgactaaatcgccaaaagcaattgcaacaaaagcaaaaattgacaaatggtatcaaattaagataaagagcttctgcacagcaaaataaactatcatcagagcaaacaggcaacctacagagtgggagaaaagttttgcaatctgtccgtctgacaaatgtctaatatccagaatctatgaggaatttaaacaaatttacagggaaaactac

SEQ ID NO: 891442 - DNA, 657 bp, Homo sapiens
tctccatggcacttatcattgtttgttatattatacttttatttattgagttgtttgtcagacttctcacactacaatatcaattccatgaaggtaggaatatttgtctttgtccactgacaatcctcaatgcttatgcagggcctggcacatagtaggttctcagtaaatattttttgaatgaatgtggtaggtatggactttcaacatataatctaatttagtcctcccaagataagtattaatgtttctgttttagaggcgaggaaaggaaagctcctcatcacctatacaaaaaaggacagaggttttgagaaacgggtgtgtatatgttgagcctatagatwcaaagatgattgattcaaagatcagggtcacaagatatggggatacaacaaaaatgtgagcccaataaaaataccagttaatgagtgaatctctgccaagctgaactgaagagaaacactgtgtactctttcccccagatatttcacattctacaagtagaatcagttttgaaacttaaatagttaattttctttctgttgttcttaaagaatctgggggcttgtgaggacttccataggaaaattaggaggcaaggtcattggagcaagggtacaatttttgtagacaagccgttaaggatttacagag

SEQ ID NO: 891443 - DNA, 667 bp, Homo sapiens
tctgttgcatatgtgtatcagatatgtcaattgaaaatatcccatagcatgttcacattcatgtattgttctttaattcaataatattatccaacatatgatagtgataaaggaattgtgccaaaaattcattctgaactttttctgaatataatagtagccataaactctttcattagcgttataaattcttggaaatactgttagaactagtgcatatactctaagcagtgaaattttggttgatgccattgtagtttgggcctgttatctccctttagtaataatatgcatcaatgtagtatggaaaaccattatttctgctttttctggaaacatttgactgattaccagagaggtccctgtgctttgtatgaaaatgttgtgaaagctattgtggcatcgctggataaagttttacaacagacataatctycacccaataaaagtcagtgtttagatattcattgttttaatttctccttaatttctgaggcattttaaattttttatattaaatcataatatttgcatatttaccggtcccaatgcatatatcttcatattctatatttaccccaaattcaagttcactatgtttttaatgttacctttagttactactgattttcataactgcatttgtacttgaatgaaccacttttga

SEQ ID NO: 891444 - DNA, 667 bp, Homo sapiens
tctgttgcatatgtgtatcagatatgtcaattgaaaatatcccatagcatgttcacattcatgtattgttctttaattcaataatattatccaacatatgatagtgataaaggaattgtgccaaaaattcattctgaactttttctgaatataatagtagccataaactctttcattagcgttataaattcttggaaatactgttagaactagtgcatatactctaagcagtgaaattttggttgatgccattgtagtttgggcctgttatctccctttagtaataatatgcatcaatgtagtatggaaaaccattatttctgctttttctggaaacatttgactgattaccagagaggtccctgtgctttgtatgaaaatgttgtgaaagctattgtggcatcgctggataaagttttacaacagacataatctccacccaataaaagtcagtgtttagatattcattgttttaatttctccttaatttctgaggcattttaaatttkttatattaaatcataatatttgcatatttaccggtcccaatgcatatatcttcatattctatatttaccccaaattcaagttcactatgtttttaatgttacctttagttactactgattttcataactgcatttgtacttgaatgaaccacttttga

SEQ ID NO: 891445 - DNA, 630 bp, Homo sapiens
gtttgaccaaatgtatgggcactgtgtggcccattcaagttgacgcataaaagtaaccatcatagtgggtttaaccacagggttattttcctagtgtttgcatttcttggcccttattaattggccttttgtacaattttcttaattattttgcctgtttactttcctagtatatgttattttttcaggcttcaagaaattattattagattttcaytggaattgcctttctccaattcaacctcctcaccactgccagggaaaacttcttcgagtacaaatcacatctgttgctctcttgattaaaatattttaatggtttcctaggctcctaaactcctcagtaaagatactaggcctttcatgatcttacctctaccaacctctctggcttcctgccacacttctcctgctacactctagttatctctcataatttgcatttccctaagtggagtgtgtgctctctttttctcccatgctcttgctcatgcttagaataccttcttgacccacccatgccaagtgaacatctacacttattgggcccccctgggcccagcacgaaaagaagtttcaaagaagaagaaatcagcaaagttaggagatcaagaaggaggcagacagaga

SEQ ID NO: 891446 - DNA, 630 bp, Homo sapiens
gtttgaccaaatgtatgggcactgtgtggcccattcaagttgacgcataaaagtaaccatcatagtgggtttaaccacagggttattttcctagtgtttgcatttcttggcccttattaattggccttttgtacaattttcttaattattttgcctgtttactttcctagtatatgttattttttcaggcttcaagaaattattattagattttcactgraattgcctttctccaattcaacctcctcaccactgccagggaaaacttcttcgagtacaaatcacatctgttgctctcttgattaaaatattttaatggtttcctaggctcctaaactcctcagtaaagatactaggcctttcatgatcttacctctaccaacctctctggcttcctgccacacttctcctgctacactctagttatctctcataatttgcatttccctaagtggagtgtgtgctctctttttctcccatgctcttgctcatgcttagaataccttcttgacccacccatgccaagtgaacatctacacttattgggcccccctgggcccagcacgaaaagaagtttcaaagaagaagaaatcagcaaagttaggagatcaagaaggaggcagacagaga

SEQ ID NO: 891447 - DNA, 681 bp, Homo sapiens
gattgcaagagttaatattgttaaaatgaccatactacccaatgtgatttacagattcaatgcaatccctatcaaaataccaatgacattctgcaaagaaatagaaagggaaatactaaaattaatatggaagcacaaaagaccacaatagccaaagcaatactgagcaaaaagaataaagctgaaggcatcactctacctgactttaaaaaatattacaaagctatagtaatcaaaacagcatggtatcagcataaaacagacacatagaccaatggaacagaatagagaacccagrtataaatctatgcatttacaatcaactgactttcaacaaaggcaccaagaacatacattgggaaaaggataccctcttcaaaaaatatcactgggaaaactgcatattcatatacagaagaataaagcatgacccctatttaacactatatgcaaaaatcaactccgaatagattaaagacttaaacctaagaccaaaaactataaaatgactagaagaaaatacaaggaaacaattctgcacagggtctaggccaagattttatgggtaagactttaaaagtataggtaacaaaaacagataaatgggactatagcaaactaaaaagcttctgcacagcaaaataaataattgagaaataaaaataaaatcccaagtccccc

SEQ ID NO: 891448 - DNA, 681 bp, Homo sapiens
gattgcaagagttaatattgttaaaatgaccatactacccaatgtgatttacagattcaatgcaatccctatcaaaataccaatgacattctgcaaagaaatagaaagggaaatactaaaattaatatggaagcacaaaagaccacaatagccaaagcaatactgagcaaaaagaataaagctgaaggcatcactctacctgactttaaaaaatattacaaagctatagtaatcaaaacagcatggtatcagcataaaacagacacatagaccaatggaacagaatagagaacccagatataaatctatgcatttwcaatcaactgactttcaacaaaggcaccaagaacatacattgggaaaaggataccctcttcaaaaaatatcactgggaaaactgcatattcatatacagaagaataaagcatgacccctatttaacactatatgcaaaaatcaactccgaatagattaaagacttaaacctaagaccaaaaactataaaatgactagaagaaaatacaaggaaacaattctgcacagggtctaggccaagattttatgggtaagactttaaaagtataggtaacaaaaacagataaatgggactatagcaaactaaaaagcttctgcacagcaaaataaataattgagaaataaaaataaaatcccaagtccccc

SEQ ID NO: 891449 - DNA, 648 bp, Homo sapiens
gcaaaggtgtacgtacacaaatggccactgttgcactgtttatattagcaaaatgttaggagcaaattaaatgtcaattaatatggtactggtgaaaatacctgtagtatttatatagtcataaagtgtaatacagtgataccattaaagtgattctgtagatctgaaaagatttctgcaacgtattgttagttgtaaaaacataggctagaaaacattacatataatatgaccttgttttttatgtgtgtgtgtgtgtgtgtgtgtgtgtgtgtataaacatggaagaatgaagtgtgagatatgcatacacctaaatatcaatgcctgttacctctaggaggtaggaatgtggctaattttaattttcttctttaaacttctgtgtrttttctaagttaatattaaatcaacaaacattattgcttttgatgatgtggaaaacaataaagctacggtcattttggaaaggagagaaaacatgtggtaacaacaataatagtagctaacatttactgagcagttactatgtaccttggttttaagtacacttatattttgatctcataacagtacttatgaggtatgtaatactgtccccatattagagatgagaaaacactgaagcttagagagtttaagggactt

SEQ ID NO: 891450 - DNA, 639 bp, Homo sapiens
caacaatgtggatgaatcttaagtaaattatgctaagtgaaataagtcagtcacagaaggacaaatactacatgattctacttatatggaatatctaaaatagtcaaactcatggaagcaaagaatagaatggtgactgtcaggggctgggaagaaggggaaatggggagttgctaatcaacaggaataaaatttcagttatgcaagatgaatgagttctagagttctgctgttcaacattgtgcccataaataacaatactatattgtacatttaaaaatctgttaagtgaatagatctcacattaaatgttcttaccacaataaggaytaataaaataataaaataaaatgagaagttatataacatccaagtcacgtacagctggttaaaatgaggtttggatacagattgcaaaggaagtgaaatcatctttatttgtagatgatatgatcaggcaggcagaaaattttaaggaatctagaaaaagtttactagaactaataagtgagattggtaaggttgcaggacataaaactaatgtatataaatcaaacatatttctacatagtagcagtcaaccatcagaaggtgaaattttaaaatataaaccatttctaataacatcaaaaatatgaa

SEQ ID NO: 891451 - DNA, 545 bp, Homo sapiens
atggatcaatcccagttaatggaactgttaaaagaaatagaagacagtgaatgtaataatctgtgttctttgccaatgcacgttgattaagtaatggaaaagatttacaaagatttgctgtactgttcaagattttactgaaacagaaggaatgcttgtcaaatattaatttttttttctttttcttttcttttcttttcttttytttttttttttttagacagtctcactctgttgcccaggctggagtgcagtggcacgatctcagctcaatgtaacctctgcctcctgggttcaagcgattctcctgcctcagcctcccaagtagctgggattgcaggtgcccactaccatgcctggataatttttgtatttttagtagagatgggatttcaccatgttggccaggcttttctcgaactcctgacctcaagtgatctgcctgcctcggcctcccaaagtgctgggattacaggcatgggccactgtgcctggccaaatattcaaaaattaaagacaaaaacgactgaataactttgatatca

SEQ ID NO: 891452 - DNA, 641 bp, Homo sapiens; identical to SEQ ID NO: 890453

SEQ ID NO: 891453 - DNA, 633 bp, Homo sapiens
  misc_feature 597, 598, 599, 600, 601, 602, 603, 604, 605, 606, 607, 608,609, 610, 611, 612, 613, 614, 615, 616, 617, 618, 619, 620,621, 622, 623, 624, 625, 626, 627, 628, 629, 630, 631, 632,633: n = A,T,C or G
ctctgtgactcgcctttcaattcttccctgaagtagacccaagaaccctctcttggggtctggatcgagacccctttttccagcaacacaacccgcggggccgcctcccgcccaccctcaggtgcaggagaccccgggccatgcatccttccgggcaggaaaatgtcagccagcgctcgccsgccgctttcctcccccgcctcccgaagttctcgcccggtagctccccgactggctctcgcgccggacaaaggcgcacgctgattggccgcagggccgtagtcatgcaggacgcgcgactctaggggcgggaccagacaaggggtgactgccgcgcggcgcgggggaggagaccttcatctgttcacgcggtagcgcggattgcggttcgcggcgcgcgccaccgggcaaggaacggtgggccgaggggttggaggtggggccccaggaggacctcgggctgtgggccgggagagcggagtcggggagtggggcgggggagcgaggtggcgccggggagcctgggatatggcgcggccagacgatgaggagggggcggcggtggcgcccggacacccgctcgcgaaaggatacctnnnnnnnnnnnnnnnnnnnnnnnnnnnnnnnnnnnnn

SEQ ID NO: 891454 - DNA, 633 bp, Homo sapiens
  misc_feature 597, 598, 599, 600, 601, 602, 603, 604, 605, 606, 607, 608,609, 610, 611, 612, 613, 614, 615, 616, 617, 618, 619, 620,621, 622, 623, 624, 625, 626, 627, 628, 629, 630, 631, 632,633: n = A,T,C or G
ctctgtgactcgcctttcaattcttccctgaagtagacccaagaaccctctcttggggtctggatcgagacccctttttccagcaacacaacccgcggggccgcctcccgcccaccctcaggtgcaggagaccccgggccatgcatccttccgggcaggaaaatgtcagccagcgctcgccggccgctttcctcccccgcctcccgmagttctcgcccggtagctccccgactggctctcgcgccggacaaaggcgcacgctgattggccgcagggccgtagtcatgcaggacgcgcgactctaggggcgggaccagacaaggggtgactgccgcgcggcgcgggggaggagaccttcatctgttcacgcggtagcgcggattgcggttcgcggcgcgcgccaccgggcaaggaacggtgggccgaggggttggaggtggggccccaggaggacctcgggctgtgggccgggagagcggagtcggggagtggggcgggggagcgaggtggcgccggggagcctgggatatggcgcggccagacgatgaggagggggcggcggtggcgcccggacacccgctcgcgaaaggatacctnnnnnnnnnnnnnnnnnnnnnnnnnnnnnnnnnnnnn

SEQ ID NO: 891455 - DNA, 633 bp, Homo sapiens
  misc_feature 597, 598, 599, 600, 601, 602, 603, 604, 605, 606, 607, 608,609, 610, 611, 612, 613, 614, 615, 616, 617, 618, 619, 620,621, 622, 623, 624, 625, 626, 627, 628, 629, 630, 631, 632,633: n = A,T,C or G
ctctgtgactcgcctttcaattcttccctgaagtagacccaagaaccctctcttggggtctggatcgagacccctttttccagcaacacaacccgcggggccgcctcccgcccaccctcaggtgcaggagaccccgggccatgcatccttccgggcaggaaaatgtcagccagcgctcgccggccgctttcctcccccgcctcccgaagttctcgcccggtagctccccgactggctctcgcgccggacaaaggcgcacgctgattggccgcagggccgtagtcatgcaggacgcgcgactctaggggcgggaccagacaaggggtgactgccgcgcggcgcgggggaggagaccttcatctgttcacgcggtagcgcggattgcggttcgcggcgcgcgccaccgggcaaggaacggtgggccgaggggttggaggtggggycccaggaggacctcgggctgtgggccgggagagcggagtcggggagtggggcgggggagcgaggtggcgccggggagcctgggatatggcgcggccagacgatgaggagggggcggcggtggcgcccggacacccgctcgcgaaaggatacctnnnnnnnnnnnnnnnnnnnnnnnnnnnnnnnnnnnnn

SEQ ID NO: 891456 - DNA, 581 bp, Homo sapiens
ataagattattatttctctgtttcttattaaggcattttaaaagtatatttcttctacatttaaatagttctcctaaatttataaattatagtaaatgtgttttcaaattatataggaatattaaaatatttcaagagtataaaaagataacataaaccttgtttaaaaatgcatagcacttctcccttcactctttctctctcttgctgtgccatgtgaagattatgcctgcttctccttcaccttctgccatcattgtaagtttcctgaggcctgctcagcagtgcctcctgtatagtctgtggaactgtgagtcaattaaatctctttcctccaaatttccccagtctcatgtatgtttttatagcagtgtgagaatgaactaatacagaaaattcgtgtcagataaatgaggcattgctataaagatacytaaaatgtggaagcaactaaggaacttgataatgggcagaggttggaacaggttggaaagctcagacaaagacagaaagaatactgaacgtttggaacttcctagagacttgttgaatggttctaacaaaaaatgctgatagtgata

SEQ ID NO: 891457 - DNA, 636 bp, Homo sapiens
attgcctctcttctacactaactctcagattcacacttatgtttcctgtaatttgctcctaccatagagataggattatccatttgcctctcttcatgccacttgcagggtgctaggtatgggggaccattgtgataatgttactttccattctgttttgctttgagtaaataaactatgtgctctggtctctgactcagtacactatttctgctagaatatatatatctacgtacctgtctatcaatacacctatctatttagagtataactgtacatgtagggtgacatctcagtacctcattctcttcccagcttctgatttaacackaatctctttgtttctctctgcttaatataacattcataaacacaggatatagttgggttttggttcttcatggaatctgatcatcactgcctttgattgaagtgtttatgtcatttacatgatattatttttctcctgcctaaagctcttacatttaaaaaaaaataattgaattttgctggtgttgaatttcttcagcattttcatgtgtgaaaaatatttattttaccttaaattttgaaaagtatattctgatggtacaaaagtctactttgacagtggagtcacttgatgggttcctcctg

SEQ ID NO: 891458 - DNA, 565 bp, Homo sapiens
tgtattcccccatgaattaaatgggaaccacaaaaataaaagaaatatatattgttgtagagtattttttatttctagataaatgtgttattagaaaaaacttataaattttataaaatgcacattcaacacttattgaaatcaaatatgtatatgtacaaacattttctttattttttttttcttttttgagatggagtctcrcactgtcgccagggctggaatgcaacggcgcaatcttggctcactgcaacctctgccttctgggttcaagcgattctcatgcctcagcctcctgagtagctgaaattacaggtgcccaccaccatgcccagctaattttttgtacttttagtagagatggggtttcactatgttggccaggctagtctcaaactcctgacctcattatccgcccacctcggcctcccaaagtgctgggattgtaggcgtaagccactgtgcctggcttgtacaaacgttttctttgtataaactctgtatatttttctttatttcattttttgttgttgttgttttcatctagtttatggtattaatagac

SEQ ID NO: 891459 - DNA, 619 bp, Homo sapiens
ctccctcttataaactaatggcaatttgacaaatcacttaaactttctgaattaacctagtgcaagtttactgtgaagactgaatccactgccaaaggatcacatatgcatctcaattaaagtacttagtatggtggattgtgtattcttgtttcctggtctgtaggtctgtactctgtatgtaaatagtcttacttaatttgtctttgagctccagtgcatcatagtctctaaatattgcctgttgagtaaatgaaagtaccytcccaatagcaaagagggccattcatccttaatatacaaatttaattaaatcatgatcagtttattagctggtggttagagatgtggttgtcaatacggctgagcctcagggcatcattaagaacattcaatatttctgtactattgacacttggttgcactagataataagaactgtacaagatagcatgatagatgaaccaagttttataatttattttacaaaggaagcacaccttaatttgtttgctttgagggaaaaatgaacactttatgaacacattatgaaaaaccagagttcaaagatgtagtgttactcttgtgaaaaaatattctcgggggtgataaggggcat

SEQ ID NO: 891460 - DNA, 626 bp, Homo sapiens
acccttatgtaatctacactgcttagtagagaactacacatgtattttggtgctaaccatattatcacctttaatgtaagacttccattttagaaaaagatccaagagtcaacttatattcttttctgtatttattatattagtccaaagctgtatctgctggccattaatggaaagaggagcttggacttgttggtatgtacctgggaatagaattggggcrtaccctttctgcgtttcccttggttcacatatttgcaaaaaagaaacaaaatatcctcaataaaattttctcaaaacaaagctatctaccgcaaatgaagcagacacaatttatcgaatgaataaggaataatacaatagtgtcacattatcttattggtcaatatacattatataattacacaaagttttgtgtagtgtattggagatagaaatctttgctaacaataatgaatttcatttgcaaattttcagcctaggctcttttgtgcatgtgtgtataaatgttacttaaaaagagttatgtattatatatagtagagatctagatgtttcctaaatataaaattttcccaatgattagcatgcctgattagcagggtaattttgcttattgtccttat

SEQ ID NO: 891461 - DNA, 650 bp, Homo sapiens
taaatgtaggtggcataatattttgggaaatagttttatggcaccataggtgctattatctaagatatccagcaggaaactcagcagccagcaagaggtcccccacatttttgtgtatagactgaaatgtggtcactaacaaaatgaccgagggatgtctagccagttattatgcsctcatttgcttagaaattttaagtttgaatcttgacacatttctttcttagatgagttgataagagaaattacagtcatagcagcaatgcttctcttttgaagtattgtccttgtgtaaataggtttttatatggcgagaattttaagaattttagatgttttcttttatttgaaaaaccttatcctattgccagtaggcagtatttaatattgcatattctgtttctatgatgagaaattattaaagttaatgaatctatctagatccttaggcttcattacacacaaacacacacacacacacacacacacacacacacttcatcagaaataaatatgatagagactctccccttgaatttgaaatctcatttccttgattttccaaaaaaatttctattgtaataaacatggtaatgtggaagggtagaatagaaaaataaaaaatggcatgccctcatctaaatttatat

SEQ ID NO: 891462 - DNA, 650 bp, Homo sapiens
taaatgtaggtggcataatattttgggaaatagttttatggcaccataggtgctattatctaagatatccagcaggaaactcagcagccagcaagaggtcccccacatttttgtgtatagactgaaatgtggtcactaacaaaatgaccgagggatgtctagccagttattatgccctcatttgcttagaaattttaagtttgaatcttgacacatttctttcttagatgagttgrtaagagaaattacagtcatagcagcaatgcttctcttttgaagtattgtccttgtgtaaataggtttttatatggcgagaattttaagaattttagatgttttcttttatttgaaaaaccttatcctattgccagtaggcagtatttaatattgcatattctgtttctatgatgagaaattattaaagttaatgaatctatctagatccttaggcttcattacacacaaacacacacacacacacacacacacacacacacttcatcagaaataaatatgatagagactctccccttgaatttgaaatctcatttccttgattttccaaaaaaatttctattgtaataaacatggtaatgtggaagggtagaatagaaaaataaaaaatggcatgccctcatctaaatttatat

SEQ ID NO: 891463 - DNA, 650 bp, Homo sapiens
taaatgtaggtggcataatattttgggaaatagttttatggcaccataggtgctattatctaagatatccagcaggaaactcagcagccagcaagaggtcccccacatttttgtgtatagactgaaatgtggtcactaacaaaatgaccgagggatgtctagccagttattatgccctcatttgcttagaaattttaagtttgaatcttgacacatttctttcttagatgagttgataagagaaattacagtcatagcagcaatgcttctcttttgaagtattgtccttgtgtaaataggtttttatatggcgagaattttaagaattttagatgttttcttttatttgaaaaaccttatcctattgccagtaggcagtatttaatattgcatattctgtttctatgatragaaattattaaagttaatgaatctatctagatccttaggcttcattacacacaaacacacacacacacacacacacacacacacacttcatcagaaataaatatgatagagactctccccttgaatttgaaatctcatttccttgattttccaaaaaaatttctattgtaataaacatggtaatgtggaagggtagaatagaaaaataaaaaatggcatgccctcatctaaatttatat

SEQ ID NO: 891464 - DNA, 622 bp, Homo sapiens
agttaatggcacatgggaaacatggaaaaaccacacagaatccctatacagtcacctgtagagcctcttgtttacataataagctttacttagagagacagccgagctggttggtctcacaaaagggaggatgattcttttattagaattatcacttttttttgcagtgcatttattcaytcatcatatgtctgttacagatgtgtctagatgaaaggaggaacttaattaagatttattgaataaacactgtgagaaaagctattgtactgccatgctgctttgcagagaaatttgattcttgcttccctccttattcaatgaaaactccacatgaaagtatcaatttgttcttggcttccttgatatgcgttttgaaagacagttgctgaaccacaatgcaagtgtatttccctctggtttttattctatattatgcactatcacgttgtctattttatttcaccatgagaaattctcaaagattaaggtaaagtgaatgtgaagactcaaatggaactccactctgactgagcaggccagttcaggtgtttcccggtcctaggactttgcagatatggaaacacttctctggagaacccattatcctctttaactcaaa

SEQ ID NO: 891465 - DNA, 622 bp, Homo sapiens
agttaatggcacatgggaaacatggaaaaaccacacagaatccctatacagtcacctgtagagcctcttgtttacataataagctttacttagagagacagccgagctggttggtctcacaaaagggaggatgattcttttattagaattatcacttttttttgcagtgcatttattcattcatcatatgtctgttacagatgtgtctagatgaaaggaggaacttaattaagatttattgaataaacactgtgagaaaagctattgtactgccatgctgctttgcagagaaatttgattcttgcttccctccttattcaatgaaaactccacatgaaagtatcaatttgttcttggcttccttgatatgcgttttgaaagacagttgctgaaccacaatgcaagtgtatttccctctggtttttattctatattatgcactatcacgttgwctattttatttcaccatgagaaattctcaaagattaaggtaaagtgaatgtgaagactcaaatggaactccactctgactgagcaggccagttcaggtgtttcccggtcctaggactttgcagatatggaaacacttctctggagaacccattatcctctttaactcaaa

SEQ ID NO: 891466 - DNA, 581 bp, Homo sapiens
atctatggatttcctgaaatatgttgttgagtaagtatttgaattttctctttggggttatgtgttcttaccagcgagagggcatggagccacaattcagttaattgttactaaacacccaattgaaatactacttgtagtagatttttttgaggctggtgtacaaggcaattgaaaagttagaaggcctagcttcttatagtttttgggtgcctcagtgacccatactgattctcttgcagcaaactaaacttcaagcctctggagcaggagatgcctgtkcagttccaggtggtagagctgcccagtggccaccatctatgcaaagtgaaagctctgaacaagggtgatgccaactctgaagtcactgtgtactaccaggtcagttgggtgtactaaagactggcggaaggcccagtgcctggggatcagggaccccgtgaccttcaaggcccttttatagttacttctgtagtttcatgcttggggccatttgtcctcttgaagcaactacatttaaaaattgctcctgttggtaaaatggatcctttttcaatcacagtgaggtattgcttcattaa

SEQ ID NO: 891467 - DNA, 539 bp, Homo sapiens
ttcctgaatacagcacactgagggatcttgactcttgactctttatccaatttgccagtctgtgtcttttaattggagcatttagcccatttacatttaaggttaatattgttatgtgtgaatttgagcctgtcattatgatgttagctggttattttgcccgttaattgatgcagtttcttcctagcctcgatggtctttacaatttaacatgtttttgcagtggctggtacmagttgttcctttccatgtttagtgcttccttcaggagctctttttagggcaagtctggtggtgacaaaatctctcagcatttgtttgtctgtaaaggattttatttctccttcacttatgaaggttagtttggctggatatgaaattctgggttgaaaattctttaagaatgttgaatattggcccccactctcttctggcttgtagagtttctgccgagagatccgctgttagtctgatgggcttccctttgtggataacgcgacctttctggctgctcttaacattttttccttcatttcaac

SEQ ID NO: 891468 - DNA, 539 bp, Homo sapiens
ttcctgaatacagcacactgagggatcttgactcttgactctttatccaatttgccagtctgtgtcttttaattggagcatttagcccatttacatttaaggttaatattgttatgtgtgaatttgagcctgtcattatgatgttagctggttattttgcccgttaattgatgcagtttcttcctagcctcgatggtctttacaatttaacatgtttttgcagtggctggtaccagttgttcctttccatgtttagtgcttccttcaggagctctttttagggcargtctggtggtgacaaaatctctcagcatttgtttgtctgtaaaggattttatttctccttcacttatgaaggttagtttggctggatatgaaattctgggttgaaaattctttaagaatgttgaatattggcccccactctcttctggcttgtagagtttctgccgagagatccgctgttagtctgatgggcttccctttgtggataacgcgacctttctggctgctcttaacattttttccttcatttcaac

SEQ ID NO: 891469 - DNA, 607 bp, Homo sapiens
ttctgaatgctggcgtaaccatgagctcagtcattaggtgatatcccttgtccatttttcgttttcccttggtcatatcatccactctcatggcttaaaaaacctggcaatatattgataactaccaaatttatatttccattggagacatctcccctaaaccctaaactctagaggtgtgtgtgtgtgtatctctaatagcctactgaaaatcaccacccacatgtcgggataaacaatgctgctgtaacatccatattgctttggaatgcacaattcccatgcattttggcctgacttccagttgtaaatatttataacttagccagaargctttctctagcactagagcctagtcagcctacttggcctgtgtatgaggctgagttaactccctccataagctgctgtcaaccagtgactgatgggagctaaaggatgaatgctccagctcgttcacttctcagggacttctatgctcctgcacagacatttgttttgaggtatcttctgtttctcagagttccccagagagattgagttccagttgcctatggtatcaactggcttgttaatacaccctttactggagtccgtttcttaccca

SEQ ID NO: 891470 - DNA, 639 bp, Homo sapiens
gatggatttctgaagtcttttatgatgcagtaaaatttttcttagctaaaaaaatgggaaatgttttatcctaaaattgagaacaagagcccagtacagtccccttctagtgataaatttattataacttagcatcttatgggcataaaaataataatctaaacttgagttttttattattaaactggactccatgggacaaattcaggagattcatgaacctcaaacaattatgtgcctactgggtgttaacgtatatctggagtggaaggtggagtctatcactttcatcaggttttaagaggtttgaaacactgtactggctttatacgrccttatatttatattcccactattaggctagtttcaaggagacacttgacactggggctaggtcctctatttcaacttacaccatgttgagaaaatggattttaagaaaaatgtgcatgcgtgtgtatgtctgggggttaaggaaatagaaaaaatgattacaatccacggtatggaatgcttcccgagtttgcagtagagactcctggatgctcaagaacaagaatgaggttgtggctagtaagggaagcgagggttactaataagaatcttaaagacaagctctacttcacattcaatctccaa

SEQ ID NO: 891471 - DNA, 639 bp, Homo sapiens
gatggatttctgaagtcttttatgatgcagtaaaatttttcttagctaaaaaaatgggaaatgttttatcctaaaattgagaacaagagcccagtacagtccccttctagtgataaatttattataacttagcatcttatgggcataaaaataataatctaaacttgagttttttattattaaactggactccatgggacaaattcaggagattcatgaacctcaaacaattatgtgcctactgggtgttaacgtatatctggagtggaaggtggagtctatcactttcatcaggttttaagaggtttgaaacactgtactggctttatacgaccttatatttataktcccactattaggctagtttcaaggagacacttgacactggggctaggtcctctatttcaacttacaccatgttgagaaaatggattttaagaaaaatgtgcatgcgtgtgtatgtctgggggttaaggaaatagaaaaaatgattacaatccacggtatggaatgcttcccgagtttgcagtagagactcctggatgctcaagaacaagaatgaggttgtggctagtaagggaagcgagggttactaataagaatcttaaagacaagctctacttcacattcaatctccaa

SEQ ID NO: 891472 - DNA, 635 bp, Homo sapiens
tgcttcttggccgcataaatgtcttcttttgagaagtgtctgttcatattctttgcctgctttttgatggggttgtttttttcttgtaaatttgtttaagttctttgtagattctggatactagccctttgtcaaatgggtagactgcaaaaattttctcctatcctgtaggttgcctgttcactctaakgatagtttcttttgctgtgcagaagctctttagtttaattagatctcatttgtcaaatttagcttttgttgccattgcttttggcgtttttgtcatgaaatctttgcccatgcctacgtgctgaatgctattgcctaggttttcttctagggtttttatggttttgggttttacttttaagtctttaatccaccttaagctaatttttgtattagatgtaaggaaggggtccaatttcagttttctgcatatgtctagccggttttcccagcaccatttactgaatagtatatcctttccccattgcttgcttttgtcaggtttgttgaagatcagatgattgcagatttctgaggtctccgttctgctccattggtctatatgtctgttttggtaccagtaccaggctgttttggttactgtagccttgtagtgtagtttgaag

SEQ ID NO: 891473 - DNA, 635 bp, Homo sapiens
tgcttcttggccgcataaatgtcttcttttgagaagtgtctgttcatattctttgcctgctttttgatggggttgtttttttcttgtaaatttgtttaagttctttgtagattctggatactagccctttgtcaaatgggtagactgcaaaaattttctcctatcctgtaggttgcctgttcactctaatgatagtttcttttgctgtgcagaagctctttagttyaattagatctcatttgtcaaatttagcttttgttgccattgcttttggcgtttttgtcatgaaatctttgcccatgcctacgtgctgaatgctattgcctaggttttcttctagggtttttatggttttgggttttacttttaagtctttaatccaccttaagctaatttttgtattagatgtaaggaaggggtccaatttcagttttctgcatatgtctagccggttttcccagcaccatttactgaatagtatatcctttccccattgcttgcttttgtcaggtttgttgaagatcagatgattgcagatttctgaggtctccgttctgctccattggtctatatgtctgttttggtaccagtaccaggctgttttggttactgtagccttgtagtgtagtttgaag

SEQ ID NO: 891474 - DNA, 635 bp, Homo sapiens
tgcttcttggccgcataaatgtcttcttttgagaagtgtctgttcatattctttgcctgctttttgatggggttgtttttttcttgtaaatttgtttaagttctttgtagattctggatactagccctttgtcaaatgggtagactgcaaaaattttctcctatcctgtaggttgcctgttcactctaatgatagtttcttttgctgtgcagaagctctttagtttaattagatctcatttgtcaaatttrgcttttgttgccattgcttttggcgtttttgtcatgaaatctttgcccatgcctacgtgctgaatgctattgcctaggttttcttctagggtttttatggttttgggttttacttttaagtctttaatccaccttaagctaatttttgtattagatgtaaggaaggggtccaatttcagttttctgcatatgtctagccggttttcccagcaccatttactgaatagtatatcctttccccattgcttgcttttgtcaggtttgttgaagatcagatgattgcagatttctgaggtctccgttctgctccattggtctatatgtctgttttggtaccagtaccaggctgttttggttactgtagccttgtagtgtagtttgaag

SEQ ID NO: 891475 - DNA, 636 bp, Homo sapiens
agaatcatatggcccaaaatggcagcataccattgttgataaatgccgatttagatatatcaaaaaaaatttaaattaacaagacatcagataaaagctaaaattatcatacttatttgctatttcaacttatataaaggttcataagatgggcctccaataagtggttgctttgagatattaactaatgatggcaatacatatatactggggctactcyctcaaaaattttgggtgcagtacatacatgactgaaaatattagagtccatcatgccacaatctcctccaatttggtcattctccttgggtgaggtacattttaggggagaagaaaagtgctgcagcccctcttatgattacttttactacctccattgcacaagaaagaatggaagagatcagcagcctcctgattttaccttgggaaaaatgaagcttatcaaataaccttcctgacataagatcttagctagatgctgtgaaaatggactgaaaagtggaaattacagtcatgtttataattggcagttttcaggtatatttaaatatgtaaaatgtaaaccttaaagaggaaataccatgttctgccaaaccactttctctgatctgtgttttttgggggacataatacagt

SEQ ID NO: 891476 - DNA, 636 bp, Homo sapiens
agaatcatatggcccaaaatggcagcataccattgttgataaatgccgatttagatatatcaaaaaaaatttaaattaacaagacatcagataaaagctaaaattatcatacttatttgctatttcaacttatataaaggttcataagatgggcctccaataagtggttgctttgagatattaactaatgatggcaatacatatatactggggctactccctcaaaaattttgggtgcagtacatacatgactgaaaatattagagtccatcatgccacaatctcctccaatttgrtcattctccttgggtgaggtacattttaggggagaagaaaagtgctgcagcccctcttatgattacttttactacctccattgcacaagaaagaatggaagagatcagcagcctcctgattttaccttgggaaaaatgaagcttatcaaataaccttcctgacataagatcttagctagatgctgtgaaaatggactgaaaagtggaaattacagtcatgtttataattggcagttttcaggtatatttaaatatgtaaaatgtaaaccttaaagaggaaataccatgttctgccaaaccactttctctgatctgtgttttttgggggacataatacagt

SEQ ID NO: 891477 - DNA, 639 bp, Homo sapiens
ttaataaatggtgctgggaaaactggctagccatatgtagaaagctgaaactggataccttccttacaccttatacaaaaattaattcaagatggattaaagacttacatgttagacctaaaatcataaaaactctagaagaaaacctaggcattaccattcaggacgtagacatgggcaaggacttcatgtctaaaacagcaaaagcaatggcaacaaaagccaaaattgacaaatgggatctaattaaactaaagagcttctgcacagcaaaggaaactaccatcagagtgaacaggcarcctacagagagacattttcaaatagtttaagagagaaattatttttaaaaactaaacttccaatagagcccataaagttctaaatttaaagcaaaactctttgctgaagacttacaacggcatttagactattcaactatcttactgacagagtcatgcttcagtcctggctgatgatgggtaatgtcattcatttccatggcttttactatcagctatgtgttgatggcttccaaatctatacaatagcaatgacggaagtcagtttttcattagacatatccatctgagtaacccactaaaatatcaaacttaataggtttcaaactgagctcat

SEQ ID NO: 891478 - DNA, 650 bp, Homo sapiens
tcttttttctttttcttttttttttgagacagagtcacgctctgtctcccaggctggagtgcaatggtgcaatctcggctcactgcaacctccacctcccgggttcaagcaattctcatgcctcaggctcccgagtagctggaattacaggtgctcaccatgcccggctaatttttttgtttttagtagagacgggtttcaccatgttggccaggctggtctcgawctcctgacctcaaatgatcatcctgcctcggcttcccagagtgctgggattataggcataagccaccatgcctggcctaatgtctctcatctctatcaggaagatagtaatagcatccctccaagcaccgctagagacttaggttagggagttaaatgaaatcctgggctataaagcgcttaccactagtccctgacactgagtccctgagtacacactgcttattatggaccacatggccccacttaatcctgaatagcaacctagacagactcgagccagactggctgtgccaccttgggcaagttgcttaacctctctgagccttgtccttaacacagtgacaataatatgcatagcataggattgttgtaaggactttaaaaatcttgataggaatattgcttactgtttggcatgtgct

SEQ ID NO: 891479 - DNA, 605 bp, Homo sapiens
gttgcaattttccatctctctagttagttgtattcctgagtattttattcttttttggctattgtgaatgagattgtgttcctgatttggctttcaacttggctgtcattggtgtataggaatgctactaatttctgtacattgattttgtattctgaaactatgctgaagctgtttatcagatcaaggagcttttgggcagagrctattctcttctaggcatagaatcatatcatctgcaaacagggatagtttgacttcctctcttcctatttggatgtcttttatttccttctcttgcctgactgctctggttaggacttccagtatgatgctaaatgggtgtattgagaggccatcccttgttttgttctgattttcaagggaagtgcttccagcttttttccattcagtatgaggttggctgtgggtttgtcatagatagctcttattattttgaagtatgtaccttcagtgcctactttattgagggcttttttaacacaaaggaatgataaattttatctttagtcttttctatgtctattgaaataatcatttggattttttatttctagttctgtttatgtgaagaataacattga

SEQ ID NO: 891480 - DNA, 608 bp, Homo sapiens; identical to SEQ ID NO: 890653

SEQ ID NO: 891481 - DNA, 534 bp, Homo sapiens
aagtgccttaacaggtataccatttaaaaaaatcttttatactttttttgttttttttttttttgagatggagtctcgctctgtcgcccaggctggagtgcagtggagcaatgttggctcactgcaagctccgcctccagggttcacgtcattctcctgcctcagcctccccagtagctgggactacaggcgcccaccaacacaccyggctaattttttgtagttttagtagagagggggtttcaccatgttagtcaggatggtctcgatcttctggcctcgtgatccacccgcctcagcctcccaaagtgctgggattacaggcatgagccaccgcacctcgcccttttatactgtttttactgtgtcttttctatgtttagatacaaaaacatttaccattgtgttataattgcccacgctatttagcatgctgtacaggtttgtagccttggagcaataagctataccatatagcttaggtgtatagtaggctaaaccattgaggtttttgtaagtatactgtatgatatt

SEQ ID NO: 891482 - DNA, 605 bp, Homo sapiens
actctagtcaatgacatgcatgccaaagtatttaaaggaaagtgtacaggtatctgcaatttaatgggatggatagctatacgataaagcaagtaatattaaaatgttaatggtaggatagatcctaagtgatgtgctccttataaaattctttatacttggctggatattcgaaaattttcataataaaayatgagggaaaatgacattggtaagacactgtacttgtaaattgtaaacactgataacacactacatttcataaaattgtaagatgttaagtttggtggcagcaccaggtatttgctccttgattgcttccaaactacgctgcacacacctcttacagaatggttgcctctcccagcatactataagttcctggtgggcacagatctaacctaatttgtatttatattcctattgctttgcatcatgtttggggaataatatgtattcaacaatagtggcatgattgaattaaagtggaatactgctaacgaacaaagtattatatttctagcagattcactattcttttcttacatattctaaaggttaatacgctcaatatccaagagaaatgtgtccttacttctctccaa

SEQ ID NO: 891483 - DNA, 630 bp, Homo sapiens
ataatcacaatacatccatcagaagcaggaaattaatattgatttcctacaagcttgtaatccacagacccattcacatttcatcagttgtgcaaataatgtctcttatagcaaaaggatccaggccagggcatgtgtcaygtgactcgtagtcttggttaatctggaacaactcccttttccttgtatttctttgattttcatgaccttgacacttctgaagattacacacaagttattttacagaatgtccttcagtttggatttgcctgaattttttttttttttttttgtaatctgattcaggttctgcattttgggcaagaatcccacagaaattatgtcatgtcctcataatacactagcaggtagcacctgatcttgatttgccccattccttacaatgttcactttgatctcttgattaagctggtgtctgccagcctccttcactatcaaggtactcttttttattttgtaattaataagtattttgggggaatctactttggaactatggaaatgtcctcaatttttaatttatttacttatttatttctatcactatggacttgtgctttcctcttttactcaatggggtataatctgttattttcagcatgtattttg

SEQ ID NO: 891484 - DNA, 590 bp, Homo sapiens
gcaatccaacaaaattgagtcctttttccttttctttgtaacttccttcactgtaagaaatttgactagcagtgctgataatatacttactgatttattcaaacctagtatacatataaagtagtttcagttgctgatttatgcctctgtgagaaacacatttactaactagattacagtatttgtatataggatttttgtcttttggatctaaacttattttgataatacatttatttcctctcaaatttagttttcaagrtgaccttctccagtatcagctatagtgagataattatcgcataaattgacttttggtggcacaggttatcactggaacacagaaatgtgcacactggctacagataacaaagatatctgtaatatgaaggaaaaaggtttcacctatgtttgcttattcttaattggaagtatatactttgttataactttgtgcttttttgtccagtatcagctcaaaaatcaatatttctttgaagtctcagagcaacatactaaatttttacaggaagcccatactatcaacacacattttagatttcagttataagattagtatatcaaaatga

SEQ ID NO: 891485 - DNA, 590 bp, Homo sapiens
gcaatccaacaaaattgagtcctttttccttttctttgtaacttccttcactgtaagaaatttgactagcagtgctgataatatacttactgatttattcaaacctagtatacatataaagtagtttcagttgctgatttatgcctctgtgagaaacacatttactaactagattacagtatttgtatataggatttttgtcttttggatctaaacttattttgataatacatttatttcctctcaaatttagttttcaagatgaccttctccagtatcagctatagtgagataattatcgcataaattgacttttggtggcacaggttatcactggaacacagmaatgtgcacactggctacagataacaaagatatctgtaatatgaaggaaaaaggtttcacctatgtttgcttattcttaattggaagtatatactttgttataactttgtgcttttttgtccagtatcagctcaaaaatcaatatttctttgaagtctcagagcaacatactaaatttttacaggaagcccatactatcaacacacattttagatttcagttataagattagtatatcaaaatga

SEQ ID NO: 891486 - DNA, 526 bp, Homo sapiens
atatagcccatttgtatttctcagtgaattgtcgatattgctatttttcttcttcattaaagtgaaatgtgcatcttgtaactgtgatacatatactcttttataatcagacacaaatttgtcctactttttcagagatacatatataggcatagacataaataaatatattgatacagagagaggagagagagttagagagacatccgtagaagttgtagaaawacagtgaaggcattaatttgaagtgaaaattaccatgaagaaccccctagttaaatcactgaatgttctatccactccacattataagaatttttgaagaaactaagcttttaaggttttttttctgtttgttttctgtatcattagtaagctagagaaagagcaatgactattacttactggctggtgctttgtttgttatttttaaaaattttcatacaaagggacttaaatactaaattatagcaggaatatactaaactcacatagtaaacaacactaatcctgaaaaataattaaa

SEQ ID NO: 891487 - DNA, 585 bp, Homo sapiens
ttagatgttcaaattaggggcaactgcatgaagtgtgtataggaactttccgtactacctttgcaaacgctttggaaatctaaaattattccaagatagaaagggtttcgagaagaaataacttgtgtaaccagcacttagataaaaaacaaacaaaataaaacagaacattacagcatcatgaaaaagcctttgtacctcattccagtcactatcctctggaggataaccacttacctaaaatcccacagcacagattgattaaactttttaaaaaaarttacataagtggaatcaaattgtatacactttcttatgtttggtttgtttcactgcatgtcatggaagttagacacaaccttattatttcatgttgcaaaatttatttattcttattaccagagtgactatatattttaaggtagcataaatgtatttattcattgtagtactgacagacatttagggttgttttcacattgttgctactaagaatagcatactatgcatgctatgactgatcttgagcatatatttctatatatgtatttctatagtgtataaaaataggagtaaaattgctgg

SEQ ID NO: 891488 - DNA, 639 bp, Homo sapiens
acaactatcagatctacaatcctgacaagtagaagcattgggaaaaggattctctgtacaataagtcatgctgggacaactggctagccgtaagcagaagactgaaactggaccccttcttcgcaccatatacaaaaattatctcaagatggaataaagacttaaatttaaaatacaaaackataaatccatggaagacaatgaaggcaataccattttggacacaggaatgggcaaagatttcatgacaaaaatgccaaaagcaattgcaacaaaagcaaaaattgacaaataatatctaattaaactgaagtccttctgcaaagcaaggaaaactgtcaaaagagtgaacaggcaacctacagaatgggagaaaatttttacaaactatgcaaccaacaaacgtctaacatccagcatctataaggaacttaaacaaatttacaggaagaaaacaaacaacctcattaagaagtgggcaaaggacattttcaaaagaagatatacatgtggctaacaagcatatgaaaaatgctcagcatcactgatcattagagaaatgcaaatctaagccacaatgagatatcatctcacactagtcagactggctattaatagaaagtaaaaaaataaaacaga

SEQ ID NO: 891489 - DNA, 639 bp, Homo sapiens
acaactatcagatctacaatcctgacaagtagaagcattgggaaaaggattctctgtacaataagtcatgctgggacaactggctagccgtaagcagaagactgaaactggaccccttcttcgcaccatatacaaaaattatctcaagatggaataaagacttaaatttaaaatacaaaacgataaatccatggaagacaatgaaggcaataccattttggacacaggaatgggcaaagatttcatgacaaaaatgccaaaagcaattgcaacaaaagcaaaaattgacaaataatatctaattaaactgaagtccttctrcaaagcaaggaaaactgtcaaaagagtgaacaggcaacctacagaatgggagaaaatttttacaaactatgcaaccaacaaacgtctaacatccagcatctataaggaacttaaacaaatttacaggaagaaaacaaacaacctcattaagaagtgggcaaaggacattttcaaaagaagatatacatgtggctaacaagcatatgaaaaatgctcagcatcactgatcattagagaaatgcaaatctaagccacaatgagatatcatctcacactagtcagactggctattaatagaaagtaaaaaaataaaacaga

SEQ ID NO: 891490 - DNA, 618 bp, Homo sapiens
gtgcagcacaccagcatggcacatgtatacatatgtaactaacctgcacaatgtgcacatgtaccctaaaacttaaagtataataaaaataaaataaaataaaagtgttagattatttcagaaaaaaaaatatggtaaacacattgtagaagacagcttgtaaatttcgtaagttaaacacaaaactatcatatgatccattgtattaggccattcttgcattgctttaagaaaatacytgagactgaataattcatagagaaaagagacttaattggctcatggttctgtaggctttataggaaacatgatgctgaccatctgtttggcttctagggaggcctcaggaagcttacaataatggtagaagtcaatggcagagcaggcaatgttgtatgatcagaacaggaacaagagagaacaaggagggaggtgccagatacttttaaacaaccagatctcaagagaactcctcactatcgtaagaacagcaccagaaggatggtgctagaccgttattgagaaatctacccccaacatttaatcacctcacactaggccccatctccaacattaacgattacaattgaacacgaaatatggggagacacagatcca

SEQ ID NO: 891491 - DNA, 584 bp, Homo sapiens
acacatagtcatcttactcatcaatcattccatgaatccaaaatgtaaaaatatgcgaccagcacaccgctgaagtctagggagaacaggttaacaaaaatgcaaacatctacttctttggtaaggacatgaaaacctacagggatttcaacaagtatttataaccacctatctcaaacatctgtgacaccactgggaaactgcctggtaacttaagctccattttcacaaggaattttttaytgatgtaaagttaagttactattcagcacaaaagatgctgtttattttctcaagttgccccaaacagacagccttgaagcaggactcatcttccatgtgtgggcatgtggtctctcagagcagcattgctgttgtttgtttggttttttagataatgaagactttactgattatagcaaagagctttacattgcaaaccattctatttgttttttagcatcccagatctgccctaccagggtcttgatgcagtctctcttgctcccccatcgtaaattgttattaaatgttaataataatttaaaaacctgaggcatcctggttctttccctatgctgcca

SEQ ID NO: 891492 - DNA, 614 bp, Homo sapiens
acatgtactgcattaaagtgcattttatatcatttaatttaaatacaattgaaaatgacttaaattctcctctacttacttggcagaggagaacaatataaatagtgctgtcctgaccatgattctttctgactcctcctccattgcaatgtaaattctcctagaacaagggccatgttgtctggttcattccagtatgtccagatcctgtaacagtgtcaccatattgagtatatttccaatatatttttaaatgggaatcaatgtctgtttattatatcaccattaaagtttcattaagtataaaatgtggtgatttttcacacctacactaggactagatggaacatccgattaaacttaggatattttagtgaattttgaattcattgctcagaaggttgttgttgttgttgttgttgtttttgasagacagcttgtagggaacttacagggagtagatcagtatgtgccataaattaagagaacactagatatggctgactagaaataagaaggtactttacccagccattatcttagccctcatcttatctctgtgagtggttctggttagaaggtggctaaagacatgagggtggaacaagtttaga

SEQ ID NO: 891493 - DNA, 635 bp, Homo sapiens
taaaaaaacaaagactgcctttctattctcaaaacaacatttatttgaggtggatatatgctttctggatgaaaaaatattttcagaataaatttcaaatttaatgtgttaaatggttgtttaccaccagagtaatcctatgtaacaaactcccacgaaacttcagttcttacgacaagctttyattgctttcatggagtaggactggctagttaggcagctttgctggtcttggttgggcttatgcactgagggtcagctttctaaggctgatctaacctggcctggctgagacaacagatgggactcagcccttactcatgtgtttctcatctctctgtagactaattgaggcatattttgtgactatggcagaggcaaaaaagtacaaacaagtaagtgcttcttcaaaccttatttatatattgtcttctagaatctcatttgtcaaaggaagtcacgtggtcaagctaagaatcaagggttgggaaaatataccttttgaaagagggtggtaaaaagtcacacgacaaagaccgtgaatgcagggaggggtgaagaattggggctattaatgtaatcaatggttagatggcagtatttttaaattatttctagccatctcaatcaggtaa

SEQ ID NO: 891494 - DNA, 601 bp, Homo sapiens
aaacccatcattaataatattggctttagtagaaacaatcatattctttctttttcattactttaattttaggggagctttaatatctggttgtacaggctactcttataattcttytttaagattttcttggttattctcacctacagtttttgttcttgcagaactttaggatcgttttgagaagtttaatttcccatgggttttgactagatttgcactaacatctataaactatattgaatcattcaattcacaaacatgttacatctttccatttattcaggtcttcttttatgtaactccataaaatttaatagttctctttccaaaagtcctgcacatttcctagtagctttatgcctaagtcatctatattgctgttgttatagtagatgtaatcatttttaatttttttcttttacttaattatgcagcagtacatgaatacaagtcattacaaaacattaaagacgagtaaaaccaaacactcttgtcattaatcctacaaaccctcactcctcccaccaaaggggacatctctaaagagttgggctcatgtctgtcaatacaattttccatgctccttaaatattgttga

SEQ ID NO: 891495 - DNA, 601 bp, Homo sapiens
aaacccatcattaataatattggctttagtagaaacaatcatattctttctttttcattactttaattttaggggagctttaatatctggttgtacaggctactcttataattcttctttaagattttcttggttattctcacctacagtttttgttcttgcagaactttaggatcrttttgagaagtttaatttcccatgggttttgactagatttgcactaacatctataaactatattgaatcattcaattcacaaacatgttacatctttccatttattcaggtcttcttttatgtaactccataaaatttaatagttctctttccaaaagtcctgcacatttcctagtagctttatgcctaagtcatctatattgctgttgttatagtagatgtaatcatttttaatttttttcttttacttaattatgcagcagtacatgaatacaagtcattacaaaacattaaagacgagtaaaaccaaacactcttgtcattaatcctacaaaccctcactcctcccaccaaaggggacatctctaaagagttgggctcatgtctgtcaatacaattttccatgctccttaaatattgttga

SEQ ID NO: 891496 - DNA, 601 bp, Homo sapiens
aaacccatcattaataatattggctttagtagaaacaatcatattctttctttttcattactttaattttaggggagctttaatatctggttgtacaggctactcttataattcttctttaagattttcttggttattctcacctacagtttttgttcttgcagaactttaggatcgttttgagaagtttaatttcccatgggttttgactagatttgcactaacatctataaactatattgaatcattcaattcacaaacatgttacatctttccatttattcaggtcttcttttatgtaaytccataaaatttaatagttctctttccaaaagtcctgcacatttcctagtagctttatgcctaagtcatctatattgctgttgttatagtagatgtaatcatttttaatttttttcttttacttaattatgcagcagtacatgaatacaagtcattacaaaacattaaagacgagtaaaaccaaacactcttgtcattaatcctacaaaccctcactcctcccaccaaaggggacatctctaaagagttgggctcatgtctgtcaatacaattttccatgctccttaaatattgttga

SEQ ID NO: 891497 - DNA, 601 bp, Homo sapiens
aaacccatcattaataatattggctttagtagaaacaatcatattctttctttttcattactttaattttaggggagctttaatatctggttgtacaggctactcttataattcttctttaagattttcttggttattctcacctacagtttttgttcttgcagaactttaggatcgttttgagaagtttaatttcccatgggttttgactagatttgcactaacatctataaactatattgaatcattcaattcacaaacatgttacatctttccatttattcaggtcttcttttatgtaactccataaaatttaatagttctctttccaaaagtcctgcacatttcctagtasctttatgcctaagtcatctatattgctgttgttatagtagatgtaatcatttttaatttttttcttttacttaattatgcagcagtacatgaatacaagtcattacaaaacattaaagacgagtaaaaccaaacactcttgtcattaatcctacaaaccctcactcctcccaccaaaggggacatctctaaagagttgggctcatgtctgtcaatacaattttccatgctccttaaatattgttga

SEQ ID NO: 891498 - DNA, 643 bp, Homo sapiens
aacttcagtaatacacaaaaatctgctatttttaacaagtctctcctaaatccttttagttgtagatgtcacaaaattgcatccttgtacattaaatactccaaatataggctacaaattttaaatttaatttttattttttgacaaaatrtaattgtatataattgcagagtacacagtgatattatatactcaacacagggtgtgggattattgaaaaaagcaaattaacatatgtatcaccttaatttttattttattttattttttctttccacactacactgatgtatgtatcaccttaaatacttatcatttattcctcctaattgcaactttttgtcctttgacaaatcccattctcccaacttctccagctctagtaatcaccattctactccctgcttctgtgagtttgttttagattccacctgcaagtaagacatgttcatttctctttctatggcttctttcatgtaacataatgtcctccaggttgatacatgttgaaaaagacagaatttctttttttctaaggcgaaatagcattttcttctgtaaatatatcacattttccttatatattcacccattaatgaaatactgatacaacttttacatgatgaaatgggatctagttttt

SEQ ID NO: 891499 - DNA, 643 bp, Homo sapiens
aacttcagtaatacacaaaaatctgctatttttaacaagtctctcctaaatccttttagttgtagatgtcacaaaattgcatccttgtacattaaatactccaaatataggctacaaattttaaatttaatttttattttttgacaaaatgtaattgtatataattgcagagtacacagtgatattatatactcaacacagggtgtgggattattgaaaaaagcaaattaacatatgtatcaccttaatttttattttattttattttttctttccacactacactgatgtatgtatcaccttaaatacttatcatttattcctcctaattgcaactttttgtcctttgacaaatcccattctcccaacttctccagctctagwaatcaccattctactccctgcttctgtgagtttgttttagattccacctgcaagtaagacatgttcatttctctttctatggcttctttcatgtaacataatgtcctccaggttgatacatgttgaaaaagacagaatttctttttttctaaggcgaaatagcattttcttctgtaaatatatcacattttccttatatattcacccattaatgaaatactgatacaacttttacatgatgaaatgggatctagttttt

SEQ ID NO: 891500 - DNA, 662 bp, Homo sapiens
cccagatgggagagatcccaaagtgatcccaggctatgtgggaaggctggctaggggcttgtgcccaggggattcatggaatgtacttcctacagcatagggctgctaaacagccactctgatatggcatctcctttgtctgagaaagagagcagaattttaagggctgtggatgatattctcactactctcatttgtctctggctacctttgggggattttctctcttcaggcacatgtgatgcttctcctaggttgaggcagaaacaattatccatcaccttggagtttcttcacttctctgtagccctaggaactggctcatcctcagatttgagttgagggttattgccagtgataatcttggtgtgtagatatttgttttgttttttggggggttggtgtgaagccagcttgtgtttagtctgcaattttggtgatgccactctcatctattttttaatttttactttaattgtctctaatttttgttgactatgtatatgcatttttgttttctttttatctggttgcttttaggtgaattctaggagatgaagggagaagttctatatttactctgccttttaaaattagatgggytccatgcctgatatgaatgaactgcctctgtttgaaatctctgatgaatgggaaggcca

SEQ ID NO: 891501 - DNA, 631 bp, Homo sapiens
gatattgaattttatcaaaagccttttctgtatctattgaaataatcatgtggtttttgtctgtagttctgtttatgtgatgaatcacctttattgatttgtgtatgctgaaccaaccttgcatcctagggatgaagcctacttgatcayggtggattagctttttggtgggctgctggatttggtttgcaactattttgttgaggatttttgcactgatgttcatcaaagatattggcctgaagttttctttttttattgtatatccgccaggttttagtatcaaggtgatgctggccacatagaatcagttgaagaggaactccctcctcctcaatttttgtggaatatttcagtaggaatggtaccagcacttctttgtacatctgatagaatttggctatgaatctatcaggtcctgggcttttcttgattggtaggatatttattactgattcacttttggagttcattattggtctatagggaatcagtttctttctgggtcagtcttgggagggtgtatgtgtccaggaatttatccatcttctctaggttttctagtttttgtgcgtagagttgttcatagtggtttctggtggttgtttttatttctgtggggtcagtagca

SEQ ID NO: 891502 - DNA, 631 bp, Homo sapiens
gatattgaattttatcaaaagccttttctgtatctattgaaataatcatgtggtttttgtctgtagttctgtttatgtgatgaatcacctttattgatttgtgtatgctgaaccaaccttgcatcctagggatgaagcctacttgatcatggtggattagctttttggtgggctgctggatttggtttgcaactattttgttgaggatttttgmactgatgttcatcaaagatattggcctgaagttttctttttttattgtatatccgccaggttttagtatcaaggtgatgctggccacatagaatcagttgaagaggaactccctcctcctcaatttttgtggaatatttcagtaggaatggtaccagcacttctttgtacatctgatagaatttggctatgaatctatcaggtcctgggcttttcttgattggtaggatatttattactgattcacttttggagttcattattggtctatagggaatcagtttctttctgggtcagtcttgggagggtgtatgtgtccaggaatttatccatcttctctaggttttctagtttttgtgcgtagagttgttcatagtggtttctggtggttgtttttatttctgtggggtcagtagca

SEQ ID NO: 891503 - DNA, 598 bp, Homo sapiens
tatactgcccaaagtaatttatagattcagtgctattctcattaaactaccactgacattcttcatggaattagaaaaaactattttaaaattcatatggaaccaaaaaagagcccaaatagccaagacgatcctaagcaaaaagaacaaagctggaggcatcacgctacttaacttccaagtatactaaaggctacagaaaccaaaacagcatggtactgctacaaaaacagacacatagaccaatggaactgaaaagagaactcagaaataagactacacacctacagccatctgatctttgacaaacmtgaccaaaacaagcaatgggaaaaggattccctatttaataaatggtgctgggagtactgggtagccatatgcagaaaattgaaactggaaattaactcaagatggattaaagacttaaatggaaaacccacaactataaaaatcctaaaataaattctaggcaatactattcaggatataggcataagcaaaaatttcatgacaaaaatgccaaaaacaattgcaacaaaggcaaaaattgacaaatgggatctaattaaatgaaagagcttctgcacagcaaaat

SEQ ID NO: 891504 - DNA, 590 bp, Homo sapiens
cagcatgtgttgcatgatgtttgtaactggattatactcaaggtaactaaaatgagggctaagagtccttaaatttattcaatttttgtactctttttctcttctggatagggagatacataacattagctaatgctagctattctcaaaacatttccttccaagtccattctaagtacctaagatatcaatataaatcataaaaaacattgtgaatttcaattattcctaactgacaataataggagttgctgggaaatgaatcactaattttcacactaaagcttttaattttactatagttcttcctttaaaaaggaagattataattcttctacatgtgatgaaattcacttaaagtagaaatcatttctcaaatattgtttggtrggaaaattaatgatggactcatcagtttaggaacaaagataaaatatataagattttagcacatgtaactaatttcatagaaaactttattaaacttgttgtaataggtttagaatatacatatccttgaaaaaaacccagatatatgtatatatgtgcatgcacacacaaatatttgcatatatgtaattaagatttag

SEQ ID NO: 891505 - DNA, 619 bp, Homo sapiens
ttcaggtacgtaaggattcaggcatttggaagagatggttttactttttcttctgtttgcatgcaagttttcatagggaaggcattacattgcattttgagcacctattacctccaatattgtctcattttcctcccttttatctactttttattagtgagaacagcattttgttgcactttaatgttctctgtactattgcagctattataagaaaggctattgatttctttttcttcatcttctaccctaaaactcaaggyaaacatatatataacctttccccactgctatttcatacagtagactaataactttctccttcatagtatctttctaatgaagtccgcctttacatctagaaccctaaattaaacttactcttccctggccattgtcacctgcattggtataagtggtaattgtacaaggttacttaagagtacttctttcagctgctttataacttgaattccttagagactttcaaagggccaggtttcctttagtctgaagatttgaaattagaataaaattcaaacagaattatactgaagatccttcacactaaagtcatttgtttctgtgttgcaatcatgcttctcctaagcattaaaca

SEQ ID NO: 891506 - DNA, 606 bp, Homo sapiens
attaacagaaggcacagagaaaacaaatcgaagcctctccctctcgtgcaataacatagtaaaaaaacaatccttaagccttcaatttgtactgtacaggtgggtctattagatgctatgggttgtgatagataaatctctctcctagttgtactcccaaattcccgacctcctcgcttcttcttacatagagaagagggcaatttacagggaataagcaacagttgagccaaatccrcaaactcatttctccttatgtggagaagggtgcaatttacagggaataagcaacagttctgcaagatattctcctggtttaaaacctaaaatcttatgacattaccgccacctgaatttctccttcacaatccgaatcaacaactcctgggactacagtaataccgtgtaagttaagttgacttttacctaaaattactcccatagatccaatttttctacacttataacatttagcatttttgcaaccactaaagaagatgatacaagccaattttcatcctccctctcctgttcatcaccctccataggtgctgtaggtggggcaaaaaattctctcaaaccctgaaataacagaagatggcacgt

SEQ ID NO: 891507 - DNA, 606 bp, Homo sapiens
attaacagaaggcacagagaaaacaaatcgaagcctctccctctcgtgcaataacatagtaaaaaaacaatccttaagccttcaatttgtactgtacaggtgggtctattagatgctatgggttgtgatagataaatctctctcctagttgtactcccaaattcccgacctcctcgcttcttcttacatagagaagagggcaatttacagggaataagcaacagttgagccaaatccacaaactcatttctccttatgtggagaagggtgcaatttacagggaataagcaacagttctgcaagatattctcctggtttaaaacctaaaatcttatgacattaccgccacctgaatttctccttcacaatccgaatcaacaactcctgggactacagtaataccgtgtaagttaagttgacttttacctaaaattactcccatagatccaatttttctacacttataacatttagcatttttgcaaccactaaagaagatgatacaagccaattttcatcctccctctcctgttcatcaccctccataggtgctgtaggtggggcaaaaaattctctcaaaycctgaaataacagaagatggcacgt

SEQ ID NO: 891508 - DNA, 632 bp, Homo sapiens
taaatgttcttaccataatgaaattttaaaatgttaagtatgtgaggtgatgagtatgttagttgcttgatttcatcattctgccatgtcagcatgtatccaaacatcacattgcaccacataaatatactgtgcagttattatttgtcaattaaaataaggtaaaacttaaaaattgaattaaaattgttatacagtattcattatttgggcttaattacatttcactgaggtacaatggcatttcccagttacccagaacaagttattattcagtaaagggaaataagtttctgtccagcgacacagtaaatgtctrtattatccagattaaaacccaacagctcttttcttagtggttaattgttgatacttctacactgttaagagggatttgtggaagcagatggccattagtagttcagtagactagttactcttcagtagtagtgagaggtgacagcgtgctggcagccctcgcttgctctcggtgccttctcggcctcagcgcctactctggccatgcttgaggagcccttcagcccactgctgcactgtgggagcccctctctgggctggccaaggctgcagccggctccctctgcttgcggggaggtgtggagggagaggtg

SEQ ID NO: 891509 - DNA, 634 bp, Homo sapiens
tttgacaacttcaatagctgaatctcgtgaggtttttgtttttgttttttgtcttggtttttgatcatttggttttgtctttttgcatgcctggtaatttttttattgtgtataaaacattgtggagactctggaagatgacatctcctccaaaagaaaagtttttctgctggctattgatgatagtagaggcaaatcactttggtcaaatatgagattgagatgactcaaggcaggatctattttgtttgctgttactccaaggaagtaatcctttagggtcccagttaaaagttttgagtgtttctcaaggctcctcatccttattggccatgaattccaatttttgccttcctgtaattaggcaactgcaaaaaagctctgcttaatttcttgcctttatagctaccccctttttgcttggtttctctgcctctcacygcacccagcttggatatcagcaaatgcctcaaggctaataactttcaacaatatgagactcatacctctgtggttctcatatttctacaatctttgctcctgtgtcctaactactttagtaatcctgaactccagtttttttctccccagccccataagactggaaaactctaagctgttgctttttttcttc

SEQ ID NO: 891510 - DNA, 444 bp, Homo sapiens
tgcaacctccgcctcctgagcttaagcgattctggcgcctcagcctcccgagtagcagggattacagacgtgagcccctgtgcccacccaagtttttatgtttatctctaacttcagacttcaaactatgcaagaccacagtaaccaaaatagcatggtactcatacaaaaacaggcacatagaccaatggaakagaatagagaactcagaaattaatccgcacatctacaaccatctgatcttcaacaaacctgacaaagacaagcaatggggaaaggattctatatttaataaatggtgctgggaaaactggttacccacatgccgaaaactgaaattggatcccttctttacaccatatgcaaaaaattaagtcaagatggattaaagacttgactgcaaaacccaaaattataaaaaccctagaagaaaatctagacaat

SEQ ID NO: 891511 - DNA, 517 bp, Homo sapiens
aatattgttatgtgtgaatttgacactgtcatcatgatgctagctggttattttgtaggcttcttcatgtagttgcttcataatgttactgctctgtgtacttcagtatttttttagtggctggtaacagttttttctttccatttttagtgcttccttgaggagctgttccaaggcaggtctagtggtggcaaattcccttagcatttgcttgtctgaaaagaaacttatttctctcttcttaacttatgacgcttagtttggccagatatgaaattcttggttggraattcttttctttaagaatgttgaatattggcccccaatctcttctggcttgtagggtttctgctgagaggtctgctgttaggctgatgggcttccctttataggtgacttggcctttctttctggatgccttaacatttttttcttcatttcaaccttggaaaatctgataattatgtgtcttagggttgatgttctcatgaagtgtcttactggggttctctggatt

SEQ ID NO: 891512 - DNA, 671 bp, Homo sapiens
actttccaatatacatagaagagatgcacatacagggttttaaaattttaatttggatcaatttatgttgacagttattggtttttacccctttaagaatacgtgttcacaatctttctatgtcagtttccatggctctcattaacttaatagccacacttcatagaaaatatcattaactattatttaattgttttctgttaatggaaaattagagttttcctcactttttatatcaattaaatacgctgttatcttacacatctttatacatatcttttggctcacatgkaaaagtcttgctaaaaggtatagttctagaatatgctgagatttactccaaactgtggagatggtggaattggaatttttggagttgcaaaaattaatgccaaattaaaataccaccgaatacaggacagcccctactactccctttcttcaccattctgacctttctctgacctccagatttttctgtctgttgcatgttttcacttgtgtgtgctacgcagcttctgttactttgagattctgttcttccttttgctacttgtgagctgcattccatcacagcctttcccacggaggaccgccatactgagtgtcttgataatgctgccttccacacacagcacactctttatttggtatatagagcatcctttggg

SEQ ID NO: 891513 - DNA, 562 bp, Homo sapiens
tgccggactgcaaattttccaaacttttatgctgtttctcttttaaaacagaatgcctttaacagcacccaaatcacctcttgaatgctttgctgcttagaaattccttctgccagataccctaaatcatctctctcaagtttaaagttccacaaatctctagggcagaggcaaaatgctgccagtccctttgttaaaacataacaagtgtcatctttgctcaagtttccaacaagttcttcatctccatctgagaccacctcagcctggaccttactgttcatgtcactatcagcattttggtcaacgccattcaacatgtccctagggagttccaaaccttctcacattatcttgtyttcttctgagccctccaaactgttccaacttctgcatgttacccagttccaaagtagcttccatattttttaatatcttttttttttttttttttttgagatggactctcgctctgtcacccaggctggagtgcagtggtacgatctcggctcactgcaagctccacctcccgggttcataccattctcctgcctcagcctcc

SEQ ID NO: 891514 - DNA, 562 bp, Homo sapiens
tgccggactgcaaattttccaaacttttatgctgtttctcttttaaaacagaatgcctttaacagcacccaaatcacctcttgaatgctttgctgcttagaaattccttctgccagataccctaaatcatctctctcaagtttaaagttccacaaatctctagggcagaggcaaaatgctgccagtccctttgttaaaacataacaagtgtcatctttgctcaagtttccaacaagttcttcatctccatctgagaccacctcagcctggaccttactgttcatgtcactatcagcattttggtcaacgccattcaacatgtccctagggagttccaaaccttctcacattatcttgttttcttctgagccctccaaactgttccaacttctgcatgttacccagttccaaagtagcttccayattttttaatatcttttttttttttttttttttgagatggactctcgctctgtcacccaggctggagtgcagtggtacgatctcggctcactgcaagctccacctcccgggttcataccattctcctgcctcagcctcc

SEQ ID NO: 891515 - DNA, 673 bp, Homo sapiens
agacatgtgaatgagtgagatttcatattactccagcctcagtgttcaagtattactactgagccacagacactgtcatgcagatataagccatcctcgtgtgctctctgtgaatccatggcccacagagactacaatcggtttattgcattacatcactaactttgggtttatttgttttgaagraatgggtacctaatacatatgaatcatttataaagtttattttttctttttttgtatcacactgaagatattgctggttgatatagtgagtgttcatcttgtattctcagtcttctgcagaggaaacccaaattggtttctctaaaatagtgttttctccagcctcaccttcaatcctatatatcttttaggtaatgaatatgtacaattttacatctgacaattcaaaatcaataattttaaaatttaaaatttaattgtatatattttcccctattttgctattattttagtttcagaatttttctagtcacattatatacaaaaacatttattttggtgtactctcatttaggtataaaaccaattaaatgaattctacaacaaaatattataaagacttcttttttaatcggatagcaattgcatggtgtcaagcctttattatctctcatatagattttattatggttctagcttactaata

SEQ ID NO: 891516 - DNA, 581 bp, Homo sapiens; identical to SEQ ID NO: 888067

SEQ ID NO: 891517 - DNA, 652 bp, Homo sapiens; identical to SEQ ID NO: 888068

SEQ ID NO: 891518 - DNA, 583 bp, Homo sapiens
aagtgggaagggaggcgattgccattccatttccaaaaactcccaggttgcagaacggcaggaggaggggcaggtctggccgagatagatttccaggctgagagtagattcgggccgagagtagagaggagacttacccaaggccatgcggcttgtaagttggacccaggagtagaactggcaagccagggttttgaatcagtatttgtggggtggggtggactctgtgtgctctcttgtggacctcccgacactctgccatggcctggtccagctgtgggctctgcaccgccayggagggagagaaggccatgctgcccctccctccccacccacataagcgtgcacactccattctgctccagctgttggagagtctggggcgggccgcatgaggcacctgttagtgagatgatggatgtgccgtttgcttccaggagaaggagccacaaaaggggatccagggaagggacagcaccagggctgtgtgctgggagagggggtcctgctatggtgcccagcagccttttttggagtcactgacagatggggagtgcagaggagggcaggggcggagggaagg

SEQ ID NO: 891519 - DNA, 591 bp, Homo sapiens
atactttttctcccttactccattactacctccataaggaacactagaccagttatgaaaaataaagatggtattttttttgcacatctgaatatagcatacaatattttaactatcctacactgacactaatcaacatgctgtgccagatactatgctaagtactttgattagggtccttttctttttttttcttttttttttttttttttgagacagagtcttgctctgtcacccatgctggagtgcaayggtgcaatctcggctcactgcaacctctgcctcccaggttcaagcaattcttctgcctcagcctcctgagtagctgggactacaggtgcatgccaccactcccagctaatttttgtatttttactagagacagggtttcaccatattggccaggctggtctcaaactcccgacctcgtgatctgcctgcctctgtctcccaaagtgctgggattacaggtgtgagccaccacgcctggcctattagggtccttttcttaatcaatggaagtccgatggcctttaatctcctcttccttgaaatcaagcctcttctctccccatcctctggttctgcaca

SEQ ID NO: 891520 - DNA, 622 bp, Homo sapiens
aaaggagactcattagtggaagtatttcctttgaaagggcacacacgctgtgaaaaaaaaaaaagaaagggttatgccaggcttttctctttgtaaataaagtgacaccttttatctttttttctgttaataacacaggctggggagaatgagtctgagggaggcttgtagataagctggcaggatttgaagattattcagatctttagtttcttatttctctatgttctagggtaagacttttcttcattgttcatggccttgtataaagaatggttaggattggggatcttagggagttaggcttaagagtggtggcttakactccattatcccagttaactgatgaaccatttgccatgaacacctttggtaggtcatgctccatttagcaactgggcagggaatccgatcacctcaaacactacattcaaacagaaaggcaaaagatgctataaaagctagatggagagataggtggatacacagataaataaacctgatagaaagatgatagatagagatataaataagtaggtagataaatgaatagataggtaaagagactacagaataattagctaaattctgtagaaagacctaaaagggaaaagatattcac

SEQ ID NO: 891521 - DNA, 610 bp, Homo sapiens
ccttgcctccaggcctcatttttcttcttactgaagcacaccccttggtagctctttcagtaagggtctgtaccgaaaacacttttggagccctttatgtccgaaaatgttcttcacatcatgttcactcttgattaatgtattagttggtaataaaattctaagttcacttcctttacctcaagaaacagtggagctattctctttatcttcatgggtagacagccctgtttcaactcctgaattcacacagagaaccaggatccaggccgtgctgtgaatgagatttgtttgaccccagtcatcagaaaagctttgaggaacgcactrtgatgttgttattcagtactggttacgaatagcatggaaagcttcagatctcacccttttcccaatatgttgttggtgttgttattcttgtctcctgtttctggttgaagaagagctcccttccttgtttttgaacatggagatatatttaatattacccttttgtatttgatctatgtttggaatgagaagaaggctcaatgtgagctcactctgacatcttgaaccagagaacttgaaaaaatttaataaatctataatccatttttctcctaaactt

SEQ ID NO: 891522 - DNA, 643 bp, Homo sapiens
tgttctcacattgctataaggaaatacctgagactgggtaaattataaagaaaagagatgctgggcatggcggctcatgcctgtaatcccagcactttgggaggccaaagtgggcagatcacttgaggttaggagttcaagaccagcctggccaacatggtgaaaccccgtctctactaaaaatacaaaaattagccaggcctggtggcaggtgcctgtaatccctgctactcgggaggatgaggcaggagcatcacttgaacttggaaggaggaggttgcagtgagccaatatcatgccactatactccagcctgggtgacagagcgagactccatcaaaaggagagaagaagaagaagaagaggaagaggaagaagargaaggggaaggggaaggggaagagaaagaggaggaagaggaagaagaagaagaaagggaaggggaaggggaagggggaggaggagagaggtttaataggctcatagttttgcaggctgtacaggaagcatagtggtttctgcttccggggaggcctctggaagcttccaatcatggcggaaggcaaagggggagcaggcatcttccaaatcaggagcaggagcaagagaaagagcaaggggggaggtgctaaaacacactttt

SEQ ID NO: 891523 - DNA, 590 bp, Homo sapiens
taggttgtcttccagggttttcatagttttgtatttcacattaagtctttaactcatcttgagttaatttttgtatgtggtgtaaggaaggggtctagtttctgtcttctgcatatggctagccagttaccccagcaccatttattgaatagagaatcctttcccctattgcttgtttttgtcaggcttgtcaaaaatcagatagttgtaggtgtgcggtcttatttctgggttttctattctgttccattggtctatgtgtctgtttttgtaccagtaccatgctgttttggttactatgaccctgtaatatagtttgaagtcaggtagcatgacgcctttagctttttttctttttgcttaggattgtyttcattattcagggtctttgctagttccatatgaatattaaaatagttttttctagttctgtgaagaatgtctgtcaatgatagcttaatagaaacagcattgaatctgtaaattgctttgggcagtatggccattttaataatattgattcttcctatccatgagcatggaatgtttttccatacctgtcatctctgatttctttgagcagtggtttt

SEQ ID NO: 891524 - DNA, 659 bp, Homo sapiens
agagacaaaatgtattgctttgtaccatttaaatgttaagagggttttcatgtttttctgcaaaaagcctatttaccctgcactgagtttccccggcctcacagtatcacaggttagggagttccctttcattaaayggttctttagaccatgaaattttcttgttttgctttctaccaaattccaaattaattccagtccaaggtttaatagatcagatccatgaggtcattgtaacttcatattttatattaagcatgactactattaattgagggccagctttgtgatatgcatgctctatacattgtctctaatcctcctagatctcccaaggtaagtagcatttttcctaacaacagaactgaggctaagtgaaatcacataggaaagctagaacctgaacataagtctccatggtctcaaagcctgaactcaccactacagcatatagcaattgtaccctcattatctgaggtttcaattttgcaatgtccatattttgagttttacatcattttcctgctcctaattgcccagagtcatagtggactgcgtacaagcttcatttctccctccaaggttttgcagagaaaaattctattgtttggcccaggagccccaggtatcatttagggtgtgggaacaaagtgaaatag

SEQ ID NO: 891525 - DNA, 607 bp, Homo sapiens
ttagaggctcgtctttgtaaagatgtgtcctccttctgtagcacctattatcaagattctgaggcaataacttcagctctacagaaccctaggaccagcgataatggattggtagttgaagccctctcactgcgtaggaataacttggccaactgagcaaataactcttcctgcccaacttccgaccctccccacccaacccaacattagcacatccatcacattgtttatctgtccttctgagaaatgctggggcaggaaccggttcgtgacatttgggccatgctctcagttccttttttgattcaagaagaaattggtaaacagagagtcagatgagtggggcaagggagaccacagatgttccccattccacatcagggtttgctgagtgacactttgcacaaaccctctccctccattcttccccggacagacaaaatgcaragaatggccatgggtcccgtcacaaccttggagagcttttgctgcctgcacttaggccagtgtgttatagtggaaagagctctggacttgcatgcacaaaccctagatttaaattttggttctgtcacgtagtagttaaataactttggcccagccagtt

SEQ ID NO: 891526 - DNA, 623 bp, Homo sapiens
ggtatgtaactcaacacaataaatgccatatatgacaaacccacaactaacattacactgaacaggaaaagctgaaagatttttttctaggatgaggaataaaagaatgcccacttttaccacttttattcaacatattaatggaagttctagccagagcagttagkcaagagaaagaaataaagtcatccaaattgaaaatgaggaagtcaaattgtccctgtttgcagattacattatcttaaatataggaaaccctaaagaatccaccaaaaactgttaaaactaataaatgaatttagtaaagttgcagtatacaaaatcaacattcaaaaattattagccaggtgcagtggcttattcctgtaatcctggcactttgtgaggccaaggcaggaggatctcttgaggccaggaatttgagaccagcctgggcaacatagcaataccccatctctacagaaattttttaaaaatattaaaataattttaaaaacattaatagtgtttctatatgccaatagtgaaccatttgaaaaagaaataaaaaagataattacatttataatacctataaaaaagatagctaggaataaactcaacaaaggaggtgaaaactataa

SEQ ID NO: 891527 - DNA, 631 bp, Homo sapiens
atgaatggaacagtatctcaaatatcaatactaatgttgaatataaatggcctaaatgtttcacttaaaagatacagtattgcagaatggataagaattcaccagccaagtatctgctgccttcaagatactgacctaacacgtaaggactcatataaacttagggtaaaggggtggaaaaagacatttcatgcaaatggacaccaaaagtgagcaaaagtagctattcttatgtcagacaaaacaaactttaaagcaacagcaattaaaaaaaggaaaagagggacattgtataatgacaaaaggccttgtccaacagataaatgccacaatccaaaatgtaaatgcasctaacactggaggtcccaaatttataaaacaattactactagacctaagaagtgagatagacagtaacacaataatagtaggggacttcaataccccactgacagaactagacaggtcatcaaaacaaaagtcaacaaagaaactatagatttaactataccctggaacaaatggacttaacatatatttacagagcattctaccgaacaacttcagaatatacattctattcatcagtgcatggaactttctccaagacagaccatatgataggccgcaa

SEQ ID NO: 891528 - DNA, 587 bp, Homo sapiens
tatcaactgataaatgaataaactaatggcagccatccatacaatttaatagaatttgccacctaaaaggaatgaaatattgatacatgctacaacatagatgaaacacataagtatattaagctatgtgaaagaaggcagatgcaaaagaccacatattacatgattctagttatatggtgtccagaaaatcaaatctgtggagtcaggaagtcatgagggctgcctagagctgggggctgggaataagaggtggcaaatgataagcatgagggatttcttrggaaagatagaaatgttccaaaacaggattgtgatgatggttacacaagtctaaaattttactaaaaataattgaactgtacacttaaaatgggaatgttataatatgtcaattatacttcagtaaagctgtttaaaaacagaaagttggtagtgtggcccccagcagccttgctctttgtcctactgctcactttcctaaagaaagcaaaatatttattggtttaaagaaagcttacagttattgcttccactcagactccaagagacactgcctgaactctaagagcctccagaactctcaa

SEQ ID NO: 891529 - DNA, 583 bp, Homo sapiens
ttttaagtttctggtaagtctgtgtaaatataccattttggaactgcaaggcttatgacaaaggattatctttctttttttcaactttaattttaagttcaagcttacaagtgtaggtttgttacataggtaaacttgtgtcatggaggtttgttgtacagattatttcatcacccaggtattaagcctagtacccataagttgtttttcctgatcctctcccaccctccatccttcagtaggcctcagtgtgtgctgttcccctctgtgtccatgtgttctcatcattcagctcccactaatatgcggtattcagttttctgttcctgtgttagtatgctaargatcatggcctccagctccatccatgtccctgcaaaggacataatctcattcttttttacagctgcatagtattccatggtgtgtatgcaccacattttctttatccagtctactattgatggacatttaggttgattccatgtctttgctattgtgaatagtgctgcaatgaacgtacatgtgcatgtgtctttataatagaatggtttatattcctttgggtatataccaagtaatg

SEQ ID NO: 891530 - DNA, 637 bp, Homo sapiens
ccagcaagctccacctatacacagtggacttcagtgaggacattcctttcctttttgggcatactcagataagggaacttgcacagagttcttgcctaagacaggtctgcagctgtatagataagttacacagaaccaggcatgtctggagtgkaaaattccagcatctgatgcatgcacagtaagagaggtgaaacaatatggagtaactcaggctaagagcctgcatacacactagagggatggggtggagttaacagtaagttgcaccttatgaaaataaaaaacccagccctaaccagtttttcgtgccttatgcaaatgaaaaaccccacccattagcttgtttatgaaagcttttgcattcgactgtgtgatggcaaccctctcaggccccctctccactgtggagacctttcgtctttcacttattaaactttcactccaacctcacccttggtggccatgctccttaattttcttggttgtgagacaaagaactccaggtaatatctcagacaacgatactgctgcttcagtgaccctagactgcttccaagtaaacatactattttctgtttttacaagttataatgtctctcaacataaacaatacattcagtattttaaatctgta

SEQ ID NO: 891531 - DNA, 609 bp, Homo sapiens
gctactgaattatggtacacttgcttccagataaggaaacaggcgcccctagattaagaataaaggaggtcctgggcagagggttttgatcttgataggtgacagaacagatctaaggtaagacaaacatacagactctctccaggccctcagattggggagatcagtaaataaaggcgggaataatccacatcagatgatagggaatgagagggttccataatcgtatttctgcatctgaatcttaagcctagctttgcttctattcrttagatattggaaagactgatacagcattgcatcaaacctaagatgctatagactgaagtgacattcctattttatatgccattacgaacccttttaaaaatgccactcactaaactatggctgctataattatgaaattcattcaagttgctataatcagaaaaaaaatttgtgtcttaggatcgatgaaatacggtacaagctgtgaactgcaatgaacttggttctgaagctgtggaaatcgctcagcacactggggaggctcctgctaaccaaggccaaaaacatagttcaaacaacatggaaaataatctgtactgcatatttcaataagatttg

SEQ ID NO: 891532 - DNA, 613 bp, Homo sapiens
tgaacccagaagcaagtttggcagagcagatctgtcagctgggtattggtctgcactctcaaaatgaccctcttaggtcatgggctctgctaggctttcacagactcctatctgaattccaaggctcaaacagagagactttttactgtggataggtgcagaattgttgttgtgagggaatatgagcaggttacctcctattctgctatcttggtgacatcatccccacagaagacagttttgaaactgaaagggaatttgaaattttgtagtttaatrtttccatttacatttaagatatctgaagcctaagtgggttcaatcaatttttaaaaaagttctgccgtgtgggtatgaattaggttcaatggggacatgaacgtaagtgttataccatcatgtctttaagaagcttataattgtgtagtgatgagattcaaacaaaaataactataatcagcagtacgtggtgtgggctttaattttgtatccaatcagatacaaatttgaagtccagcttctgatcttactatctgtgtgatcatggactaatttactaggttcttttagcttcaattttttcatctgtacaaacagaggtaacaatatctaa

SEQ ID NO: 891533 - DNA, 651 bp, Homo sapiens
gtttttaattatataaaactaatgattaagatagacaactgtcacagcacagaatttaaagtatgtaaacaattaaactgtattatcatactgccaaaagtatataacaggaaaaaacttttcattggagagttgatctcaagaggacatgagaattgtttctcccccaggaaccctccaaaacagctcactctactgtcaataagttaacttacaccaagatgcaaatagctcctactgaatgcccttgaaacaagtattcaggacccccatgattagtagagttraaggctaggccttccaacctttctttataagaaactgaaaggtgcaatggattcataatgaaacctccatagcatctgaccctctctcagaatatgtccaacagaaatctttctgaatcaagagacagcctaccacctagtcatgcactagccattttcctagcaatcttttcagcatcctcagaaaaaaaagcttgacaatcaagttgatcagagaatctactctgcaagcaatggcaaagaccgcttgaccaaccagcagccacttggcaacatttcaaggctgggtccagaagagctggaagcaattcaattccttgattttagaatcaaggaatcccaacagtttgaacaaaattgggaa

SEQ ID NO: 891534 - DNA, 581 bp, Homo sapiens
ttaaatgtatgtagaattaaaatatatgatgacaataatgtaaatgtggtagaggtaatttgggattgttgtatgagtagtagtagtaaaggtattataaagtcttataattgtaaaaaaaagtagtcaaatactaaattatatcagggtatacgtgaggtatgatgtaatctataggtaatcactgaaagaatagtagaagtgtatataaataacaagcaattagagggtgaaatggaataataaaatatttggttgattcaaaagaaggcaagatgaaagggaacyagattatagaaaatactggataaatataaagctaatggcaagattacaatttaaacctaagtatattagtaattacattaattgtagtagattatgcactccaatgaaagaatagttgagaaacccaggtgcttgatacaggaagatgttagcatttacaagaatggtccactgaagttgtaagtgaccttgtagatgggcccaaggcatataagctagagcctcagcaacatttgatatactaacaagtgcactccttgttatatgtacccatatgcaaaccaaaaaaatgc

SEQ ID NO: 891535 - DNA, 608 bp, Homo sapiens
ttcttttttgcttccatttgaaatttagagtagctttttctagttctgttgagaaactcaatggtagcttgatgggaatagcactgaatctataaattactttgggcagtatggccattttcacaatattgattcttcctatccatgagcatggaatgtttttccatttgtttgtgtcctcctttatttccttgarcagtgatttgtagttctccttgaagaggttcttcacctcccttttaagttgtattcctaggtattttattctctttgtagtaattgtgaatgggagttcactcatgatttggctctctattattggtgtataggaatgcttgtgatttttgcacattgattttgtatcctgaagttgcttattagctgaagttgcttatcagcttaaggagattttgggctgagacaatggggttttctaaatatacaatcatgtcatctgcaaacagagacaatttgacttcctctcttcctatttgaatatgctttatttctttctcttgccttattgccctggccagaacttccaatactgtgttgaataggagtggtgagagagaggacatccttgtcttgtgctggttttcaaaggg

SEQ ID NO: 891536 - DNA, 608 bp, Homo sapiens
ttcttttttgcttccatttgaaatttagagtagctttttctagttctgttgagaaactcaatggtagcttgatgggaatagcactgaatctataaattactttgggcagtatggccattttcacaatattgattcttcctatccatgagcatggaatgtttttccatttgtttgtgtcctcctttatttccttgaacagtgatttgtagttctccttgaagaggttcttcacctcccttttaagttgtattcctaggtattttattctctttgtagtaattgtgaatgggagttcactcatgatttggctctctattattggtgtataggaatgcttgtgatttttgcacattgattttgtatcctgaagttgcttattagctgaagttgcttatcagcttaaggagattttgrgctgagacaatggggttttctaaatatacaatcatgtcatctgcaaacagagacaatttgacttcctctcttcctatttgaatatgctttatttctttctcttgccttattgccctggccagaacttccaatactgtgttgaataggagtggtgagagagaggacatccttgtcttgtgctggttttcaaaggg

SEQ ID NO: 891537 - DNA, 672 bp, Homo sapiens
tggcttccacactcttttggcatttagggtttcttcagagagatcccctgttagtctgataagcttccctttgtaggtaacctgacctttctgtctggctgcccttaacattttttcctgtgtttcaaccttggagaatctgacaattatgtgtcttggggttgctcttctcgaagagtatcttagtggtgttctctgtatttcctgaatttgaatgttggcctgtcttgctaggttggggaagttctcctggataatatcctgaagtgtgttttccaacttrgttccattctccttgtcactttcaggtacatcatcaatcataggtttggtcttttcacatagtaccatatttcttggaggcttacttcattccttttcattctttttttccctaatcttgttttcatgctttatttcagtaagttgatcttcaacctctgatattctttcttccacttgatcgatttggctattgatacttgtgtatgcttcacgaagttctcatgctgtgttttttcagttccatcaggtcatttatgttcttctctaaactggttattttagttatcagttcctgtaaccttttatcaaggttcttagcttccttgcattgggttagagcatgctcctttagctcagaagagtttgttattacccaccttctgaagc

SEQ ID NO: 891538 - DNA, 571 bp, Homo sapiens
gtctgatgtgtttatcaagaacacactaaagttatgggtttttgggtggaagaccacaaagataaattgcctataatagactcatgagactgtcataacaaagtaccacaaattatgtgactttcaaatagcagawatttattctttctcacagttctggaggccagaagtctaaaagtgttaaccgggttggtttcttctgacagctgtgaggaagaatctattccacacctctctccttagcttctggcgatgactgtcaatttttggtgttccttggcttataaatacatcattctgatttctgcctctgtcttcacctagctatcctctctgtgtgtctgtcaaaatttccctcttcttataaaacacataagtcatattggattaaggcccaccttgatgacctcaccttaactaattgtaactgcaaagactatttgcaaataaggttccattcataaggtttggggtagacaaaacttgagaacagagactcattttcttctaaaatgctttctctgaaagatttttaaaaagaaaagggtggaaatttgaaagaaaaataagt

SEQ ID NO: 891539 - DNA, 571 bp, Homo sapiens
gtctgatgtgtttatcaagaacacactaaagttatgggtttttgggtggaagaccacaaagataaattgcctataatagactcatgagactgtcataacaaagtaccacaaattatgtgactttcaaatagcagaaatttattctttctcacagttctggaggccagaagtctaaaagtgttaaccgggttggtttcttctgacagctgtgaggaagaatctattccacamctctctccttagcttctggcgatgactgtcaatttttggtgttccttggcttataaatacatcattctgatttctgcctctgtcttcacctagctatcctctctgtgtgtctgtcaaaatttccctcttcttataaaacacataagtcatattggattaaggcccaccttgatgacctcaccttaactaattgtaactgcaaagactatttgcaaataaggttccattcataaggtttggggtagacaaaacttgagaacagagactcattttcttctaaaatgctttctctgaaagatttttaaaaagaaaagggtggaaatttgaaagaaaaataagt

SEQ ID NO: 891540 - DNA, 681 bp, Homo sapiens
actccaacagacctgcagctgagggtcctgtctgttagaaggaaaactaacaaacagaaaggacatccacaccaaaaacccatctgtacgtcaccatcatcaaagaccaaaggtagataaaaccacaaagatgggaaaaaaacagagcagaacaactgctaaaaatcagagcacctctcctcctccaaaggaacgcagcctctcaccagcaatggaacaaagctggatggagaatgactttgatgagttgagagaagaaggcttcagaagatcaaactactcygagctacaggaggaaattcgaaccaatggcaaagaacgtaaaagctttggaaaaaaactagatgaatggataactagaataaccaatgaagaaaagtccttaaaggacctgatggagctgaaaaccaaggcacgagagccacgtgacaaatgcagaagcctcagtagccgacgcaatcaactggaagaaagggtatcagtgatggaagacaaaatgaatgaaatgaagcaagaagagaagtttagagaaaaaagaataaaaagaaatgaacaaagcctccaagaaatatgggactatgtgaaaagaccaaatctacatctgattggtgtgcctgaaagtgacagggagaatagaaccaagttggaaaacactctgcaggatattacccaggagaactt

SEQ ID NO: 891541 - DNA, 681 bp, Homo sapiens
actccaacagacctgcagctgagggtcctgtctgttagaaggaaaactaacaaacagaaaggacatccacaccaaaaacccatctgtacgtcaccatcatcaaagaccaaaggtagataaaaccacaaagatgggaaaaaaacagagcagaacaactgctaaaaatcagagcacctctcctcctccaaaggaacgcagcctctcaccagcaatggaacaaagctggatggagaatgactttgatgagttgagagaagaaggcttcagaagatcaaactactctgagctacaggaggaaattcgaaccaatggcaaagaacgtaaaagctttggaaaaaarctagatgaatggataactagaataaccaatgaagaaaagtccttaaaggacctgatggagctgaaaaccaaggcacgagagccacgtgacaaatgcagaagcctcagtagccgacgcaatcaactggaagaaagggtatcagtgatggaagacaaaatgaatgaaatgaagcaagaagagaagtttagagaaaaaagaataaaaagaaatgaacaaagcctccaagaaatatgggactatgtgaaaagaccaaatctacatctgattggtgtgcctgaaagtgacagggagaatagaaccaagttggaaaacactctgcaggatattacccaggagaactt

SEQ ID NO: 891542 - DNA, 646 bp, Homo sapiens
gaatattccatgtgcagatgagaaaaatgtgtattctgtggttgttgggtggagtattctggagacatctattaggtccacttaattaagagtccagtttaagtacagagtttctttgctagttttctgcctcagtaacctatctagtgctgtcagtgaggtgttgaagtccctcactattattgtatggctgtctatctcttttcataggtctagtagtatttattttataaatctaggtgctctgatgttcagtgaatatgtatttaggatagtttaatctttttgttgaattgaactttttatcattatataatgtccttctttgtattttattttactgttaaagtctgtttaatacaagatacaaaaatagaaacacttgctgttttttttttttgtttttcattttcatgatagagctttctccatcccattactttgarcctgtgggtgacattatatgtgagatgggtgtgttgaaggcagcagatggttgtctttttgtttttttttgtgttttagaatccaatttgccactctatgtcttttaaatggagcctttaggtcctttacagtcaaggctaattttgatatgtgagattttcttcctgacatagtattgttagctatttgctttgtagtc

SEQ ID NO: 891543 - DNA, 598 bp, Homo sapiens
cttggtaattaactcaagaaagcaattggattccttcctggggaattttaaaattgaaagtagagggacaatttcaggctttttctgatggtgaggttatcagatgagtgcctttgaaactgaagatttcatgttactgaayatatggaaggaataggtatggagtagatcagagattctcaacagtggtgctatgaatacttgggggctagaaaattgcttgttggcatggggttaggagtgggggcttatcttgtgcattatagaatgtttagcagtatccaaggcctcttacccattagattccagtagcattccccagcagtgacaaccaaaaatgtctccagacattgccaaatgtcccttggagggtactgtctcccaactgagatccaccaaagtagaggaaaacaaagctaaatgcatggagagaagcagaaactggaaatggcaggagctccttacagatattgtcctaaatacatttgtccttctgttgtttctaagcctcagatctcttcctatcctttttatagttacatgaattataccaaccttcttccagttggcagtttttcccccatttttctccctaaaa

SEQ ID NO: 891544 - DNA, 633 bp, Homo sapiens
cctgcattgccaagtcaatactaagccaaaaaagaacaaagctggaggcatcacgctacctgacttcaaactatactacaagggtatagtaaccaaagcagcatggtactggtaccaaaacagagatatagacaaatgraacgcaacagagccctcagaaataatgccacatatccacaagtatctgatctttgacaaacctgacaaaaacaagaaatggggataggattccctgtttaataaatggtgctgggaaaactggctagccatatgtagaaagctgaaactagatcccttccttacaccttatacaaaaattaatccaagatggattaaggacttaaatgttagacctaaaaccataaaaaccctagaagaaaacctaggcagtaccattcaggacataggcatgggcaaggacttcatgtctaaaacaccaaaagtaatggcaacagaagtcaaaattgacaaatgggatccacttaaactaaagagcttctgcagagcaaaagaaactaccatcagagtgaacaggcaacctacagaatgggagaaaatttttgcaatctactcatctgacaaggggctaatatccagaatctacaacgaactcaaacaaatttacaagaaaaa

SEQ ID NO: 891545 - DNA, 633 bp, Homo sapiens
cctgcattgccaagtcaatactaagccaaaaaagaacaaagctggaggcatcacgctacctgacttcaaactatactacaagggtatagtaaccaaagcagcatggtactggtaccaaaacagagatatagacaaatgaaacgcaacagagccctcagaaataatgccacatatccacaagtatctgatctttgacaaacctgacaaaaacaagaaatggggataggattccctgtttaataaatggtgctgggaaaactggctagccatatgtagaaagctgaaactagatcccttccttacaccttatayaaaaattaatccaagatggattaaggacttaaatgttagacctaaaaccataaaaaccctagaagaaaacctaggcagtaccattcaggacataggcatgggcaaggacttcatgtctaaaacaccaaaagtaatggcaacagaagtcaaaattgacaaatgggatccacttaaactaaagagcttctgcagagcaaaagaaactaccatcagagtgaacaggcaacctacagaatgggagaaaatttttgcaatctactcatctgacaaggggctaatatccagaatctacaacgaactcaaacaaatttacaagaaaaa

SEQ ID NO: 891546 - DNA, 638 bp, Homo sapiens
cagtaataacaaacttctccaagctaaaggagcatattctaacctatcacaaggaagctaaaaaccctgaaaaaaggttagacaaattgctaactagaataaccagtgtagacaagaccttaaatgacctaatagaagtgaaaaccacaatacgagaactgcatgaagcatacacaagcttcaatagctgattcaatcaagtagaagaaaggatatcctttcaaaggattgaagatcaaattaatgaaataaagcaagaagacaagattagagaaaaaagaatgaaagraaattaatgaagcctccgagaaatatgggactatgttgaaagacaaaatctacatttgattgctgtacctgaaagtgatggggagaacagaaccaagttagaaaacactcttcaagatattattcaggagaatttcacaaacctagcaaggcaggccaacgttcaaattcaggaaatacagagaacaccacaaagatactccttgagaagaggaacttgaagacacataattgtcagattcaccaaggttgaaatgaaggaagaaatgttaagggcagccagagtgaaaggttgggttacccacaaagggaagcccatcagaataacagcagatcccacagcagatccc

SEQ ID NO: 891547 - DNA, 608 bp, Homo sapiens
ctacatggcaactgaacaaccggctcctgaatgactactgggtaaataaagaaattaaggcagaaataattaagttctttaaaccaaggagaacaaagacacaaggtaccagaatctctaggacacagctaaagcactgtttagaggaaaatttatagcattaaatgcccacaggagaaagtgagcaatatctaaaatcgacactctaacatcacaattaaaagaactagagaagcaagagcaaacaaattcaaaagctagcagaagacaagaaataactaagatcagagcagaactgaaggagatagagacacgaaaaacccttcaaaaagctggaggcatcaygctacctgacttcaaattatactacaaggctacagtaaccaaaacagcatggtactggtaccaaaacagatatatagatcaatggaacagaatggagccctcagaaataatgccgcatatctacaactatctgatctttgacaaacctgacaaaaacaagaaatggagaaaggattccctatttaataaatggtgctgggaaaactggctagccatatgtagaaagctgaaactggatcccttcattacaccttatacaaaaa

SEQ ID NO: 891548 - DNA, 608 bp, Homo sapiens
ctacatggcaactgaacaaccggctcctgaatgactactgggtaaataaagaaattaaggcagaaataattaagttctttaaaccaaggagaacaaagacacaaggtaccagaatctctaggacacagctaaagcactgtttagaggaaaatttatagcattaaatgcccacaggagaaagtgagcaatatctaaaatcgacactctaacatcacaattaaaagaactagagaagcaagagcaaacaaattcaaaagctagcagaagacaagaaataactaagatcagagcagaactgaaggagatagagacacgaaaaacccttcaaaaagctggaggcatcacgctacctgacttcaaattatactacaaggctacagtaaccaaaacascatggtactggtaccaaaacagatatatagatcaatggaacagaatggagccctcagaaataatgccgcatatctacaactatctgatctttgacaaacctgacaaaaacaagaaatggagaaaggattccctatttaataaatggtgctgggaaaactggctagccatatgtagaaagctgaaactggatcccttcattacaccttatacaaaaa

SEQ ID NO: 891549 - DNA, 410 bp, Homo sapiens
atgtagagtttactctaaagataaattataaattcaaagaaaaattgtatgtgaaagatgcaattattaaccccccttccaaatattcccatttggtcaaacagcagttttatgaaacacacttctggcataataaaattcctttargtatggcctctgcttaaatggaaacacctttcttaggtgtctaacttttaggttacttcccagactggaatttaattcaggataactagtacaattctagaatttccacttacacttcaataaagattgttttcatctccctaccccagcatcagagcatggaattttcaaattgagaaaggatatctttaagaatgaacctactgttcaaagtgggcttttcataataaaccaacactcaataccaggccaatttatgctgg

SEQ ID NO: 891550 - DNA, 410 bp, Homo sapiens
atgtagagtttactctaaagataaattataaattcaaagaaaaattgtatgtgaaagatgcaattattaaccccccttccaaatattcccatttggtcaaacagcagttttatgaaacacacttctggcataataaaattcctttaggtatggcctctgcttaaatggaaacacctttcttargtgtctaacttttaggttacttcccagactggaatttaattcaggataactagtacaattctagaatttccacttacacttcaataaagattgttttcatctccctaccccagcatcagagcatggaattttcaaattgagaaaggatatctttaagaatgaacctactgttcaaagtgggcttttcataataaaccaacactcaataccaggccaatttatgctgg

SEQ ID NO: 891551 - DNA, 620 bp, Homo sapiens
agcatatcaaaaacataatccaccatgattaagtgggtatcataccagggatgcagggatggtttaacatatgcaagtcaataaatgtgatacaccacataaacagaattaaaagcaaaaatcaaatgattatctcactagatgatgaaaaggcatttgacaaaaatcagcatccctttatgattaaaagcctcagtgaaatcagcatacaagggacacacctcaatgtaataaaagccatctatgacaagcccacagccaacataatactaaatgggaaaaagttgaaagcattacccctgaaaacaggaacaagacaaggatccccactctcaccattcctcttcaacacagtactggaagtcctagccagagcaataagaccagagaaaaaaaatcaaaggcatccaaatcagtagaaaggaagtcaaactgtcactgtttgctgatgatatgattttttaccttgaaaacccyaaagactccccagaaagctcccagaactgataaaagatttcagcaaagtttccagatacaagataaatatacagaaatcagtagctctcctatacaccaacagcaaccaagcacagaatcaaatcaagaacccaaatcccttt

SEQ ID NO: 891552 - DNA, 633 bp, Homo sapiens
ggactgtaaattagttcaaccattgtgaaaaacagtatggtgattcctcaaggatgtagaaccagaaataccatttgacccagcaatcccattactgggtatatacccaaaggaatataaatcactgtactataaagacacatgcacatgtatgtttattacagcactatttacaatagcaaagacatggatcaaacccaaatgcccatcaaggatagactggataaagaaaatgtggtacatatgcaccatagaatactatgctgccatgaaaaggaatgagataatatcctttgcagagacayggatgaagctggaagccatcatccccagcaaactgacacacaggaagagaaaaccaaacactgcatgttctcactcataagtgggagttgaacaatgagaacacatggacacaaagaggggaacaacacacaccagggcctgctggggtctgtggggtgaggggagggaacttagaagatgggtcaataggtgtagcaaaccaccatggcacacgtatacctatgtaacaaacctgcacattctgcacgtgtattccttttttttttttttttaaagaagaaataagaaaagtccatttcaggggaggaattcaagcatgctgtagaa

SEQ ID NO: 891553 - DNA, 644 bp, Homo sapiens
ctttctgtgcctggatcatttcacttaatataatgatctccagttccatccatgttgttgcaaaggacaagatcttattcttattctttttgaaatcatcattctcagtaaactatcgcaaggacaaaaaaccaaacaccrcgtgttctcactcataggcgggaattgaacaatgagaacacatggacacaggaaggggaacatcacactctggggactgttgtggggtgggcagagtggggagggatagcattaggagatatacctaatgctaaatgacgagttaatgggtgcagtatgccagcatggcacatgtatacatatgtaactaacctgcacattgtccacacgtactctaaaacttaaagtataataataaaaaaattttttaaaaaagatcttattctttttgatggctgaatagtgctccattgtgtatatgtaccacattttctttatccattcatctgttgatggacatttaggttgcttccaaatcttgactattgttaaagggctgcaacaaacatgggactgaagatatccctttgatatctgacttcctttcagtgggacggctggatcacatgttagctcagtttgtagttttttttgaagaaccttcaaaccattctccataatgg

SEQ ID NO: 891554 - DNA, 644 bp, Homo sapiens
ctttctgtgcctggatcatttcacttaatataatgatctccagttccatccatgttgttgcaaaggacaagatcttattcttattctttttgaaatcatcattctcagtaaactatcgcaaggacaaaaaaccaaacaccgcgtgttctcactcataggcgggaattgaacaatgagaacacatggacacaggaaggggaacatcacactctggggactgttgtggggtgggcagagtggggagggatagcattaggagatatacctaatgctaaatgacgagttaatgggtgcagtatgccagcatggcacatgtatacatatgtaactaacctgcacattgtccacacgtactctaaaacttaaagtataataataaaaaaattttttwaaaaagatcttattctttttgatggctgaatagtgctccattgtgtatatgtaccacattttctttatccattcatctgttgatggacatttaggttgcttccaaatcttgactattgttaaagggctgcaacaaacatgggactgaagatatccctttgatatctgacttcctttcagtgggacggctggatcacatgttagctcagtttgtagttttttttgaagaaccttcaaaccattctccataatgg

SEQ ID NO: 891555 - DNA, 632 bp, Homo sapiens
cacaccgaggatccattctttgcatccttcaatctaatcaaattgacagtcagtattagctatcacataaagtgacattctgaagcactgagggttagaacattaacatatcccttttagaggaacacaattcaactgatagcatatgcatatacttataaaatattaaatataggcacactataaaaattagtcccatagagtrtatgatttcctcatggacatatctcctgagttctttaatctactaaaaataaatactggagaaagaatagccactgaggaatctgaactcagcttctctactctcacttactctatgatagggaaaaattataacttccctgaacctgtttccttatttttaaaaatgaagagattggcatagataatttccaagatgttataaatacatatacttctaggttattttttcaatttaaaaactaatatacggatgtggttttctataataagtcaaacatcataaaaggctttattatgaaatacaagatttttccccattcaaaattcttgagaagaggcaaagaaagacggtagaatagaaggctccaccaattattcccttggcaaggacaccaacttaacaactatctacataggataaaaac

SEQ ID NO: 891556 - DNA, 597 bp, Homo sapiens
tgtgcaaaaatcacaagcattcctatacaccaataacagacaaacagagagccaaatcatgagtgaactcccattcacagttgcttcaaagagaataaaatacctaggaatccaacttacaagggatgtgaaggacctcttcaaggagaactacaaaccactgctcaaggaaataaaagaggacacaaacaaatggaagaatattccatgctcatgggtaggaagaatcaatatygtgaaaatggccttactgcccaaggtaatttacagattcaatgccatgtccatcaagctaccaatgattgtcttcacaaaattggaaaaatctactttaaagttcatatggaaccaagaaagagccctcatagccaagtcaatcctaagcccaaagaaaaaagctggaggcatcacgctacctgacttcaaactatactacaaggccacagtgaccaaagcagcatggtgctggtaccaaaacagagatatagaccaatggaacagaatagagccctcagaaatgataccacacatctacagccatctgatctttgacaaacctgacaaaaacaagaaatggagaaaggattccctatttaa

SEQ ID NO: 891557 - DNA, 597 bp, Homo sapiens
tgtgcaaaaatcacaagcattcctatacaccaataacagacaaacagagagccaaatcatgagtgaactcccattcacagttgcttcaaagagaataaaatacctaggaatccaacttacaagggatgtgaaggacctcttcaaggagaactacaaaccactgctcaaggaaataaaagaggacacaaacaaatggaagaatattccatgctcatgggtaggaagaatcaatatcgtgaaaatggccwtactgcccaaggtaatttacagattcaatgccatgtccatcaagctaccaatgattgtcttcacaaaattggaaaaatctactttaaagttcatatggaaccaagaaagagccctcatagccaagtcaatcctaagcccaaagaaaaaagctggaggcatcacgctacctgacttcaaactatactacaaggccacagtgaccaaagcagcatggtgctggtaccaaaacagagatatagaccaatggaacagaatagagccctcagaaatgataccacacatctacagccatctgatctttgacaaacctgacaaaaacaagaaatggagaaaggattccctatttaa

SEQ ID NO: 891558 - DNA, 624 bp, Homo sapiens
gctcttcaccacatccagataatttttgtattttgtagagatggagttttgccatgttgcccagactggtctccaactcctgggctcaagcaatccacccgcctcagcctccccaagtgcttggattacaggaatggtaytatcagagactagatgttaataattacatcatggagaatggggtaactaccccttcaaagatttatcctttgtgttaaaaacaatataaatatactcttatagtgatttttaaatgtacagttattactgactatagtcattccaatgtgctatcaaatagtaggtcttattcatttttttctaatttttgtgcattaacgattctcatctctccttcaattccccactaccttttccagactctgataaccatccttttaccctctacctctatagtttgttttaatttttagatacaacaaatgagagagaacatgcaatgtttctccacatctttgccaacacttttatctttgtaataataaccaatttatatatatcacatatatacaaacatacatatgtgtacacacatacatatatgtgtatatacacacatatatgtattatacacacatacatatatgtgtacacattgaattt

SEQ ID NO: 891559 - DNA, 624 bp, Homo sapiens
gctcttcaccacatccagataatttttgtattttgtagagatggagttttgccatgttgcccagactggtctccaactcctgggctcaagcaatccacccgcctcagcctccccaagtgcttggattacaggaatggtactatcagagactagatgttaataattacatcatggagaatggggtaactaccccttcaaagatttatcctttgtgttaaaaacaatataaatatactcttatagtgatttttaaatgtacagttattactgactatagtcattccaatgtgctatcaaatagtaggtcttattcatttttttctaatttttgtgcattaacgattctcatctctccttcaattccccactaccttttccagactctgataaccatccttttaccctctacctctatagtttgttttaatttttmgatacaacaaatgagagagaacatgcaatgtttctccacatctttgccaacacttttatctttgtaataataaccaatttatatatatcacatatatacaaacatacatatgtgtacacacatacatatatgtgtatatacacacatatatgtattatacacacatacatatatgtgtacacattgaattt

SEQ ID NO: 891560 - DNA, 629 bp, Homo sapiens
acccttatgtaatctacactgcttagtagagaactacacatgtattttggtgctaaccatattatcacctttaatgtaagacttccattttagaaaaagatccaagagtcaacttatattcttttctgtatttattatattagtccaaagctgtatctgctggccattaatggaaagaggagcttggacttgttggtatgtacctgggaatagaattggggcrtaccctttctgcgtttcccttggttcacatatttgcaaaaaagaaacaaaatatcctcaataaaattttctcaaaacaaagctatctaccgcaaatgaagcagacacaatttatcgaatgaataaggaataatacaatagtgtcacattatcttattggtcaatatacattatataattacacaaagttttgtgtagtgtattggagatagaaatctttgctaacaataatgaatttcatttgcaaattttcagcctaggctcttttgtgcatgtgtgtataaatgttacttaaaaagagttatgtattatatatagtagagatctagatgtttcctaaatataaaattttcccaatgattagcatgcctgattagcagggtaattttgcttattgtccttataaa

SEQ ID NO: 891561 - DNA, 701 bp, Homo sapiens
tcattgaaattgctataattagcaataatttcttctggtattacatgggaatctccctctatgaaatatatctatgactctttactatgctctctggagttatactggataaataaatatccttttcaagtatttatgaagagctatcacagtgtgttgcaactctgaaatcaaggaagctccccttcaatttctcatctcttttttgcttctctcattttctagtctaaatgatctcttacactctgccaagcattcatgtaccccatttctcctgatttctgaattcattttctcctcacaatagaaaaatatttaatgttattaattatattcacaacaaaactcagttgcaattgcacaggaattttaaggcaataataacgcaggcacctrtcgtcttcacatactttagctttatgtcacttcaaggagttaacacaatgggaaactctaaatttcttgtaaatatttccattttgtgagtttaactctatctccaacagtggaacatcagaattgggtgggagtgtatgctaaaaaaacaggtaccttcaccacaaaagttgtgttagtcagagtaggttaactattcaacaaacattttccaaatatcaatagttcgagaaaataaaagtttgtttctcattcaagtcagaatccaatatagttgactggggagacaagattctagtgggtac

SEQ ID NO: 891562 - DNA, 595 bp, Homo sapiens
aaaattagccaggcgtggtggcgggtgcctgtagtcctggctacttgggaggctgaggctggagaatcgcttgaacctgggaggtagaggttgcagtgagccaagattgtgccattgcactccagcctgtgcgacagagccagattctgtctctaagaaaagaaaagaaaagaaaaggaaagaaaaggaaagaaaaggaaagaaacacacctgtagragaggaaatgaagagcactgaaatggtgagtatatagtaaatagactattttttccttaatttctttaaagtaagtggttgtttatataacaatgtaatgtggagtttattacatgtagaaataaaatatatacaacaattgcaaaggggatgggagagcattaagttaaaatatactatcgtaagattcttctatatcaagtggtataatattaattcaaggtaaatgtgacaacttgatgcatgttgtaatccttaaagtaaccactaaaagaataatgattaaaatattaagaatcatgcaaagagatatgcctaaatatccaaaagaggcgattcatcagttgctaaaatgatgacttgatttggcaggaaagg

SEQ ID NO: 891563 - DNA, 602 bp, Homo sapiens
tataaaaatagatgcaaaattccaaataagctactagctaattaaccctactgtgtagtttaaaaataatctagttggatttattctaggagggtaagaacaatttgacattagaaattctatgaatttatctaccatattatcggactaacagagcaaagtaactcttgacagatgccgaaaaggatttgatgaagttcaacgtctctttctgattttttaaatttctcagaaaactctgaatggaactgaatatccttaatgcaataaagctttgcatattaaaaactttgtagaaaacctactactctgcagatgaactttaattcattctctttaatgttggaaacaggacaagcggaagcaccgcagctattcaacctaacacgagaggctcyggctagtgccataagatgagaaaatgaaaagataggaagagaagagggagggaagagacgcagctgtcatcacacgcagattatatatcatctacatagaaacccaacagaatgaacagaaaattgattggaactaataatagagtttagcaagattgctgaatacaagatcaacttactaaaattagtggctttccctacacc

SEQ ID NO: 891564 - DNA, 550 bp, Homo sapiens
ttaaagtattagtgatgattttccttcctaagctaagtgtacacatgagtgttttgttttattgtaatttatactgtgtgtgcaggtatgtgaatccatacccaatgtgtgtttgtgagtgtgtatgacttaaatatatgtttccattgtaaaaagttggcccccttttctctacaaaccctagctgttctgggactcctgcctctaccatgggagctttcaccagatctcagagttggaggaatcccctctgtgggctatcatctccagagaacttckgaatatatttttcaaagaaatgttgctattggtggtggtgtgatttgtcctggtactctattcttcaagtatacaggcatcagtggactagcctggtctaactaggatggaatattttctccccttctagggaaaatacactctgagttccagatagtttacatgaaaacaaactttctctttcaaaaatagggaaccattgaacattggttcacatattaaattcagaatcctaagtataatctctttataacttgggatatgagattag

SEQ ID NO: 891565 - DNA, 634 bp, Homo sapiens
aatagctttccatgcagataaaatatcaagaatcaataaggtcagaaatatatgtttattttcttgttttttttctatttttaacttttattcatatgtttattttcgttttttttttttttttattgacacagagtctcgctctgccggccaggctggagtgcagtggcgcaatctcggctcactgcaagctccatctcccgggttcatgccattctcctgcctcagcctctcgagtagctaggactacaggcgcccaccaccacacccggctaatttttttttttttgtatttttagtagaaacatggtttcaccgtgttagccaggatggtctygatctcctgaccttgtgatccgcctgcctcggcctcccaaagtgctgagattacaggcctgagccaccgcgtctggcccacatgtttattttcaactttacttccaaactttatgatcacaatggaaggctaccaggaaaaagcattcttttagtgggttttctcatgaagatttaggaagaagataacttggcaattagagtaaaagtattaaaacacttaatccaagatctagactagcatcattgtgttgtattgggcttaagatgcttattttctttcaggtgctttgcaagc

SEQ ID NO: 891566 - DNA, 634 bp, Homo sapiens
aatagctttccatgcagataaaatatcaagaatcaataaggtcagaaatatatgtttattttcttgttttttttctatttttaacttttattcatatgtttattttcgttttttttttttttttattgacacagagtctcgctctgccggccaggctggagtgcagtggcgcaatctcggctcactgcaagctccatctcccgggttcatgccattctcctgcctcagcctctcgagtagctaggactacaggcgcccaccaccacacccggctaatttttttttttttgtatttttagtagaaacatggtttcaccgtgttagccaggatggtctcgatctcctgaccttgtgatccgcctgcctcggcctcccaaagtgctgagattacaggcctgagccaccgygtctggcccacatgtttattttcaactttacttccaaactttatgatcacaatggaaggctaccaggaaaaagcattcttttagtgggttttctcatgaagatttaggaagaagataacttggcaattagagtaaaagtattaaaacacttaatccaagatctagactagcatcattgtgttgtattgggcttaagatgcttattttctttcaggtgctttgcaagc

SEQ ID NO: 891567 - DNA, 630 bp, Homo sapiens
atttctatgactggcatatttttacatgttaaatatgactttcaaaatactttggaaatgtagtcccttaaatatggtaactaaacttaatagtttggttattatttgtatgtttttcatcgtcagttactcattttatttcctttttttacttatttaggttaaatttaatatttttctctagattcttaaatgaaaccttatttcactgacttcacattttaaagctataaattgtcctcmaaatactatttttactatattccacacatttatatgtgttgtgtttacattttttcggttcgaatcattattcttttagttcaaataattttctaattttcttatgtttttttgatcatagttattaaatgtatgtcgcctaagtttcaaatattttggagattttccatatccagataatatttatttatttatttatttatagacagggtcttgctatgttgcccaggctggactcaaactcctgggctcaagtgatccttctgtttcagcttcctgaataactgggactacagccccatgacactttgcataggtattatttatttctaatttaatgcttgtgtggctgaagaatacactttatataattttaatctttttata

SEQ ID NO: 891568 - DNA, 694 bp, Homo sapiens
tgctcagctctctcacatggtttatattgtgcagtaagtgacaaaatccatctcaacagcttagcacagcacctgggacatagtaaccgctcagtaaaaatcagcaaaatgactgttttgttgccattattattagcatttgacttaagatgaggataagggaacaaatcatttatttggaaggtaatcctagggggcactggttaaggagaggccaagtrataaagagaaagaaagaagccagtgaagggtgtgttctcaagccagttatcgctgtcagcaaatagagctgaactccaccagggcaccctgacatccagtgtagagtacacaccccagagttctcccacctgaggggtgagggagctgaggtatttatacaccaactcccaccaaccatgccatgagagctgggggtggatactactttctagctttggagaaagagatgcaattggaagtcggctggtgcatactgcagtggtaaggcccaaaggatgtggacagggcacacactggcacctgctgcagagtcatcattgcctatctggggcaattcacccagcttctctgagcctcagttttccatctataaaatggcaggcatcatatctgcttctcagagttggcatgaggatttcagaaaataatgtttgtcaaagcacctggcgtgatgcctgccacatggaatttc

SEQ ID NO: 891569 - DNA, 612 bp, Homo sapiens
aagacaagaaggagtggcagagaaaataaaaaataataggtgtttcgaaaaaatattttaaatttgtctttggattttggttttgatgctaaacttgagtaggaatttccttgaatttttcaaattcataataatgccatccatagagaagctagaaaaatactaatgaaagctgtcatttaccgagtcatctcacataaagtgttctatgaggacactgaggttcagagaggttgaataacttgcccaacactgaacagctactaagtggctgaaccaaaattcaaactctgtctggggactccaaaaccyaggctcttgatcacctagctattcctcagcattataggattctagtccccggcttcagcatgctttagaatccccgggaggatcccatcctcagggttcctgattcagtagggctgcggttaggcctgggaatttgcatttctaacaagttcccaggtgattcccaggatgccagcccagggaccacactatgaaaaccactgttctgaaaggtggcaatcaggtctcacttatctctgtatccaaaggccccagtccagtgcctggcaggtatcagacatataaatgattgattactaa

SEQ ID NO: 891570 - DNA, 639 bp, Homo sapiens
aaatagaaaccaatgtcaagaagatctctcaagactacacaatcacattaaattaaacaacttgctcttgaataattcctggctgaacattgaaattaaggaataaataaaaaacactttgaaattaatgaaaatatggacacaatttatcaaaatccctggaatgcagctaaaggggcgttaagaggaaagtttataaccctaaacaccttcatcaagaaattagaataatcccaaactagtcaaataactttgcacttaaaggaaccaggaaaaacagaacaaaccaacctgaaagctagcagaagaataaaaataattaaatttagagaacttcatgaaactgacatgcaaaaatccatttaaaagatcagtgaaaccaagaattggttattcaaaataataaataacattgatggaatgctagctggactaacaaaaaaaaaaaaagagagaagatccaagtaagtaaaatcataaatggcaaatataacattacarctgatccaaagaaattcaaaagatcctcagaaactactatgaatgactttatgcacataaattaaaaatctagaagaaatgaatgcattactggaaatgcacaaccttgtaagactccattatcaggaagagattgaa

SEQ ID NO: 891571 - DNA, 620 bp, Homo sapiens
cagaatagcctaatctggcactttaaactttaagatttattgcgggcattcaagatttgaaattgactgcatttattgaataaagccaggaagccattttattctaacggttgggctaggttaatctgtaatgaaatccagtctaagagtagaggggggagttcaattcagttagacatttgagtactgtgtgccatatagatgctagatactgaggatagggagatgactaggcctcacaccatactttcatggagcccacagtctactaagaaggatggaaaggaagaaataattatcacaagggatgcatcctcctttcttctgtaagtatgtgaagaggacttaacttccaaagatatattcagttcaaaaagcttttactgaagacctrtgattatgtgttggaaactggtactagtgttagggactgagaatacataaatgaagcctttgcttctgtcattgagatgaaggagacaaaagaaacaaatgtttacaatagagtggaaatagatatatgagcacagtgaatagaaacacaacttgctctggaggagttagagataacgagatattgccaattgatgcattcaataaatgtttaataagtgcgctca

SEQ ID NO: 891572 - DNA, 667 bp, Homo sapiens
ccagattttctaaaccctgtattgtccctttctattattattgtcgcacagtgataggatttgctcagtgattaaagatttgccttcttgcctttgtaaaggtgaagagttctgtgccagttttgttgattatatgagtaagagctcataaatccatgaagtgaaagtgagacatttccctgcagtttgagatgaaaagaataccatcataaacttctgttgtgttgtggtgagatgcggtgacattaatgtgaaatggaatggtgccttttattattgtctaacttcagaactgctactcccaagtcttttctacaggcatctcatccttctctaccctagacatggagcttgcttggctttctttcctagcctgtgcctgttcatgattcctccagcctcctactccaagccatctgctgaggagtytgcaaaatcccagtgtccccttcaggcttcctggcctttttccagctttttaaagactctcctactttcattccaaataatttcattgcataggaagtgtaccaaaaatacaagcaattggaattgtatagatttacaaggacattttaatagtttattgtaataataagaaattatagagaagtttgaaggcgtttgactcccatatctgagacggaagaataaaaaaaaggatctg

SEQ ID NO: 891573 - DNA, 480 bp, Homo sapiens
atattctctggagtttggtccacctgatcctgcccaaggtaagcgtgtttacttgctaatgcttatgtcattttgtgaaaagcatttttctttttaaagacttcttaatttttttttcctattttcttccccttttcatagttaaaggacaaaggacaatgttgtggtacattttagccttattatggttcgttttctttttctcaatttcttcattttaatgttggcttcaagaaattgtggcattattagtcagcttaaacttttttcattgctaaaaatataatactaaccagaaacctgttagcagtgtttttttgtttggttgttttcccctmcttgactgctgaattgattacaatctatgttcagaccttttaacttcttggcgccagtggttaaaggaaacgtgtgttaggaagtcccaggagaatggctaggcttgatgtacaatgccagatatatgcgttctaaagtttt

SEQ ID NO: 891574 - DNA, 609 bp, Homo sapiens
tggttatttatattcaggtgacaggtgctaaggattgtttttggccttccctacttgctctactgctcagagtatcccaagagtctatgtctctagcttttggtcactattttttttttaatctcatcttatagaatagtttggtaaacatctacacaaaatttctrtagtttttattaaagaaatgacaactagtgtatacctgaagacattttgaattgttcctttgattaaaaaaccttcagtaaaatacggaagattgagaattccaacttagaaggtatttaaattgagtacttcttgccataaacaagactaggcattgagatagattgaaaagaagcctgacatacaacagaaaggtgaaactacagtcccagacacaactaaaattactgtgtgaggcctgatacaacagtacccactgctcttggagtgtttgggaaataatataaacaaggacataagaagtttaccgtgtaattctagacatggaaaataattagtgagtttagcagcaactaaagtgcaaaatataggagatgccataaagcagaatgtgattaacttccaaattaataatatagagctgctgctctaggaaaagac

SEQ ID NO: 891575 - DNA, 568 bp, Homo sapiens
atttgacccagccatcccattactgggtatatgcccaaaggattataaatcatgctgatataaagacacatgcacacatgtttattacagcactattcacaatagcaaagacttggaaccaacccaaatgtccatcaatgatagattggattaagaaaatgtggcacatatacaccayggaatactatgcagccataaaaaaggatgagtttgtgtccttcatagggacatggatgaagctggaaaccatcattctcagcaaactgcctcaaggacagaaaaccaaacaccgcatgttctcactcataggtggaaattgaacaatgagaacacttggacacagaaaggggaacatcacacaccgagacctgtcgtgaggtagggggaggggagagggatagcattaggagatatatctaatgtaaatgacgagttaatgggtgcagcacaccaacatggcacatgtacacatatgtaacaaacccgcacactgtgcacatgtaccctagaacttaaagtacaattaaaaaaatcatgatacagtaaaattgacttctttaatatacaa

SEQ ID NO: 891576 - DNA, 644 bp, Homo sapiens
tgccaaaaaagatgactacatagtgcttttacctttttgctcaaatagaaagattttatttccccttgggatcttttcagtgtcgtccttctgtaccctcaggactatgaacatttgttccaatgactacgctagttggagtagtgttgcttggatgtaaacaaaaagctgatagttttgactgatccagcccagaagcatgagaatgctgtcagggaagtgagctcccaccataagcccttcaragaagtgtctgctcttctctcaggaggcctctctctatatttaacacttgactatctggcacccagaccaaatgaaagcgcaaggcaactttaatttttttttaaggttaagaatgtaaataggggccggacgcggtggctcacgcctgtaatgccagcactttgggaggccaaggcgggtggatcacctgaggtccggagtttgagaccagcttggccaacatggtgtaaaccccgtctctcctaaaaatacaaaaattagccgggcatggtggcacgtgcctgtaatcccagctactagcagggctgaggcaggaggatcgcttgtatccgggaggcggaggttgcagtgagccgagatcacaccactgcactccagcttggggaacagagccagac

SEQ ID NO: 891577 - DNA, 517 bp, Homo sapiens
tactttgaggttatgaatgacattacattacaggtgtgatgggtctcttgaagacagtagacaaatggttcttggtttttttgtttgtttgttttattttttaatccaacttgccactctgtgccttttatgagggacaattagactatttacattcaaagttaatattgacatgtgaggtctcaacctatcatgaacttgttagctgtttgctttgtggtttctattgctttatagggcctatgagttatgtatttaaatgtatttttgtggtagcaggtatcattctttcatttccatgtttagaactcccttaaggatttctcataagtttggtctgacagtaataaattcccttagcacttgyttgcctcaaaaaaatttgtttctcccttacttatgaagcttagtttggcaggatatgaaattattagttggaatttcttttatttaagaatactgaaaatagtccctcagtctctattggtttataaggtttcatctgacaagtctagag

SEQ ID NO: 891578 - DNA, 626 bp, Homo sapiens
ccaggactagttttccatttactttgtgaactttggcaagtcatttaattgctgttcactttgaccatctgtaaaaatcagtaacctttcattaggattaagttggaggcagttaactcactccttgtacacagattcaattcatgccaactcttttttattcttcactttaaccattctctgccttgtataaaatgctgtggaagatccraaattgagaaagaaagagtccttgcatttaaagagattacaatgtagtgaaagacatacttcacacagtatcttaagtatggccataatagggataagacattttcttcttaactccagacctaatactaaactgtctacttggactttttcattgaatttcttcaggcatctcaaatgtgatgtatccaaagcttaactctggatttccacccactcttcatcaaaatatgcattccctgtgtaatctttcccatttccataaatagcacctctatcgactttactcaagccagaaatcagtgttacccttgacatatctatgtcctcacttcttgaatccaattcatcattgtacttacagtttcacttctaaaacatagcttaaagttgtcttctcatgcccaccttgactg

SEQ ID NO: 891579 - DNA, 598 bp, Homo sapiens
ggaccagtgccgttagttcacttgaatataaatgtagccaaatcctccagtctctcaaaacttgcattactagattgaggatcttcatgccactattttatgtaaatgtatttaataactatcttccaaaaaaaagtctaagtaaatctgtgatgttctttctaaccagcaaaacaatagccactatgactaatctttgttaagcttctgtaagaraattacatggcatgcgtaagtgtgatttcttattaattagccttttttaaatagaaaaaaattatatttctacttatgtatatgtgcaagagatttttaaaatccagttttcttaaaattgaagtttttgtttagtacaatgaatgttcaaataaagatcactttcaaacatgccattttaatatcacattagatatacactaaaatacatgaaaatcatttatttatcaaatatttattgagtgcctaatatgtgcaaatattatgcaaggtgctaggagtaaaagagttttgctttttatattccttctttgattgtagctttcttatttaagaaatcaaccaagattgtgtgaattactagcagttacaaaatacactg

SEQ ID NO: 891580 - DNA, 550 bp, Homo sapiens
catagtctatccaaatgagaaggaaccagaaaaataattcaggcaatatgataaaacaagttctttaacacacccaagagatcatactagctcaccagcaatagatccaaaccaagaataaatccctgaattgccagaaagagaattcagaaggttgactgttaagctaatcaaggaggcaccagagaaaaggtaagtccaacttaatgaaaaaaaaaaatgatacaggatataaatgaaaaaatcttcagtgaaatacatagcataaataaaaggcaatcataacttctggaaatgaaggacacatttagagaartgcaaaatgaactggaaagtatcagcaatagcatcgaacaagtagaagaaagattttaagagctcaaagacaaggctttcaaattaacccgatctgacaaagacaaagaaaaaataattttaaaaatgaacaaagcctccaagaagtttgggatcatgttaaacaaccaaacctaagaataattggtgttcccaaggaagaagagaaatctaaaagtttggaaaacatattgaa

SEQ ID NO: 891581 - DNA, 607 bp, Homo sapiens
tctcatgctgtggtggggaaggaggtggtcatctggaagccccagccaggagagaggacctggggtggaatgacctctttatgcatttcagccagtccctctgctttcagccctgcacccctccccacctctgcagaacctggtgcttccaattccccagcgtttctgggactccatggctctgcaagggtgccccctacttaacctttctctgttctgctcactcctttatctacttcccattttctaaagaagcagagacgtcttttgcattgtcacttctcctactttttgtgttgttgggggtatatgccatttaattatttcttcttatatcagtggagctttgaagaaaaaaatgatcacatgttcaatctaccatgttcaacaggaagcmctaattttaatttgtttcagaaaaaatttttgattgagtaataggactaggcactcttcttggtggtttgtgtataatctcacagaatcctcactgttgctctcaggaggtgctgatagccccagtttacaggtgtggaaacgtaggcagagagaggttaagtaacttcccatgcagagtggtgagtggtggagtgtggattgaaatgca

SEQ ID NO: 891582 - DNA, 539 bp, Homo sapiens
gtaattgctcttctccatatgtcgggtctaacagtggggcccaaagtaactcagctacaaaatttaaatacaataggaataattggatcctgaggtggcaggggccaagtggtacattcaaccatcaaaggcaagctgggtttagctactgtaatggacagcagaggcaaagcagtaatcaaaatagtctgactcatgtagagctctggcattggctaattaatcacagtgttcctagaagtgaaattgataggaagcctactgcatttctacttaatwtatataagcagaaaacttctatttcgaatggatcatcgtttgaatgataaaaacaggaaatcacagtctctcaatttccagacttgagccagtttatagactcagaaccccttgaatgaaggggaggccgggtccccttgaggaaggaccccactatgctactgacaatttatgcagtgaatctttctcccatccttcccgaaggggacctctggccttttaaccagggtaactgtgcattggggaaaaggagacgatca

SEQ ID NO: 891583 - DNA, 628 bp, Homo sapiens
ctcagctcttagctttattcattcctttcatgctgaagcatccacagcactcctggaaacacatctcctctgccagctggactcttaggagtaatttttatttgtggagaacaatgactttattatgaaatctttattctggagtattcctctargtttatacaaatattcatttcaataaaaatttattgagcatccataaagtacaaagtatttgaggggcacaaaagtggagcacctgtcttccaggagtgtacagtcctagtggatgtctgacagacaagtagaatgaaccagaatgcaaactattagtaaaacgaaggtattaataacatgaggtgggagccaaggggaagaagctatgaattttgattggaaggaaggcttgaagaaagtttccagagaaagtaactagatgacttattatcattacttgttctgtcttcagtgggtatcatacatgatagtgtgacaggctgggtcacccaggaaccagggccttgagcccaacatttgaagggggaagagcaataggttgaccaactgttctggtttgtccaggactgagggaagttcccagcacatggaacttctagtactaagaccagaaagccctaggaaaactgcg

SEQ ID NO: 891584 - DNA, 628 bp, Homo sapiens
ctcagctcttagctttattcattcctttcatgctgaagcatccacagcactcctggaaacacatctcctctgccagctggactcttaggagtaatttttatttgtggagaacaatgactttattatgaaatctttattctggagtattcctctaggtttatacaaatattcatttcaataaaaatttattgagcatccataaagtacaaagtatttgaggggcacaaaagtggagcacctgtcttccaggagtgtacagtcctagtggatgtctgacagacaagtagaatgaaccagaatgcaaactattagtaaaacgaargtattaataacatgaggtgggagccaaggggaagaagctatgaattttgattggaaggaaggcttgaagaaagtttccagagaaagtaactagatgacttattatcattacttgttctgtcttcagtgggtatcatacatgatagtgtgacaggctgggtcacccaggaaccagggccttgagcccaacatttgaagggggaagagcaataggttgaccaactgttctggtttgtccaggactgagggaagttcccagcacatggaacttctagtactaagaccagaaagccctaggaaaactgcg

SEQ ID NO: 891585 - DNA, 628 bp, Homo sapiens
ctcagctcttagctttattcattcctttcatgctgaagcatccacagcactcctggaaacacatctcctctgccagctggactcttaggagtaatttttatttgtggagaacaatgactttattatgaaatctttattctggagtattcctctaggtttatacaaatattcatttcaataaaaatttattgagcatccataaagtacaaagtatttgaggggcacaaaagtggagcacctgtcttccaggagtgtacagtcctagtggatgtctgacagacaagtagaatgaaccagaatgcaaactattagtaaaacgaaggtattaataacatgaggtgggagccaaggggaagaagctatgaattttgattggaaggaargcttgaagaaagtttccagagaaagtaactagatgacttattatcattacttgttctgtcttcagtgggtatcatacatgatagtgtgacaggctgggtcacccaggaaccagggccttgagcccaacatttgaagggggaagagcaataggttgaccaactgttctggtttgtccaggactgagggaagttcccagcacatggaacttctagtactaagaccagaaagccctaggaaaactgcg

SEQ ID NO: 891586 - DNA, 562 bp, Homo sapiens
cccagtcgttactatagggaaactccttgcaaattacttaatttctgttagcctttaatcttcttatctatgaagtagggattaacaaattacacaagctaaataaaataatgtgtatgaaagtgactagcaaagcacctacagttctattatgaaaataggatgccataggaattaaaatgttgaattgctaatctgattcttacggccagtgactagccacacacaaatctgagtgtttatgtcagacataaatgcatattctcatgcattggttggatccttccagttctgtaagtgtacatatttgttctttttattttatttttagagatgaagtcttgctctgttgcccaggmcagagtgtagtggtatgatcagagctcactgtagccccagactctggcttctacctcagatgatcctcccacctcagcctcctgaatagctaggactacaggtccatgccaccatgcccggctaatttttaattttttttgtagagatggggtcttgctatgttgcccaggctggttttgaactcctggcctcaagcaatcaa

SEQ ID NO: 891587 - DNA, 653 bp, Homo sapiens
tctgaatccaggcccaagctcttcccagaatcctagcatctggaagggtcaatggtagatttggccctcccacagccaatctatacgaatggctagccatagttgaaatctacaagcctcaacttcaggatcttttccattttaggttgacccttcactgacctccacttcctccaccccacctgcttcaccccaagaagccatcctgtttgtgcctggccactctgttgcaattttccaccaggattatttgtggctataacaagcaagaccacgccaaygtctggcattaaaagaagtttgagccttcattcctgaggtaatgagaccatttttttcaagttccttcctctaaagttcatgaacttaataaaaaataaaataaggccagatctattacagcccagatctgtgctgcaggaagccagagctgattgggtaaaggcagagcctggatgaaaaagaaaatgtacttatgaactaactctgtctttaccttccactgaatccagagaaagccacagtgggaggcaccaccacccacatctgagcttcctggttacacaccacaggcagcactaacattacaggagcaaagcggaccttgatataaagatgtttacagccttgtctcccttttggaaactgagctt

SEQ ID NO: 891588 - DNA, 677 bp, Homo sapiens
gacagaagattaaacagagagggattggatcccagggagacctagctgattttgacaggcggcattaagagagtggtcccagaaagcaaacaggaggttccctttaagagggaacatgcaatactcttctctctgcaacagagcatggctaccatgggagccagagaggaagagagcagctggtgttcattgcactggacagataggagctgaggaggatgaagactcagctatccctgtatggtacacacagcacacacagagaaacacaacagctgccacaccttgtttcttagctgggttgaatttcacatactgtggccaagggaatgcaggctttgggcccattatagactccagacatggtgtgccttctaggcctttttattttaacactgtgacataaaatgtaaatttttttgtctaggtacttttcctggtgtttagctttgctaggtacttcctaattcctytgcttgttgcctctttgctatttatctttcctaacaagaacctaaagacaaatgtggagaaagcagctttgcacctcctcctggttttcacaacaggggagaacaggtcttctctgtgtgtgcaggaaatccacggggctggtgagtttatcgagggtcatgcttacaggtacaatgaagacaatggacaagcatgttaacagg

SEQ ID NO: 891589 - DNA, 581 bp, Homo sapiens
acccggtaaagatcacacccaaagtataaatccaaatattgcttgaggcctgtgtgccccaccctgatttgcagaccacagactatttgcttttaagcaactcatggatggattaaagagactgctggggaagcattcctttcacaaaaaagataatgtttatttattttttcaaattatagaagttgtagatgcaaaatatgccattttattaaaaaaaaactatgaaaaattaaaaaagcactcccaataccccattccataggattaacagctagtatatatggtggtgtgtatgtatagtgttgtatttcaaccaggtatatgtacatttttttaggcacttagaccttatctccataaacattatcgtcaatgacatccagattttagaagaaaaagtctggtgaagwttccatacttgaatcaggattgagtatgtctttcttgtttttcctggtcttgatgaccttgaaggagaaagagataaagacagaccagttgagatgctgatgatcctacatttctcccttcaatcacactgtatctcctccccctgcaccatatctcttcccctattc

SEQ ID NO: 891590 - DNA, 512 bp, Homo sapiens
acccttccttcctttgccgccccagacatgccttcccgcctaattggtacaggacagtgtcttccttcccgcctaattacccctatagaatttaaagcagtagccaatccggtcagcttagaatgtgcattgtgactgacgcaggcagcacccttctrtagaagcaaatatgctttgctgagaaatttcctgtttaagtgctggtttttctttgtggcactgagcacttgtttccaacaagtgtgacagcacaatttatttgcaaaataaaaccagatttgggatgacagtaggctatgtataatctttatttcactgaaatgtgaacactcacatgttttgttttgcaatattagtgcttttgattttggagtaattatttatatcccaatggagtttctagtaagacactatttagaatatatacactaaatagcctttctgaagcctccagattcttaacttcaaaatgtatctagctccacagcacagaagaggtgctttcatcttgt

SEQ ID NO: 891591 - DNA, 621 bp, Homo sapiens
ttaatctgtgacttctgccgaatatgtttataggacacagactcttcaccccctgaaaaaaaggagaagaagaacacttcccatctcattctatgaggccagtattaccctggcaccaaaactaagacttcaagaaaggaaaatgacaggccagtatacctttataaatatagaygtaaaagttctcaacaaactttatttggcaacatatgaaaaagattatacatcatgacaaagtggcatttatcctaggaatgcaaggttgattcaacatatgaaacaataaatgtaatgcaccatattacaaaggacaaaggacaaactccatatgatcatctcaataaatgcagaaaaagcatttgagaaaatctagcatcttatcttgttaaaaaacaatgaacaaactaggaaagaagagaacttcttcaacctgataaagggtatctatgaaaaacccacagctaaccccatacttaaaggggaaagacttgaaaacatttcctgtaagatgaggaataaaacaagtatgtccgctctcaccacttctagtcaacatagtacctgatgttctaatgagggcaattaggcaagaaaaagaaataaaagcaccccagctggaaa

SEQ ID NO: 891592 - DNA, 442 bp, Homo sapiens
gaattgtaattcccataatccctatgtgtcgtgggagggacctggtgtgaggaaattgaatcatggggcagttcctctatgccattctcatactagtaagttctcacaagatctgatgattttataaggggctcccaatttgcccagctctcattcttctctctcctgacaccttgtgaagaaggatrtgtttgcttccccttccaccacgactgtaagtttcctgaggcctccccagccctgcagaactgtgagtcagttaaatctctttcctttataaataatccagtctcgggtatgtcttatagcagtgtgagaatggactaatacaataaattggtaccactgagagtggggtgttgctgtaaagatactcaaaatgtggaagcaactttggaattgggtaacagccagaagttggaacagttggagggctcagaag

SEQ ID NO: 891593 - DNA, 655 bp, Homo sapiens
tagttttaggaaaaaaaggtattaaattttaaaatctttaaaaacaaatcaacctaattttaattacatgattgtaggacatttaaaagcggacatcagctgaaaatttatgtttcagtgaatacttaaaattttgagaatatacaacttacattttcacaaactaagtgaattgctaaaataagatgaagtctatcaaaatgtcaccataaaatatagctaccttaataygaataaacatgaagaagaactgaatggcttcatagaatgtgataataaaaacatgagcatgagaagagtgccgtgtccctttacattgcttccaagcttcccttttgttgctcttccttctgcatatgtatattcatttataagaacataagcaggaaagaagagcctcaagaaaatcccaaaaatgatttaacattgtattcttgctgttttatatatcacaatttattttgtatggtggaaattgtcttcaatatatgaaattcaggctcataaaatgatgggctaataaaatgcaagcttttatattaaaaatagataaacatatacattataatactatcatgttagtcatttgtggaagttgtacaaaatacagcaaccctgtaaggcctataggactttaatttaaggaaaatgtaac

SEQ ID NO: 891594 - DNA, 655 bp, Homo sapiens
tagttttaggaaaaaaaggtattaaattttaaaatctttaaaaacaaatcaacctaattttaattacatgattgtaggacatttaaaagcggacatcagctgaaaatttatgtttcagtgaatacttaaaattttgagaatatacaacttacattttcacaaactaagtgaattgctaaaataagatgaagtctatcaaaatgtcaccataaaatatagctaccttaatatgaataaacatgaagaagaactgaatggcttcatagaatgtgataataaaaacatgagcatgagaagagtgccgtgtccctttacattgcttccaagcttcccttttgttgctcttccttctgcatatgtatattcatttataagaacataagcaggaaagaagagcctcaagaaaatcccaaaaatgatttaacattgtattcttgctgttttatatatcacaatttattttgtatggtggaaattgtcttcaatatatgaaattcaggctcataaaatgatrggctaataaaatgcaagcttttatattaaaaatagataaacatatacattataatactatcatgttagtcatttgtggaagttgtacaaaatacagcaaccctgtaaggcctataggactttaatttaaggaaaatgtaac

SEQ ID NO: 891595 - DNA, 556 bp, Homo sapiens
actgatgtttaaaatttcaggtttaacatggacattatttaccatgaaaatcataaaatgtagttatatttcactatgtgtttgttagaaccatatggaattgccatttttaaaaaatataaatgttgaacatggccaatttgatatgcatttacctaatacttagttctccccagatcttaaattcgtctttaggtacactayggattgtagaattaggcatactgaagacaacattttaaattttttaatgtgtaaacttaattgtataaagcttgaagttctttattagttcaagcttcatattttctgtggccctgctagacaagaatgagatgaaactctgccctgtgtgagactctatcaattttgttaataaatgattctgcaatttatttttcctgttaacactatacaggtgtgccaagcaagagatgtattgtactggttctagactcagttcggtatcagaatgactagagcagcctggggagataataaagcttttgtattctccataaacccttctaacaacaagctggtgaatataagagac

SEQ ID NO: 891596 - DNA, 590 bp, Homo sapiens
ggtactttcaaatgggatattatcatcatctctgcatcaccatttattcaccaattgtgggtgaggggcggggggagggaacaccttataagtgagaacatgcgatatttgattgtctgttcttgtgttagttcacttargattttgatgtctttttagatattatctcaacacttacagtatgtgaatttaagtctgtcattacttgataaatacagtataaataatcttttattgcattctccagatttaagtgtcttttctgccactgtgcaggtccagctgcgacttggccctccccagacatattttgcatggataatgcatttgcattttaagattcatctgttattttgattctctcttccacagcagtttatttgatttcttgtctagtgaaatcatcctcatcagagttctttttattctagtttctgcattattttactagcaatgaaaatttgcttattgagacatcttgtcacccttaggacagaaaaaaggctgtagatttttaggcagcagcagatcaatcattcttccatttaccagcatggaaaccaatttggcagagatgtaatgtgagaata

SEQ ID NO: 891597 - DNA, 590 bp, Homo sapiens
ggtactttcaaatgggatattatcatcatctctgcatcaccatttattcaccaattgtgggtgaggggcggggggagggaacaccttataagtgagaacatgcgatatttgattgtctgttcttgtgttagttcacttaggattttgatgtctttttagatattatctcaacacttacagtatgtgaatttaagtctgtcattacttgataaatacagtataaataatcttttattgcattctccagatttaagtgtcttttctgccactgtgcargtccagctgcgacttggccctccccagacatattttgcatggataatgcatttgcattttaagattcatctgttattttgattctctcttccacagcagtttatttgatttcttgtctagtgaaatcatcctcatcagagttctttttattctagtttctgcattattttactagcaatgaaaatttgcttattgagacatcttgtcacccttaggacagaaaaaaggctgtagatttttaggcagcagcagatcaatcattcttccatttaccagcatggaaaccaatttggcagagatgtaatgtgagaata

SEQ ID NO: 891598 - DNA, 617 bp, Homo sapiens
gacctctgagctagatctaggctataaacatctaccttttaatctcacttaaggtgtgatggttaattttatgtatcaacttgactgggccatgaggtggccagatatttagttgaactttattctgggtgtgtctgtgaggctgtttctgcatgcagtgaacgtttacagtggaccgagtaaagcagacagccctcccttacgtgaatgggcctcatccagttagttgaaggtttgaatagaacgagaaagttgagtatgggggaactccttctgactaactgccttcaagctgggacattgatttcctcctgttttttggacttgaattaaaacattggctcttcctggsttttgagacttggatttcagacggaactatgtcattggctctcttcgccctccagcttaattgtgtgagccaattttctacaataaatctcaatctctctctctctctctctctctatatatatatatgtatctaaaatttaaaatattttaattaatatgttcatcaaatttaaaaatattcatatgtatttatatatttatgacatatatgacatctatatgtctacattatctctctctatatatatatatatggcctccct

SEQ ID NO: 891599 - DNA, 626 bp, Homo sapiens
atgcagtgtttggttttctgttcctatgttagtttgctgagaatgatggtttccagcttcatccatgtccccgcaaaggatatgaacccatccttttttatggctgcatagtattccatgggatatatgtgccacattttctttatccagtctatcattgatgggcatttgggttggttccaagtctttgctattgtgaatagtgctgcaataaacatacacgtgcatgtgtctttatagtagaatgatttataatcctttgggtatayacccagtaatggaattgttaggtcaaatggtatttctgattctagatccttgaggaattgccacactgtcttccacaatggttgaactaatttacactcccaccaacagtgtacaaacttacctatttctccacatcctctccagtatctgttgtttcctgaccttttaatgatcaccattctaattgaaatgagatagtatctcatagtggatttgatttgcatttctgtaatgaccagtgatgatgagcttttttttcatatgtttcttggccacataaatatcttctttagagaagtgtctgttcatatccttcacccactttttgacggggttttcttcttgtaaatttgttt

SEQ ID NO: 891600 - DNA, 608 bp, Homo sapiens
cctgttttaccagtatattttcaaagctaaagcaaaatgtcctgtcaagtgccttgctgaataatatgtattgccttaatataaccctcatttgacagtttagagaccatatttaaagaggaaacgaggctagtctgagatgaggtgtgactggtgaacattcagagtggctcattgttcaccacttttctgtttaagggtttaaaactcatccaattactgaytggttaaagctcatacttcctggctgggcacagtggctcatgcctgtaatcctatcactttgggaggccaaagcaggtggatcgcctgagctcaggagtttgagaccagccagggcaacacggcaaaactctgtctctactaaaatacaaaaaattagctgggcatggcagcatgtgcctgtaatcccagctactagggaggctgaggcaggagaattgctagaacctgcgaggtggaggttgcagtgagccaggattgcgccactgcactccagcttgggtgacagaatgagagtcagcctcaaaaaaaaaaaaaaaaaaagaggctcaaacttcccagcataggctgtaggttctgcataatctgtccacaagctatagacc

SEQ ID NO: 891601 - DNA, 619 bp, Homo sapiens
cctccacccaccgacaggctctggtgtgtgatgttcccctccctgtgcccgtatgttctcatagtacaactccaacttatgagtgaaaacatgcggtgtttggttttctgttcctgggttagtttgctgagaatgatggtttccagcttcatccatgtccctgcaaaggacatgaactcatttttttatggcttcatagtattccatggtgtatatgtgccaaattttctttatccagtctatattgatgggcatttgggttggttccaagtctttgctattgtgaatagtgctggaataaacatacgtgtgcatgtgtctttatagtagaatgatttataatcctttgggtatatacccagtaatgggattgccggatcaaatggtatttctgattatagattcttgaggaattgctatactrttttccacaatggttgaatgaatttacattcccaccatcagtgcaaaagcgttcctatttctccacatcctctccagcatctgttatttcctgacttgttaatgactgctattataactggcatgagatggtatctcattgtggttttgatttgcatttctctaatgaccagtgatgagctctttttcatatgtt

SEQ ID NO: 891602 - DNA, 645 bp, Homo sapiens
ttatattaaaaaaatttttttgttttgttgctcttttgtattttttcagtctcaattttatttagttttgccctggtctttattatttcttttcttctcttaagtttgggtttggctttttcttgcttgtctagttccttgaggtgcatcagtaagtatttatttgaagtcttttcactttttcgatgtatctattgctataaacttccctcttagtaatacttttgctgtattccataggttttttratgttacatttccatctttatttgcttcaagaaattttttaatgttcttcttaattttttcctgactgattggttgttaaggagcatgatgtttaatttccagctatacatatatagtttccaatgttcctcttgttttttatttctagttttattccattgttgtcagaaaagacacttgatgtgatttctacttttttttcaatttgtttttattagtggtatggcctaagatgtggtttatcttggagaatgctacatgtgctgatgagaagaacgtgtattctgaacctgttgaatgtaatgttctgtaagtgtctattagtctattaaatacatttggtctacagtgcatattaagtccaatgtttccttgctgatttctgtctagataatg

SEQ ID NO: 891603 - DNA, 578 bp, Homo sapiens
ttcaagtaggtcactttatatgagaacagattttaaagaggacaggaaggtaaaactagttagaagttggctaagttgtccaagcaagacctgatgggtgctgaaatcgtcatagcagttgagatgtggcctcaaagaagcacaaggtggaatatcacagaagtcataggygaaacaggagaatacattaacagagagtttctccttaaccaaactttactggggctcctctgagtcctcttttggaggaggccccaactttgagctctatcctagacctgcttcgtccagttttagcaaaaatcctgctggtatgtgatcatcctcagtttagccagaatccttttagctttggttttcctcttagtaattttccatccactgacacccatcctgctcttgcttcttggctataaattcccacttttccttatcatatttggagtcccatcactctgtcctgctacaaaaccccattgtagccatccccctgaatagtcagccttagccaattttaacacttgtctttaatgagtggcataaaaacttttttctttaacaacactgtcacagaaacc

SEQ ID NO: 891604 - DNA, 656 bp, Homo sapiens
atcagtccaaatgcccatcaatcaatgagtgtataaagaaattgtgagatatatatatatgtatatatacatacacatatacacacatatgtacatatatatatacacacatatacacatatatatatgatagaatacttctcagccataaaaaggaatgaattaatgacatttgaagcaacctggatggaaatggggactgttattcaaagtgaagtaacacaggaatggaaaactaaaccttgtatgttctcactcataagtgggagctaagctatgaggatgcaaaggcataagaatgatacaatggactctggagacttgggggaaagggtgggaggtgggtgagggataaaagactactaattgggttcaatgtttactgcttaggtgatgggtgcaccaaaatatcycaaatcaccactaaagcacttactcatgtaaccaaataccacctgttcccccaaaaggtatggaaataattttttaagtggcgtttccttctagctcaacactttcttaagtgacattacacaagaataacctattcttctttttgagaaactctaaaattaggtaggcctttcttatgttgagccaacttgtcttcattctcactcttctgtgttttattccctcttctgctcagaaagtgg

SEQ ID NO: 891605 - DNA, 666 bp, Homo sapiens
gcaaactcacattgtgtagttcatgccactgaaccctaagatcaaccgcacttaaaaaaatacattggtataaaaggaatcatacatgggctgctgtctaagattctgattagaaaggagaaaaatgcctaagtaagaataatagttaacattcactgacagcgtcttctgccaggcgccttctaactactttacatgaattattttgatcctcccaacaacgctatgagcaaagtataattatttccattgtacagatgagaaagctgagatccagagaagttaagcaaccagcttcagggcacagagcagaagtggtggaaccaatgcaggcagtctgattccatggtcaccacccttgctgcctccctctatgaactctaaaaaatctttagcyctaaccttctatgtttctctggttgtcaaaagcaaaagcgagcctggctaataaggcatttgcaattgcagggcttcctctcactcagacagtatccctggttgctggaggacccagccagtacagatgggggtcagtcccctataagccctctgtgatcacatcaaaattcctagatagatgttcatgctgttcatgagagacagtatagcacagtggctaaaaagtggactctgaattctgactacctgagagcaaaccacaaccct

SEQ ID NO: 891606 - DNA, 648 bp, Homo sapiens
attgtcatgaccccacctcattgagatatttgatccacacaatacagtgatttaaggcctgtgtgaatgtaaattactgctgttcatttttgtgctcctgcctgggaccagggaagaaattctccaaacatcctgctttccgagtttgaggacttactttaraaaagtactaccattggctttatacctatcattagctaaaccttctgtaaatggcatcattttgggagcaaggtaattgtcaggtcaggcctggatagacatatacctcctctgttatctgcaaggttgctttcaatctccttcttttccatctgtctacaggcatctcaatggtttatgttaaccttagaaaatagggcttgggtttagccacaggggatggaagatggccttagccacatggctgtggaagggaaggaggtagggatggccctagtcacactgggcctgtgtaaaagggccaaggagcacttgcccctccaagggcacttgtctctggggctgtacttgccacaaacctaatcctctccattacatagctctgcaggctaagttttcaggagacagcacagacggaaaagctccataaagctgttctgatcctcttagcactttgtgcaaggagcacagataagacttttgatt

SEQ ID NO: 891607 - DNA, 567 bp, Homo sapiens
gggaggctttttaggctgtcttttttttttcctggttctattaaatatctgactgttttgccattttgcaggtatgttggagctactagcctcctcttaaacactcgccactaagatctcaatcatttttgacaattctttargcaggtagttttccatactctgttccaaataaatccagtctccttgggcagaactgctaacttttccattgttcatttcgtttgatttgtaaattcagatttgaaaacattgaaattaaagacaataatgatttctaagtagagattaatccctttactaccagaaacctttccccaaatacatgtcctggagcacatgtaaggaaagttccctaatacagactaaccagtaaggcttgccttatattaataattaaatataattatttaatattatagatgcaaatttatttaatcctggttcgcttacacaagtgttgcttcagaaacattggactttatcagttttctgatgtttctcctttgaatttgaaactgacccaatagtcccatagactgttcttttggataaacataggaattg

SEQ ID NO: 891608 - DNA, 619 bp, Homo sapiens
acctatgagtgagaacatgtggtgtttggtttttgtccttgtgatagtttgctgagaatgatggtttccagcttcatccatgtccttacagaggacatgaactcatcattttttatggctgcatagtattccatggtgtatatttgccacattttcttaatccagtctatcattgatggacatttgggttgtttccatgtctttgctattgtgaatagtgctgcaataaacaaacgtgtgcatgtgtctttataacagcatgatttacaatcctttgggtatatacccagtaatggaatgtctgggtcaaatggtatttctacttctatatccttgaggaawcgccacactgtcttcaagaaactaccatcagagtgaacaggcaacctacagaatgggagaaaatttttgcaatctgcttatctgacaaagggctaatatccagaatctacaaagaactcaaaaaaatttataggaaaaaaacaaccccatcacaaagtgggcgaaggatatgaacaggcacttctcaaaagaagacatttatgcagccaaaacacacatgaaaaaatgctcatcatcactggtcatcagaggaatgcaaatcaaaaccacaatgaga

SEQ ID NO: 891609 - DNA, 654 bp, Homo sapiens
ttgatcgtggtgcataagctttttgatgtgctgctggatttggtttgccaatattttattgaggattttcacatcgatgttcattagggatattggcctgagattttccttttttgttgtgtttctgccaggttttggcatcaggatgatgctggcctcataaaatgagttagggaggagtccctctttttctattgtttggaatagtttcagaaggaatggcaccagatcctctttgtacctctggtagaattcggccatcactggtcattagagaatgcaaatcaaaacgacaatgagatactatctcacatcaattagaatggtgatcattaaaaagttaggaaacaacagatactggagcggatatggagaaataggaatgcttttacactgttggtgggagtgtaaattagttcaacmattctggaagacaatgtggggactcctcaaggatctagaatcagaaatgccctttgatccagcaatcctgttactgggtatatacccaaaggattggaaatcattctactatgaagacacatgcacacgtaagtttattgcagcactattcacaatagcaaagacttggaaccaacccaaatgtccattaataatagactagataaagaaaatgtacataaacatcatgga

SEQ ID NO: 891610 - DNA, 564 bp, Homo sapiens
gcctcagactgagagttacaccactggcttcccaggttctgaggccttcagacttggctggagccacgctatcagcatcccagggtctccaacttgcagaaagcctgtcttgggactttccagcctccacaattgtgtgagccagtttacttaacaaatcctatctatctatctacctatcctctatcaatcaatcatctatctatcctgttggttttgtctctctggagaaccctgactaatacaaccttttatacaaacatgtcctgagcctcatcttcctccaccaacagaagcacttttctccctatgctgctgccgctgcctgccaaaatcaacagccttcaaaaatcaccccaaatgccatgtaaaccatgaagtytgttgtttgttgaactaaatatagtaccttctttaaaaaagcagtaacaaaaagaaaatttttaaacaacaaatatcattagagaaaaatcagaaaatgcaaataagcaaaaagaagaaaaaattgtatcacccagagaactctgtggttttgattatctttccctgtctctggaggaattc

SEQ ID NO: 891611 - DNA, 614 bp, Homo sapiens
ctgacaggtgcttataatgctatgcaggaaaacgaatcctcctatgcctgggaaagtctgtccccagagaacctggagggctcagggctcagtgggcagggcagagaaggagggagaaagggagggagagagtgatggggttcagaatacactaccccaaaatatggcaccttggcatttgaggaacagcagaagcaggaaagtctctctgaccttctgcagccattctttcctgaagcaggccataaataattatctgaccttcctctaaagtagattataacaccctcatctttaaagtgtacaacctatacccaaaggaaaggagtatccttatctctgaagacacmgggatgcagcgaagaatccgagcaaacaggccttgctaagctccccccagtttattgccattaaatcatactccttttgtccaattatacttctccacatctgtctgctattcttcaaacttaagcataaaaatacactggtttctgttgctttgggtcttcatttttgcaggcttctgtgtcatgtaaattttatattaagcacatttgtacatttttctcttgttactctgtctgtataggtgcctcagctgagaaccttta

SEQ ID NO: 891612 - DNA, 539 bp, Homo sapiens
ctgaaatgggaggggctgcaatgaagacctctgacatgccccagagacattttctccattgtcttggggattaacatttgattgcttgttacttatgcaaatttctgcaaccagcttgaatttctcctcagaaaatggaattttcttttctaytgtatcatcaggctgtgaattttctaaaattttatgccctgcttcccttttaaacataagttccaattacacatcatctcttcatgaatgcataaaaatgcactgctttaagagcacccaagtctcgtcttgaatgctttgctgcttagacatttcttccactagataccctaaatcacctctctcaagttcaaagttcccgagatctctagggctggggcaaaatgctgcccatctctttgctaaaacataacaagagtcccctttgctccagttcccaacaagttcctcatctccatctgataccacctcagcctggacttcattatccatatcactatcagcattttggtcaaagccattcaacaagtctccaggaagttaca

SEQ ID NO: 891613 - DNA, 602 bp, Homo sapiens
atttttaattccaataacttgattaccccagattctcaattttaggacttaagaattcctgagctgagcagcatattttccttgcagttctgggttcagctctaaaacaggagcatgtatagatagaactctatgtacggtgcttataaattcaggccctagaactcaactacctctgtccaaaccctgaaactactacttcctagctacgggcaaggtacttgcatmccctaagcttgagtcttcttgtttattcttgtttgtgccataaagacaatgatagtatatatcacatatggttaaatacacacacaaaaaaacactaagaacaacatatggcacaaagaaaatagtcaataaattctggctatttttattaaaaggcaagtgaaattatgaaaggcatttggttaaacctaagatgagatctgcctaggtctggcccatatcaactattgattttctatgattatcatcttaatctgtgcatccatttagtaattaatgattctctttgttactattaaatatgaggactcaaattgaaggtcatctcctcctaaccactgacctcccttggtcttattagcaccaaatcttag

SEQ ID NO: 891614 - DNA, 542 bp, Homo sapiens
attcttcctcattgcctccagggagaacgaagccttgctgtcaccttcaacttatcccagtgaaactgatttgggacttttggcctccagaactataaaatcataagtttgtgttgttttaagccactaaacttatggccatttttttacagcagcaatagaaaactaacacaccattgaaaaggtgatcttgcgcatgtgaatcatgtttcaagtggttagtgaacaaagtgtccctagagtgctatgaatgakgggggcgggggggggggccggagtaggggcagcaatctccactttgaccctcttggtgtagagacaagcagactgcactgccccagaacatattacccaatggctgcaattctgaatgtgggctggtgtgccttgggaaagggataggaacctgctgtgtgtggaactaaaaggctcttagtaaacaatagacccaccttccctaacagtcccatactcagattgacataaaccaataatcattatgcaactatgtcaggtctcatttttggtgttttaaaatagga

SEQ ID NO: 891615 - DNA, 648 bp, Homo sapiens
aataaatatcaaatggattgggatcacctctttctttgctcaggtttatttttatcagctctgctgttacaagctacacctgaaaaaatgatgggagctgaaatatagggccatgaaatgcaacaatagcacttttccaagggcaacatataggctttacttagcattcagcatttgaaaacatgctcattatttcagtgagattaaaaacgtacaggaatccaaaaatataaattrggaagagctcagagcaaagcatttataaatatgagtggtgagaatgaagatgactttgagacacctgatctagttggtctctctctctccaaagtattcatttttttaaaaaaaaaaggccgacttcgtagagtgaagtattttactctctgcatcataccctcagctgaaccacactaagcactggagatactcaacatctgaataatgcagtcttttattatttgcggtttccttgataaggggtaaaaattacatttcagattctgctctgtctcttacatctttgttataaattgtctccagattagtgtcattaatcatattttgtagacaaagaaatgagatacacagtaagaagtaatcttctaagattttaaaagtttgagagataaaattaagagtttactt

SEQ ID NO: 891616 - DNA, 648 bp, Homo sapiens
aataaatatcaaatggattgggatcacctctttctttgctcaggtttatttttatcagctctgctgttacaagctacacctgaaaaaatgatgggagctgaaatatagggccatgaaatgcaacaatagcacttttccaagggcaacatataggctttacttagcattcagcatttgaaaacatgctcattatttcagtgagattaaaaacgtacaggaatccaaaaatataaattaggaagagctcagagcaaagcatttataaatatgagtggtgagaatgaagatgactttgagacacctgatctagttggtctctctctctccaaagtattcatttttttwaaaaaaaaaggccgacttcgtagagtgaagtattttactctctgcatcataccctcagctgaaccacactaagcactggagatactcaacatctgaataatgcagtcttttattatttgcggtttccttgataaggggtaaaaattacatttcagattctgctctgtctcttacatctttgttataaattgtctccagattagtgtcattaatcatattttgtagacaaagaaatgagatacacagtaagaagtaatcttctaagattttaaaagtttgagagataaaattaagagtttactt

SEQ ID NO: 891617 - DNA, 622 bp, Homo sapiens
acaaggaggatgtggattcacatttaaaagacttctgatgtttgtttaaaagactttcattcattcaaaaaaacacacattgagcatctgtatgggtgtagcatggtgctaggatcaatgggacactgaaaagtctgacatgcagtattctttagaagtattccattttgttaggcaaattggaagtttcatggaacatttaaatgactgtgaaatgaaatattctggggatatttaaccagagagargaacttatattagcttttgaagaagatgggacagaggggttgtgagaaaagagatgagagatgagttgtcttagaaattttatagtgaatatatactgaattatggtcaacaattttttccaacagtacttttcactgttgagggaagaacatttttcagaaaaatacaatattttatttatttcttttatttatttatttttttgacacagagtctcactctgtcacccaggctggagtgcaatggcgatcacaactcactgcagcctcaacctcccgggctcaagcaatcctccctcctcagcctctcaagtagctgggactacaggcatggaccaccatgcccaggtaatttttaaattttttgtgaagat

SEQ ID NO: 891618 - DNA, 566 bp, Homo sapiens
gagtggctcttctgagacaaagttcattgttaataaatacagttactcttttgttgtgaaattttatgaggaatataaacaatgcttttgctaaattggcagaattgctatcattaaaatatccctgatgtaattttcyttaactcaaaacttctacagtctgtgttttcattgcaaaaatgaatatctggactccttgcttggcgtttactaaaatatcagcttctggactctccctaaccaaactggggtgagaaggagattgttagtagacctgcctttctcagcacttcaagacagttataccacttgggaaatgagataacagtggttttgagatccattattgacaatagaagactgtcctttctttcatataatgtgttaggaaatccacatgcccctgatcagcagggccattgtcctgtgcaacaagtggcattaattcacaaaggttcagcactgccacttcattggatgtcccctctccacaccccttttccatccacctctacacaacatatattggctgtagcaccttgccaagctaccaactgtcttttgag

SEQ ID NO: 891619 - DNA, 704 bp, Homo sapiens
cgcccaggctggagtgcagtggcgtgatctcggctcactgtagtctctgcctcctaggttcaagaaattctcctgcctcagcctcctgagtagtgaggattacaggctaatttttgtatttttagtagacacagggtttcaccatgttggccaggctggtctcgaacccctgacctcaagtgatccgcccacttcggcctcccaaagtgctgggattacaggcatgagtcactgcatctggccagctcattagacttcctgataagatttcaaattttatgtctttgtccraagtcagatctataactttaaaaatataaactagttattttactttgttttcatttgtttttctttctgattttttaagtaattaattctaacaaaatggtctacttggctgtgctcatgtgtatagctgatgtcagcatattaatagccagatgtagatgacatatcttgatctctggtctcatcgctctactgttaccgtcaacattgttaccaagcatgagctgggcaatgcaaggcaattattttctgacccttgcagtctgtataatttggttatcccctagatacaatctctataaatagtgtttgttgggttctggaaactagagtggacagatggcatgggggacataatcaccaatcttacccaagtatgtaacagatctgagtatataaagaaagcttgggta

SEQ ID NO: 891620 - DNA, 627 bp, Homo sapiens
aaattcacttctctttacccagtgctataatccctcttccttaagtcattctctttgtcacattcttaccaacatatctccgctactagattggtacacataccataccctggacagtcatttacttttatacacattacagccctgagaacaaactgcaagacccataaagagtcaaataggtttgcattttcaattctaaattcagagagagagaggaaaaaaaaaaaactaaaagctcaaattacacyttatcttttgaagtaattttgaaaatgtattttcttcattcatacatagtctttaatttcattcagctgttaacatgaaatatgtggccaattatttaggttcaactgttaactggccacttcccttacctcattgccaagatttagaatatgaaattctatatcttttttcatatttgcaattttgcataccaaatgctctgcattttagttgctttacattgatggatgtttacaacttgcaaaactccccaatagactaaccaatgcagatttcaagatgatgaacaaagattagataaatgaatggaaactcactctttaagtgaccaactaattcattattttcctaccataatgatgtctgtttccccat

SEQ ID NO: 891621 - DNA, 605 bp, Homo sapiens
ctcaccaacttccagcccagtctcactcatgctttgtggtgtgaactgcaggctgattttgattgttgagagcagtgcaaggaagacaagtctggccttccttatattaacaaatggcactcactgcaataggacctatctgggaccaatccaagctgtccatggaccctaactagctccttcctggttgggcagaagcctctggaaacagagtakgtttaagatttcagaacaggtcctcattatttgccaaattctttcttccctttgtaaacgattatgctagtttaaacaccaaaagggagccagccggagagacattaaaatgagtagcttcagtaatgtaaataatccattacttcaactagttctgctttattcctaccacaggcctaaaatttggcaaggaagttgagcaagcctggcggcataagccagagctcacaagaactagcctatctctgtgaaggtgtgcagtaaacacttcacattaaaatggcccagtaacttggacattttgggaagcctgtacccaaagggcaggtgcaagttggtgcccatattggtatagaggtagccagttaagtgagcatttaatagagcca

SEQ ID NO: 891622 - DNA, 560 bp, Homo sapiens
tttcctattatcttgaaagattccaaacttcttcaagtgattacttttctaagcttttatagtccattttctcacttttaactggtttatgatgagaggttctttcattaattgtgcaataaggcttcaatccacacaggttttctgagattacaatgaattttttccctgggtctttctgactctaaatcacttgtgaaatttcttggcagtaaaagaacaaatcttctttgttgttgttgttgttgtaccaatgtaaatagtgtgtttggtcataacaaaaccaaggcagtcttttttttttttttttatcttcaagggatgatgacgaaatacaaagcgatgtttgcaaaacctcaacctgggagaactttcttamagcacataaaactcatttggtttttattcacgtcaaggcaaaaagaaatgaaatattacggatacacagaatactttctgcatgggattttatgcaattttcctcttcattttttttgaaaggctgaggacattgaaagtaaactttataggtatacgtcattatttttaaagttctcaac

SEQ ID NO: 891623 - DNA, 560 bp, Homo sapiens
tttcctattatcttgaaagattccaaacttcttcaagtgattacttttctaagcttttatagtccattttctcacttttaactggtttatgatgagaggttctttcattaattgtgcaataaggcttcaatccacacaggttttctgagattacaatgaattttttccctgggtctttctgactctaaatcacttgtgaaatttcttggcagtaaaagaacaaatcttctttgttgttgttgttgttgtaccaatgtaaatagtgtgtttggtcataacaaaaccaaggcagtcttttttttttttttttatcttcaagggatgatgacgaaatacaaagcgatgtttgcaaaacctcaacctgggagaactttcttaaagcacataaaactcatttggtttttattcacgtcaagkcaaaaagaaatgaaatattacggatacacagaatactttctgcatgggattttatgcaattttcctcttcattttttttgaaaggctgaggacattgaaagtaaactttataggtatacgtcattatttttaaagttctcaac

SEQ ID NO: 891624 - DNA, 643 bp, Homo sapiens
aagaaattaagaaggaaattaaaaaatttaatgaaacaaatgaaaatggaactacaacatacccaaatctatgcgatatagcaaaagcattagtaagagggaagtttatagcaatatatgcatacatgaaaaaagtaaaaagtctaacaaytaacaccctaacaatgcaccttaagggattagaaaagcaagaacaagccaaaccccaaattactaaaagaaaataaacaataaagagtagagcagaaataaaagaaattgagactgaaaaatacaaaagatcaatgaaatgaaaagtcggttttatgaaaagataaacaatattgacaaacctttggttagactaagaaaaaagagagatgactcagataaagaacatcagaaatgaaaagagacataacaattgagaccacaaaaatacaaagaatcattagaggctatcacaaacaacaaattggaaaacctagaagaaacgggtaaatttttggacacatacaacctaccaagattgaatcatgaataaacagaaaatctcaacaaaccaataactagtaacaagatcaaagccataataaaatgtctccatcaaagaaaagctcaggacctgaagcgttcacatttgaattctaccaaacatttaaag

SEQ ID NO: 891625 - DNA, 643 bp, Homo sapiens
aagaaattaagaaggaaattaaaaaatttaatgaaacaaatgaaaatggaactacaacatacccaaatctatgcgatatagcaaaagcattagtaagagggaagtttatagcaatatatgcatacatgaaaaaagtaaaaagtctaacaactaacamcctaacaatgcaccttaagggattagaaaagcaagaacaagccaaaccccaaattactaaaagaaaataaacaataaagagtagagcagaaataaaagaaattgagactgaaaaatacaaaagatcaatgaaatgaaaagtcggttttatgaaaagataaacaatattgacaaacctttggttagactaagaaaaaagagagatgactcagataaagaacatcagaaatgaaaagagacataacaattgagaccacaaaaatacaaagaatcattagaggctatcacaaacaacaaattggaaaacctagaagaaacgggtaaatttttggacacatacaacctaccaagattgaatcatgaataaacagaaaatctcaacaaaccaataactagtaacaagatcaaagccataataaaatgtctccatcaaagaaaagctcaggacctgaagcgttcacatttgaattctaccaaacatttaaag

SEQ ID NO: 891626 - DNA, 643 bp, Homo sapiens
aagaaattaagaaggaaattaaaaaatttaatgaaacaaatgaaaatggaactacaacatacccaaatctatgcgatatagcaaaagcattagtaagagggaagtttatagcaatatatgcatacatgaaaaaagtaaaaagtctaacaactaacaccctaacaatgcaccttaagggattagaaaagcaagaacaagccaaaccccaaattactaaaagaaaataaacaataaagagtagagcagaaataaaagaaattgagactgaaaaatacaaaagatcaatgaaatgaaaagtcggttttatgaaaagataaacaatattgacaaacctttggttagactaagaaaaaagagagatgactcagataaagaacatcagaaatgaaaagagacataacaattgagaccacaaaartacaaagaatcattagaggctatcacaaacaacaaattggaaaacctagaagaaacgggtaaatttttggacacatacaacctaccaagattgaatcatgaataaacagaaaatctcaacaaaccaataactagtaacaagatcaaagccataataaaatgtctccatcaaagaaaagctcaggacctgaagcgttcacatttgaattctaccaaacatttaaag

SEQ ID NO: 891627 - DNA, 605 bp, Homo sapiens
tgggtggattgcttgagcccaggagttcaagaccagcctgggcaacatggtgaaactctgcccctactaaaaatacaaaaaattagccaggcatggtggtgtgcacctgtagtctcagctactcaagaggatcgagccatggcactctagcctgggtgacagagccagaccccatttcaaaaaaaaaaaaaattattcaccattatagtgtgataagtcccccacctggttatttaagcatgtttgtccatcgcttgaaccctgaagtctgatcaatgtgcaaaggccatggtgcccacccaaggagcaggtgtctctgagaacctatacatcctggggcataactgggaacgtaccaaggaaagaatttcatctctcacacacacagtaggcaaakagtcataaaattagcttaatatcagcttagagatgggaggtagagcagatctctggagtggtccagctgtcacccaggaatgctgctgataaagacacacccaaaagtgggaacaaaaagaggtttcattggactcagagttccacatggctgaggaggcctcaggatcatggcaggaggaaaaaagagacttcttacatggcagcag

SEQ ID NO: 891628 - DNA, 588 bp, Homo sapiens
gatcattcctttccatctggctcattgttccgattggccatatcaacccctgattgcatgacactgggtgatgagctcttacaggtgctcattttttctacttataacttaaatatcttattcaatatatttcatatataatattacacaatatcttttttttttttttgagacaggrtctcgctatgtcgcccagactggagtgaagtggtgtgaatatagctcactgcaactccaactactgagctcaagtgatcctcccagctcagcctcccaagtagctgggactacaggcatgcaccaccacacccggctaatttttgtattttttttttgtagagacagagtttcgccacgttgcccaggctagtctagaactcccaggctcaagcaatctgcccaccttggcctcccaaagtgctaggattacaggcgtgagccaccacacctgcctgaggttgaacctttgaataggctaagtactcttctaagcaaagtccatttaacctgagaccactttacactggacgtgactgagcgtcccctccttttcacctcataggaatgaagctccaaagaaacatggac

SEQ ID NO: 891629 - DNA, 650 bp, Homo sapiens
cgaacctgtaatctcacctactcgggaagctgaggcagagaattgcttgaacccaggaggcagaggttgcagtaagccgagatcgcgccactgcattccaggctgggtgacagaatgagacttttctcaggaaaaaaaaaaaaagaaaaaaagaaaagaaaacggagtctggaaaggtgaagtggcttggggtcctatacaggataaaaagcacagtttggaaacaaattacccaagacattaccactatgagactttgggaaaggttgcttaacttccgtcaacattagttcttcacctgtgaaaaaggaaaaaaaaggatgtctacattgcagactggttgtaggaaatcagttattcagtcaatagtctttcctgggcaccttgtgccaggcactgcatttggtgctgrggatagagtggagaacaaaagacatacagctcatgaccacaagaagagtagtttcaggatgagaactaaatgaggtagataggtaatagggtgcgaggcttagcttttttcctctggctcattgtgttcgctcagttattttcccaaaggtgggggccttattgtagtactcttttgtttgtttgtttgtttgtttgtgacagtttcacttttattgcccaggctggagtgcaatggc

SEQ ID NO: 891630 - DNA, 609 bp, Homo sapiens
tcaaaagaaggcacacatgcagccaacaaacatatgaaaaaaagctcatcactgatcattagagaaatgcaaatcaaaaccacaatgagatatcatctcacaccagtcagaatggatattattaaaaagtcaaaaagcaacagatgctggcaatatgtggagaaaaaggaacatttttacactgttagtgggaatgtaaatcagttcaaccattgtggaagacagtgtgacaattctgcaaagacctagagccagaaataccatttgactcagcaatctcattactgggtatatatctaaaggactataaattgtcctattataaagatacatggacatgtatgttcactgcagcactattcaccatagcaaagacatggaatcaacctaaatgggcagcagtgatatgctcgatgaaaaaaaaacgtgrtacatatacaccatggaaactatgcagccataaaaaggaatgagatcatgtcctttgcagggacatggttggagttgaagcccattatccttagcaaactaatgcaggaacagaaacccaaataccacatgttctcacttttcagtgggagctgaatgatgagaaaacatggactcatg

SEQ ID NO: 891631 - DNA, 681 bp, Homo sapiens
tccctcaatcacactttcaaaagctgcttaagtaggagaggaagacagataaatagtagaccccacctttctcatccctgccctcagtacaaatagctggcataggaagaaaatcaaaagaacaagccattattcccactggttttcctctcctgcaagctacaaatctagccatttacaaggccagcagagagagttaggaaagggaaatctcaacttgtaataattgaaagagaaggaaacattatgggatctgcccaaaatggcagtaagaggcagaaaatagaaattttacagagcatggttggaaacagaagctgaacaaaaaaaacaaactgtttatattcatccaactgtgtaagtgatcaataaactgcttacatataaataggattttgcaaaattgtttagatctcaacggagcccatctggtaacatgtaagaattttattcaacyttcagaagtaagacctctgtacacaattagaaattgtattaggtgtgtatgcaggggagtatacttgccatttaacaggcatttgataaacgtttgtggaattagcagaactgtaatgatgaggttaggccttggctacaaagcataggggcatgctatgaatgaggtctgggtttcaactggcctaaaacaaagctttgctatgtatgcaagaagactttgct

SEQ ID NO: 891632 - DNA, 664 bp, Homo sapiens
gtgtgattgctgggtcctatggtaagactatgttgtattttttaataagctataaaaatgtatgctaaagtggctataccactttgcatttccacttgcaatgactgatcattcctgttgcttcttcaaccctgtcagcatttggtattgtcaggttttttattttagcaattttaataggtgtgtagtagtatcttattgttttaattttcaatcctctagggagacacattgttgagtatcttttttatatgcttatttgccatgtgaatacttctttggtgaagtgtttattcagatcttttgcccatttttaattgggtagtttattttcttattgttgaattttaagagttctttgtatatttttaatagaagtcctttatgagatatgtgttttgtaaatatactctaccaggctgtggcttgtcttttcacttactcaacaaagtattttacagagcaaatgtttataaytttaataaagtctaacatcaattttttcttggattatacttctagtgttttatctaaaaagtcattctcaaacccaaagtcacctaaacttctcctttattatcatctataaattttatggttttgtgttttacatttaggtttttaactcattttagttaatttttttgtgaaaggtatgtgtttt

SEQ ID NO: 891633 - DNA, 685 bp, Homo sapiens
gaaaatcactgttatcctgttcttttttcaagatgcccagatttcatattgtttaaacaatttgtgcagttaacacaatcatcacagggtcctgaggcaacattcatcctcagcttacaaagatgatgggattaagaaattaaagtaaagacaggcataggaaatcacaagagtattgattagggaagtgataagtgtccatgaaatcttcacaatttatgttcagagattgcagtaaagaaagrcataagaaattataaaagtattaatttggggaactaataaatgtccatgaaatcttcacaatttatgttcttctgccatggcttcagccggtccctctgttcaggttccctgacttcccacaacagtttccattgtgatttacagtagtccagcaccttttctgtgtggccaactacagagggtcatcttggaaaaggtaaaataattagcacttacagctgaagggttttcctcagaaatgcaggggtagtttcagataagagaaagctaccaatgtaatttgtatttctttgacagacttaatagcagcatcgtaagaccattccaatagatgccaaatgttttaaatttatcatttctccattcttactaaattaagagtaaaaagaatttctactaaaaacctacagcaaatatcatacttaaaatgaaattttag

SEQ ID NO: 891634 - DNA, 685 bp, Homo sapiens
gaaaatcactgttatcctgttcttttttcaagatgcccagatttcatattgtttaaacaatttgtgcagttaacacaatcatcacagggtcctgaggcaacattcatcctcagcttacaaagatgatgggattaagaaattaaagtaaagacaggcataggaaatcacaagagtattgattagggaagtgataagtgtccatgaaatcttcacaatttatgttcagagattgcagtaaagaaagacataagaaattataaaagtattaatttggggaactaataaatgtccatgaaatcttcacaatttatgttcttctgccatggcttcagccggtccctctgttcaggttccctgacttyccacaacagtttccattgtgatttacagtagtccagcaccttttctgtgtggccaactacagagggtcatcttggaaaaggtaaaataattagcacttacagctgaagggttttcctcagaaatgcaggggtagtttcagataagagaaagctaccaatgtaatttgtatttctttgacagacttaatagcagcatcgtaagaccattccaatagatgccaaatgttttaaatttatcatttctccattcttactaaattaagagtaaaaagaatttctactaaaaacctacagcaaatatcatacttaaaatgaaattttag

SEQ ID NO: 891635 - DNA, 685 bp, Homo sapiens
gaaaatcactgttatcctgttcttttttcaagatgcccagatttcatattgtttaaacaatttgtgcagttaacacaatcatcacagggtcctgaggcaacattcatcctcagcttacaaagatgatgggattaagaaattaaagtaaagacaggcataggaaatcacaagagtattgattagggaagtgataagtgtccatgaaatcttcacaatttatgttcagagattgcagtaaagaaagacataagaaattataaaagtattaatttggggaactaataaatgtccatgaaatcttcacaatttatgttcttctgccatggcttcagccggtccctctgttcaggttccctgacttcccacaacagtttccattgtgatttacagtagtccagcaccttttctgtgtggccarctacagagggtcatcttggaaaaggtaaaataattagcacttacagctgaagggttttcctcagaaatgcaggggtagtttcagataagagaaagctaccaatgtaatttgtatttctttgacagacttaatagcagcatcgtaagaccattccaatagatgccaaatgttttaaatttatcatttctccattcttactaaattaagagtaaaaagaatttctactaaaaacctacagcaaatatcatacttaaaatgaaattttag

SEQ ID NO: 891636 - DNA, 698 bp, Homo sapiens
atgacaagaagggtgtcaaacaagaagcagtctaaatagcatatgtgctccttttgtacctctgtgacactgtggttatttagaccactgtcatgatcaggccaatgcaaaaggcaccacacgccagctgggcacatgccctcttattcacaaagactgtgcactccmggaattcccagacaaatacacagcagtcaatggtggtcaagatggcaaagatcattatttgtaattcaaaagataaatgcttgaggggatgaataccccattctctatgatatgcttatttcacagtgcatgcccataaatatatacacctactacatactcataaaaattgttttaaatcttaaataatttttttaaaaaagaaagaaagaacccagaaattaaaaaaaaaatgacaaagaccaagaaaatctcctggttctgagctatgagactagaaagtattgtagaataaggatgagtgtataaagtcactgaactaaccaacactctcaggaaaacatacatgaccaatgtgggtgagactcaagatgatggcattccctgctgaagttaagatgtggatgacatcattcacagaagctggagacaaccagcaaggtgaactttgtcagcttctgtgaggttctttctttgtattttgaagttttagggataacaataaaatagatcagcataagaaaactctt

SEQ ID NO: 891637 - DNA, 538 bp, Homo sapiens
gctttggtatcataagcattttagtggaaacccagccagacacaaagaaagcctgtgaccctgggtcaccaagtgactaaaaaaatccatttcccggccatttcaggaggtgtgaatactcacaccacaatgagaatcattacaaaatcattacaatccacctggcccaattctgtgtttgccttgtccactcacaacacccttgragggttaactgaactggggtctgctcgcctggcacagtaaatccaggtatctacatcaaggcttcttacagctatagaagagaaggcatttatttgtagggtgccaaggaaggaggaccaggcagccattgtttaaatcctgacctcccagtgtcttgtaagcaagggtttttttttttttttttttttttttgagacggagtctcgctctgtcgcccaggctggagtgcagtggcgggatctcgactcactgcaagctccgcctcccgggaagcaagggtttttaaaggcaggggaaggagagtagaagttacaagcaaaattataaatta

SEQ ID NO: 891638 - DNA, 571 bp, Homo sapiens
ttgctacaaaatatcaatttaatttccttagaaaatatatgcagaagtgggattgttggatcatatggtagttatatttttaatttttaaggaattttcatactgttttccataatgtttgtaccaatttacactcccacccacaatttacaagagttcccttttcttcacaacaacattctttatatcttgtctttttgatactggtcattctaactgggataagaaaatatatcactatggttttgatttgcatttctctaatgattagtaatgttgagcatcttttcatatacctattggccatttgtatgtcttctttggaaaaatgtctcttcaggttctttgcctatctcctaattgggttatttggggacttttttggctattgagttttatgagttagcattttttttattcttatatatmtgactttcacaaagcgtaacatttttgagattcatccatgtcacggtgtatatcagtagattgtttgcagatgccctttattgggttatagaaattcccttctgcaaaacttgccaaaattttttgggggaatggatgttag

SEQ ID NO: 891639 - DNA, 543 bp, Homo sapiens
ctggggccccatatgatatgcccattgtgtttgcctgttacatattttaatcaatcagtgaactaattgtagccatttatttaagttctattaggctacatttatattttgttcaccactgtatctcttagagcctagcacagttcctagcataccattggtgttcaaaaaatatttgttgactgactcattgactgtatgggactgcttattcttgtgctagtccttcaggttgctctgatggtacaattgtactggaccttgaggcctttcttttcccagtgtctcccagccatctgctaaggacttgaaattcctatgattcctctgtgttgaagctttgagaatacttgtkagaatgcaaatatagtgaccactgattgttcccagcaaagagaggttagactagatcacaaggcttttgggttgagagttagtctagttggttatgatgttatgggaagagggaccttggaagagagatccctcagcataaactctggggagggagtgtgaaggtggtgcccaaacacttgatatgag

SEQ ID NO: 891640 - DNA, 649 bp, Homo sapiens
tgaaacagatgaggaaccagccctgcccccttgacctgtggtaagagtggcagctctgatgctctccaaattgcctttgggattattcttcccttttcttgaaagataaagcatgttcacagccaaatggccccatcatcctatcctgacaatgtacgaagcccaatatcctgtttttttttttttttgcttttyaataattttttctaattttgttactttaatttccccatagcaccttggcgatggcccaacatccttctttcagtcactcctgtttatttctgccccctttagtcccagctggcaacatttctcttggtataatcccatccccattcccggcttctgttgaaatagctgatcaaatccttcattcacatccatactatctccttatcaaatagtgttcagccacacccttagtgttcttttcagaataatctttctcattctttgcaatatggatagcctaagaatttgccaaatcttcaagttctggttcctttttgcataggaattccttcttaaattcatttctcttttctccattttactagaagcagtcaggaagaaccaaggtactccttcaatactttgcttagacatttcctcagctaaatatcaacttcactgcctgcactggaac

SEQ ID NO: 891641 - DNA, 649 bp, Homo sapiens
tgaaacagatgaggaaccagccctgcccccttgacctgtggtaagagtggcagctctgatgctctccaaattgcctttgggattattcttcccttttcttgaaagataaagcatgttcacagccaaatggccccatcatcctatcctgacaatgtacgaagcccaatatcctgtttttttttttttttgctttttaataattttttctaattttgttactttaatttccccatagcaccttggcgatggcccaacatccttctttcagtcactcctgtttatttctgccccctttagtcccagctggcaacatttctcttggtataatcccatccccattcccggctyctgttgaaatagctgatcaaatccttcattcacatccatactatctccttatcaaatagtgttcagccacacccttagtgttcttttcagaataatctttctcattctttgcaatatggatagcctaagaatttgccaaatcttcaagttctggttcctttttgcataggaattccttcttaaattcatttctcttttctccattttactagaagcagtcaggaagaaccaaggtactccttcaatactttgcttagacatttcctcagctaaatatcaacttcactgcctgcactggaac

SEQ ID NO: 891642 - DNA, 632 bp, Homo sapiens
ttctaggtaatcttatttccttattttgggtcagagaatcagagatttgttcttatgtgtggatgtctttatacatgctcctgatccaagggagaggaggtgttgagccctgtggctgtagttgagaagggcaattctgagagacaggactagctggatttcctaggccaactaagaatccctaagcctagctgggaaggtgaccacttccacctttaaacacggggcttgcaacttagctcacatccaaccaatcagatggtaaggagagctcactaaaatgctaattaggcaaraacagaaggtaaagaaatagacaatcatccattgcctgagagcacagcaggggagaacaaggatcgggatataaacccatgcattcgagccagcaatggctaccctctttgagtcccctccctttgtatggaagctctgttttcactctatttcactatattaaatcttgcaactgcactcttctggtccgtgtttgctatggctcgagctgagctttcgctcaccgtccaccactgctgtttgccgcagtggcagacctgccgctgacttccatgcctccagatcaggcagggtgtctgctgtgctcctgatccagtgaggcacccattgctgct

SEQ ID NO: 891643 - DNA, 564 bp, Homo sapiens
tttgtccttaattctgtttatatgatgtatcacatttattggcatatgttgaaccatccttgcatccctgggataaatcccacttggtcatgttgaatgatctttttaatggattattgaatttggtttgctaatattctgttggggatttttgcctcaatattcataataaatattggcctgtagttttctttttttgatttgtctttgtctgattttgataaggtttcctttttattattggtttccggaagtttgattatgacaaatgttggtgtggtttctttgtgtttttcctactgagggtttattgagctttatttatttatttatttttaaatttatttgtaaaatttaattaattattttcaacttttmagtttaggggtacatgtgcaggatgtgcagatttgttacctacgtaaatgtgtgccattgtggtttgctgtacagatcattctatcacccaggtattaagccctgcatccattagctatccttcctgatcctctccctcctcccagcctgcatcctctgatagaccacagtgtgtattgttcccca

SEQ ID NO: 891644 - DNA, 510 bp, Homo sapiens
cacactgtcttccacaatggttgaactaatttacactcccaccaaatgtgtaaaagcattcctatttctccacatcctctccagtatctgttttttcctgactttttaatgactgccattctaagtggcatgagatggtatctcattgtggttttgatttgcatttctcaataacagtgatgatgatctttttttcacgtgtttgttggctgcataaatgtcctcttttgtgaaatgtctgctcatatcctctgcacactttttgatggggttgtttgtttttctcttgtaaatttgtttaaattccttgtagattctggatattagccctttgtcaggyggatagattgtaaaaaattttcttcgtttctgtaggttgcctattcactctgattacagtttctttttgctgttcagaagctctttagtttaattagatcccatttgtcaattttggcttttgttgccattgcttttggtgttttcatcatgaagtctttgcccatgtct

SEQ ID NO: 891645 - DNA, 583 bp, Homo sapiens
tacatgtttgctaatagctagggaaatatcttaagcagttttgatgcattagctcattggctccattttacagatggagcctttgaaagttggaggttaagtgatttctccaaggtcatacaactgatttagtagtaggatttaagcccagatctgggcccaacactttagcacttattgaatgcagtgcctaaaacytggaaaataataatgctcagaacaataaataaaagcaaatgccaggtgtggtggctcaagcaaaggccgggtgcggtggctcacacctgtaatcccagcactttgggaggccaaggcagccaaccacctgaggtcaggagtttgagaccagcctggccaacatgacgaaaccccatctctactaaaaatacaaaaattagccaggcgtggcgatgcgggcctgtaatcccaactactcaggagactaaggcaatagaatcacttgaacccaggaggcagaggttgcaatgagcagagatcatgccactgcactccagcctggttgacagagcgagactctgtctcaaagaaaaaaaaaaaaaaaagcaaagtaaaaaataaaata

SEQ ID NO: 891646 - DNA, 606 bp, Homo sapiens
cactatagtttggcttactttgaatcattctctttttctagatggtgaaacacttgtttcccttggggtgggaaatcagatactacatcaaccactcttttgtagtctgtggctaataatcacaatctatacctatttctcctagcttgatacataatgtccagcttttgaaatttcaagaaaaatctctcagcaagtgtttggctttctgactattatgtcagagaatgacattaaacactctattttgaaattcaagcctgagcaatagcttctttgtyctcggctatatttatcctcaccttctgcaatgaaagccactgcctccacagttgtaaggaagaaaatgtaggaaaaaatattatccatgaaatatctacaaatattttctgttcataatattattagtataatcatctgcaatttgaagattccactgtttctttaagctactgataatatcctaaaatttccccaaaatataggtaacaaatttcattgttctgtgtggtatagttccaactaggttataagctaaagtcaggaggcatggttaagtttcctgatctataaactggggctaataatgtctatatcatcaagtta

SEQ ID NO: 891647 - DNA, 559 bp, Homo sapiens
cgcctggtggagacctcgctgaaaggtaggagcaccgcgggcctttccacccacgcagggcctggaccccctgctctccggacggcttggcccacactgttcctggccttcctaggcctcagacctggtccctgtcaccctgtgccctgacacaccctcctttcctgggcccaggcattcggccctctcttctcaggtccyaagatcagtccctgggcctaaagttggctggtgtttccataacaagagctcgtttaagtgctaaccattaacttaataagtgctcaagaattgcgagctatggttattaaacgtcttctatttttaagatcggttgggggagtggaggaggggtcgggttcagttagtagcagaactgcggagcctcctcacccccgagggcctctctctttccctcccaaaacaaacaaaaagaaaaaacttgactggacccacccacaccctctccctgtctggttccaagtttcctgacaccctccagctccaacccccaaactcctgtggcttcctcgtctgccttttcctctgaggcccccgg

SEQ ID NO: 891648 - DNA, 675 bp, Homo sapiens
catttttgcaaactatgcatttgataaaggtataatatctggcatctgtaaggaacttaaacaaatttacaagaaaaaaacaagctcattacaaaagtgggtaaaggacgtgaacagacacttcaaaagaagacatacatatgaccaacagacatataaaataaagctcaatatcactgattattagagaaatgtaaatgaaaaccacaatgagatatcatgttacaccagtcagaatggctattgaaagtaaaaaaataacagatgctggtgaagttgtggagaaaaaggaacacttacactctgttggtgggagtgtaaattagttaagccattgtggaaaacagtgtggtgattcctcaaagacctaaaaacagaaatatcatttgacccagcaatcccattactggttatatacctaaaggaatataagtcattctatcatagagacatgcacacatatgttaattacagcactattcataatagcaaagktatggaatcaacctaaaaacctgtcaatggtagactggataaagacaatgtggtacacatacaccatagactactatgcagccataaaaaagaatgagatcatgtcctttgtaggaacatggatggagttggaggccattatccttagccaactgatgcaggaacagaaacctaaatact

SEQ ID NO: 891649 - DNA, 582 bp, Homo sapiens
ttgttacatatgtatacatgtgccgtgtcggtttgctgcaccccttaactcgtcatttacattaggtatttcttttaatgctatccatcccccatccccccactccacgacaggccccggtgtgtgatgttccccaccctgtgtccaggtgatcttattgttcaattcccacctatgagtgagaacatgcartatttggttttctgtccttgcaatagtttgctcagaatgatggtttccagcttcatccatgtccctacaaaggacacgaactcatccttttttatggctgcatagtattccaacctcatagaagttttatgaggaatagatgagcaaagtgcttcattgtgtctggtgcatagtaagtgctatacacgtttcttaatttaacgattgcacacaagatgtgttcaatagttgtttttctatctcctgcctttagtttcatcacaatccatccccattggttcctttcagatctttctaaaatatccatctccgcatcagttagaaggttgtggtcaacatgagagccttccttatggagctaagattgctgctgaagctcataagtaccac

SEQ ID NO: 891650 - DNA, 681 bp, Homo sapiens
aattattttataagttaacttattaccaatcatcttagtcaacagtagtttaaaatttttaatattttaagtatttaatgaaagaataaaaataatacactacatcatcaatttaaatgaatttgcatttattcttgcttgtttgcacctttaattcacctgaagcccatttctctaggattatattattgtgtagaattatactgagtttgaaaactcttttgtaataagatttcaaaagaaaaaaacacaaggccttatttttatagaaaaaggcagaaaagattaatgtttgactcaattttaaaaaaatcaaaatgtaatagtcatttactaatatttaacaaacagctggtttctctacttcacttcctatttgccttctttctctccccacccccagacaggaaactgcttttgacaacaaatgaatcagctagaagttaaaaagccagcagctagcagctgattcttcatggtttccaaactccagcatttagaaaaaacttatttcctctctccctcaccaycatctactgaagaattaaagcccataagtctaaaagattcattaagaattatgaaagcggctaacaggttaaactactaaattgatcttgtcagggaaataaggccagtaagcagggccaaatggtcaaatctgcacacaaaccctccacc

SEQ ID NO: 891651 - DNA, 550 bp, Homo sapiens
gaatttcacatccagccaaactaagcttcaaaagcgaaggagtaataaaatcctttacagacaagcaaatgctgagagatgttatcaccaccaggcctgtcttacaagagctcctgaaggaagcattaaacatgaaaaggaacaaccggtaccagccactgcaaaaacataccagattgtaaagaccattgacactatgaagaaactgcatcaactaatgggcagaataaccagctggcatcataatgacaggatcaaattcacacataataatattaaccttaaatgtaaacaggctaaatgcccaaattaaaagacacagactggcaaattggataaagagtcaagacccattaatgtgctgtatgcaggagacccatctcatgtgcaaagasacacatgggcttaaaataaagggactgaggaatatttaccaagcaaatggaaaacaaaacaaaacaaaaaagcagggattgcaattctagtctctgataaaacagactttaaaccaacgaagatcaaaagagacaagggcattacataatggtaa

SEQ ID NO: 891652 - DNA, 617 bp, Homo sapiens
tggcgaaaccccatttctactaaaaatacaaaaattagctgggcatggtggtacatgcctgtaatcccagctactcaggacactgaggcacgagaattacttgaaccccggaggtggaggttgcagtaagccgagattgcaccgctgtactccagcctgggtgacagagtgagaccctgtctcaaaaaaaaaaaaaaaaaaaaagaaaaagaaaaaagaaaagaaaagaaaagaaaaaacaasaaattagctcatgatagcagcttatattataattatgtgacactttggatatttcaaagcacattcacaaagtgtatgtcacttaaatacctcaaaatttccctgttatacatgcagatcattccccattcagccctggtatggactgaactgtgtaccaccccaaaattcatatgttgaagccctaaccaccaatgtgactgtatttggagagggtgactttaaggaggtaattaaggttaaatgaagtcacaaggaagccctgatccaattgggtctgtgtccttctaagaggaggagacacagagatctctcttgctctccctctctctctccacatgcacacaccaacgaaaggccacatgaggacactg

SEQ ID NO: 891653 - DNA, 623 bp, Homo sapiens
gtcgatatccttcaaaaatacacattctctttcctgtggatggactccagagccaagtccatgcaatccacagatctctgtgtttcattaaagcaagaactcgtgagcatctctgggccctgaccactggtcatttagacaaccacagtcactttagtctgcagacttgaatgcgctatagcagttcaggaaggaaattgaaggaaaccactgggaaggctgacagcctctctgaccctcaccagaaaaatcccaatggaaagttaatcacctccttgaagtgtctgaagccaaagagacctgaggggctacaaacacataaccctggactccaagaggcccatcagcccttctgtgctgggggcgggatggggtaaggcaggaggatggtggaagcttagagtgggccagcagtcagatagcagcctgcctcrgacctcaggagagcagggagcagggcctcaggggccctgaatgcagtcagcttctgctgtgtttgggagaagcatctctttggtgggccaggatggggcaaggggtggagaggtgtcaaatggtgcttaagtgagaacagccaagccaaactgtatttggggaaaatccatccccgttatatttgttaa

SEQ ID NO: 891654 - DNA, 620 bp, Homo sapiens
cttatctgtcatcccacacctcagcattagaaagagttttctttgggtctgtatgagctctgcattgcaattaaaaccatccacacttgggcaatcgcgtaccctccttctcttttcctattcttttaatggattttaggagcatggagtctaatcctcctgcctctgagtgggacccagctagcctagtctatgccaaatcttcctgagtttctctagccaaacaatgctaatcacaacgtcccgcctctccgccaggtcaggtaagcatccaggatgaggccacacccgctcccatcactcttttttttttctgaracggagtcttactctgtcacccaggctggggtgcagtggcacgatctcagctcactgcaagctccgcctcccgggttcatgccattcttctgcctcagcgtcccgagtagctgggactacaggcgcccgccaccacaccagctaattttttgtattatttactacagacagggtttcaccgtgtgagccaggatggtcttgatctcctgacctcatgatcttcccgcctcagcctcccaaagtgctgggattacaggcgtgagccaccgtgcccggcctccatcactcccattgcccactct

SEQ ID NO: 891655 - DNA, 620 bp, Homo sapiens
cttatctgtcatcccacacctcagcattagaaagagttttctttgggtctgtatgagctctgcattgcaattaaaaccatccacacttgggcaatcgcgtaccctccttctcttttcctattcttttaatggattttaggagcatggagtctaatcctcctgcctctgagtgggacccagctagcctagtctatgccaaatcttcctgagtttctctagccaaacaatgctaatcacaacgtcccgcctctccgccaggtcaggtaagcatccaggatgaggccacacccgctcccatcactcttttttttttctgagacggagtcttactctgtcacccaggctggggtgcagtggcacgatctcagctcactgcaagctccgcctcccgggttcaygccattcttctgcctcagcgtcccgagtagctgggactacaggcgcccgccaccacaccagctaattttttgtattatttactacagacagggtttcaccgtgtgagccaggatggtcttgatctcctgacctcatgatcttcccgcctcagcctcccaaagtgctgggattacaggcgtgagccaccgtgcccggcctccatcactcccattgcccactct

SEQ ID NO: 891656 - DNA, 646 bp, Homo sapiens
aacctcgatctgcatgtgatctgttctaatttctatgaacctgttgctcctctattcacttatttttttccctttctttggctatctgaagttccaaatatttataaaagtatactcaataaatgatttcacagtgtctttttattaggctatttttccctcagactactttttatttgatattaaatggaaatggctcctataattatatgtattgttttatttgctgtttgcaattgtgataattttcattacctcctgcagtacttttaattaatagtgtttcatttcatttcttaacatcatttaaaaatcaaaaaaagcaaccacttctattttcagctgatattcagtgattttcctgaaaacacacataagaactgactgaaatgaaaattaaaaaactgttttcaaagccattactaagagcttcatttggtgtctgtagcttttttttttttttttgtcgtcacarggtttgtagtatttggtgttatttcatctttatgaagcatttatagaacatatgagatttttaaatatacgaaatacgtacacaagtgcttttgaactagatattcgtttttcatcagagttacaatctctttaaaagaacaatattttcaaaacgagttacgctctattt

SEQ ID NO: 891657 - DNA, 649 bp, Homo sapiens
gtgccaaaacttagaagcaaccaacttatctttcatgaggtgaatggataaactgtgatgcatccaggcaatggaatattatttagtgctaaaaagaaatgagctatcaagtcatgaaaagacatggaggattcctaaatgtataccactaagtgaaagaagccaatatgaaaaggctgcatactgtgtgatgccaactaaatgacattctgaaaaggcaaaactatggagactataaaaagagcaatggtttgaagggcttagcaaggagggagggataaataggcggagtacagagaaactttagtacaatgaaactactctatttgaactataatggtggatacatgttgttgtatatttgtcaaaacccatagtatacacaacactaacagtgaatcctaagataaactatgtactttgrgtgataatatatgaatataggttcatggattgtaacaaatgtaccactcttgtgagggaggttgataatggggaaggctccatgtatgtgggaaaggggatgatatgggaaatctctggatctcctacttaatttgtctgtgaacctaaaactgctctaaaaattagtttattatacaaaattattttaaaatgagagaaaaaaattacagtggtcagattgccc

SEQ ID NO: 891658 - DNA, 603 bp, Homo sapiens
aatgtagatgatggtttgataggtgcagcaaaccaccatggcatgtgtatacctatgtaacaaacctgcacgttctgcacatgtaccccagaacttaaagtataacaaaatatatctatatctatgtacaaaaatttctgggtgatcaccaaaaatgtaatcaataatgttactttcctttgtttctctgaatcctctttctcctacaatgaaagtgtatttttttaaaccttaagaaattctttttgtactatcttttcctaccgatagtttatgtgctaccagttaggatcttggaaaactactcacattaaaatcttgtttcctgagttttatttcaaactgtcctgaatttttactacagtaatttttgctaaaggtagttcctagtaatcagttatttacctttggtaaacttaattttagatgaaaactayacacaaaaaaacaattgtcttatgattagaacttcaagttaggaggtgagtagtctatgcagcataagacaaattataactcttacctttaaatttcctcgtttgacaagaactatcaaattcctttttaagagtgtacacatatatgtttttaatttggaaattc

SEQ ID NO: 891659 - DNA, 603 bp, Homo sapiens
aatgtagatgatggtttgataggtgcagcaaaccaccatggcatgtgtatacctatgtaacaaacctgcacgttctgcacatgtaccccagaacttaaagtataacaaaatatatctatatctatgtacaaaaatttctgggtgatcaccaaaaatgtaatcaataatgttactttcctttgtttctctgaatcctctttctcctacaatgaaagtgtatttttttaaaccttaagaaattctttttgtactatcttttcctaccgatagtttatgtgctaccagttaggatcttggaaaactactcacattaaaatcttgtttcctgagttttatttcaaactgtcctgaatttttactacagtaatttttgctaaaggtagttcctagtaatcagttatttacctttggtaaacttaattttagatgaaaactacrcacaaaaaaacaattgtcttatgattagaacttcaagttaggaggtgagtagtctatgcagcataagacaaattataactcttacctttaaatttcctcgtttgacaagaactatcaaattcctttttaagagtgtacacatatatgtttttaatttggaaattc

SEQ ID NO: 891660 - DNA, 603 bp, Homo sapiens
aatgtagatgatggtttgataggtgcagcaaaccaccatggcatgtgtatacctatgtaacaaacctgcacgttctgcacatgtaccccagaacttaaagtataacaaaatatatctatatctatgtacaaaaatttctgggtgatcaccaaaaatgtaatcaataatgttactttcctttgtttctctgaatcctctttctcctacaatgaaagtgtatttttttaaaccttaagaaattctttttgtactatcttttcctaccgatagtttatgtgctaccagttaggatcttggaaaactactcacattaaaatcttgtttcctgagttttatttcaaactgtcctgaatttttactacagtaatttttgctaaaggtagttcctagtaatcagttatttacctttggtaaacttaattttagatgaaaactacacacaaaaaamcaattgtcttatgattagaacttcaagttaggaggtgagtagtctatgcagcataagacaaattataactcttacctttaaatttcctcgtttgacaagaactatcaaattcctttttaagagtgtacacatatatgtttttaatttggaaattc

SEQ ID NO: 891661 - DNA, 673 bp, Homo sapiens
attttatctaaagcctttctgcatctattgatataatcatgtggtttttgtctttagttctgtttatgtgatgagtcccatttcttgatttgcatattgatatggtttggctgtgtccccacccaaaatctcatcttgaattgcaatccccacctgtcagatcatgggggtggctggtttcckctatgccgttcttgtcatagtgagtgaatctcacaagatctgacggttttataagtgtctggcatttccactgcttgcactcattctctctcctgctaccctgtaaataagtgccttctgccataattgtaagtttactgaggcttccccagccatgtggaactgtgagtcaattcatcctcttttctttataatatacccagtcttgggtgtttcttcatagcagcatgggaacagaataatacagtaaattggtactgaggtagcagggtgatgctataaagataccccaaaatgtggaagcaaatttggaactgggtaacagttagaggttggaacagtctggagggctcagaagaagacagaaaaatgtggtgaagtttggaaccttctagagacttggtgtatggttttgatcaaaatgctgacagtgatatagacaatgaagtccatgctgaagtggtgtcagatggacaagagaaacttgttg

SEQ ID NO: 891662 - DNA, 673 bp, Homo sapiens
attttatctaaagcctttctgcatctattgatataatcatgtggtttttgtctttagttctgtttatgtgatgagtcccatttcttgatttgcatattgatatggtttggctgtgtccccacccaaaatctcatcttgaattgcaatccccacctgtcagatcatgggggtggctggtttcctctatgccgttcttgtsatagtgagtgaatctcacaagatctgacggttttataagtgtctggcatttccactgcttgcactcattctctctcctgctaccctgtaaataagtgccttctgccataattgtaagtttactgaggcttccccagccatgtggaactgtgagtcaattcatcctcttttctttataatatacccagtcttgggtgtttcttcatagcagcatgggaacagaataatacagtaaattggtactgaggtagcagggtgatgctataaagataccccaaaatgtggaagcaaatttggaactgggtaacagttagaggttggaacagtctggagggctcagaagaagacagaaaaatgtggtgaagtttggaaccttctagagacttggtgtatggttttgatcaaaatgctgacagtgatatagacaatgaagtccatgctgaagtggtgtcagatggacaagagaaacttgttg

SEQ ID NO: 891663 - DNA, 673 bp, Homo sapiens
attttatctaaagcctttctgcatctattgatataatcatgtggtttttgtctttagttctgtttatgtgatgagtcccatttcttgatttgcatattgatatggtttggctgtgtccccacccaaaatctcatcttgaattgcaatccccacctgtcagatcatgggggtggctggtttcctctatgccgttcttgtcatagtgagtgaatctyacaagatctgacggttttataagtgtctggcatttccactgcttgcactcattctctctcctgctaccctgtaaataagtgccttctgccataattgtaagtttactgaggcttccccagccatgtggaactgtgagtcaattcatcctcttttctttataatatacccagtcttgggtgtttcttcatagcagcatgggaacagaataatacagtaaattggtactgaggtagcagggtgatgctataaagataccccaaaatgtggaagcaaatttggaactgggtaacagttagaggttggaacagtctggagggctcagaagaagacagaaaaatgtggtgaagtttggaaccttctagagacttggtgtatggttttgatcaaaatgctgacagtgatatagacaatgaagtccatgctgaagtggtgtcagatggacaagagaaacttgttg

SEQ ID NO: 891664 - DNA, 673 bp, Homo sapiens
attttatctaaagcctttctgcatctattgatataatcatgtggtttttgtctttagttctgtttatgtgatgagtcccatttcttgatttgcatattgatatggtttggctgtgtccccacccaaaatctcatcttgaattgcaatccccacctgtcagatcatgggggtggctggtttcctctatgccgttcttgtcatagtgagtgaatctcacaagatctgacggttttataagtgtctggcatttccactgcttgcactcattctctctcctgctaccctgtaaataagtgccttctgccataattgtaagtttactgaggcttccccagccatgtggaactgtgagtcaattcatcctcttttctttataatatacccagtcttgggtgtttcttcatagcagcatgggaacagaataatayagtaaattggtactgaggtagcagggtgatgctataaagataccccaaaatgtggaagcaaatttggaactgggtaacagttagaggttggaacagtctggagggctcagaagaagacagaaaaatgtggtgaagtttggaaccttctagagacttggtgtatggttttgatcaaaatgctgacagtgatatagacaatgaagtccatgctgaagtggtgtcagatggacaagagaaacttgttg

SEQ ID NO: 891665 - DNA, 488 bp, Homo sapiens
cattctctctcctgctaccctgtaaataagtgccttctgccataattgtaagtttactgaggcttccccagccatgtggaactgtgagtcaattcatcctcttttctttataatatacccagtcttgggtgtttcttcatagcagcatgggaacagaataatacagtaaattggtactgaggtagcagggtgatgctataaagataccccaaaatgtggaagcaaatttggaactgggtaacagttagaggttggaacagtctggagggctcagaagaagacagaaaaatgtggtgaagtttggaaccttctagagacttggtgtatggttttgatcaaaatgctgacagtgatatagacaatgaagtccatgctgaagtggtgtcagatggacawgagaaacttgttggaaactggagcaaaggtgactcttgctatgctttcgcaaagagactggcagcattttgcccctgccttagagatctgtg

SEQ ID NO: 891666 - DNA, 633 bp, Homo sapiens
gtaacaaaacctggtggagacactacaaaaaaaaatgaaaatttcaggccaatattccagatgaacatccatgcaaaaatcctcaataaaatactggcaaaccaaatccagcagcatatcaaaaagcttatccaccatgatcaagtcagcttcatccctgggattcaaggctggttcaacatgggcaaatcgataaacataatccatcacataaacagaaacaatgacaaaaaacacatgattatctcaatagatgtagaaaaggccttaaataatgttcaacaccccttcatgctaaaaacagtcaataaactaggtattgatggaacataactcaaaataataagagctatttatgacaaaaccatagccattatcatagtgaatgagcaaaagctggaagtattccctttgaaaactggcaaaaracaaggatgtcctctctcacaactcctattcaacatagtattggaagttctggccagggaaatcaggcaagagaaagaaatacagggtattcagattggaagagagaaagtcacattgtctctatttgcagttgacatgattatatatttagataaccccattgtctcagcccaaaaactccttaagctgataagcaacttcagc

SEQ ID NO: 891667 - DNA, 633 bp, Homo sapiens
gtaacaaaacctggtggagacactacaaaaaaaaatgaaaatttcaggccaatattccagatgaacatccatgcaaaaatcctcaataaaatactggcaaaccaaatccagcagcatatcaaaaagcttatccaccatgatcaagtcagcttcatccctgggattcaaggctggttcaacatgggcaaatcgataaacataatccatcacataaacagaaacaatgacaaaaaacacatgattatctcaatagatgtagaaaaggccttaaataatgttcaacaccccttcatgctaaaaacagtcaataaactaggtattgatggaacataactcaaaataataagagctatttatgacaaaaccatagccattatcatagtgaatgagcaaaagctggaagtattccctttgaaaactggcaaaagacaaggatgtcctctctcacaactcctrttcaacatagtattggaagttctggccagggaaatcaggcaagagaaagaaatacagggtattcagattggaagagagaaagtcacattgtctctatttgcagttgacatgattatatatttagataaccccattgtctcagcccaaaaactccttaagctgataagcaacttcagc

SEQ ID NO: 891668 - DNA, 633 bp, Homo sapiens
gtaacaaaacctggtggagacactacaaaaaaaaatgaaaatttcaggccaatattccagatgaacatccatgcaaaaatcctcaataaaatactggcaaaccaaatccagcagcatatcaaaaagcttatccaccatgatcaagtcagcttcatccctgggattcaaggctggttcaacatgggcaaatcgataaacataatccatcacataaacagaaacaatgacaaaaaacacatgattatctcaatagatgtagaaaaggccttaaataatgttcaacaccccttcatgctaaaaacagtcaataaactaggtattgatggaacataactcaaaataataagagctatttatgacaaaaccatagccattatcatagtgaatgagcaaaagctggaagtattccctttgaaaactggcaaaagacaaggatgtcctctctcacaactcctattcaacatagtattggaagttctggccagggmaatcaggcaagagaaagaaatacagggtattcagattggaagagagaaagtcacattgtctctatttgcagttgacatgattatatatttagataaccccattgtctcagcccaaaaactccttaagctgataagcaacttcagc

SEQ ID NO: 891669 - DNA, 565 bp, Homo sapiens
tttgaccctctgggtcagaggcccttatggagcaatgcttccctttctagatctaaaataaaacctgtctctatggacagcaaaggagcatgaagtcaggaaaatgttttcctttgataagcttgaaaagtcaatttcaaggataaagcaccttgataaaagtcaatcagactagataaacacaaatggaaaccaagagaaatagagacataaatagatatgcaatatcatatacttttcctaaataggaaaggaggttacacataaaatgcaagtattttgcaagctggaaacacaacaaaacagaaaataagatagaatatggaaaaaaataataaaaatgactaygaataagagatataaaaatattttgagcaaatgttttagaggcttttgcaggtgagttgcataaacgctccataatttcctgttaacttggatctatacgaggtggattaacaaagaaaacagagtttagactattaatttcatttaattttttgattatgaatatatatttacaataaataataaactttgctttaaaacatactcatgttagtta

SEQ ID NO: 891670 - DNA, 630 bp, Homo sapiens
gggtctcaggcaagaagacctccttgtgccaggcaagattacttaggaaagtctgcctggagctgtgtcaagagatgtcttttggataatgagacagaaatgatgacagggtaaggaaagaatgaagttttattcttttttataaaaaagaagttttatagcatgttttaaaagcctccctggcaggtgaaaaatctgtgtaaggaaaactacaaaacacagctraaagaaataatatatgacacaaacaaatggaaacacatcccatgctcatggatgagtagaatcaatattgtgaaaatgaccagactgtccaaagcaatctatagattcagtacaatttccattaaaatgccatcatcatttttcacagaactataacaaacaatcctaaaatttatatagaaccataaaagagcctgcatatccaaagcaatactaagcaaaaagagcaaatttggaggcatcacattatccaacttcaaattatactacaaggctatagttaccaaaacagcatggtgttcatataaaataggcacatagaccaatgaaatagaatagagaatccagaaatagaaccaaatacttacagccaattgatctttgacaaagcatacacaaacataa

SEQ ID NO: 891671 - DNA, 542 bp, Homo sapiens
atattatatagggataaaagttcattttgttcatttgctctctattaaaggcattgaggagtcagagatcattagaaatagaagaagctatacgggtcgtctagttcactgattcccagacccatggcatcagcatcaccttggaatttgttakaaatgcaaattttcaggcccacctcagaactattgagtcagaaactctggtgggtgagtgacaaccatctgtgctataacaaattttccaggtggttttgtggctggctaacattgtagaaccacttagtttaactagcttgaggtgaaagtcaacatgcatttactaaaagcacctattaggtgccaggtgctttcacttgtgttatttgatatcatccttacagttccatgcacagggggatgtgagagcacagaatatttggggcatggtgagcaatacagtaaaactggatcaaggttgtgaaagagcagagagtgggtgctgagagaaatttgctggagaggctataggtggcagattgggggtcaaagagatcttccacagc

SEQ ID NO: 891672 - DNA, 642 bp, Homo sapiens
cacctatgagtgagaacatgcagtgtttggtttttttgtcgttgcgatagtttgctgagaatgatgatttccagcttcatccatgtccctacaaaggacatgaattcatcattttttatggctgcatagttttccatggtgtatatgtgccacattttcttaatccaatctatcattgatggacatttgggttggttccaagtctttgctattgtgagtagtgctgcaataaacatacatgtgcatgtgtctttakagcagcatgatttataatcgatgatttttagattaatgtattttacgataagcattattggttctaaaagatctttctaaagttaaaaaaaattgtaatacatttaaaagattgggctaattattttttatttagctatatgtttcaactttagatagtatcacttgactccagctatgacagctaagaaattgaactcaaatacagttcctttcatcctttctttgtatctagtggctgaatattattggatcttgaagatagcttgatttctgtctcctgtaggtgacctgatacttctttccagatgccagtaaaagtcattttttagtcaggctggagtgcagtggtgcgatcttgctcactgcaacctgtgcctcccgggt

SEQ ID NO: 891673 - DNA, 591 bp, Homo sapiens
actttgtaaatacctgggtttttctgataagtgtaagggctcatgttattattgtgaattaatttttcttaccaaacatcaatttttttcttagataatgtgagatgaggattcttatacataataaatccatttaggctgcctgtaaaacaacaacaacaaaaaagaaaatgtatgaataaataattaaaaattataattggcaattttgataacatattgtcttctatattgtaagaatattataagtagctgtgtgtttctaagtattgacaaaataactataataaaatgccaataattccaacaagaatatctagattataaaaattttaaatttgctttgtaaatagaagaaactaattaagagatggaaattcttgatttcttgttgaaatattataccaatttcctttttttccttgatatatgcaaaaccaagcctcatctmgagtatggctaatttaatcaatagtgggtatttctttatccaacatgttcttaaaaataatatacttgcatgaccatatgcacagaatatttgggatcaaatttcaattcaatacagtctcagagtaagtataacagcaa

SEQ ID NO: 891674 - DNA, 439 bp, Homo sapiens
gagggcagcagggcaggtggcttggagcagtggaaagacagctgacatagagacatggatgatgtgggctccggccacagcctggatgatcttgaacaaattactcagctgagcttctgttttctctgaaataaaatgcagaaaataatacctttcctgctccttcaggcacaaacaaattgatagaaggagagaattctgtaaactctaaataactgtgaacatatgaggmatgttttgtttattatcaatggggagtagtgacacaacactgggtcctaagcaaaaacacagacaggactgggggcagctctgttgacattttgaactcctgtgatgtagtttacagctttgcccaatgtttttaactggctaggtgagggtatgtttaacactcatgccttagcgtgaaatgtggttctatgcctttcctgataaa

SEQ ID NO: 891675 - DNA, 439 bp, Homo sapiens
gagggcagcagggcaggtggcttggagcagtggaaagacagctgacatagagacatggatgatgtgggctccggccacagcctggatgatcttgaacaaattactcagctgagcttctgttttctctgaaataaaatgcagaaaataatacctttcctgctccttcaggcacaaacaaattgatagaaggagagaattctgtaaactctaaataactgtgaacatatgaggcatgttttgtttattatcaatggggagtagtgacacaacactgggtcytaagcaaaaacacagacaggactgggggcagctctgttgacattttgaactcctgtgatgtagtttacagctttgcccaatgtttttaactggctaggtgagggtatgtttaacactcatgccttagcgtgaaatgtggttctatgcctttcctgataaa

SEQ ID NO: 891676 - DNA, 599 bp, Homo sapiens
aagagcccagggtattgagctgtcacacagccctgcacccctgtggccatgcaacttgaaccacatgagtggcttccgtggagaagtaagcactttaccttcttgcacacagatggaattatcacttgggatccagcctagggttccattaaaatgcttcaaacacagtctctttgtagcgcccttcagcttgaatccgtcttggcagtgaaatcgggctacagagccttcaaagaaaacccctccgctgggggtcctgaagccattctcgggaatgccggggtcagcacacacttgaaggtcatcgaaccctacatcaacaaagagaggaaaaggtgcctatgaatatgttctctcaatgccaagggccttcctacataaatggcagaccctgcatgatgtcatacgcyttggacactccagttaccccaccaccaaagccaaggacattttagtgcacattctactctgcttttagctctttgctcagaaaagcactgagtagagttttctgttcaatggccaagttagcctttcaaggaagttacaggaggagggagaaggaaacagacaaaaaggatttcacatgacaagtgcca

SEQ ID NO: 891677 - DNA, 666 bp, Homo sapiens
tgacatcatccaggtttggagttgaaggaactcagagaaatcacgtaattcaagccctcattccgatttagtttttgtttgacctatagagaaactgagtctcaaataaggtaagagccttcccagagttaaatgacaatttagggaaagacctgttgcagcccccgggcttgtcactgttacctggactcctttcacaccatgggtcagtcctgtctgagatgcagattttttaaaaactaagttcatatccattaaaatgctttatgacagtaaagtgctctacagaagcaaggtggtattgggcagctgttctcttgggtgygcacagatccctttcttttattcccacctcatcctgccacatgtacagccattcccccttttcacatggcccccttattccaattcaacttgcttcttccaagtgaactaaatttatagaggtctgaatttacagaactgaatgaattcactttatggcccccaaagtctccaacctcagagatgtctgtgcttcttcaagctgcttctgcaagactggagcctgcatgaccccaagcatgggtgaaaatgtctatggcccagggaacagaggaggtgacctatatggtggagaggagaccctagaattggcaaaggactgaaaatacaccccgtgggcgc

SEQ ID NO: 891678 - DNA, 623 bp, Homo sapiens
gtattcattcttggttggctatgtgaattataaacagctttttccactttggtcatttcactttgtttatagtatctttttggtttttttgctacatacagttttaatttgttgacctttatggttgacgattttatgatatgtgtttgttatcttttgtttaagaaattcttcccaaccatgagttaaaaaaagtgtacattttcttctaaaaatatgtatttttaatttttaattgatacataattttacatatttatcgggtgaaatgtgatgtttcaatacatgtgtacattatgtaactagcaaattggggtaattagcatatccatcacctcagacatttataatatttctttgtgatggtaatattcaaaatcctctcttctattttgagatatgcaatacctttttattgactatagtcaccccactrtgcaataggataccagaacttatccttcttttctgattgtaactttgtacccattgaccaaactctctccataacccgcgcccctcacccccaccccagtctctgataaccactgttctattcattacttccatgagatcaacttttaaaaatatctggcatatgtaaaaattgtttcacattttgg

SEQ ID NO: 891679 - DNA, 677 bp, Homo sapiens
cagcacttccatgccgtctgcctgtggagttagggtgtgtcacctgcccaactcaccagtgggtgctccaatcaggaacctcctcttagctttggtgtctacagttttcactggggtttcattatgtaagcatgattgattaattcattggccactagaagtgattgtaytcaaactcaatctccatccctcctttccctctccagaggatgggtggctgaaagttccagccctctaattacatattggattttcctggtgactagcccctattctgaatccatctaggatcccaccataagtcacttcactagggtaatagagacactcctatctcccaggaaattcccagggttttttaagctccatgataggaatcagggacaaagactagaaaaattatttgttataccatagtcagtctgctggcatcatgtctatgttccaatcagcgggacagtgaaaagtgccaataaggcagtttgaagacatgaccagaaagctgcacatgtgacttctgtttcagctccttggccagagcttcaacactggccatgccaactacaagagaggctagaaaatgtggtctttattgtcagcagccacgtacctagctagaaagcagaggttttattattatagaaaagagggagaatagatattgatgtagagttacc

SEQ ID NO: 891680 - DNA, 608 bp, Homo sapiens
gataaacacctctttatggcactttgcagagctgctctctcagcgatgggcatcagcatgagtatagctgaaagctgagactacttctcttatgtcccctctcacttctcctctaatgagcctccctaattttaaaggtgctatttcctgggtggttaaaggaagaygagagttttattaaggaaaatgcccaagtatcatcgttgctagggaatccacctgggagtctttgctgcaaatgtgcctgtttgtcatttcatgccttacttggggcactgactttgctgccaggaataccaaatctgtttttcctaagccaccactgggacagatagctgggaagatgaccccactaatagcccattagtatacaaattcaaaaatgattcagcagttcagggataagagctccatgtgggtgcaaacacatcctcaggcttggctggggcacaagattgcagccttggtcttcagcaggcaaggccaggtgctttgctcctgaaacaaatggatcaatgtgctggttattgctaacaaagtactagttgggcccatttgtgggttaaaacagccatctctagactggtgggcccaggatccttgttctt

SEQ ID NO: 891681 - DNA, 608 bp, Homo sapiens
gataaacacctctttatggcactttgcagagctgctctctcagcgatgggcatcagcatgagtatagctgaaagctgagactacttctcttatgtcccctctcacttctcctctaatgagcctccctaattttaaaggtgctatttcctgggtggttaaaggaagatgagrgttttattaaggaaaatgcccaagtatcatcgttgctagggaatccacctgggagtctttgctgcaaatgtgcctgtttgtcatttcatgccttacttggggcactgactttgctgccaggaataccaaatctgtttttcctaagccaccactgggacagatagctgggaagatgaccccactaatagcccattagtatacaaattcaaaaatgattcagcagttcagggataagagctccatgtgggtgcaaacacatcctcaggcttggctggggcacaagattgcagccttggtcttcagcaggcaaggccaggtgctttgctcctgaaacaaatggatcaatgtgctggttattgctaacaaagtactagttgggcccatttgtgggttaaaacagccatctctagactggtgggcccaggatccttgttctt

SEQ ID NO: 891682 - DNA, 667 bp, Homo sapiens
ccacctatcctgggatgcaaagagatgtagctacttgaatacagaaaacaaaattacaactgaacttttctaaaatttactatttatttagttttttttttaactgacacataataattgtacatatttatgggatacatagtgatgttttgatacatacagcatgtagtgatcagatcagggtaattagcatattaatctctcaaacatttattatttctttgtgttgggaacattcagtatcctcctcctaagctatttggaagtatggaatatatgattgctaactgtatcatcctacagggctatagaacactagaacttattcctcctatctatctgtaattttttatcctttaacaagtctctcccaccctttctcccatacttcctttctgattccagttgtagcctcacaactactctgtgtgtaaagaatgacaattgctccccttttaaagatgaggacactgagggttaaaaaagctagggaacttttgttggtttgcayagctagaaagaggccttccctgacccccttgaagaggtaacctgcggttccctcagttgctagccacgttgctctattttcttaacatcaccaatcacagtgtgtaattattgccttatttatttgttcgctactatggtagacagcctcctcact

SEQ ID NO: 891683 - DNA, 664 bp, Homo sapiens
ggaagagtttgtaacaggctgatctaatctcatcttggggtatccaagaagatttctccaaagaaatgatgtttaacagataaagaaaattatcctgattctgatgaaaaattatgtaattggttgtttaatatctgccacaccttactgaaagctccatgagagtagggatcatgcctgtattaaagaaaaaataaaaatacagagatgttgggaggccaaggcaggtggattgtctgagctcaggagtttgagaccagcttgggcaacatggcaaaaaccgctttctactaaaaaaacaaaacaaaaaaacaaaaaatacaaaaaattagccaggcacrgtggtgcacactcgtagtcccagctacttggaaggctgaggcatgagaattgcatgaacctgggaggcggaggtttcagtgagctgagatcgtgccactacactccagcctgcgcgacagagcgagactctgactccaaaaacaaaaacaacaacagaaaaaacaaaaatgaatctgcgaatttaacattttatttgggaatcacagagttgcaattcagggcatatgcacagacaggaggtctttggtatgtctgaggaaaaaaggaaatgttgggggttgtattaaaaaaagaaatgttatgtattctcttgaaaggcaag

SEQ ID NO: 891684 - DNA, 664 bp, Homo sapiens
ggaagagtttgtaacaggctgatctaatctcatcttggggtatccaagaagatttctccaaagaaatgatgtttaacagataaagaaaattatcctgattctgatgaaaaattatgtaattggttgtttaatatctgccacaccttactgaaagctccatgagagtagggatcatgcctgtattaaagaaaaaataaaaatacagagatgttgggaggccaaggcaggtggattgtctgagctcaggagtttgagaccagcttgggcaacatggcaaaaaccgctttctactaaaaaaacaaaacaaaaaaacaaaaaatacaaaaaattagccaggcacggtggtgcacactcgtagtcccagctacttggaaggctgaggcatgagaattgcatgaacctgggaggcggaggtttcagtgagctgagatcgtgccactacactccagcctgcgcgacagagcragactctgactccaaaaacaaaaacaacaacagaaaaaacaaaaatgaatctgcgaatttaacattttatttgggaatcacagagttgcaattcagggcatatgcacagacaggaggtctttggtatgtctgaggaaaaaaggaaatgttgggggttgtattaaaaaaagaaatgttatgtattctcttgaaaggcaag

SEQ ID NO: 891685 - DNA, 590 bp, Homo sapiens
actaggtgaaactggtcttagggttacagcggtcatttcagcagctgggcttgtggaatattccatttcttggagcaggtgctatgtgccccaagtcctttccccacctggcctctctactctgatttagttggctacgacaagaatgacccaattcatgcagtcaactttcacatttcctccttttgatcgagatctttttataaaagcattgcttgtgaatcatcttgaacttaggcttaattgtttctcagtgccaggatgcacttttcctggctgtctctgtcccacactggggggaaggcatgggggctatgtaaggcacccaggtcacatttgagtaataaagaggccagaagaaaaactttttgtcttaagkcaggtttgtctggggtgtcccagggaagcagggaaggggctcaaaggccctgagtgtggattctgcatgccatagcaccaggggccagtgatttccctgaggtgaatcagctttgagtctcacttctgacaccaagtaggtcaaagtcaaaagtacacaaaaaagtctctaaacttaatgttttatttgggaattacagaattgcaatttg

SEQ ID NO: 891686 - DNA, 590 bp, Homo sapiens
actaggtgaaactggtcttagggttacagcggtcatttcagcagctgggcttgtggaatattccatttcttggagcaggtgctatgtgccccaagtcctttccccacctggcctctctactctgatttagttggctacgacaagaatgacccaattcatgcagtcaactttcacatttcctccttttgatcgagatctttttataaaagcattgcttgtgaatcatcttgaacttaggcttaattgtttctcagtgccaggatgcacttttcctggctgtctctgtcccacactggggggaaggcatgggggctatgtaaggcacccaggtcacatttgagtaataaagaggccagaagaaaaactttttgtcttaaggcaggtttgtctggggtgtcccagggaagcagggaaggggctcaaagkccctgagtgtggattctgcatgccatagcaccaggggccagtgatttccctgaggtgaatcagctttgagtctcacttctgacaccaagtaggtcaaagtcaaaagtacacaaaaaagtctctaaacttaatgttttatttgggaattacagaattgcaatttg

SEQ ID NO: 891687 - DNA, 678 bp, Homo sapiens
atcaagtctaagaactctgtctagctataggtcctgaaaattttcttctatttttctaaagtttatagttttatgctttacatttaagtctgctctccaaacctcagttatcttttcatataagttattttaagttaattttaatgtaagttgtaagaatttgaccaagattaatttatttttttgcctatggatgtctaattgctccataataatttgttgaaagagttatatttattctatgtaattgcttttgtactttgtgaacaataagttgagcatgtttgtgtgagtctgtttctcggttctctgatctatccattgatctgttatttacctctctgtaaatatatcatactgtctcgatgactagaaatataataagtcttgaaattgggtagactgatttatattgctttattcttcttttacaaactggtttagctattatcattcccttgtatgttcatgtatattttagaataatattgcctatatctacaaaaagtcttgctgggattttgatagkaattgcatagaatctgtatgtaaacttgaggagaattgacatctttactatgttgactcttctaattcaacatgatatatctctccatttatttaggttttctcttcatcacaggcttgtaggttttgcagtactaatcttgttcatgt

SEQ ID NO: 891688 - DNA, 555 bp, Homo sapiens
tcttttggccagtgcaagttacaaagcctacctagatttgaagactgaaaaaatggatactaccatttttttggtagagcttcaaagtcatgttgaaaaaggacacggacacagggaggaaaataattgtggtcatttgctttagtgattatggatatggctactagttggtaatgttgggagcagctatgaaaagactggtttcgtttgggaatagttgaactargttatttcttctggcagtgatttgatagcagggccagttttccaatacacattcttttagtatgtgacaacgaaaccatgttatcaatttgtaagggaacatttatcttttattgccctctgtagctggtagacacaagcctgtctcatctaaaggcaaattcacattactgaaatacaagttaaagagaaaggtggctagagcacattctgttttgttcctcactgagaattttagtctcacctgttaggactctttctattaattctccatctcacattggtattagggcctgattctatagaagcatcaatatccaggggttgata

SEQ ID NO: 891689 - DNA, 641 bp, Homo sapiens
cagagactaggattgcaactcttgcttttttttgtttcccatttgcttggtagatcttcctccatctctttattttgagcctatgtgtgtctgtgcaggtgagatgggtctcctgaatacagcacactgatgggtcttgactctttatccaatttgccagtctgtgccttttaattggagcatttatcccatttacatttaaggttaatattgttatgtgtgaatttgatcctgtcattatgaagttagctggttattttgcttgttagttgatgcagtttcttcctagcattgatggtctttacaatttggcatgttttggcagaggctggtactggttgttcatttccatgtttagttgcttccttcaggagctcttgtaaggcaggmctggtggtgacaaaatctctcagcatttgattgtctgtaaaggattttatttctctttcacttagaaagcttaggttggctggatatgaaattctgggttgaaaattcttttctttaagaatgttgaatattggcccccactctcttctggcttgtagagtttctgctgagagatttgctgttagtctaatgggcttccctttgtggttaacctgacctttctctctggccgcccttaacattttttcctt

SEQ ID NO: 891690 - DNA, 645 bp, Homo sapiens
acacatatgccctcccactactgaaccaggaagaaattgaatccctgaacagaccaataatgagctccaaaattaaatcagttataaatagcctaccaaccaaaaaacattcaggaccagagagattcacagccaaattctatcagatgtataaagaaaagctggtaccattcctattgaaaccatttcaaaaaattgaggaggaaggactcctgctgaacttattctatgaggccaacattatccggataccaaaacctggcagacacagtaacaacaaaaaaagaaaactttaggccagtgtccttgctgaacattgatgcaaamatcctcaacaaaatactggcaaaccaaatcccacagtgcatcaaaaaggttatccatcacaatcaagtaggctttatctatgggatgcaaagttgggtcaacatatgcaaataaaaaaatgtgattcatcacataagcagaactaaagacaaaagccacatgactatctcaatagatgcagaaaaggctttcaataaaattcaataccccttcatgttaaaatttttcaataaactagaacaaggtattgaaggaacatacctcaaaataataattgccatctatgatgaataaattgccaacatattgaatagaaaa

SEQ ID NO: 891691 - DNA, 644 bp, Homo sapiens
tcaaatgaaccccctgccttggtctccaaaagtaaacagcacttactattatttttaactttttattttgtgataattatagattcaaaggaagttgcaaaggaagttgcaaagaaatgtacaaggagttctggtgcctcttcatccagtatcttctaacgttaacaacctgcaagaccacagcataatatcaaaatcaggaaattggcattggtacattcygaagagtttattcaaatttcaaaagttttgcatgcatttatgtgtgtgtgtgtgtatatgtgtgtgtgtgtagctctgtgtaatttgatcatgtgtatagctttgtgtagttactgtcacaaacaggatctataatcaccacaaggctttctcatgcttccttttcatggtcatgtttactccctttccaaataaccccattcctgaccccccagcaaacatgaattgattcttcatctctataattatatgatttcactattgtataaatgggacgatgcagtatgtattcttttgagattggctttttcactcagcataatttccttgaaattgatccaacttgttgcatcagtcaatagtgtattccttcttattgctgagtagtattccatagtatagaagtatcacagtttgttcta

SEQ ID NO: 891692 - DNA, 630 bp, Homo sapiens
cagctcacaaagatgagaaataaccagtacgagaactctggcaactcaaaaagctagagtgtcttcttcttttttctttctttctttttttttttttttttttcctgagatggagtgttgctctgtcacccaggctggagtgcagtggcacgatcttggctcactgcaacctccacctcccaggttcaagcaattctcctgcctcagcctcccaagtagctgggactacaggtgcctgccaccatacctggctaattttttgtatttttagtagagatggcatttcaccgtgttagccaggatggtctcgatctcctgacctcatgatccgcctgcctcggcctcccaaagtgmtaggattacaggcgtaagacaccttgcccagccgccagtgtctcttcttatctctaaacaaccacactagtttcccagcaatgattcttaaccaggcttaaattgctgaaatgacagaaatagaagtcacaatatgggtaggaattaagatcattgagattcaggagacagtcaaaactcaatccaaggaatctaagaaatacaataaaagaatacaggaaatgaaagataaaatggccattttaagaaaaaactgatctgatagagctgaacaac

SEQ ID NO: 891693 - DNA, 597 bp, Homo sapiens
aatgtcaccaggcagtaagtgagctccagtagttcatagcacgtttctccctgggtccagaaagcctcagctatttagtcacataatttcataaatgatcatgaaatcaataatagctaactactctgggaagattcacttgtcccaggaattatgataatgctatttacatatattattatattcatttctcatataagcctggatttatagatattatctccaattttcatatgagggaaatgaagatcagaaaagttaagtgactttctgaaggtcacacagctggtaataaggggtagatctggcattgtttacacacgtccctctttcctccctaccatccccaacgcaagtccatgttctaccagtaatatttctctagtttctcargacgctaatgttttacacacacacacacacatgcacacacatagaggtttctatagttaaacagagctagttactgtaagacttctcagagtttttactatgataatgtgcattgtgaatctacaagagagggaaaaagtgtgcccacttccctaagcctatttgacgatggacacctttcatcaaaggagacctcatgaaacc

SEQ ID NO: 891694 - DNA, 656 bp, Homo sapiens
ccatgagtatggtttcatctaacctataagctaactggaaggcagatgaaatacagttaaggactattggcaaggtttttataatctgcactaagaaagagtttcatctaccagatcagcatctttgtaaaggttgctgatgggagatgacctctctattacctccaagtttgatgcttggatgcttcttgcaacagcaaaagccaagccctgacacaccaaccttatgtgggcagcctagacccttatagctgcagccaaaacttaatctcttagccatctgaagccaggtctactcaagtccgtgctccaaaaagtcggaagccacaggccaggaatcastgatgaaaaagatgaaggaaaatccccttgagcacaagaccatcagttcctacaccatggagggatacctctatgtgcaggagaaacatcactttggaacttcttgggtgaagcactactgtatgtatatataaatgggattccaaacaaatcaccatggtaccatttgaccaaaagtcaggaggaaatagggagactgtgaatcagttaccctcaaatcctgcacacggaagaaaacagactccattgagaagaggttttgctttgatgtggaagcagtagacagaggaaatttggacccagaaatggacatg

SEQ ID NO: 891695 - DNA, 617 bp, Homo sapiens
cagacaggacttgccttgtctcagatgagactttggactgtggactttggagtaaatgctgaaatgagttaagactttgggggactgttgggaaggcatgattggttttgaaatgtgaggacatgagatttgggaggggccaggggggaatgatatggtttggctgtgtccccacccaaatctcatcttgaattcccacgtgttatgggaggaacctggagtgaggtaattgaatcatgggggtgggtctttcccatgctgttcttatgatagtgagtaagtctcacaagatctgatggttttaaaaatgggagtttccctgcacaagctctcttctcttgtttgctgtcatgtgagacatgccttttgccttccaccatgactgtggtggcatgtggcactgtaagcytaataaacttctttcttttgtaaattgcccagtctcaggtatgtctttatctgcagtgtgaaaatggaccaatacagtgttctactagcaaacttcatcattgcaattcatttagtagtttctatcttcctactagggcttccttcctagtttggagatatttgacttttcacttcaataggcagtaactgtgtgggaggctatgaac

SEQ ID NO: 891696 - DNA, 590 bp, Homo sapiens
taggtctggctatgggataggagagggagatcttaaaactttacagaaaaaaaattgttagttttttctctgggaagataatcagtggccttggttgcaggtagtatgaaaagtaacggtctaaaatagaaccaaggaaggaaacagaaatgctcccaggtgggttgaaaaactgccttgccaagctccatagagcatcagtatatcaaatgagcattcaaggtccaggtctgtcaatcccactcccttcggaagcaatgggtttttaaaaatgcatctatgctatatttaaatgagcgaacttatcagcctcttttcagaatttacagatggaaagtggctaaagatttttcttagtgaaaatgwtaaatagcagggtttgtcatgtgagatatgctattacctacatctgactgaaaggaaggtgatttgcatcaattaattgactatgtttaaagtctgttttccccacatgacaagaacctccagcctgctctataaatgggctgcaggtaagagaaaagaggaaggcttccttcagggtcttcagagtaactgtgctccattcttttctccttccacagtgattt

SEQ ID NO: 891697 - DNA, 649 bp, Homo sapiens
cagttttagttttctgcatatggctagccagttttcccagcaccatttattaaatagggaattttttccccattgtttgtttttgtcaggtttgtagaagatcagatggttatacatatgtggtgttgtttctgaggtctcttttctcttccattggkctatatatctgttttcgtaccagtaccatgatgttttggttactgttgccttgtagtatagttttgaagtcacgtagcgtagatgccttcagctttgttctttttcttaggattgtcttggctatatgggctttgttttggttccatattaaatttaaagtacttttttctaatcctttgaagaaagtcaatgataacttgatggggatagcattgaatctataaattactctgggcggtatggccataaaatattttttaatccaaatagctcaaaaaatggtgatgtaatattatgtattcattaataaaaacgaagatgattacattcatttttgttgaaaatacttttcaaaaaatatatcttcttgggaaaactattgctattacctcaagggatgtgaacaatatcttcatcttattggatgtttttacttcataatacatgtaatttggaggcacttttccttggcggcaatagcacatttagt

SEQ ID NO: 891698 - DNA, 610 bp, Homo sapiens
aacacaagttcctttaatctattcttattttccacttactgcctttgccttaaagttttgaagagttctacatattattttctaatgagttaccaaaatgcttaggaagaaaagtatagcattctttgtttttgtcttgttcttctgcctttacatttctacttgccrtacaatttcaattactttaagatttttattttgtcttcataaagttacatttttccagactataggcacactgtataattttcatcaattttttacctcaaaatgatgacaaactcttttcattaacatttttgccctaagatgtctttattatattttataatgcaagccatttttttttctttagcttgttgaaaagagctctactttgagcctatttgtttttctacgagcattttcagcaaaatccactcagttggagggacaaataatttatcaattacagcatgttctaaatgttgttagaaattttgttatttaagaatatagttatatgttgctcatgctttaaaaaatggactaaaaagtcacagtattgtgaaattataggattgtttgaggatttctaatgctcttttctttagataggtatgaaattaca

SEQ ID NO: 891699 - DNA, 650 bp, Homo sapiens
taatttttgtagttttaatagagacggggttttaccatgttggccaggctggtctcaaacttctgacctcaggtgatcagcccgccccagcctcccaaagtgctaggattacaggtgtgagccaccacacctggccactgttactcataagattaagtccacatattcagatatcatgcaagggtctacataatcctgctccaacatcctgttgtatttcacttttctcaagtctcccatatacatgctgtgttctcgccaccctgaactgttgttcctaagtcagtgtaccttttggtgtggctctgggcctttcaattttctagttctctgcctagattttkagcctccatatttttgaatggaaaagttagtcctagttcaaaatacaactcaaacatcatgtaccttcaaaaacattttcagccttcatttttcctctttccagtcattttttttttgtcttcatcccctttggttttcatcccacacccccatccccatctttccataggcagagtaatttctttgcctccagttaatggcctacattcccagaaatacccaggactgtgtctttgtgcctcatttacatttgcaccaattggggacctagaaaatggtgcccaataaatgcttgttaaatgaac

SEQ ID NO: 891700 - DNA, 641 bp, Homo sapiens
tgaaggagacaaaacttaagcaagaccaattaagtacaagtagggatgccacaattgaagagaaagaaaaagagaacctaactaggaatatagtaaatattatatgacaatagtatttaaactgttttctaataaatttgacatcagatataatagataatttatgtaaaattttacctcaagaagcaattaaaaatataaataagcctataatgattaaagtattttaaagaaaagtccaaaatctacccacataaaaagcacctgctccaccatcatggatttaagttttaccaaaccatcaagttacagataatgtatttgttaaaccaaatgttctccacactatagagaaggggaaggtgccaaaattaatctgaggctaatgttgccctgattttataaccaaatgagataatacagttagactgaaagaataagacctagtttttggtagcagaatagggtgactatagttaatgataatttgatatatattwcaaaatcactgaaagaattaaactggaatgttcctaacacaaagaaatgacaaatgcatgcagtgataaatatcccaattaccttgattttatcattccacatttcattattatacaatatcacatgtaccccataaatat

SEQ ID NO: 891701 - DNA, 623 bp, Homo sapiens
aattcccactggaatatatatggaagtatttaaaagcctttacttgaaatatatctgaaccattctccttgaagtcacactcgggatctgctattcccctgcttagcttcataaattggttctagttactcttcactggaatttctgctctgctgacccattctggacatatgacamaatttaagcttgaaggaaaaaaaaagattaagttgctaatgcagatgctctttgacttacaatggggttaggtcctgataaacccatcgtaagctgacaacatcgccaagtccaaaatgcatttgttacatctaacctatttaacatcacaggttgcctcactcaccttataagtgctcagaacacttacattagcctacagttgggcaaaaatatctaacacaaagcctattttataataaagtgtgaggtatctcattcaacagtattatcgaatactgtatggaaagtgaaaagagagtaactggatgggtatctgaaatattttttctacttaatgtgtatcactttgacatcattgtaaggtagaaaaattgtaagtagacacactacccctccccccccacataagttgaggactgtctccactttattcaggaggtaga

SEQ ID NO: 891702 - DNA, 618 bp, Homo sapiens
aatatacatttttcttatctgcacctggcacatacttgaaaattgaccacaaaatcagccatgaaatactcagaaaattaaaaactgatatcataccaaccacactctcagactactgcacaattaaaataggaatcaatattaataaaattgctcaaaaccatataattacatgcaaattaaacaacatgctcctgaataatttttgggtaaataatgaaattaaggcagaaatcaaaaagttatttgaaagtaataataagaaaaatacaacataccagaatcattggaacacagataaagcagctgtaagagggaagtacacagagctaaacacacacatcaaaaagttagaaagatctcaaattaacaacctaacatcacacctaggggaactatagaaataacaaaaaatgamcctcaaagctagcagaaggtgagagataatgaaaatcaaaactgaacttaataaaaattgagatgccaaaaatacaaaagatcaacaatttcaaaagtttggtctttgaaattatatatatatatacatatgtgtatatatatatagacatcaatcatatatatgtgtgtgtatctatatatacacacatatatatatgc

SEQ ID NO: 891703 - DNA, 673 bp, Homo sapiens
ttcttccttctgccacttcagatcctctgttgagctgcttgagtgaatttttcattgtttttgtactttttaacttctgaatttccatttgcttcctttttaaaattcccatctctttattggtattctgtatctgatgaaagaaacattgtcatcatagcttcttttacttctttaaacatgggttcctttaggactttgaatatatttgtaatggctgctttgaaggctttggtatatcagatgcctggcctctctaacagatagtgtctattgactacacttttttctgtgtataggtcatacttttttctttctttccatgtctcatactttttgttgaaaactggacattttaggtaatattttttagcacctctagatactcttccctccccggacttgtttttgttgttatttgcctgtctatttgatcagagacttgactagatcatcttagtgatggactagtctttttttcttcatagtttgaagcctctgatgtgactcctaagagggcatgrccttggtcaagcaaacgcagtcaccctgagaagacagtggtttttttttagcagggcactctttccctcttccacgaatgtctctgttaggctgtctccctcagttgttagcacaccagctgttgggttccactaattacctgctgatc

SEQ ID NO: 891704 - DNA, 583 bp, Homo sapiens
acattagccaggtgtggtgatgcacacctgtaatcctcaggaggttgaggcacaagaatcacttgaacctgagaagcagaggctgcagtgagctgagatcatgccactacactccagcctgggtgataagagcaagactccgtcttaaaaaaaaaaaaatcaattcagcaagaggaaatwacaattctaaatatatacgtacccaacactggaacactagattcataaaacaaatattactagacttaaagagagaaagatagaccataatacagaaatagtagtggacttcaacaccccagcagacagattacctatgcagggaatcaacaaaaagcctttggactaaacctgaactttagactaaatgaacctaacatatttacagaatattctaagccaacaactgcagagtatacattcttttcatcagcacatggaacattctccaagatagaccataggttaggccacaaaaaggtctcaataaatttttaaaaatcaaaatcatatcaattatcttctcagaccacagtagaataaaactagaaatcaataccaagaggaactttggaaactacaa

SEQ ID NO: 891705 - DNA, 731 bp, Homo sapiens
ccacataattggaagtaaaacactcctcaggaaatgcaaaagaactgattagttattaataaattgggctgaggcttgggcgctactgaaagccacaatatcagatgccagaatgtctcaaaatcaaaaaggttttttcctctaattattttttatgtgatccaagccaagctgccagtgactatggctgtagtttggatgttgaccatcagaccactgacctttcagtagacctcatattctaataggtcttagaccaccagttagggtgtccatcattcagatttgattgggactgaggggcttcccagaacatgggaattagagagctaaaatcaagaaaatccagagtaaattgggacaagttgatcaccctcacttcagtgtacttctgtctagcaagctatttttccatttttcatggctatacctcatcacataggtcatacattggcttttcacagaatcagtctagggtgctctttttccatatttttgcctcaactgtcatttcctgaaacacactccttgagcatgcagarcaccttccattctactttgtattattttcttcccatcatttgaactctgaaatcattttgagtatttactctctctctgattttttttactaacttatggcctaacacccctgctataatgtacatatagtcctcatctcttggtcttgttgacctatgtgatccaaactgcaagaacagtgcgtcaca

SEQ ID NO: 891706 - DNA, 599 bp, Homo sapiens
actgattagcccaatgttttccttttttatattttggacatatttcagactcagcagttttcttttttcccctatctggcagcctgactcgctgattatttctacattcttttttagtatgaatagcttgtttaaattctttgagtaatttaaaaggaaaaggctcaaatgtagctataatatttccttgttgatctgggggggtgtattctaacagggaactgccaagcctctaaatcaccctctcatctagcttgctgaattcctgcctgaatagaactaagagygatcgctcaaggcactgctcaaacagtcactggggcaactacttttcgcccagtgttctccggaaaagaaagatctggagggtcattttcttcaaaataatgagggggaacacaagggtagggatgaacctctccctcctttgccgctttagctttagctggcaaataaacctggtctgtaacctcttctgttacttcattatactctccttcctctgcatcatcagtgtgaaaaagttccaaggtggaatgaatcacagcccacacttgtcccattgttaccctgatgcttccgagctccccttcttactc

SEQ ID NO: 891707 - DNA, 643 bp, Homo sapiens
atatttgatagtgtttgctcctgagattctgtaacttataatttattttttattatttattttttttttgagacagggtctcactctgttacccaggctggagtgcagtggcatgatcactacgtgctgcaatgctgaacttctgggctcaaacagtcttcctgactcagcctctagaggcgctaagactacaggtgtgtaccaccatgcctgactaatttttttttwaaatttttgtacagatggtttctcattatattgcccaggctagtcttgaatcctagccccaaatggtcctctggccttggcttctcaaaatgctgagattactggcgtaagccaacactcatggccaattctttaccctctatttttttttttctcaagtacatgactgtgtaagcatatactatattcggggtccatgaaatatagtcatattctgatttttctgaagaccagaaaggacataatatgtattacatacatattatatgttctataccaatacttaatataatacctgacatatagaatatactcaaaatatctattttcacatggagcagaagaatgggttaaaatttactaaatttattagcccactatattgaagccttaccacattgctacttccagcttg

SEQ ID NO: 891708 - DNA, 579 bp, Homo sapiens
aaaaaccaaattaataggcgatcgtttcctcccatcttttgcacagacactattttaggagaagaagatctatcacccacagcatgtcagtgaacgaaggggctgtttttactgttcaatcaggaatgagcgtccacagcatcgttgctcacatactccagtaattccctactgacctgcatttactttatttaattccattaatttaagctaaatgaattttatttttaaaatgtgtctgtgcagaactaagcacagagagcatatttctgtttaactccttttgtttgcagcttgaaaaccaatttggatcttttattttcttttcccttggttctaagctttgcttggtcagtgtcttcagcacctaatttgacaattaaatgtatttcacaacccactgacactrcttcattaggttctccaggagtcatcatttccctgcagcctcattccagtcatctctaatagatggtgtgtgtattagtccattgctacactgctatgaagaactacctgagactgtgtaatttataaagaaaagaggtttaattgactcagagtttcacaggctgtata

SEQ ID NO: 891709 - DNA, 598 bp, Homo sapiens
gctctcactgaggaggatgagggaacatgccctggggggtggtgagtggatggcagctgtatgagggatggggctaataatgtctaatgccgctgatctcaagtgagccagggttctaagggaggcaggtgaagagagagttgtaagtatctctggggaacaaataggacccagacatcmtaagggaacgagctctctcctgtgtacatagcttcccctaaagtcctctgctagattctttctctctgactgcttgtcagcttcgttttattttcttgtttttttgttttgttttgttttgttttttcttttttttgagacggagttttgctcttgttgcccaggctggagtgcagtggggcaatctcggcccactgcaacctctgcctccaggattcaagcaattctcctgcctcagcctcccaagtagttgggattacaggcgtgtgccaccgtgcccagctaatcttttgtaattttagtacagacggggtttcgccatgtcatctaggctgatcttgaactcctcacctcaggtgatccacccactttggcctctcaaagtgctcggattacaggtgtgagccacctcgtgcag

SEQ ID NO: 891710 - DNA, 571 bp, Homo sapiens
gtaacttcacagtggagaaatctaacaaaccctacttcagccaggtgattgagaccaacatcagcattcgtagacagtatgtagctttgatatgatgtgatgaaaatgacactttacctatatggtcttcatccccaatatcataaccccagtctaatcataagaaaaaaatcagaaaaatctaaattaagggacattctgcaaaatacctgaccrgtacccctcaaaactgtcaaggtcatcaaaacaaggaaagtctgagaaattgtgagactgacaggaacctaaagagatgtgatgactagaagtaacattgtatcctagaagagatcctggaacagaaagaggaaattaggtgaaaactaaggaagcctgaataaaatataagcttcaggtaataaaaatatatcaatattggttcattaatagtaacaaatgtatcatactaataaaatatgttaatagtaaaggaaactgggtgttggttatgtgggaactcttggtattatctttacacatttttctctaaatctaaaactgtcctaaaaaactgaattctatttttttaaat

SEQ ID NO: 891711 - DNA, 695 bp, Homo sapiens
caggtgttagggcatgggtatctttgggaccattattaagaccgtgtaccacagtgtgttttcctctgctgggcacaagtgtgtaccttgaaatctttcttttgcacaatatccacaaatatcatctcattccatccccttattgactcaagcgatgcttagagaggttaagtgggtttgcgtgttgtcatacaattaagtcacgaatcttgtagctgagtccagggcccatccttttacattatagaaagcaaacaagttcacacccaggggcctcttcccccatcagagccaggatatgatatcctcagtgctcaaatattgctggtgcccagaactaaggaaaatgacaggttttggggtcttagctctttgggcagatttttttwaagaaaagattaggcgatccttagttctcctactcttacaacaggaaagatattgatttttcacaaagactcaatgtctgacctttgaccttgttacatgcccatggtcctaggtagttcagtacagttgcagaattagaatgtgattagcttaggaaaccaagtttctaaaggttgtatttctcaaagaagaaaaaatactaatttctaaaagtaggctagcggatatttatgtaatttaggcacaagatgatggacccctctcctcaattctatgttgctcttgcgtttaactaatcattttag

SEQ ID NO: 891712 - DNA, 695 bp, Homo sapiens
caggtgttagggcatgggtatctttgggaccattattaagaccgtgtaccacagtgtgttttcctctgctgggcacaagtgtgtaccttgaaatctttcttttgcacaatatccacaaatatcatctcattccatccccttattgactcaagcgatgcttagagaggttaagtgggtttgcgtgttgtcatacaattaagtcacgaatcttgtagctgagtccagggcccatccttttacattatagaaagcaaacaagttcacacccaggggcctcttcccccatcagagccaggatatgatatcctcagtgctcaaatattgctggtgcccagaactaaggaaaatgacaggttttggggtcttagctctttgggcagattttttttaagaaaagattaggcgatccttagttctcctactcttacaacaggaaagatattgatttttcayaaagactcaatgtctgacctttgaccttgttacatgcccatggtcctaggtagttcagtacagttgcagaattagaatgtgattagcttaggaaaccaagtttctaaaggttgtatttctcaaagaagaaaaaatactaatttctaaaagtaggctagcggatatttatgtaatttaggcacaagatgatggacccctctcctcaattctatgttgctcttgcgtttaactaatcattttag

SEQ ID NO: 891713 - DNA, 633 bp, Homo sapiens
cccaggagacaccccaaatactgtgagtgcccaaactgcagaagtgggaaaggaagatcctccgcccctggatacacaccccagctggggaaactgaaggtctagtttaaaggagaagattccaaccttacctggagctgagtcaatttagagagttgagcaaaatacagggktagaggaagcagcaggaaaggccctgggagctccctaggtccccaagcaggccattcctgtctggcatcacagggatctttcaggaggacagccagaggcccagggaaaatgccacagggagaaggaagtctccagctgaactttgtaacaatttgaactggacgagaagcctcctggccaggactctgggaagggcacaaatccagcatgcagactccacaggcaggggaagaactaaagccatacttgctttcacagctgggtggtgggtagcctggggcaagttctcagccctgcttgcccactgcctggaaacagactcaatgctgttggtgggggcatggtgggagtaagaccagccctttggattgcatgggagctgggtgaggcctggaactgctggctttagcccacttccctgacaacctgcacgactcagcagagggaggcataatcctc

SEQ ID NO: 891714 - DNA, 661 bp, Homo sapiens
aaaagaataaatcatttagacaaggtcttaattgataattaaatcgtaaaattgataattgaggaaagaagtgagtgaaggccgggcgtggtggctcatgcctgtaatcccagcactttgggaggccaaggcgggcagatcacgaggtcaggagattgagaycatcctggctaacatggtgaaaccccatctctactaaaaatacaaaaaattagccaggcgtggtcgtgggcacctgtagtcccagctactcaggagggtgaggtaggagaattgtgtgaacccgggagatatagcttgcagggagccgagatcacgccactgcactccagcctgggtgacagagcaagactcggtttttaaaaaaaaaaaaaaaaaaagtgagtgaaaatatttaaatattctggcaattagtgatcaaaaatagaaaaataaataataaatatactttaacttcttcatagtccacagtgctgtgccatagctctgccttcattatttgtactttaaagggagctctttcaggcatttcttcaaatcaaatctaagaaccaggaaaacaacaccttttaagactttagtctgatcttcaacaattgagacatttttcccactattgttcttttgaaatagtctaatttaataaaatctagggaagttg

SEQ ID NO: 891715 - DNA, 661 bp, Homo sapiens
aaaagaataaatcatttagacaaggtcttaattgataattaaatcgtaaaattgataattgaggaaagaagtgagtgaaggccgggcgtggtggctcatgcctgtaatcccagcactttgggaggccaaggcgggcagatcacgaggtcaggagattgagaccatcctggctaacatggtgaaaccccatctctactaaaaatacaaaaaattagccaggcgtggtcgtgggcacctgtagtcccagctactcaggagggtgaggtaggagaattgtgtgaacccgggagatatagcttgcagggagccgagatcacgccactgcactccagcctgggtgacagagcaagactcggtttttaaaaaaaaaaaaaaaaaaagtgagtgaaaatatttaaayattctggcaattagtgatcaaaaatagaaaaataaataataaatatactttaacttcttcatagtccacagtgctgtgccatagctctgccttcattatttgtactttaaagggagctctttcaggcatttcttcaaatcaaatctaagaaccaggaaaacaacaccttttaagactttagtctgatcttcaacaattgagacatttttcccactattgttcttttgaaatagtctaatttaataaaatctagggaagttg

SEQ ID NO: 891716 - DNA, 672 bp, Homo sapiens
aaccaaaaatgaacaaagaagataccaataaaatttgttttacacatttaagtctataaataaaatacattgcaaaaaagttattctggcattacaacttttgttcagctcattgtcaaaggaaatataagtttccctgaaaaggcttatttcatatttctgttacattttccgtaatagagtaatgatttggattcagtaaatacttgatgagctaatcttttatctaactaaacagagtatttaaaaaattctgctggcaaaataattacaaaacacatgtgggaaaaattaaacattaatataataatactattggatctactacttaaattcataatttattactgttttcattttcttggtagaacattttcagcaaaaatcaaggattcattaagaattaagayttaaaaatttctaaatgattggctaagagagccagagttccaagggaatcccaaattaaatcttgttatatattcagcaagggattagtaaatgtgttatgatctaaattgtccatattatcagtttagttatcaatagtattgagaggagttatgaaattacaagaatggcagaaaccatggtgtgtggtaggtggagagtaagtcaagagcaaatgtgataccagcatatcaaagattagaaagtaaactaccttatttt

SEQ ID NO: 891717 - DNA, 602 bp, Homo sapiens
atggaaaaacatttcatgctcatagatacgaagaatcaatattgtgaaaatggccatattgcccaaaataatttatagattcaatgctattcccattaaactaccatgatattcttcacagaaaaaaaaaactattttaaaatgcatatggaaccacaaaaagagtttgtgtagccaagacaatcctaagcaaaaagaacaaggctggaggcatcatgctaccacacttcaaactatactacaaggctacaataaccaaaacaccatggtactggtacaaaagcagacacatagaccaatggaacagaatagagaactcagaaataagaccacacatctaagccatctgatctttgagaaacctgacaaaaacaagcaatgaggaaaggattccctatttaataaatggtgctggaaaaactggctagccatatgcagaaaattgaaacctggcycattttttacaccttatacaaaaattaactcaagatggattaaagacttaaatgtaaaactcaaaactttaaaaaccctagaagaaaatctaggcaataccatttaggacataggcacaggcaaagaaatcaccaaaagcaattgca

SEQ ID NO: 891718 - DNA, 648 bp, Homo sapiens
ttcaggtttttacccattctattggaatgtccttttccttaaagatttgtagaaatacttcattgaaattctagactgggcacggtggctcatgcctataatcctagcactctgggaggctgaggtgagtgggtcatttgaggccaggagtttgagaccagcctggccaacatggtgaaatccgactctaytgaaaatacaaaaattagccgggtgtggtgggatgcacctgtaatccaagctacttggggggctgcagcaggagaatgacttgaacctaggaggcggaggttgcagtgagtggagatcaagccactgcactccagcctgggtgacagagcaagactccgtctcaaaaaaaataaattctaatattttcttctacttgcagtttttctgttccctctagtattatgctttttgatgaatacaaattcttattttaatatattaacatttattaattttttatagttagtttttttcctgattaataactctttccttactttgtagtcatgaagatattctacctacagtattgtttaataattagaagtcagtatcaacaataaagctatataaaggaaaaaacattcaatttagttattcaaatgcaattaagcaagtgacttactaagcagtgaa

SEQ ID NO: 891719 - DNA, 585 bp, Homo sapiens
ggtacagcaaaccatcatggcacatgtatacctatgcaacaaacctgcacattctgcacatgtatcccagaacttgaagtaaaatttaaaaaaattagttgcaaatggatgggtttacttctgggctttctattctgtttcactagtttatgtttttgtttatgcaaccactatactgttttgattatcatagctttgtaactttttttttcaacttttactttagattcattgggtacatgwgcagatttttctttacctgggtatattgcacgatgctgagttttggggcatgaataatatccaacccagttacaaagcatggtacccaatactcattttgcaacctttgccccactctctttctcctccctctagaagtccccagtttctattgttggaatctgtgttcatgagtacttgatgtttagctaccacttataagtgagaacatgtggtatttggttttctgttcctgtgttaatttgcttaagataatggccttcagctatatccatgttgctgcaaaggatatgatttcattcttttttgtggttacatagtattccatggtgtatatgtacc

SEQ ID NO: 891720 - DNA, 544 bp, Homo sapiens
tttttttttaagcactcatgtacaacttacaaaaatattatcctacacacaaagaaaacaaaacatctaaaaaataagttacactgtatacaatgtgatcacaaagcaataacactagaaattgttaacaaagtataaacaaatagaagaaaatgggttggagtttttaagtacagttattcctcaaaattcacaggattttggtttcaagacctctctcccaataccaaaacctctaatgctcaagtctctgatataaaaaggtatcatatttgcatataacctatgcacattyttctgtttaagtcatgtctagattatgaaaaaaaaaacctaatacagtgtaaatgccatgtaaatagttacactatattgtttagggaatgatgacaaggaaaaaagtctgtacattttcagtacagacacaatattttttaaatattttagatctatggttgattgactccatggatgcagaacccacagatatagaaggctgactgtacacacatttcatcaactcatattaaataaaaaattaaaa

SEQ ID NO: 891721 - DNA, 544 bp, Homo sapiens
tttttttttaagcactcatgtacaacttacaaaaatattatcctacacacaaagaaaacaaaacatctaaaaaataagttacactgtatacaatgtgatcacaaagcaataacactagaaattgttaacaaagtataaacaaatagaagaaaatgggttggagtttttaagtacagttattcctcaaaattcacaggattttggtttcaagacctctctcccaataccaaaacctctaatgctcaagtctctgatataaaaaggtatcatatttgcatataacctatgcacattcttstgtttaagtcatgtctagattatgaaaaaaaaaacctaatacagtgtaaatgccatgtaaatagttacactatattgtttagggaatgatgacaaggaaaaaagtctgtacattttcagtacagacacaatattttttaaatattttagatctatggttgattgactccatggatgcagaacccacagatatagaaggctgactgtacacacatttcatcaactcatattaaataaaaaattaaaa

SEQ ID NO: 891722 - DNA, 657 bp, Homo sapiens
ataatattatttaattcagttttattactcttcacggatttttcttagaattttcatcagtaggaacattttgattcttattttccatcttctttatatagtaacctttatggttgttgtttacagtaaatatcttgtattttctggattaacaataaggaataattctgtgttgacaaatgtgagacatttggtggcttactagttttttagttcaagagcaccctcttctgttgatataataaaatgtaattttattaaatggcaccattttttaagagaagaattggtttgactttattttattttattttatttatttatttttttgagatggagttttgctcttgttgcctaggttggagtgcaatggcacaatcttggctcactgcaacctccacctcctgggttcaagcgattctcctgtctcagcctcctgagtagctgggattacaggcatgygccaccacgcctggctaatttttgtatttttagtatagatggggtttctccatattggccaagctggtctcaaactcccaacctcaggtgatccgcctgcctcagcctcccaaactgctgggattacaggtatgagccaccacgcctggtcagtttgactttttattaagtaatcttcttttgtttatttggatc

SEQ ID NO: 891723 - DNA, 612 bp, Homo sapiens
ttgacaacttgagaacatagagggattacgtgttttattaatgatcataaataatatatttaactatgtaacataattcacttgtttatttcccacttcaatttacagattttttttacacatttgtatcacaggggacaaaagtaaatgataaagtattaatagaaagccaggaccaaggggaagaaaatacaactatgctcctcatataaaatgacataattgctgggtgatatggtttggctgtgtccccacccaaatctcatcccgtaattcccacatgttatgggtgggacccagtgtgagataattgaatcatgggggcagtttcccccatactgttatggtagtgaataagtytcatgagatgtgatggtttttataaggggtttcctttttcgattggctctctgattctctctcgcctgccgccatgtaagatatgccttttgccttccaccatgattgtgaggcctccccagccacgtggcactgtaagtccattaaactctttttctttataaatcacccagtcccaggttgtctttaccagcagtgtgagaacagactaatacactggggtagggcttcaagtttcactcttggtgaaaa

SEQ ID NO: 891724 - DNA, 630 bp, Homo sapiens
ccgcacgctgtgagggtctatggatatgccactgccagccctggaaatggacactgcttcgaaaataggaagaacgtaagagggaaaaagtggagagaatttaaaattttaaaatatttatattaactgatcaccagttctcagataacatgcctgaagagcattcttgcgtaactaagaacaatttccaaacaggacaaaaagaggtccatttacttgtttcccttcacgttctagtttgtagaaaaaaggagacaagaattagggtggtatttccaaactttgcatatgaagattaagaaatattttacactgttaaatatttataattactcaaaatatttctttctctctctmtatatatatatccctacacatacacatgcaatatatgcataaatatatatatacataaaactacataattttatgttgaatgataaaatggctttatttatatcaaaagatttaattcttaaacattataaaaatttaaactttactttgaaatattttatttaatattttgatttataatgatttgtcttttgccttttaattttataggcaattttgaatattttgaaagaaaagattttgaaaatatgaacaataacttttttacattta

SEQ ID NO: 891725 - DNA, 630 bp, Homo sapiens
ccgcacgctgtgagggtctatggatatgccactgccagccctggaaatggacactgcttcgaaaataggaagaacgtaagagggaaaaagtggagagaatttaaaattttaaaatatttatattaactgatcaccagttctcagataacatgcctgaagagcattcttgcgtaactaagaacaatttccaaacaggacaaaaagaggtccatttacttgtttcccttcacgttctagtttgtagaaaaaaggagacaagaattagggtggtatttccaaactttgcatatgaagattaagaaatattttacactgttaaatatttataattactcaaaatatttctttctctctctatatatatatatccctacacatacacatgcaatatatgcataaatatatatatacataaaactacataattttatgttgaaygataaaatggctttatttatatcaaaagatttaattcttaaacattataaaaatttaaactttactttgaaatattttatttaatattttgatttataatgatttgtcttttgccttttaattttataggcaattttgaatattttgaaagaaaagattttgaaaatatgaacaataacttttttacattta

SEQ ID NO: 891726 - DNA, 549 bp, Homo sapiens
tgatcagattgcagagcctgtgctgtattttaggcacagctggtgagggtatgaggcttctaagctctcctgcctcctaatctgcttaccatatattagatgcttgattaatggtatctattatcattaccattatctttattaccatcaaaagaggacagctctataggaattacattatacatttggatatgcaattttagttgaggctgatgaactagtggcctaaaatcactaaatttaaagatgacttgtttcaacataataaataaagtacgaaatattttcatttaccattcactcattctattgggatagtgtacagagtcatgaaaatattgcctcaatggattttcagctactcagaatagctctccataaagaaaaamcaaaacaaaacacaaatggccaataaaaaatactaaaggatgttcagacttactcataattaaagacatatcattcaaaacagtgaggctccagtgctgccatgtgtagttgttcggtttgagcactgtgtaaggtggctggccaaagggcaagtggagt

SEQ ID NO: 891727 - DNA, 549 bp, Homo sapiens
tgatcagattgcagagcctgtgctgtattttaggcacagctggtgagggtatgaggcttctaagctctcctgcctcctaatctgcttaccatatattagatgcttgattaatggtatctattatcattaccattatctttattaccatcaaaagaggacagctctataggaattacattatacatttggatatgcaattttagttgaggctgatgaactagtggcctaaaatcactaaatttaaagatgacttgtttcaacataataaataaagtacgaaatattttcatttaccattcactcattctattgggatagtgtacagagtcatgaaaatattgcctcaatggattttcagctactcagaatagctctccataaagaaaaaacaaaacaaaacmcaaatggccaataaaaaatactaaaggatgttcagacttactcataattaaagacatatcattcaaaacagtgaggctccagtgctgccatgtgtagttgttcggtttgagcactgtgtaaggtggctggccaaagggcaagtggagt

SEQ ID NO: 891728 - DNA, 662 bp, Homo sapiens
agcttttttccatatgattgttggccatatgtatgtcttttgaaaagtgtctattcaggtcctttgcccacttttttatggagttgtttttctcttgtaaatgtgttcaagttccttacagaggctggctgttagacctttgtcacatgcatagtttgcaaaaattttcttgcattctgtargttgtctgtttactctgttgatagtctcctttgctttgtagaagctctttagtttaattaggtgccatttgtcaattttttcttttgttgcaattgcttttgacattttcatcatgaaatatttgcccatgcctatgtcctaaatggtattgcctaggttgtcttccagggtttttatagttttgagttttacatttaagtctttaatccatcttgaattaatttttgtatatgttgtaaggaaggggtccagtttcaattttctgtatatggctagccagttatcccagtaccatttattgattagagaatcctttccccattgcttgtttttgtcaggtttgtaaaaaatcagatagttgtaggtgtggagttttatttctgggttttttattctgttccattggtttatgtgtcagtttttgtaccagtgccatggttttttggttactgtagccctgtagtatagttttaaagttg

SEQ ID NO: 891729 - DNA, 662 bp, Homo sapiens
agcttttttccatatgattgttggccatatgtatgtcttttgaaaagtgtctattcaggtcctttgcccacttttttatggagttgtttttctcttgtaaatgtgttcaagttccttacagaggctggctgttagacctttgtcacatgcatagtttgcaaaaattttcttgcattctgtaggttgtctgtttactctgttgatagtctcctttgctttgtagaagctctttagtttaattaggtgccatttgtcaattttttcttttgttgcaattgcttttgacattttcatcatgaaatatttgcccatgcctatgtcctaaatggtattgcctargttgtcttccagggtttttatagttttgagttttacatttaagtctttaatccatcttgaattaatttttgtatatgttgtaaggaaggggtccagtttcaattttctgtatatggctagccagttatcccagtaccatttattgattagagaatcctttccccattgcttgtttttgtcaggtttgtaaaaaatcagatagttgtaggtgtggagttttatttctgggttttttattctgttccattggtttatgtgtcagtttttgtaccagtgccatggttttttggttactgtagccctgtagtatagttttaaagttg

SEQ ID NO: 891730 - DNA, 630 bp, Homo sapiens
tcttgggactctgattcccatcctcttttaagcattaaaattacagaccctaagaactatatctggtccacttatctctttgagtcatgaatcataaaaaataaataccatttggggtattttctttatttctggcacttggagatttcttttcttactttcaagtgtgactctatacttatactttaaatattargcatttctatgtatctggaatgtgtgagtttgtggtgtgtgtgtgtgtgtgtgtgtgtgtgcgcgtgtatgtcaatgggatgtttgattatttcctacatcaacctggactttgatcttgactgaataacaagcctttgctcctaaccactaggctctactgcctcccagtgttgtttttcctcttaggtttccaatatcatccttgatgcttctgtgcattttataaataaagagacagactctgtgacatacactttatccatacaataaaaatagacatatctgtcacacttgaagttaactatggaaaacaagttagtaaattaattattttttatttactttccaaatgagccaattatttctttcattagctatcattttgattctccatttgggaccttaataataaagatattatttatctctttt

SEQ ID NO: 891731 - DNA, 611 bp, Homo sapiens
acccattttacaaaataccagtgaattgggtgtgattttatcacccccatcttataaatgaactggataagccatacagctgttaagtaacttactcgaggtcacatggtttgtatttgtgaaaccaagatgcaaacccaggycaagcatgcttagtttctctactcttttgaaaagagctgaagctcaagctgcttcagaggtaaaagtggaaggaaagatagtacccataaggaatcaccaccctaacgggtaaaagctacaggtaacagggtaacctcaaaaccagtgaacccccaatcacacctgcttgcaaacatttgcaattaaaattgaatgcaaagttagcttggagattcaggtaagactcatttccatggaggacgtttttggtaaataagagacatgttgtccaaattagaatgcgtttcctctagattgttgccagccattggaaatggctttccttcacaatgcttttcatagcacttttgtttaaaaaaattagaagtttacatttggtattttgtctttttgggctaagaatccagtggcaaactctttggataaagtgcttgctttgaagaatcaaagaagatggatgtcaggaa

SEQ ID NO: 891732 - DNA, 611 bp, Homo sapiens
acccattttacaaaataccagtgaattgggtgtgattttatcacccccatcttataaatgaactggataagccatacagctgttaagtaacttactcgaggtcacatggtttgtatttgtgaaaccaagatgcaaacccaggtcmagcatgcttagtttctctactcttttgaaaagagctgaagctcaagctgcttcagaggtaaaagtggaaggaaagatagtacccataaggaatcaccaccctaacgggtaaaagctacaggtaacagggtaacctcaaaaccagtgaacccccaatcacacctgcttgcaaacatttgcaattaaaattgaatgcaaagttagcttggagattcaggtaagactcatttccatggaggacgtttttggtaaataagagacatgttgtccaaattagaatgcgtttcctctagattgttgccagccattggaaatggctttccttcacaatgcttttcatagcacttttgtttaaaaaaattagaagtttacatttggtattttgtctttttgggctaagaatccagtggcaaactctttggataaagtgcttgctttgaagaatcaaagaagatggatgtcaggaa

SEQ ID NO: 891733 - DNA, 701 bp, Homo sapiens
ttctatgtaaccctaactactggtggagagcagaagtgaaaatgagagggaaaccaaacaataaaaaacatgatgaggagacaggccagttgacagaggaccaagccagcagagaagcaagtgcaagagctcagtctggatttagaactcattgaagctctaagttctctctgacttacaaagacaagatatggtttccttctacctactgctgaaaagcaagctccagacagaagcgaagttctatgtgtcataggtttcaatcacaaggctggacctaggtaaacagatatctctaagatttacctttggagttacttgtctytagctggcttgtgctcaatgtcataagctacagtgaccttggacaatttacttaacaagctacagtgaccttggacaatttacttaacattttatgtttaatattttatattcaaaattgggataattcttgagcaaatgccataggtcattttgtgagggttcattgagataaggcatataaattctccgtaaatgttggttattgttattcgtgataattggtgctattctgactggtagagtctttattctttttttgattttaacagctttattaatatatcattatcatatcagatgactcaccgacttgaagtgcacagttcaatggttattaatatattcacaggtacatgcaaccatcaccatagtta

SEQ ID NO: 891734 - DNA, 728 bp, Homo sapiens
atcaattacaattcttcaagaaataggtaatgtttggaggaaaattcaataatcaggttgtttagagaattatgcagggggtggggggggggaattattttttggaagtagacttattaggcacattcctgagcaaggaatgaaggacaagatagtgtgccagattcagattctggctttaatagtcaagttttcagtacaaaggcattgtatctattccaattaatagaccttaaaatttaccctagctttgagaaaactttatacactgtcttttatagtatttagcatttaggatcccrgtaaactatcaccgacttggtgccaaatttcctatggtaccaaggagttttgtatttccagttgagcaattggtggcagtatcatttaacttagtcacattaatgttatggtagaaacaatccctaaacctcagatgcttacaaaaacaaaggtttatttttcactcacagtgcatgtcttttgggttggccatgggcttcatattgatttcattataggccttaactgaaaggaacagtccctcttggggacattagtcatcttgtgacaggggaaagaaaatggcaggatttggaggtggtcttcatctcttccactcatataccacttgatgtgccatggcatcaagaaggcagaatgtataatccttctttgaggggagaagtgaatactttgaacaaaaataaaatcaactacaaggatgc

SEQ ID NO: 891735 - DNA, 640 bp, Homo sapiens
ggaggatattttagtaacatcttaccctcaaatgaaataattgcacctaataacacgtacatttttaaaaatcgtgagaaataatgatgtattgtacagtgtacaattaaaacataaaaatcagaacaccttttatgcatatagtgatcaaaagttttcaaaggtctttcattttattcattttgctacctcctattgttcatttgatagatttgattcttattttaagatggaaaacactgagacacagagagtttgagggcattatgtgaatccattcagggtcaaaatgaatatcagaactcagtttcctcgactatcaatccagcactttcttcacttcagtaaaatggtatgtgtcatgctgcctggtattcatgccactaagaaagtgtaccaaattactgcgtgcctgtagtattgctggcactgagctaaataaattagacacatattttctatgaatcttctcaatgacccactatkttttttaaaaaaaaactgagtactgggatacagatagtataagagccagttacattactcactatgtaagtaatgaagtagcataatgcgtttcataagtaacgaggaataacttaaaactaggtttctaactccagcatctgagctgtttcca

SEQ ID NO: 891736 - DNA, 613 bp, Homo sapiens
ttctgggtcaaatggtaattgttctttgacttattcgagaactcaccaaactgctttccacaatggctgaactaatttacatttccacccgcagtgtgttctcttttctcctcaacctctccagcatctatctgttttycttttcttttttttttttttttactttttagtaatagccattctgactagtgtgacatggtatcccattatggttttgatttgcatttctctaatgattagtgatgttgagaattttttatatgcttgttggccacatgtatgtcttcctttgaaaagtgtctgttgatgtcctttgcccacattttaatggggttgtttgctttttgcttgttgatttgttcagttttttttaatagattctggatattagacttttgttggatgtatagtttgcaaatgctttctcccattctgtggttgtctgtttactctcttgatagtttcttttgctgtgcagaagatcttcagtttaattagatcccatttgtcaatttttgtgtttattgaaattgcttttggtgtcttcatcatgaaatatttgccaggtcctatgtccagaatggtatttcctcattatctttcagggtttttt

SEQ ID NO: 891737 - DNA, 670 bp, Homo sapiens
aaacaaaagagaagtgattgtatgtgattgaagttaaattgttatcagcttaaaagagttataactacaagatgttttacgaagcctaatggaaactacaaagaaaatactacagaggatacactaaagaaaaaataagaaaggaatcaaaacatatgactacaaaaataacaaaatgaaaagaaagacagtaagagaggaaaaaaggacaaaaacaaagggaaaagacagaaaacaattaagaaaatggtcctgtcagtaattacttgaaatgtaaattgattttaaaatccaataaaaagatttatagagtagatgaatagatgaaaaaatgagtcctaacaatatgctgtctatagataatctctttagatttaaggacacacataggctaaaagcaaaaggatggaaaaatatrttccacacaaatgttaacaaaaatagaacaggcgtgaccttgcttatatcagacaaaatagatttgaggtaaaaaaactgtcacgggaaacaaataaatagattatatcatgataaaaagccaattcatcaggagctataaatatataacaataataaatgtatatgcactcactagcagagcaactaaatatatgaagcaaatattgacagaactgaaggatgaaaagatgacaaataataatagtatatt

SEQ ID NO: 891738 - DNA, 651 bp, Homo sapiens
gacaggaaaatgtaagaaactatgatggagtaagtgacctgccaaagtcacacagatttaaattttcatagctgggaatccatctggtcctggactttttttggttggtaggctattaattattgcctcaatttcagaccctgtttttggtctactcagggattcaacttcttcctggtttagtcttgggagggggtatgtgwccaggaatttatccatttcttctagattatctagtttatttgtgtagaggtgtttacagtattctctgatggtagtttgtatttctgtgggatcggtggtgatatcccctttatcattttttattgcatctatttcattcctctcttttcttctttattagtcttgctagcggtctatcaattttgatgatcttttcaaaaaaccagctcctggattcattgatttttttttaaggattttttgtgtctctatctccttcagtctgctctgatcttagttatttcttgccttctgctagcttttgaatgtgtttgctcttgcttctctagttctttcaattgtgatgttagcgtgtcaattttagatctttcctgctttctcttgtgggcatttagtgctataaatttccctctaaacattgctttgaatgtgtcccagagattctgg

SEQ ID NO: 891739 - DNA, 651 bp, Homo sapiens
gacaggaaaatgtaagaaactatgatggagtaagtgacctgccaaagtcacacagatttaaattttcatagctgggaatccatctggtcctggactttttttggttggtaggctattaattattgcctcaatttcagaccctgtttttggtctactcagggattcaacttcttcctggtttagtcttgggagggggtatgtgaccaggaatttatccatttcttctagattatctagtttatttgtgtagaggtgtttacagtattctctgatggtagtttgtatttctgtgggatcggtggtgatatcccctttatcattttttattgcatctatttcattcytctcttttcttctttattagtcttgctagcggtctatcaattttgatgatcttttcaaaaaaccagctcctggattcattgatttttttttaaggattttttgtgtctctatctccttcagtctgctctgatcttagttatttcttgccttctgctagcttttgaatgtgtttgctcttgcttctctagttctttcaattgtgatgttagcgtgtcaattttagatctttcctgctttctcttgtgggcatttagtgctataaatttccctctaaacattgctttgaatgtgtcccagagattctgg

SEQ ID NO: 891740 - DNA, 586 bp, Homo sapiens
agatgagtgtacaacagctctcagccagcaccagttaccaacatgctcctaggagccttttaagatgttatcctagacctacaaatctgggcacctgagaaatgaagcctcctttgcagttcatgaagtgaagattctctgctctcaatcaccaggtactttactggaattggataatgtctatctcrtccacaggacagtccaagaaattactgttctccccaaatcacaggagagtgtctgtagcaacaaaataattttaactctaaattctacattggattcattcaccttgcccatgagttaagtaaccacttaggttacataaggtctacaaagttgtattaggccccatagacatgacaagtggattaaatacacataatatttttgttttagattttgtcttctattattaaaagttatagccatccttcatacacaaaactataagaaagtactaaatcgcaactgattatatgtggtcctaaatagatatcctagttagtcacgtggtagtccaacccttgatgactataaaaatagtaataataagcaaaataaataataatgatgatcatacaga

SEQ ID NO: 891741 - DNA, 586 bp, Homo sapiens
agatgagtgtacaacagctctcagccagcaccagttaccaacatgctcctaggagccttttaagatgttatcctagacctacaaatctgggcacctgagaaatgaagcctcctttgcagttcatgaagtgaagattctctgctctcaatcaccaggtactttactggaattggataatgtctatctcgtccacaggacagtccaagaaattactgttctccccaaatcacaggagagtgtctgtagcaacaaaataattttaactctaaattctacattggattcattcaccttgcccatgagttaagtaaccacttaggttacataaggtctacaaagttgtattaggccccatagacatgacaagtggattaaatacacataatatttttgttttagattytgtcttctattattaaaagttatagccatccttcatacacaaaactataagaaagtactaaatcgcaactgattatatgtggtcctaaatagatatcctagttagtcacgtggtagtccaacccttgatgactataaaaatagtaataataagcaaaataaataataatgatgatcatacaga

SEQ ID NO: 891742 - DNA, 609 bp, Homo sapiens
tatcattgttggacatttgggttggttccaagtctttgctattgtgaatagtgccgtgataaacatacatgtgcatgtgtctttatagcagcatgttttgtaatcctttgggtatatacccagtaatgggatggctgggtcaaatggtatttctagttctagatccctgaagaatcgccacactgacctccacaacccttgaactagtttacagtcrcaccaacagtgtaaaagtgttccttatagagacactagtgattggatttagggcctactctactccagtacgacctcatcttaactagttacatctgcaaaaactgatttacaaacaagctcacattctgaggttccaggtggacatgaattttgacagtggacagaactcttgaactggggacagcatctaaatgtgtacatgcggtgtagtcattatttacacatgactcaaaaaatctagttctactctccagtctagtctcttttcttgagttccaacaaaagagatggactcatgaagaattcagaccctctcatatcttatgtgcatctataaacaggaacttttgaagggactccagaaagacctatccaagaagtgtttgaagg

SEQ ID NO: 891743 - DNA, 584 bp, Homo sapiens; identical to SEQ ID NO: 877652

SEQ ID NO: 891744 - DNA, 605 bp, Homo sapiens
acatgtagaattctgagtcttttctaaaactagttcttaaatgattggcttttacaggggtattcaatagctattgaattgatggcactagactggttatttttatctttttttttttttttatttttagagacaggatgttgttctgtcactcaggctggagtgcagtgatgcaatcatagatcactgcggccttgaactcctgggctcaaggaatccacctgcttcagccttctatgtagctagaactacaggtatccaccaccaacctcagccctgggttctactggatgtgccggccaggggccacctctacttytgctggggcctcccaatgctggccctccacaggtggcctccggaaacaaccctcagaaagaaggatggttccactcataccagaaccttttttgtcatctttgcattttatacaggcagtcagacctcaggcgtgtgctccatcagaggcctgacctctcctcagtggctgtgattattgcctggagaaccagccagattttacgtaaatttcaaacaaatcttttaagagtagggtcctatcctggaggcagctggagggagaaaaagatccctcttagaactcg

SEQ ID NO: 891745 - DNA, 599 bp, Homo sapiens
acctgaggtgtgcattaggaacaccagaaattgccaggacctgaggagaggatgattcaatccaggaggcaaggggaagatcacttagtcatcttaagcacttactatgtgtcaagtatttctataagtactgggaatacaaagaaaaataagataagtcatctaccttcagaaactttatcctgagtcatgaagacaaggggtgtttaataatgyttaatgatgaagggtcagagacaacagggacagataaaggacctttggatttgttggtgaaatgcacccttcaccttctatttgacattaattttaatgtcaaaaactgcaattccctttgcaccaacctaatagaaagcattttcaatagacaaatcagattgaatgggggaatatttgatgaaaaaatgaacacaagatcaataatgcctttattcccagaacctttttttgtttttcactctcttggcaattattcagcttcttggccatcttcattttaattaatttgtattatgatagtaatgttctgatattttaattcagattttaaataatattgaagccaagttaaaatttagtcacataccacattcatgttt

SEQ ID NO: 891746 - DNA, 632 bp, Homo sapiens
atccccaccataaagcccagcaacttcttgcatgtaaccggctctttaaaaatatttatcatttggccaggtgcagtgactcacgcctgtaatcccagcactttgggaggctgaggtgggtggatcacttgaggtcaggagttcaagaccagcctggccaacatggtgaagccctgtctctactaaaaaaatacagaaattagctgggcgtggtggtgcatgcctgtaatcccagctacttgggaggctgaggcaggagaattgcttaagcctgggaggcagaggttgcagtgagccaagatcgtgctactgcactccagcctgggtgaaagagcgagactcagtatytaaaaaaaaaaaaaaaaaaaaaaatgtatatctatatctatatctgtatctatatctatcatttggatgactaatcagaacacattgaatggtttttctctattattcattatgaccaaatgaataccagttattgtcacgtcaccaagcatgtcaccactattcagccaagaattgagatgtcgtgtttcaagagacgttcattctcctgccatgatccagtcacaactgatgggcctgcatagtagcacttttctaagtgatagcctttatatttctttaga

SEQ ID NO: 891747 - DNA, 610 bp, Homo sapiens
tccttttgagagttgatttttcagtgaaacttcaaagggcccttggtccccacaccgctcttatgctgcttattactttctcctagcacagtgtaataacccacggatgccagagtcatctgcctcattgcaaccacattaggggctaatgagataaccaaaatatcctgtaaagttcaaagtactatataaatatgttgagttttaacaagtttgtgatgtattatggtaataagcagaggtgagtgttgctccaaacttttttttagattcagcgggtacatgtgcgggtttgtgacatggatatgttgcataatgctgagatttgggcttctgttgaacccatcatccaagtagtgaacatagtacccaatagcaagtttttcagcccttcccacctcccctcctgyctctttttggagtccgcagtttctgttgttttcgtctttatgtccaggtgtattcattgtttagctcccacttttaagtgagaacagtattgcagtatttgattttctgtttctgctttaattcacttaggataatgacctccagctgcatccatgttgttgcaaaggaaatgattgcattatttttatggctgtgtaat

SEQ ID NO: 891748 - DNA, 600 bp, Homo sapiens
ctaaaggcaagtatatcttacaggcaatcttcaataaacactatttctcacaagtaagctttgatagaaattgggcagctgagtgggtttataatctctggcagaagttgaatggcagttctattgtgttgctaatcaaaagtataatgatatgctttgaaagttcatggttaggttctaaaaagctggtctccctaggctcctgcttcagtagaaagaaacatracttctcttgatcagcttgtgatgaagcaataactgtgggcacaaccaataatattctcaaaaacttgctgctctaacacacgaacaaaatagtatgtgtggcctgtagatctgtgctccatttcagtagttcccaatctatgggctgcacactctaagtgattgtattttttatgtgtgggaggggtcaaagttttgcaaagttattttttttaatactaaatttggatgtgacctttcaactaatacaaagtacaactattacactgtagaagatccactaactttttcaacattaaacttgtaaaatttggggagttctttttatagttagaagatgcttacaatcaataaattaggataaataaatctgga

SEQ ID NO: 891749 - DNA, 612 bp, Homo sapiens
ttctattgacttgtaagtccattgtttctttcctccatcattccatttggttcttaagcttacccagttaattttatatttcagctgttttgtttttcagttctagaatttctatttgggctttaaaaaaataatctcttttcttctgctgaaatttcccactttttattagctgtgagcatattttcctttttactactgagcatcattttaatatacagttttaaataattgttggccaacatctgggtcatcctagcttgttttctattaatctttctcctatgaattggtcatgttttcctgcttctttgaatgttgtataattttttttttgagatggagtctcgctgtgttgcccaggctggagtgcaataatgcaatctcagctcactgcaacctccgcctcccaggttcaaatgattctcccgcctcagcctcctgartagctgggattacaggaacccaccatcatgcccagctaatttttgtatttttgtagagatgaggtttcactgtgttgggcaggttggtcttgaagtcctgacctcaggtgatctgcctgccttagccctctaaagtgctgggattacaggtgtgaggcactgcatc

SEQ ID NO: 891750 - DNA, 651 bp, Homo sapiens
gcctagctctcctgtattttttacaattagcccttatatagtgtttactatgtgccaagaactgtactaagtgcttcacatatttaacttattcaattattacagcaatcttgttagggtagcattattattatccctcttttatatatgaggaaactgaggtacagagggatcaagtaaatgcccaaggcctcatagctgaaaccctaagcgaacattttcagagttcatgaggtacttcaggaaaggggtggaggaatccaaatccgttgcattccagatcttcctccctagcccctgcatccagagcagaaaacccctacctagaaagttttctaggtagaagaggttttactggtaagaaaacaaaattaaaagtttgaaaatatgtcattaggcccattccacctgaattatttgaccytgtaaggagggtgatagactgaggctcagttcatataccatcagtggtagtcaagctagagaagatttagtagcattataaggagaaagcattacacttaatggttggaagaagttttcaaaactttgtaaagagtagaatccttttctgaaaaaagaatattgcatggaagcctaatagataacagaagacaaaatcattaacttattaatataaatatgcttcat

SEQ ID NO: 891751 - DNA, 468 bp, Homo sapiens
actcttgcctcctgccgtgtaagacatggttttgctcctcctccaccttccaccatgattgtgaggcctccccagccatatggaactgtgagtccattaaacctcttttctttataaattgcccagtttcgggtatgtctttattagcagcatgagaacagaytaatacagtaaattggtactgggtagtggggtgctgctgtaaaggtacccaaaaatgtggaagcaactttggaactgggtaacaggcagaggttggaacagtctggagggctcagaagaagataggaaaatgtgggaaagtttgaaacttcctagagacttggagggctcagaagaaaggaagatgtaggaaagtttggaacttcctagagacctgttgaatggcttctgaggtggtctcagatggagatgaggaatttgttgggaactggagtaaaggtcacacttgctatacaaagagactgg

SEQ ID NO: 891752 - DNA, 553 bp, Homo sapiens
aactttttttttttttttttttttttttgagtcaggatctcactctgttacccaggatggattgtagtggtgtgatcatagatcaccgcagcctcaacctcctaggctcaagggatcctcccaccccgacctcagcctgagtagctgggactacaggcatgtgccaccatacccagttaattttttattttttagcgacagtcttgctgtgttgcccaagctagagtgcagtggcattatctcaactcactgcaacctccacctcctgggttcaagccactctcctgcctcagcctcacaagtagctggaattacaggcacacaccatcaaaccaggctaattttakttatttctggagagccgaggtctcactttgttgtccaggctggtattgaactcctgggctcaagcgatcagcccacctcggcctcccaaagtgctgggattacaggtgtgagccaccgctcccgtactatatgtagaaactgaagaatgacatgactcatttaatgcaacaaaatgctcctctgcaaatacccgcctgtcttgtaa

SEQ ID NO: 891753 - DNA, 637 bp, Homo sapiens
ccttggttacaagccaaatgaatacctgtgttaatttgctcatttattcttttcagttgtgggaactgagatttcagcctatacaaccaggttccttatttctctccatagaagcagtggagcatagacttaagaatgtgatacagactatagtcgggctccatgaattcaaatttcactcctgtccaattttagctgtgcgacttggaaaatcactccactgtgccttagttgtcttatctgttaaaagtgaataggaggattctagaagaaagacagagtaggaatcaccaggattctgtytccccacctaaacaacaattgcactggcagaatttgatgtaattcaatggatggaactctggaatctattgaatgtttgcaacttacagaggaaggcttagatggtaagttgcagttaattttgtccatttcagctcttagcacagtgatagctacccatcccctacgcccaggcccattgcaggcagctgtgcacatgttccaggagggacctgaacacagcttataagagccaggatgggcaaaaagaactctgtcctccaaatatcagaaatctgacctcggatcactaattgctgcttctgatcacagaggcgcagacaaaaaatgtggc

SEQ ID NO: 891754 - DNA, 578 bp, Homo sapiens
atctcaaaataataagagctatttatgacaaacccacaaccaatatcatactgaatgggcaaaaactggaagcatttcctttgaaaactggcacaagacagggatgccctctctcaccactcctattgaacatagtgttggaagttctggccagggcaatcaggcaagagaaagcaataaaaggtattcaattaggaaaagaggaagtcaaattgtcgctgtttgyagatgacatgattgtatatttagaaaaccctaccctctcagcccaaaatctccttaagctaataagcaagttcagcaaagtctcaggatacaaatccatgtgcaaaaatcacaagcattcctatacaccaataacagacaaacagagccaaatcatgagtgaactcccattcaaaattgctacaaagagaatgaaatacctaggaatccaacttacaaggatgtgaaggaccttttcaaggagaagtacaaaccactgctcaatgaaataaaagaggacacaaacaaatggaagaacattccatgctcatggataggaagaatcaatattgtgaaaatggccataccgccca

SEQ ID NO: 891755 - DNA, 578 bp, Homo sapiens
atctcaaaataataagagctatttatgacaaacccacaaccaatatcatactgaatgggcaaaaactggaagcatttcctttgaaaactggcacaagacagggatgccctctctcaccactcctattgaacatagtgttggaagttctggccagggcaatcaggcaagagaaagcaataaaaggtattcaattaggaaaagaggaagtcaaattgtcgctgtttgtagatgacatgatygtatatttagaaaaccctaccctctcagcccaaaatctccttaagctaataagcaagttcagcaaagtctcaggatacaaatccatgtgcaaaaatcacaagcattcctatacaccaataacagacaaacagagccaaatcatgagtgaactcccattcaaaattgctacaaagagaatgaaatacctaggaatccaacttacaaggatgtgaaggaccttttcaaggagaagtacaaaccactgctcaatgaaataaaagaggacacaaacaaatggaagaacattccatgctcatggataggaagaatcaatattgtgaaaatggccataccgccca

SEQ ID NO: 891756 - DNA, 667 bp, Homo sapiens
ctcatcacaaatcctgcactataggtaagcactaattcttattgggtgtttttctcttatcagagactaagtcttgaccagaaagtggctcttgacattgtttctttctttttaatttttaaaaattattatgggcacatataatatgtgtatatatttgtggggtacaggtgatgttttgatacaggcatacaatgtgtaataatcaaatcagggtaattgggtatccattatctcaagcatttatcatttctttgtgttaggaacattacagtcccactcttttataatagttatctttaagtttacagtaaattattgttctgttktgctgtgaaatactagaccttattcattctatctctatatttttgtacccattaaccatccccactttatccccagtccctcaaccttgtttcttgtacttgaatccctattttcattaccttccttaggaagtgggggctgcctcaccttccgcagatctcctcagaacaccatctcgttatgggagctcagctaccatgtagactgccatccatttagctctgttcatagagcttactggttgctctctttcccatgattgtgctctacctgactgtcacctttgcctggttcttgatgccagctgcaactgcagagtcaccggttgccaatcata

SEQ ID NO: 891757 - DNA, 685 bp, Homo sapiens
cttcctttttaaatacagtagacatgacatttatggcctcctcacttactcctccttagagaatttcccctctcactttccaagaagcagttctatgggcccatgacaggaccctccccagttagcccagctacagctgactggatccaggtgacaaccagcttgtgctagacagacaggtccctctccaaggaatttggaattggggcagaaggacaggagtcagttaacttgcctgtgggagtttggtttgaaagttcacatagagtctgagccagacttagcaccactgccagccagaaccacatgtactaaagatttagtagggccgggaagtcatgagtaggctgagaaaactggcagagggcaggaaaaaggagcagacacagtgagaagggtagaaagaaaaagctagagacctcaggagagatgacttactytagttggtttaaaggagtttttatacttgacagctgggggtggatccaggttttttttttttattatactttaagttttagggtacatgtgcacattgtgcaggttagttacatatgtatccaggttttatggggcccgaaacatatatcattttgggagccttctccagaagaagaattcaaaattacaacagacaatttggtacagggtcccatgaagctcaagtgagaggccctaaagctta

SEQ ID NO: 891758 - DNA, 631 bp, Homo sapiens
ccttggttacaagccaaatgaatacctgtgttaatttgctcatttattcttttcagttgtgggaactgagatttcagcctatacaaccaggttccttatttctctccatagaagcagtggagcatagacttaagaatgtgatacagactatagtcgggctccatgaattcaaatttcactcctgtccaattttagctgtgcgacttggaaaatcactccactgtgccttagttgtcttatctgttaaaagtgaataggaggattctagaagaaagacagagtaggaatcaccaggattctgtytccccacctaaacaacaattgcactggcagaatttgatgtaattcaatggatggaactctggaatctattgaatgtttgcaacttacagaggaaggcttagatggtaagttgcagttaattttgtccatttcagctcttagcacagtgatagctacccatcccctacgcccaggcccattgcaggcagctgtgcacatgttccaggagggacctgaacacagcttataagagccaggatgggcaaaaagaactctgtcctccaaatatcagaaatctgacctcggatcactaattgctgcttctgatcacagaggcgcagacaaaaaa

SEQ ID NO: 891759 - DNA, 573 bp, Homo sapiens
aagaccaagaaccctggtgttcctccagtcatcagagccatatcacaattgagccgctttcttttgtaaatggcctggtctgaggtatgtctttatcagcaatgtgaaaatggactaataagtaaacagtaccagtagagtggggtgttgctgaaaagataccygaaaatgtggaagcaactttggaactgggtaacaggcagaggttggaacagtttggagggctcagaagaagacacgaaaatgtgggaaagtttggaactttctagaggcttgttgaatggctttgacaaaaatcttgacagtgatatgaacaataaggtccaggctgaggtggtctcaggtggagatgataaacttgttgggaactggagcaaaggtgactcttgttatattttagcaaagagattgacagcatttttgcccctgccctaaagatttgtggaactttgaacttgagagagatgatttaggttatctggcagaagaaatttgtaagcagcaaagcatttcagagatgacttgggtgctgttaaaggcattcagttttaaaagggaaacagagcattaaag

SEQ ID NO: 891760 - DNA, 573 bp, Homo sapiens
aagaccaagaaccctggtgttcctccagtcatcagagccatatcacaattgagccgctttcttttgtaaatggcctggtctgaggtatgtctttatcagcaatgtgaaaatggactaataagtaaacagtaccagtagagtggggtgttgctgaaaagatacctgaaaatgtggaagcaactttggaactgggtaacaggcagaggttggaacagtttggagggctcagaagaagacacgaaaatgtgggaaagtttggaactttctagagrcttgttgaatggctttgacaaaaatcttgacagtgatatgaacaataaggtccaggctgaggtggtctcaggtggagatgataaacttgttgggaactggagcaaaggtgactcttgttatattttagcaaagagattgacagcatttttgcccctgccctaaagatttgtggaactttgaacttgagagagatgatttaggttatctggcagaagaaatttgtaagcagcaaagcatttcagagatgacttgggtgctgttaaaggcattcagttttaaaagggaaacagagcattaaag

SEQ ID NO: 891761 - DNA, 573 bp, Homo sapiens
aagaccaagaaccctggtgttcctccagtcatcagagccatatcacaattgagccgctttcttttgtaaatggcctggtctgaggtatgtctttatcagcaatgtgaaaatggactaataagtaaacagtaccagtagagtggggtgttgctgaaaagatacctgaaaatgtggaagcaactttggaactgggtaacaggcagaggttggaacagtttggagggctcagaagaagacacgaaaatgtgggaaagtttggaactttctagaggcttgttgaatggctttgacaaaaatcttgacagtgatatgaacaataaggtccaggctgaggtggtctcaggtggagatgataaacttgttgggaactggagcaaaggtgactcttgttatattttagcaaagagattgacagcatttttgcccctgccctaragatttgtggaactttgaacttgagagagatgatttaggttatctggcagaagaaatttgtaagcagcaaagcatttcagagatgacttgggtgctgttaaaggcattcagttttaaaagggaaacagagcattaaag

SEQ ID NO: 891762 - DNA, 587 bp, Homo sapiens; identical to SEQ ID NO: 870857

SEQ ID NO: 891763 - DNA, 548 bp, Homo sapiens
aaatcattctatgaagacacatgcccatgtatgtttattgcagcactgttcaccatagcaaagactcggaaccaacccacatgcccatcagtgatagactggataaagaaaatgtggcacatatacaccatgaaatactatgcagccataaaaagggatgagttcatgtcctttgcagggacatggatgaagctggaaactatcgttctcagcaaactaatacatgaacagaaaaccaaacaccacatgttctcactcataagtgggagttgaacaatgagaacacatggacacagggaggggaacatcacacactggggtctgtcagggggtgggaggctaggggagggatawcattaggagaaatacctagtgtagatgacgggttgatgggtgcggcaaaccaccatggcacgtgtatacctatgtaacaaacctgcacgttctgcacatgtatcccaggacatgaagtataataataaaaggcattgctaagtgagggactttgccgccctagttttaatctattaagaatattatgcacaggg

SEQ ID NO: 891764 - DNA, 589 bp, Homo sapiens
atgtagaggaccttacatcactgaaggaataaaaatgtagcctgcagctcctgtatattcctaaatttcccttctcttcatcattattattttttaaatttatctgttttttcaaagactcaggtaaaagcccatcataagccatgcccatagcacagctatttccacacaccagcaggatgatctctaaaagccctgctttgtggagccaggtagagtgtaagaatgtctcatggataggaagaatcaatatcgtgaaaatggccatactgcccaaggtaatttacagattcaatgccatccccatcaagctaccaatgactttcttcacagaattggaaaaaattactttaaagttcatatggaaccaaaaaagagcccgcattgccaagtcaatcmtaagccaaaagaacaaagctggaggcatcacgctacctgacttcaaactatactacaagattacagtaaccaaaacagcatggcactggtaccaaaacagagatatagaccaatcaaacagaacagagccctcagaaatattaccacacatgtacaaccatctgatctttgacaaacctgacaaaaacaa

SEQ ID NO: 891765 - DNA, 661 bp, Homo sapiens
atcactgataccgtttcttccagttgatcaaatcagctactgaagcttgtgcatttgtcacatagttcttgtgccatgattttcagctccatcaggtcatttaaggacttctctacactggttattctagttagccattcgtctaatcttttttcaaggtttttagcttctttgcratgggttcaaacttagctcagagaaatttgatcacctgaagccttcttctctcaactcatcaaagtcattttctgtccagctttgttctgttgctggtgaggagctgcgttcctttggagtgggagaggcgctctgatttttagaattttcagcttttctgctctgttttttccccaactttgtggttttatctacctttggtctttgatgatggtgacgtacagatggggttttggtgtggatgtcctttctgtttgttagttttccttctaacagtcaggaccctcagaagcaggtctgttggagtttgctggaggtccactccagaccctgtttgcctgtgtatcagcaatggaggctgcagaacagcaaatattgctgaacagcaagttttcctgcctgatcattcctctggaagcttcgtctcagaggggtacctggccgtgtgaggtgtcagtctacccctactggggggtgcctccca

SEQ ID NO: 891766 - DNA, 661 bp, Homo sapiens
atcactgataccgtttcttccagttgatcaaatcagctactgaagcttgtgcatttgtcacatagttcttgtgccatgattttcagctccatcaggtcatttaaggacttctctacactggttattctagttagccattcgtctaatcttttttcaaggtttttagcttctttgcaatgggttcaaacttagctcagagaaattkgatcacctgaagccttcttctctcaactcatcaaagtcattttctgtccagctttgttctgttgctggtgaggagctgcgttcctttggagtgggagaggcgctctgatttttagaattttcagcttttctgctctgttttttccccaactttgtggttttatctacctttggtctttgatgatggtgacgtacagatggggttttggtgtggatgtcctttctgtttgttagttttccttctaacagtcaggaccctcagaagcaggtctgttggagtttgctggaggtccactccagaccctgtttgcctgtgtatcagcaatggaggctgcagaacagcaaatattgctgaacagcaagttttcctgcctgatcattcctctggaagcttcgtctcagaggggtacctggccgtgtgaggtgtcagtctacccctactggggggtgcctccca

SEQ ID NO: 891767 - DNA, 644 bp, Homo sapiens
tgcaactcttctccttcccccaagcctctttacacttctaagtccttatgaagccagcagacttcacttatcagaccttgctgcaataaacaaaccccaattacaaatcatccggaccgcacaggggaaggtgatgggaagcataaacaaactttacctacaccctcctgtaataaacgtcacaagctaatatgtggcaaaattaaccagcaaacaaccccagggtctctctcccccatataaacccctcattttgtaagctcaggggtgcctcctctgtctgtggtggagcagccgtcaggttaataaacttcctcggctgaccttgggtctctctttcgtcctttctctcggctaaccttatatggtgatagattggaaacttttttttttttgagacggagtcttgctctgtcgcccaggctggagtgcagtgacccgatctcagctcactgcaagctccgcctcccgggttcatgccattcttccgcctcagcytcccgagtagctgggactacaggcgcccgccaccacgcccggctaatattttgtatttttagtagagacggggtttcaccgtgttagccaggatggtctcgatctcctgacctcgtgatccgcccgcctcggccttccaaagtact

SEQ ID NO: 891768 - DNA, 660 bp, Homo sapiens
ctatgctcacgcagcaagtaggtactacagtcagcacttactctcagagcagtgtgggcctagagtctgtgctcttattcgtagtcctctaccccagaccatacctctcctcccatcattgctgaaaatttagaacttttaaaagttcatggaaatcatttacataaattatgaaagataaagccacagttctgttctctggtacatatgaatcaagaccatttatgggcaatctcagaaataaacctaccacatccgcccccagtgcttttgactcattacctctatccctttgccaaacaaccagatgttgtaaagctggttaccttcaatggagcagtaagcaaaggcaccccactcaaaccttgtgatctatcacggcagtggagtcactgcctgtaggtggattgttttgtttgtttttctcccaagcctgaatcctggctcccctgcagagagagctccataaaggctcagccaaaggtgaatggcagtgacactgtggcagycttttgttcctaatgaagcaccttagggttcattatatgaccaggtgctaccccaggagatcctaatttagtagcttagggaagaagctgaggcatgcagatttaaaagcaaaacaaaacaaaacaaactccatgggtgattatgatacac

SEQ ID NO: 891769 - DNA, 650 bp, Homo sapiens
acatttttgcagaatccttaaaaaagttgggtacagggccttgtgttattaggaaggaaagttgttgggagcaggcctcccaaaatctggccataaactggccccaaacctggccataaacaaaatctctacagcactgtaacatgttcataatggccctaacacccacgctggaaggctgtgggtttacgggaatgagggtaaggaacacctggcctgcccaaagcggaaaaccgcttaaaggcattcttaagccacaaamaatagcatgagcaatctgtgccttaaggacatgctcctgctgcagttaactagcccaacctatccctttaattcggcccatcccttcgtttcccataagggatacttttagttaatttaatatttatagaaacaatgttaatgactggtttgctgttaacaaatatgtgggtaaatctctgtttggggctctcagctctaaaggctgtgagacccctgatttcccacttcacacctctatatttctgtgtgtgtgtctttaattcctctagtgccactgggttagggtctccccagctgagctggtctcggcagaaagcattagagcctaaaggaagagcaaatacaaagaccttgaagtgtatgtgtgctcagtggatttgaggaat

SEQ ID NO: 891770 - DNA, 646 bp, Homo sapiens
cagcctcagacaggtaagacagaattgtttctgaaatggaataaagaacagtcttggccgggcgccgtggctcatgcctgtaatcccagcactttgggaggctgagatgggcggatcacatgaggtcaggagtttgagagtagtctggccaacatggtgaaaccccatctctactaaaagtacaaaaattagccgggcgtggtggtgcacacctgtagtcccasctacttggacggctgaggtgggagaattgcttcaacctgggaggcggagattgcagtgagctgagattgcaccattgcactccagcctaggtgacagagcaagactccgtctcaaaaaaaacaaaaaacaaaacaaaaaaaaacagtcttatgactgctgttttcttttcagttaatctcctttcttccttaaaaaaatcacttttcatttgaattcagaaatactgtggaatttgacaagaatgttctgtagaacaagaaaacttgatgaaactgagtcagaaaatgaatttcagaccccgaaagggccttgaccctggagtcaagagccctgttctgaattctggccatgacaattttgggttttgtatctttggatgaacatttcacctctctgggcttaattttctgttacataaatg

SEQ ID NO: 891771 - DNA, 578 bp, Homo sapiens
ttaataagatgcttggtatgatttcaatttttcttgattcactgagacttgccttatggccaagcatgtggtgaaggcatgagtacccttcttgtgcagatgagaaaaacgtgtattctattattgtagagtggagtattctatagatgttttaggtctagttggtcaaatgtcaaatttaagtttagaaatactgttggcttcttttctgccctgaygtatctattgctgtcagtggggttatcattgtttggttgtctacatcatttcataggtctattcgtaattgttctataaatctgtgtactccaatattgaatacgtatatatttaagttagttatttattcttgtagtattaaacaaacccgttattattaagtaatgattttctttgtcctttttaatgttgctggcctaaattctgttctatctgacacaagaatagtgacccctgctctttcttgtttttcatttgcaggtaaatcttactccatctctttcctttgagcctgtaggtgtcgttacatgagagatgggtcccttgaaggaagcagatggttgggtgttcttttttaa

SEQ ID NO: 891772 - DNA, 609 bp, Homo sapiens
agcctgggtgacggggtaagaccctgtctcaaaaacaacaacaataacatctgttcatgatagcttgttgtcactttgtcaagcagagaatagattatgagaggacatagatcatgaggtatagagagaggagggtggtgacacagaaaggctgagattctggtggcccctcagtggggagtcagtagcagccggggatcagctggcagatccctgggagggccagggctgagtggacaatggggaaagccatggactgtggccgtccctgcagmagcatggccctgaggaatcagcctgcctgctccaaactggcgcacgctcacttccacacccgcgaagaccacacatgtcaggaaggggcctcaggtagtaaagtctgcataccctttctggatacaatggtgaaaagcggcatcggagaaaagaaaatttcctttcatgagttgtcttttaagtttttcctaattaaaaaagtcatagatgttgaatgcaaaaatcagtggaaaatatgaaaaaggatatatgtatatgttcaaagctaaaagcaaaaagaaagaaaaacactagcaacaatgtagtatatttcacattttaattcatttaatg

SEQ ID NO: 891773 - DNA, 617 bp, Homo sapiens
caaatagacttagactctgacacaataatagtggggatctttaacaccccactgataacattaggcagatgatacagacagaaaattaacaaagatattcagaacttaaactcagcactggatcaaatggagctgatagatatctacagaactgtccaccaaaaacaacagactatacattcttctcattgtcatctggcacacattctaaaattgatcacattataggaagtaaaaaactcctcagcaaatgcaaaagaactgaaatcataacaaacaatctctcagaccacagcacaatcaaattagaaatcaagactaagacattcactcaaaaccatatagttacatgaaaactgaataacctgctcctgaataacatctgggtaaataatgaaataaagacagaaatcaggaatttatttgaaattaatgagaacaacgatacaacatatccaaatctctggaacacagcraaggcagtgttaagagggaaatttatagtactaaatgtccacctgaaaaagttggaaagatctcaagctaacaattaacaccaaaactaaaataattacagaaccaagagcaaatacataccaaagctagcagagacaaga

SEQ ID NO: 891774 - DNA, 513 bp, Homo sapiens
aaccagacttgcattccagggatgaagcccacttggccatggtggataaggtttttgatgtgctgctggattcggtttgccagtatctcattgaggatttttgcatcaatgttcatcagggatattggtctaaaattatcttttttgtgtgtctctgccaggccttggtatcaggatgatgctggcctcataaaatgaggtagggaggattccctctttttctattgattggaatagtttcagaaggaaaggtaccagctcctctttgtacctctggtagaattcagctgtgawtccttctggtcctggactttttttggttggtaagcaattaattattgcctcaatttcagtgcctgttattggtctattcagagattcaacttgttcctggtttagtcttgggaggttgtaagtttcaaggaatttatccatttcttctagactttctggtttatttgcatagaggtgtttgcagtattctctgatggtagtttgtatttctgtgggatc

SEQ ID NO: 891775 - DNA, 623 bp, Homo sapiens
atgttctcattgttcatctcccgtttataagtgagaacatgcagtgttttgttttctgttcctgtgttagtttgttgaggacaatgacttcctgctccaaccatgttgctgcaaaggatatgatctcgttcctttttatggctgcatagtattccatggtgtttatgtaccacattttctttatacagtctatcattgatgggcatttgggttgattccatgtctttgctattgtgaatcgtgctgcagtgaacatatgcttgcatgtatcttcgtaataaaatgatttatatatttttaagatatgcccagtaatgaaattgctggatcaaatggtatttctgcctctaggtatttgaggaattgccacactgtcttycacaatgggtgagctaatttacattcctcccaagagtgtaaaagtgttcctatttcttcatagccttgcagcatctgttgtttctcgactttttaataattgccattctgactggcatgagatggtatttcattgtggttttcatttgtatttttcgagtgatcagtgatgttgagctttctttcatatgtttgttgccacataaatggcttcttttgagaagtgtctattcatgtcctttact

SEQ ID NO: 891776 - DNA, 623 bp, Homo sapiens
gacctgaaacaataaaagttctagaagataacattagaaaaacctttctgaaattggcttaggcaaagacttcatgaccaagaatccaaaagcaaatgaaacaaaaacaaagataaatagataggacttaattaaactaaaaagcttttgcacagaaaaaaaaaaatcagcggagtaaacagagaactcacagagtggaacaaaatcttcacaaactatgcatccaacaaaggactaatatccagaatctacaaggaactcagttttctcttcaaacaaatcagcaagaaaaaagcaaaaaatcacatcaaaaagtgggctaagggcatgaatagacaattctctagagaagatacacaaatggccaacaaacatatgaaaaaatgctgaacatcaattatcaggaaaatgcaaatraaaaccacaatgtgataccaccttactcctgcaagaatggccataatcaaaaaataaaaaaaataagagctgttggagtgaatgtggtcaaaggggaacaattttatactgctggcgggaatgtaaactagtacaacccctaaggaaaacaatgtggagattccttaaagaattaaaagtagatctaccgtttggtccagcaattt

SEQ ID NO: 891777 - DNA, 632 bp, Homo sapiens
acagggtgtgtactctcagagtttccagttgcatctacattcctggtcactgtcttacagggggtttgggggagtagtttaggaggagaaggggaagactggaggagacagaggaggtgcttctcatagctcacctcatctcttctttagtagcaatgtggtgcaatggcctaagcctgggctttgaagtgacacaagcctggtctcaagctcttttcctgccaatcactagctgtatatccttggaaatgttgtttaatgtcctgagcctcagaatactactactgctcctgaggaatgcttaaggcatagttacgagagttaaatgagatagcatatggcaggtgcctagcacaacttctagcatgtggtagcctaccaataaatgckagttttactttcccactcccctttataacttccttgagacagctttttcctttgcttcctgatctaggagaagactctaagcatgactagcttagcataaaattgtagtattttagttcttcatctacttcattaaaattactcctgagtttaaattgctaaatccaatggacacatgtcagtctttatcttatttaatcattgtaacatttaactttgagaattaaaaaaaaaatccccta

SEQ ID NO: 891778 - DNA, 715 bp, Homo sapiens; identical to SEQ ID NO: 891157

SEQ ID NO: 891779 - DNA, 628 bp, Homo sapiens
caaatttttatgctctgcttcccttttaaacacaacttccaattccacatagtctctttgtcaatgcataaaattgaatgcttttaagaggacccaagccacatctgaaaagctttgctgcttagaaatttctcccatcagataccctaaatcatctctttcaagttcaaagtttcatagatctttagggcaggggaaaaatgccaccagtctctttgctaaagcataacaaaagtcaccttttttccagttcccaacaagtttctcatctccatctgagacyacctcatcctgcacttcatggtccatatcactatcagcattttggtcaaaaccattcaacaagtctctaggaaattccaaactttcccacatcttcctgtctcttctgagccctctaaactcttccaacctttgcctgttacccagttccaaagacgcttccatatttttggatatctgaatagcagcatcccactctctgctataccaatttactgtattagtccattctcatgctgctataaagaaatacctgagactgggtaatttataaagaaaagacatttaattgactcacagtcctgcataattgatgaggcctcaggaaacttacagtcatggaggt

SEQ ID NO: 891780 - DNA, 617 bp, Homo sapiens; identical to SEQ ID NO: 891158

SEQ ID NO: 891781 - DNA, 651 bp, Homo sapiens
ttcttgtatgcaggaatgttatagaagaatcttaaaatcatctttttagaaaaattccttaaagtactttacacaaattatcaactttgatttgtgagttgaaggaaactttaggtattggctgtgttcaatctttgtatcttaacatgataaaaccaagattcagaaacagagtcaggacactaaccctttctcttggcttttacacaagtatttcttcaattgtattatgcctcccatggaaatattgctcaattgcattctaagttataggtttttgagttgtagcagttttatcacaatgtagctagatggatcatggaaagagtaaatctttcagcttgcctagtacatgtgaatagaagtgatcattgaagcccaagaataaaagtgagtattaaagatagaaagtaactctagaaggaaaagccttggacagatcctagggggatacttatattagggggcagaagaaacaaaagagcctgtgaacragataaggaagatgcctttagagcttaggaaaagaaccagtgacacaatggaggttggaagtcagattgaaaagtgggggccattagagaagagaagagagaaaagcaagtattgaagagaatttagaagagaaaagaaggggaaaaagggagggga

SEQ ID NO: 891782 - DNA, 649 bp, Homo sapiens
  misc_feature 614, 615, 616, 617, 618, 619, 620, 621, 622, 623, 624, 625,626, 627, 628, 629, 630, 631, 632, 633, 634, 635, 636, 637,638, 639, 640, 641, 642, 643, 644, 645, 646, 647, 648, 649: n = A,T,C or G
cccccattgtatctaggaagtaagttatttgcttttgattttaaatgcttataggtggaagggacttgccttgtcttagataagactttggacttgaacttttgggttgatgctggaattagctaagattttgagggactgttggaaaggcatgactgtgttttgaaatgtgaggatatgagatttgggaggggccagggactgaatgatatggtttgtctgtgtctccacccaaatctcatcttgaattgtagttcccataatcccacatgtcatgagagggacccagtgggaggtaaytgaatcatgggagtggtggttttataagaggttttccccttcactcagttctcattcttctccttcctgccaccatgtgaagaaggacatgtttgcttccccttccaccatgattgtaagtttcttgaggtctccccagtcatgtggaactgtgagtcaattaaacctctttcctttataaattaccccatcttgggcagttctttatagcagcatgagaacacactaatgcactaactttatattatctatacaatgtatcaagtttgttgattattattgtgtgtttactctttatctcccctagtaggttnnnnnnnnnnnnnnnnnnnnnnnnnnnnnnnnnnnn

SEQ ID NO: 891783 - DNA, 612 bp, Homo sapiens
cctgtcttcatcaaagaatgcaggctcaaatgaaggcatactttgtcttgcttactgttgctcactattggttgttgaattactggcaaaaagcaggcatcatttcatatttgttgaatccacagattctttaaaacaaatacaagaaaagtcacgtatttaattttttattccttggtcttttgtgcttcctaattcagtatgcaagggaytgattttaaacaagtcttttcaagttcactaagtaaaaaaaaaattaaatatggcattttaacttttcaaagaatgctcagcattggaaacaacattaacaaaccaatagtctattttcaaggcacattttgtttaaatctgtatcaaggtaaccaagtcgtagcctggttatttgcctcaatctttgtgctgcctcatgattgactttaaggaagcaaagtttgctagttgccttatttacaattataatctattgacacggcatatagatcaaatttcagggctatatatgctcaaaaacaagaaggccaaactctcttggactcagtcttaagaagttgtgagtctgagagactgtgctcttacatcatgggattcttcattgaggttcattctctg

SEQ ID NO: 891784 - DNA, 621 bp, Homo sapiens
ggcagactgggaccctaggtcatgaactgaagctgctgtcacagtaggaatttcttctttaaaaaagcctctgccaggttttttgtattgggatgatgctggtctcacttctcaaaaggaaacatttatgcggccaaaaaacatacgaaaaacagctcatcactggtcattagagaaatgcaaatcaaaaccacagtgagataccatctcacgccccagttagaatggcgatcattaaaaagccagcaytccagcctgggcgaaagagtgagactccgtctcaaaaaaaaaaaaaaaaaaaaaattcaggaaacaacagatgctggagaggatgtggagaaataggaatgcttttacactgttggtgggagtgtaaattagttcaaccattgtagaagacagtgtggcgactcctcaaggatctagagccagaaataccatttgacccagcaatctcatcactgggtatatgcccaaatgattataaatcattctactataaagacatgtatgtttattgcagccctgttcacaatagcaaacacttggaaccaacccaaatgcccatcaatgatagattagataaagaaaatgtggcacatatacaacatggaattctat

SEQ ID NO: 891785 - DNA, 621 bp, Homo sapiens
ggcagactgggaccctaggtcatgaactgaagctgctgtcacagtaggaatttcttctttaaaaaagcctctgccaggttttttgtattgggatgatgctggtctcacttctcaaaaggaaacatttatgcggccaaaaaacatacgaaaaacagctcatcactggtcattagagaaatgcaaatcaaaaccacagtgagataccatctcacgccccagttagaatggcgatcattaaaaagccagcactccagcctgggcgaaagagtgagactccgtctcaaaaaaaaaaaaaaaaaaaaaattcaggaaacaacagatgctggagaggatgtggagaaataggaatgcttttacactgttggtgggagtgtaaattagttcaaccattrtagaagacagtgtggcgactcctcaaggatctagagccagaaataccatttgacccagcaatctcatcactgggtatatgcccaaatgattataaatcattctactataaagacatgtatgtttattgcagccctgttcacaatagcaaacacttggaaccaacccaaatgcccatcaatgatagattagataaagaaaatgtggcacatatacaacatggaattctat

SEQ ID NO: 891786 - DNA, 622 bp, Homo sapiens
caggagtttgagaccagactgaccaatatggtgaatccccgtctctactaaaaatacaaaaagaattagcagggcgtggtggcacacacctgtagtcccacctacttgggaggctgaggcaggagaatcgcttaaacccaggagacrgaggttgcagtgagccgagatcgcgccgttgcactccagccaagagcgaaactctctctcaaaaaataaaaattaaaaaaaaaaaaaccaataaacaaacaaaaccaacaaccttgggactaacaaatttgcaacaaaaccttacttagcggtaattattccatctgttggtctaatttattctgagcaccaaggaatgaaaatagtttacccaaaaaaggtctgaggaagcccacacctatgttatttattccaagagaaaccctgggtccctcttcttcaagatccagcactctccacacattgttgacagcctctgttttgcagcctttaaagccacagtagtttaaaaagaagattagccagaggagactgttacacgtggacacactgataacaaagacaaagtatgactgtcagcttaacaggaggaaagagagaaaaaatataaaaatacacaaacacaagaagcaga

SEQ ID NO: 891787 - DNA, 628 bp, Homo sapiens
ctaggttgtgcactccttatgagaatctaactaaagcctggtgatctaaggtggaacagtttcatccccaaaccatctccctcaacccttggtccattgaaaaattatcttccacaaaaccagttcctggtgccaaaaaggttgggtactgctgatctaaacacacaattaaaagacagaaattttcagagtggattaaagaagtagaatgaacacctagctttttgttttctgtaagaaaccctttaaatatatatatatatatatatatatwtttttttttttttttttgagacagagtctcactctgttgcccaggctggaggctggagtgcagtggcgtgatctcagctcactgcaaactcctcctcccaggttcatgccattctcctgcctcagcctcctgagtagctgggactacaggcacctgccaccacgcctcgctaattttttgtatttttagtagagacagggtttcaccatgttagccaggatggtctcgatctcctgacctcgtgatctgcctccctcagcctcccaaagtgctaggattacaggtgtgagccactgtgcccggccccctttaaatattaagactctgatgggttaaaagcaaagaaatagagaa

SEQ ID NO: 891788 - DNA, 628 bp, Homo sapiens
ctaggttgtgcactccttatgagaatctaactaaagcctggtgatctaaggtggaacagtttcatccccaaaccatctccctcaacccttggtccattgaaaaattatcttccacaaaaccagttcctggtgccaaaaaggttgggtactgctgatctaaacacacaattaaaagacagaaattttcagagtggattaaagaagtagaatgaacacctagctttttgttttctgtaagaaaccctttaaatatatatatatatatatatatatttttttttttttttttttgagacagagtctcactctgttgcccargctggaggctggagtgcagtggcgtgatctcagctcactgcaaactcctcctcccaggttcatgccattctcctgcctcagcctcctgagtagctgggactacaggcacctgccaccacgcctcgctaattttttgtatttttagtagagacagggtttcaccatgttagccaggatggtctcgatctcctgacctcgtgatctgcctccctcagcctcccaaagtgctaggattacaggtgtgagccactgtgcccggccccctttaaatattaagactctgatgggttaaaagcaaagaaatagagaa

SEQ ID NO: 891789 - DNA, 674 bp, Homo sapiens
ggttgtcatagatagtacttattatttaggtatgttccttcttacttgaaggttttttgtcatgaaaggatgtggattttattgcaagctttttccacatgtaatgaaatgatcatgtgtatttttttagttctatttatgtagtaaatcatgtttattgattgtgtatattgaaccaactttttataccaagaatgaagcctatttgatcatggtgaattaactttttgatgtgctgctggattcgttttgctagtattttgttgaggatttttgcatctatgttcagcagggagattggcctatagttttctttttttgttgtgtctttgccaggttttggtatcagggtgttgctaacttcatacagtgagtttgggaagagtctcacctgctcaattttttggaatagtttccatattattagtactagctatttttgtacatctgatagaatttggctgtgaatctgtctggtccagtgctttctttggttggtattactgcttcarttttggaattcaatattggtccgttcagggtttcaatttcttcctgattgaatcttgggaggttttgtgtttccaggaatttattaatttcctctagattttctagtttttgtgcatagagatgttcataacagtctctgaggatcttttgtatttctgtga

SEQ ID NO: 891790 - DNA, 675 bp, Homo sapiens
tctattctgccccaatcctcttgtaggcctttagcagctgtggcagttaggcagatgtctaaaacaacgagagaagggaatcattttttgtttgttgtttgtttttgagacagagtcttgctctgtagccagggctggagtgcagtgacacgatctcggctcactgcaagctccgccttccgggttcatgccattctcccgccgcagccacccaagtagctgggactacaggtgcccgccaccaygcccagctaattttttttttttttatttttagtagagacggggtttcaccttgttagccaggatggtcttgatctcctgaccttgtgatcctcctgcctcccagagtgctgggattacaggcgtgagccactgcgcccggccaaagccctatttttataggtagtggatgaagaagagtccttcccctatcccctatgtgagtcaggcattgtcagagagattatggaaggttgaagaaagtaaacctataaagttttatatgaacactccttagccattttgcatggatctgaccctaaacagcacatcagaggctttgaaaactagaatacacaatagactgcctctccagggccagcctggccattgggtggcaaataagtggggcagatgcaaataacatagcaaaggagttcataacaaacctga

SEQ ID NO: 891791 - DNA, 577 bp, Homo sapiens
tgtacaccagctactcaggaggctgaggcaggagaatagcttgaaaccggaaagcagaggttgcaatgagccgagactgcgctactgcactccagcctgagtgacagagcaagactccatctcaaaaagaaagaaagaaagaaagccactgttatagttgtgtgtagcataagagtaaacagactctgatcgacaatccgaagaggattttttccaaataaagtgaatttcatggactttatgacatactttttagggttaaaggctccttttgctcatgcttttgttcctagttgtgttttgggtgagagagtttattaaacagccaaattccaactatttaagatggttggacagaagatttagaccacagttcaggttctgtttcaattctgacatttgatggctatgamtaagcaactatatcatcctttatacctctcagtttatgcatctatgaaattaaacagccacctctcttcaggtatagaaagccttgatccagtaatgtatataaatcattctgttatgaagacacacgcacccatatgctcattgcagcactattcacaatagc

SEQ ID NO: 891792 - DNA, 643 bp, Homo sapiens
aattttattgaaggccttttctgcaactattgagataattatctggtttttgttattggttctctttatgtgatggattacactaattgatttccgtatgttgaaccagccttgcatcccagggatgaagctgacttgatcacggtggataagctttttgatgtgctgctggattctgtttgccagtattttgttgaggattttcacactgatgttcatcagggatattgtcctgaaattttctttttttgctgtgtctctgccaggttttggtatcaggatgatgctggcctcataaaatgagttagggaggagtccctctttttctattgtttggaatagtttcagaaggaatggtaycatttcctctttgtacctcctgtggaatttggctgtgaatccatctggtcctgggcttttttttattgttaggctattaattactacctcaatttcagggcttatcggtctattcaaggactcgaattcttcctggtttagtcttgtgtgtgtgtatgtgtccatgaatttatccatttcttctagattttctagtttatttgtttagaggtgtttatagtattctctgatggaagtttgtatttctgtgggatcagtggtgatttctcctttatcattttgt

SEQ ID NO: 891793 - DNA, 643 bp, Homo sapiens
aattttattgaaggccttttctgcaactattgagataattatctggtttttgttattggttctctttatgtgatggattacactaattgatttccgtatgttgaaccagccttgcatcccagggatgaagctgacttgatcacggtggataagctttttgatgtgctgctggattctgtttgccagtattttgttgaggattttcacactgatgttcatcagggatattgtcctgaaattttctttttttgctgtgtctctgccaggttttggtatcaggatgatgctggcctcataaaatgagttagggaggagtccctctttttctattgtttggaatagtttcagaaggaatggtaccatttcctctttgtacctcctgtggaatttggctgtgaatccatctggtcctgggcttttttttattgttaggctattaattactacctcaatttcagggcttatcrgtctattcaaggactcgaattcttcctggtttagtcttgtgtgtgtgtatgtgtccatgaatttatccatttcttctagattttctagtttatttgtttagaggtgtttatagtattctctgatggaagtttgtatttctgtgggatcagtggtgatttctcctttatcattttgt

SEQ ID NO: 891794 - DNA, 643 bp, Homo sapiens
aattttattgaaggccttttctgcaactattgagataattatctggtttttgttattggttctctttatgtgatggattacactaattgatttccgtatgttgaaccagccttgcatcccagggatgaagctgacttgatcacggtggataagctttttgatgtgctgctggattctgtttgccagtattttgttgaggattttcacactgatgttcatcagggatattgtcctgaaattttctttttttgctgtgtctctgccaggttttggtatcaggatgatgctggcctcataaaatgagttagggaggagtccctctttttctattgtttggaatagtttcagaaggaatggtaccatttcctctttgtacctcctgtggaatttggctgtgaatccatctggtcctgggcttttttttattgttaggctattaattactacctcaatttcagggcttatcggtctattcaaggactcgaattcttcctggttyagtcttgtgtgtgtgtatgtgtccatgaatttatccatttcttctagattttctagtttatttgtttagaggtgtttatagtattctctgatggaagtttgtatttctgtgggatcagtggtgatttctcctttatcattttgt

SEQ ID NO: 891795 - DNA, 579 bp, Homo sapiens
agtcagccatgttgaagcccttctacctgaaattttatatttgcatttattttccaatgaaaatatctgcaaaggtatataacaaaatactaagagtggttctgcctggttggtggaattatgaatgccttttcattttgcttgtttccattgagtttgttttctagaataaacatggattacgttgctaagaattataataattgtctttgtaattattattacttaattaataagtaattttaaaagaactcaaatctcctttagaactgcagaaattgaaatagggcttttggaaagtgggaaaaaaccagaaccmcaatacaaaattgtttataagtacatgctaagctattctatcttaataactgattcaacaaaacaatattctagaaaaatgtaatggacagagtgctatagcatgaaccatatatagtttatagaatgcatccaagtttaactacttattttctatatgtccttaagtataattaaaaaataatatatagatagagatgtgtattgttaatattcttcagggctgaatgaccaagctatgaaaaaaagacaataaaatat

SEQ ID NO: 891796 - DNA, 642 bp, Homo sapiens
ctttactccattctgtgtactagcttctcaatttttctattctaacagtaaagtttatgtaaaaatgggtgaggggaaagagtcaagccaatttaaaatgaacaaaacacttgaacagtgtttgttcacaaaagaggatttcttcatgtccaaatgtcaaaagaaagaattatcagcatcgtcactcattcagaaaacacaaatttaaaatgccgtgatacaccattacmcgcccatcagaacgggcaacatttaagagacagggaaaaccactagcttataagagtgcggagcaaatgtatcccttgttgctggcaagagaatatgatggtgcaaccattctaaaagagtgtctgatagtttctaataaagttaaaaatatgcctgctccatgacctggccattccattaccaggtttatactcaagagaaatgaaggcacaggtccataaaaaggcccataaacaccttattcacaatagccaaaagtagaaatattccaatcttccatcaatggtattgtattcatcaataacatcaaaacgttgagatacatgccataaaatgaatgtatctcaaaaccattgttgcattcaaaaaagaaacagaatcagtatattcctttacgtgaatttcaagaag

SEQ ID NO: 891797 - DNA, 629 bp, Homo sapiens
tataggcattaggtaaatacagccattccaaatgggagaaattggccaaaacaaagggactacaggtcccttgcaagttcaaaatccagtggggcagtcaaatcttaaagctccaaagtgatctcctttggctccatgtctcacatctaggtcatgctgatgcaagaggtggtttcccatggtcttgggcagttccactgctgtgactctgcagggtacggcttccctcccagctgctttcatgggctggtgttgagtatctgcagcttttccaagtgcacagtgcaaggtgtcagtggatctrccattctggggtctgaaggacggaggccctcttctcatggctccactaagtggtgccccagtagggactctgtgtgggtgctccggcctcacatttcccttttatactgcccaagcagaggttctccatgagggccccacccttgcagcaaacttctgcctggacatccaggcatttccatacattttttgaaacctaaacagaggttccccaactccaattcttgacttctgtgtacttgcaggctcaacaccacatggaagttgccaagtcttggggctggcaccctctgaagccatgacctgagctctacattggccccttt

SEQ ID NO: 891798 - DNA, 629 bp, Homo sapiens
tataggcattaggtaaatacagccattccaaatgggagaaattggccaaaacaaagggactacaggtcccttgcaagttcaaaatccagtggggcagtcaaatcttaaagctccaaagtgatctcctttggctccatgtctcacatctaggtcatgctgatgcaagaggtggtttcccatggtcttgggcagttccactgctgtgactctgcagggtacggcttccctcccagctgctttcatgggctggtgttgagtatctgcagcttttccaagtgcacagtgcaaggtgtcagtggatctgccattctggggtctgaaggayggaggccctcttctcatggctccactaagtggtgccccagtagggactctgtgtgggtgctccggcctcacatttcccttttatactgcccaagcagaggttctccatgagggccccacccttgcagcaaacttctgcctggacatccaggcatttccatacattttttgaaacctaaacagaggttccccaactccaattcttgacttctgtgtacttgcaggctcaacaccacatggaagttgccaagtcttggggctggcaccctctgaagccatgacctgagctctacattggccccttt

SEQ ID NO: 891799 - DNA, 629 bp, Homo sapiens
tataggcattaggtaaatacagccattccaaatgggagaaattggccaaaacaaagggactacaggtcccttgcaagttcaaaatccagtggggcagtcaaatcttaaagctccaaagtgatctcctttggctccatgtctcacatctaggtcatgctgatgcaagaggtggtttcccatggtcttgggcagttccactgctgtgactctgcagggtacggcttccctcccagctgctttcatgggctggtgttgagtatctgcagcttttccaagtgcacagtgcaaggtgtcagtggatctgccattctggggtctgaaggacggaggccctcttctcatggctccactaagtggtgccccagtagggactctgtgtgggtgctccggcctcacatttcccttttayactgcccaagcagaggttctccatgagggccccacccttgcagcaaacttctgcctggacatccaggcatttccatacattttttgaaacctaaacagaggttccccaactccaattcttgacttctgtgtacttgcaggctcaacaccacatggaagttgccaagtcttggggctggcaccctctgaagccatgacctgagctctacattggccccttt

SEQ ID NO: 891800 - DNA, 611 bp, Homo sapiens
gaccttattgttcatatcactatcagcatttttgtcaaagccattcaacaagtctgtaggaagttccaaactttcccacatttgtctgtcttcttctgggcctgccaaactgttccaacctctgcctgttaccccgttctaaagtcgcttccacattttttgagtatcttttcccacatttgtctgtcttcttctgagccctccaaactgttccaacctctgcctgttacccagttccaaagtcagttccacayttttgtgtgtcttttcagtagcaccccactcctgatactaatttactgtattagtctgttttcatgctgttaataaagacacattgatactggataatttatgaaggaaaagggtttaatgaacttacagttacacatggttggggaggcctcacagtcatggtagaaggcaaggaggagcaagtcacatcttacatggatggcagcaggcaaaaagagagagcttgtgcaggaaaattcccttttttaaaactatcagatctcatgagacatattcactaccatgggaacagcatgggaaagacccacccccataactcaattacctcccaccaggttcctcccataacacatggg

SEQ ID NO: 891801 - DNA, 626 bp, Homo sapiens
agactgtgaagactacaataaataccaaactctttaatgcctggacatatgagcatccacaagcattaagatcatccaggaaaacatgacctcaccagatgagctaaataaggcacaagggaccaatgtcaaggaaacagagatatgtgacctttcacagagagaagtaaaaatagatgtcttgaggaaactcgaagaaattaaagataacacagataagaacttcaggattttatctgataaatttaacaragagattggaataattttacaaaatcaagcagaaattctggcatttcaaatgcaattggcatactaaagaatgcatgacagttctttaatagcagcattaatcaagcagaagaaagagttagtgagcttgaagacggggcatctgaaaatacacagataaaggagacaaaagaaaaaaatgataaaatacacctctgagatctagaaaatagcctcaaaaaggcaaatctaagagttactggcctttaagaggaggtagagaaagagattggtgtagaaagtttatttaaagggatagtaacaaagaacctcccaaaactagacaacaatatcagtatgcaagtacaagaaggttatagaacatcaagcagatt

SEQ ID NO: 891802 - DNA, 642 bp, Homo sapiens
tgtctgcaccaaagggtaccgtcaagcacatgccaagccacccccagcaccccttgcttccattctccactccttggcacccaaagttcagaggggggcagagcggtagggggctagtgtgtcagcactgccctgagtgcacttacacctggctatgtcacagcagtgcccggkctcgaccacagctttgctccacacctgattgggtgccgcaactttgtttcacaccagtttggatgctgggagttgagagaggccagatagcaggagcaggcacttacaagcctgcaggggcaagcggcttctcagacccccgagagtgcaggaatgcctgggtctggagatgtgcctgggcacttacagctgtgcccaagagcatgttctcctgctccgccaactcggtagagtgtggggctcccactgggatcacctattcccagcccctgctggctctgcggagcgtgcagcccaggcggtacctcccccactgcaactggagtccttgcagcagccactccagatgggccaccactgccatcagaactggaggtcattatgttaaatgaaatgagctaggcacagaaagacgaacatcgcatgttctcacttacttgcgggattcaaaaatcgaaacagttgaat

SEQ ID NO: 891803 - DNA, 665 bp, Homo sapiens
ggggaaaatgataccaatttataatcttaccagatgccgctacagccctgagtgttatcaagtgttttaaacttttaagtttgccagacttggcgtcgtggctcatgcctataattccagcactttgggaggttgaggcaggcagatcacttgaggtcaggatgagttcaagtccagcctggccaacatgatgaaacactgcctctactaaaaatacaaaaattagccgggcatggtggcacatgtctgtaatctcagctacttgagaggctgaggcacaagaatcacttgaacctgggaggcagaggttacagtgrgccaagattgtgccactgcactctagcctgggcgacagagtggaaaaaaaaaagtttgccaatttcatgtgcaaaaatatcttgttttcatatttttgtgttcactttattttcattattcatttattcagtgaatatttattgtgccaccatatgccaagcacagctgcaggccttgaacgtacagtagtgagcaaagtgcctccctcgtggagtctgggtgtgagtgagggtgccattttacattagggggtcaggaaaagtctctctgatatggtcacatatgatcaggaacctcagtgagtcccctcctgtcaccctggagcctgtggaggcctgctgggaaca

SEQ ID NO: 891804 - DNA, 595 bp, Homo sapiens
cccctgacggtcctctctggaagctttgacctggtacctggtcagcacgaacacctgaacagctctgagatgaatttcttcagagcactggggggtctcgtgcaagtaactcctatggaactgcctcaaaactattcagagattgacccagacagtcacttccaggaaagagcacagcatttggagctgctattgttgatcactttagacactgaagataaacaaattggggttttccaaggtttgtgtttgattaagaggagtttaaatgctggctgtctggcagccctggatatggccgtccctgacyttccaatataaagtatacacaaaaagacacagaaaatgatagaaaacgatgaaaacttaccatatcatcaaaaactaagaataatagaccaactactgcaaaaagccagaaggaagttacctcataataggaagaatagagctgcaatgagaaaattcaaggcctacccatgccggggctcatgaaacagaggagcccccccaaaatttttaaaagataataataatgagaaaaacaatattaacactgttgttgagtacatgttatgtgccatggtctgtcgta

SEQ ID NO: 891805 - DNA, 644 bp, Homo sapiens
gaaagtttggtttaaaatggcactggtggcactattcacaatagcaaagacttggaaccaacccaaatgtccaacaatgatagactggattaagaaaatgtggcacatatacaccatggaatactatgcagccataaaaaatgatgagtccatgtcctttgtagggacatggatgaagctggaatccatcattctcagcaaactatcgcaaggacaaaaaaaccaaacaccgcatgttctcactcataggtgggaattgaacaatgagaacacatgaacayaggaaggggaacatcacacaccggggcctattgtggggtggggggagtggggagggatagcattaggagaaatacctaatgttaaatgacgagttactgggtgtagcacaccaacatggcacatgtatacatacgtaacaaacctgcacgttgtgcacatgtaccctaaaacttaaagtataataaaaaataaaataaaataaaataaaatagcactagtgcatgctaatatctcagaagactataaatgtcagcatatttcatactgtctttactcatgatggctccccttttactcaaattatggctatttcttactaaaattgtagttttttagtatcttcagtattatctagagatgta

SEQ ID NO: 891806 - DNA, 738 bp, Homo sapiens
agttcccagaataaagtgaaacttgcatgttatttttttaagttgaggatgaagcaaaatatagccaaggaaggaatacatctgcatatttaatggccaaataaataaatataatacaaccactaagattttcaggagtttacagttactgcaatgataaaatttggtttgtttttctttcaggttattcttttctactttttcctctgatagagcagttgaagcagttaaaaggatttcttaaaaaatctgacaacactgcacatttatgctgaatacatacagtatctaatttaaagtaaaaggaactaaactttttcccctcacttttgattcttaatattctttatcagctggttgaagagttcctagctctgactgttcatgcttgcaaatacgagttaaaaatactgtgagagttcatttaatttccacttaaaattcacaggaagtcatacttgttaccaggaaacactgtacttcttttagagaatatctaatccagataggctaaattatatccattacactckatcatggctagttggtaaaagctgccaaggaataccttagctatttttgatgagtacaacacttcagtggtgtctcatttccatactgacataagggctaaacaggctttcttcagaaaaacaccttacagaaatctctgaagtgtgctatgcctagatcttccttgagaaaaagatattatagagatgaaggaaactccagata

SEQ ID NO: 891807 - DNA, 626 bp, Homo sapiens
tttttagcatgaagggctgttgaattttgtcaaaggccttttctgcatctattgagataatcatgtgatttttatctttggttctgtttatatgctggattacatttattgatttgtgtatgttgaaccagccttgcatcccagggatgaagcccacttgatcatggtggataagctttttgatgtacttctggatttggtttgccagtattttattgaggatttttgcatcaatgttcatcagggatataggcctaaaattctcttttttggttgtgtctctgccaggctttggyatcaggatgatgttggcctcataaaatgagttagggaggattccctctgtttctattgattggaatagtttcagaaggaatagaaccagcttctccttgtacctctagtaaaaacaatggcaacaaaagccaaaattgacaaatgggatctaattcaatgaaagagcttctgcacagcaaaagaaactgccatcagagtgaacaggcaacctacagaatgggagaaaatttttgcaacctactcatctgacaaagggctaatatccagaatctacaaagaactcaaacaaatttacaagaaaaaaacaaacaacccctcaaaaagtggac

SEQ ID NO: 891808 - DNA, 625 bp, Homo sapiens
cctgtcacccagatagtgagcatagtagccacagtttttcaacccttttctccctccctctctcccccacttatagaagtcctcagtgtttattcttgctatatttatgtccatgagtaccccatgtataacactcacttataagtgagaacatgtgatatttggttttctgttcctggattaattcaattaggataatggccttcagtagcatccatgttgctgcaaagtatgtgatttcattctttttatggctgtatagtattccttggtgtataagtaccacattttttaaatccagtacaccattgatgggcacctagattgattctgtgtctttgctattgtgaatagtgtttttagcacttcctttattttggcaacttacttcaagatcctcttgcatgttccctgccccaatcytagaatcagctattctggaagccatggttccatttattggaggattctattagaatttagtagactcattgctaccagtagtaaactttttgctgaaataaatgccagaaaataaattatttctatgtgtatctatgtctgtaggtatataaaacatctgttataccttctctcctcattgaattattcaattcaagttaat

SEQ ID NO: 891809 - DNA, 637 bp, Homo sapiens
gtgagccaagatcatgccattgctctccagcccaggcaacagagtgagactccatctcaaaaaaaaaaaaaaaaatcaactcaagatgtattaaagacttaaatgtaaaacccaaaacttataaaccctagaagaaaatctaggccatatcattcaggacataggcatgagcaaagatttcatgacaaaaatgccaaaaccaattgtaacaagagcaaaaatttaaaaatgggatataattaaactgaagagtttctgcagagcagaaactctaacatgagagtgaacaaacaacctgcagaatgagagaacttttttgaaatctatccatctgacaaaggtctaatatccagggtctgcaaggaacttaaatttacaaaaaagaaaaaaaaamccattaaaaggtgggcaaaggacatgaacagacacttttcaaaataagacacatgcaaccaacaaacatatgaaaaaaagctcaacatcactgatcattagagaagtgcaaatcaaaaccacaatgagataccattttatgacagtcagaatggctattattaaaaagtcaaaaaacaacagatgctggtgaggttgtggagaaaaaggaatgcttttacatcattggtgggagtgtaaatta

SEQ ID NO: 891810 - DNA, 607 bp, Homo sapiens
ggaacagatcctcactcctttgcccaacttcctcttcttcctgggctggatgtcttcctctttactggcaacctgtggttagcagaataatgcctatcatatgtctatgacctgatccccagagcctgtaaataatatcaccttacatggtgtgacggttaattttatgcatcacctcccacttgactgggttaagggatacccagatagctggtagagcattatttctgggtgtgtctctgagggtgttttgggaagagacaagcatttgaatgggtagaatgagtaaaaaagatctgccttcacccatgggaacaggtgtcatccaatctgtcacgggtctgaatagcacaaaaaggcagaggaagggtaaattctctcgttgtcgcttcttgggccaggatgtccatcctccattgcccttggaaatcagggatccttgttcttgggccttcatgctcygggacttacactagtgtcctcctggttctcagctcttcagactcagattggacaaccccacccgctttcctgttctccagcttgcagatggcataacatgagacttctcagcctccataattgcatgggccaactcccatactaa

SEQ ID NO: 891811 - DNA, 605 bp, Homo sapiens
gccttcaaaactcccagctcatgaaacagagagacactggcccctccttggtgagtagacactcctcttcctccagcccctcctggcacgtgcagagcacacagcaggcaggtgttaggagaattatgtctgctttttatgacycactcactgtagcacttggaacaattccaggtccttgtggttcctgatacgtttgcaaagtcacagatgcagggaatgtttgttcctgtttcagcaaggtaatcctccacccttggggtccctgcctgccaggagatgagggtggatgatgaaaaaaagtcacactgacggggcggtgaccaagcactgcacttgctcatctcagtgtcctcagcgtggcaggaggcaggtgctgttaccaccctgttaccggctgaggaagttgaggcacagagtgggttagtcacctacctactgttgcacagccagacaatggccctgtggggagtaccgccccaggcttttctgatcctggagggggtttgttcttgagacctccagaggcattttctacaacagctcttggagagccctgaggtactgattagggaaaacaccagagccctggggcactaaggttg

SEQ ID NO: 891812 - DNA, 605 bp, Homo sapiens
gccttcaaaactcccagctcatgaaacagagagacactggcccctccttggtgagtagacactcctcttcctccagcccctcctggcacgtgcagagcacacagcaggcaggtgttaggagaattatgtctgctttttatgactcactcactgtagcacttggaacaattccaggtccttgtggttcctgatacgtttgcaaagtcacagatgcagggaatgtttgttcctgtktcagcaaggtaatcctccacccttggggtccctgcctgccaggagatgagggtggatgatgaaaaaaagtcacactgacggggcggtgaccaagcactgcacttgctcatctcagtgtcctcagcgtggcaggaggcaggtgctgttaccaccctgttaccggctgaggaagttgaggcacagagtgggttagtcacctacctactgttgcacagccagacaatggccctgtggggagtaccgccccaggcttttctgatcctggagggggtttgttcttgagacctccagaggcattttctacaacagctcttggagagccctgaggtactgattagggaaaacaccagagccctggggcactaaggttg

SEQ ID NO: 891813 - DNA, 617 bp, Homo sapiens
tgactaatagcagaaagttcatccaaagaaaacagataatgagtaatattaaaacctttcagccctgtccagaagcaatttttttcctcagctctcatgggagatcagatttccaacccctctttgcagtggttttggctgctcctctcacactgaaagcacagrggccttggtccttccattgattcataagtacaacaccctacttcttggatacagagccatcgcggaatgttcgctggagtgaggcagcgtatggagcacatgggacatgcagacccaggtaaggtgtacaggaggccgggatcacctgcaatgactgtaacctcaggcaaatctcacaacttttcacagccatggatttcacatttatgctctggcaacattacctcaaacccacactgtgtggattatgtggagaactctataaactataaaagttacacaacatttattattttggtgtactttaattcaagggacagtatttagcacattgagatggtcttctgatctatttttaagaaaaggtcagctaacatgagatctaagaagagtattattctgaagttaccattaagctataagtcaaaagacaaaatcttggtgtcaaaaaa

SEQ ID NO: 891814 - DNA, 617 bp, Homo sapiens
tgactaatagcagaaagttcatccaaagaaaacagataatgagtaatattaaaacctttcagccctgtccagaagcaatttttttcctcagctctcatgggagatcagatttccaacccctctttgcagtggttttggctgctcctctcacactgaaagcacaggggccttggtccttccattgattcataagtrcaacaccctacttcttggatacagagccatcgcggaatgttcgctggagtgaggcagcgtatggagcacatgggacatgcagacccaggtaaggtgtacaggaggccgggatcacctgcaatgactgtaacctcaggcaaatctcacaacttttcacagccatggatttcacatttatgctctggcaacattacctcaaacccacactgtgtggattatgtggagaactctataaactataaaagttacacaacatttattattttggtgtactttaattcaagggacagtatttagcacattgagatggtcttctgatctatttttaagaaaaggtcagctaacatgagatctaagaagagtattattctgaagttaccattaagctataagtcaaaagacaaaatcttggtgtcaaaaaa

SEQ ID NO: 891815 - DNA, 617 bp, Homo sapiens
tgactaatagcagaaagttcatccaaagaaaacagataatgagtaatattaaaacctttcagccctgtccagaagcaatttttttcctcagctctcatgggagatcagatttccaacccctctttgcagtggttttggctgctcctctcacactgaaagcacaggggccttggtccttccattgattcataagtacaacaccctacttctyggatacagagccatcgcggaatgttcgctggagtgaggcagcgtatggagcacatgggacatgcagacccaggtaaggtgtacaggaggccgggatcacctgcaatgactgtaacctcaggcaaatctcacaacttttcacagccatggatttcacatttatgctctggcaacattacctcaaacccacactgtgtggattatgtggagaactctataaactataaaagttacacaacatttattattttggtgtactttaattcaagggacagtatttagcacattgagatggtcttctgatctatttttaagaaaaggtcagctaacatgagatctaagaagagtattattctgaagttaccattaagctataagtcaaaagacaaaatcttggtgtcaaaaaa

SEQ ID NO: 891816 - DNA, 626 bp, Homo sapiens
actttcggaactcattttaaatcctgtcaatgattgtagaatatactaggaagcagtagagcatataggttaagagttcattttcagaatcagataactggccccatgactcgatgactccagaactcacaagctgtgtcatataaactctgcaggcttcagtcctgaactgcaaatgggagtagttaagtctattttatagtgttaatgtattacataacatagtatttataaattccctagcatagcacatggaacatagcaagggtccartgaataatggttattttcataaataatatagaattgagagagcaaatgagcaacatagaaaaatcttaaaacaccactagtccgaggattcttgctcttctcttggtagacaattatctgtaaatataaaccaactacacacacaccatttatcaccaccaccaccaaaggggcttgattagttggttggtagaaccaaaagttcacttgggtgatttcattgcccttttctcttaggagaactggagtgggcagtgaggatggaggggaaggagcattgcccccatgtaagaaaatccttctcagtaatggtttctcacaggaaaagatgtgctaaatcaccttgcctagag

SEQ ID NO: 891817 - DNA, 573 bp, Homo sapiens
aataggctgtatgtcagagagggtgcctcaaggaatttttaaaaaaatatacattgactgaatgaaaataaaaataaaatatttcaaaatttgtggaacatgactaaaacagtgaagaaagggaaattaatagctctgaatgcatagaatggaaaagaaaaaaagtgccaagttaatcacgtaaggtcccacctcaaaaacctagaaaaacagaaagcaaataaacccaaggcaagcagaaggaagaaggtaataaagataagagcaggaatcactgaagtaaaacagaaaagcattagaaaatgtaaataaatcaatgagcttgttccttgaaaagatcaataaagttgacaaatccgtagcagaactgacaaataaaaaaagagaaaccttatgtttatacaaaaacctgtacatatatgttattagcatatttrtttgtgataaccaaacctggaatcagtccagatattcagcaacaggtgaatggttaaacaaactgtgcaatactgtgcaatactccttagcagtgaaaaggaatgaactatggatacacacagcaacctggatgaa

SEQ ID NO: 891818 - DNA, 634 bp, Homo sapiens
aatacacttcagtgaaagggtaattggatgaccttaaaatctttttaaaaatcggctgggcacattgactcatgcctgtaatcccagcactttgggagtccaaggtgggtggatgacctgaggtcaggagttcgagaccagcctggccaacattgtgaaaccccttctctactaaaaatagaaaaaaattaactgggcacagctactcrggaggtgaagcaggagaattgcttgaacccgggaggcagaggttgcactgagccattgcactccagcctgggcaacagagcaagactccatctcaaaaaaaatttttttaagttagaatttgcaaatagatttatatcctgggaatatcaaataatcatggattatctatgagtagactcaatatgtatgggctcatcacacagaagtatttaagaaggttagggaaacattactaatatgagaaaaaactaatttggatgtagacaagcattgttcatttattcaacaaatatttattttgccactgctagatacatacccaaaagaaaggaaatcagtacatcaaagagatatctatactccctagtttgttgcaacactattcacagtagccaagatttggaagcaacctaagtatccatca

SEQ ID NO: 891819 - DNA, 623 bp, Homo sapiens
gaaaactctcctgtgttacccagtttgagtgtaccataccatccatctcttgcagggaccttgactgatacaacattaaaatgaagtgtaattttaaaaaattttatttacatatttcttattaagaattggatgaattgaaacttctttattttctttctctttcttgtcacacagaaagcctgattaagtagcattattcttttgtctacagaagtaaccacttctggccaggcatggtggctcactcctgtaatcccagcactttgggagcccgaggcaataggatcacctgagattgggagttggagaccagcctggccaacatggtgaaaccctgtctttactaaaaatacaaaaattagccgggtgtggtggtgggcacctgcaatcccagctactcgggaggctgaggcrggagaattgcttgaacccaggaggcggaggttgcagtgagccgagatagcaccactgcactccagcctgggcaatggagtgagactctctctcaaaaaaaaaaaaaaaaaaaaaaaaaagtaatgacttgtgctgatcttttttctcccctataggttcatagaaaaaaaactcccaccttataaaggaatctttaaaaggttcct

SEQ ID NO: 891820 - DNA, 621 bp, Homo sapiens
agtgtgaaaacagactaatacaaaaaattggtactgggatagtggggtattgctgtaaagatacctaaaaatgtggaagcaactttggaactgggtaacaggcagaactggaacagtttggagggctcagaggaagataagaagatgtgggaaagtttggaacttcctagagacttgttgaatgaatttgaccaaaatgctgatagtgatatagacaatgaagtccaggctgaggtggtttcagatgaagatgaggaacttattgggaactggagtaaaggtcgctcttgctatggtttagcaaagaaactggcagcattttgcccctgccytagagatctgtggaactttgaacttagatgatttagggtatctggcagaagaaatttccaagcagcaaagcattcaagaggtgacctggctttttctgaaagcatacagtcatatgcattcacaaaaagattatctgaaactggaacttctatttaaaagggaagcagagcataaaagtttagaaaatttgcagcctgatcctgtggtagaaaagaaaaacttactttctggggagaaattcaggccagttgcagaaacttgcataagtaacaagaagaggaatatcag

SEQ ID NO: 891821 - DNA, 486 bp, Homo sapiens
caacttcttgaccctaataaattccagtagattcttgatacacttgggagtttgaattagtagtatgtctctccttttcccactcccattccacttagtatatgaaccaggttgttgactgcaaatattgctagagagtggctccaagcacagcagtatcatttatcaatactagtatatctagaatgtatcaaaagtaaaacagtatttagttggtagtaaaaaataatttatcaaacytacactgagacatacctctcctctgtaccaaaaagaaacatcatctgctgtgattttttacaagccaagttgggtaacgttaacactgataaaaataaccatggttttcaaccagtacatacaaaggtagagagtgctatttggccctctacagcaaaacctgtttttccattctatcttgtggcttcttcctcttccatggtgcactagaaggagccctagatgggtatcaggagctttctgttg

SEQ ID NO: 891822 - DNA, 582 bp, Homo sapiens
tcatccaatgtcttgagggcctgaatagaacaaaaaggtggaggaagggtgaatttgctctctcttcttgagctggtgcatccatcttctcctgtcttcagacaatggtggtcctggtttttgggcctttggattcctactgggactacatcagtggctcccctgggtctcargccttcatgtgtagattggaactgggaatatgggatttctcagcctccacaactatatgagctaataataataaacctctttctatacatctatgtatatcttactgtttctctggagaaccccactaatacaaagtcctttgaccatttttttgttgtttgttgttgtagtggtagaggagttctttatatattttggatatttatcccttatcagatatatgacttaccaatattttcttctattctctgagttcccttctcactctgttggtagtatgtgttagtgaacagaagctgttaattttgatgaagttcaatttatctgttttttttttattttgttgcctgtgcttttgatgttacatcccagaaatcattgccaaatccaatgtcacaaaagtttttc

SEQ ID NO: 891823 - DNA, 620 bp, Homo sapiens
tgtcatgttttctcagacccagaccatagaaatgtctcacttgtctaggttgcacctaattcttctctaccgaaacgttgattcctccgtccttaggatggataatgattacaatttctgaaataacaacagaacaatgtcagtagataatatcgccattaaactaatcacttgtcacttcttaaaaattccttgattgggatctttttttaatgtaaaataagcacctccctaaatttccagtacttgagatgtgaaattttgtmgaacatgattacttaatgcaaggaatacctgaagagcgagaccacaaaaccaggtgaatccttcttccagcagcagagccgtaaccatggcttgaatcatagcccacataactggcctgtccaatcagaaatactaaggttagatatgtgtcatgatgacatatcattagtttcctaaaataaatagaggctatttgttccagctggatcttattagtggcttttctattttgtgcttggtcagcccccgggccaacctcccaggctgagctgctgataaggccaagaaaggctttcccatgcaccaactctgctgggacaattgatcaagaccacagagcactagtcagcctg

SEQ ID NO: 891824 - DNA, 655 bp, Homo sapiens
accttacttaaagtacaggtataaaataagacaaatgtttaagtttagttatgttcacagatagttgtcaattggtctgaaacaaatttgctagggaatctatttgtgtagaactaattaatgtaaaaaaaatagacttcatctcgtgttgtgtgcactgtgatataatggtagtatcagtgcaacttaaactaatgattgtamttgatattaagtgttctcaactgagtaacttttaagtggaaaccaagtttagatttggggagtggtaaaggaatcagctttttctattgttaggggaagatagtaatttatcattcatggaccagtagattgttgaaagttggtgaatcggattataagcttctggctaacacaaggattcagaattaggtaaacatctgaaggtttagtatattagaaacacccaaaccagtaatatgctaacctgatgcactgctgaaagaaaatgtgaatttttcgtaataattgcattttagtgaattgtacagtgggtggaaagggcatttggagctcattagaatgagacatagtacaccccaatggccctgtttattaaatgtagtggattaagtgtctgtcaacaaatacaccaaaaccattttttatagaaacagtatttaatggtcactca

SEQ ID NO: 891825 - DNA, 578 bp, Homo sapiens
ctcctactctaagtaagctgcagtgtctgttgttcccttctttgtgttcacatgttcttattatttaggtttcacttataagtgagaacatgtggtaatttgttttctgttcttgcattagtttgctaaggataatggcctccagctccatccaagttcctacaaaggacataatctcattcttttttatggctgcatagtatttcatggtgcttatgtaccacattttctttatccagtcttctattgatgggcatttaggttgattccatatctttgctattttgaatagtgctggagtgaacaacgtgtgcatgtgcatgtgtctttatggtacattgatttayattcttttgggtacatacacagtaatgggattgctgggttgaatggtagttatgtttttagctctatgaggaatctgcacactgctttccacaaagcatgaactaatttacactcccaccagcagtgtataagtgtttcctttgctctgaaagtacaccaggatctgtgttttttgatgtttaaataatagccattctgactggtgtgagatggttatctcattatggttt

SEQ ID NO: 891826 - DNA, 691 bp, Homo sapiens
actattttgattgttttatctccaaatggccttaacttgatgttaggcatctgtactgcatttcaattttgttggaagcagcatcctgtgctccttataatacctgtgcttgcatagcaatttataatttgtgatacatttttccatatattttctaacttaatcctcacaatgtgcctatgtgaagggtggttttaacctcattttttwagatgaggaaactgaggctcagggaatatattgatgtattcacaatgatttatttagcaaaaacagaagttgaacttgaaggtacaagccctttgtagaatatgagctcccgctttttgttgcagttcttttgctataaactttaatttgtttatgcaaaatctgagatattgctttaaatatctgcagctagatttggctgcagtgagcagagttttgtatgtctgctgaacattaaaatatactgaggcagtaagaagctttttttttcctagataattatcacaaggaagattttcttagtgggctctaatgctaatgctcttctgagactggggtgcctcagtactcaaatgctcacactgcatcattctccctggagatttggtgctgttaagaatgtgtttcattctcttcaggtccaatgacatgccttgtttctgtagtgaaaaataatcatcatcaaaatatttgagtgcta

SEQ ID NO: 891827 - DNA, 630 bp, Homo sapiens
tcaatcaataaaagaaatatccaggagtccatacttacataaataaatgattgaataaataaatggaggagaagagacaaatcctccatgcagaagaatcccaaataatttatgtagatacctcaccttcaaggaaggggagcaaaactccccactccttaagtgtgggctgtgcacagtgacttccttcagaagagtacagtacagtatgacatggtggagaaaagaaactttatggtggagaaaactgacaaagatgaccttggccagataattgaggtcaacactgatgtcacgctgacagcatgtaccmttaatgtcataaaaatggcactttacctctgtgttcttcctcctcaaaattcatgacttcatgaaaaaaaaatcagacaaatttcacttgagggatattctacaaaatatctgagcagtattccttaaaactgtcaaagtcatccaaaacaatgcaagcctaagaaactgttacagtcaacaggaacctaaggaaacatgaggactaaatgtagtgcactcacctggagggaatcctggagcagaaaaaggatattagataaaaactaaagaaatgtaaataaagtttgggatttagttaacaacatctcaatattg

SEQ ID NO: 891828 - DNA, 606 bp, Homo sapiens
gtttcatcagtatgcatgacccacaacaatatctcaaatggaaagcaacatttcacaatgttcagttgttatctgtggagcagtgaaggggactctaatcttgtgacagggtctgtgtgattctggagcaataggtagcaaaacactagaggaaggatcagagaacagctgaccccatgactaacactgagtatgtgcaagcttggcttatttttgtttctttccctcccttctcttctgattaattgtgtaaagtttctagggacagtttcaggggtgatagatgatgatggtacgagatttgcagtagaagggaaggagaaggytctggaaggggaaaagaggaccagcagggtccctccatcacctccaggtctgcaggaggtggcaggagggcctggaatgaaaaacagccagtggctgggcgcagtggctcacgcctgtaatcccagcactttggggggctgagacgggcagatcacgaggtcaagagattgagaccatgctggtcaacatggtgaaaccccgtctccactaaaaatacaaaaattagctgggtgtggtggtgtgtgcctgtaatcccagctacttgggaggctgaggtag

SEQ ID NO: 891829 - DNA, 442 bp, Homo sapiens
gcagagacaaaatgccaccagtctctttgctaaagcatagcacgacctttattccagttcccaacaagttcctcatctccatctgagaccacctcagcctatacttcactgtccatatcactatcagcattttggtcaaagccattctacaagtctctaggaagttccaaactttccygcatcttcctgtcttcttctgagccctctaagctatttcaacctctgcctcttaccgagttctaaagttgcttccacatttttccataccagtatagcagcaccccactcttggtaccaatttactgtataagtctgttctcacactgctgtgaagaaatacctgatactgggtaattgataatgaaaagaggtttaattgactcacagttccatatggctggggaggccacaggaaacttacaatcatggcagaaggcacctc

SEQ ID NO: 891830 - DNA, 621 bp, Homo sapiens
atattaatagtcactttaactgcctactgattgattttactaataaactcacattattttaaaacatgtaacaactctctatagttacaattaccaattaaatctcagaaaaaaatgaatacaataattttgtgaaaaataatttttaagataaaaaaattccctactctacccagctgaattaaataaaattctctctytctctctccccctttttatgtgtgtgtgtaaaacacagggatatctctcagaatccaaaggcaggaatgtaaaactaagttttactgaagaatcagaatctcagtagttaccggggaccatatgaattgtcccctcccctcccctccctgtcctctcctcttctcttccctcttcctttctggcacaaagtaaatgtatttttctccattaattgaccaaaatcagtagattacttataacattgcttttctaattatttgtggtactgtaccaaagaaagaatgggaaaattctatgcatatcggtaatatgaattggcctgaattataaccaaatttgtgatatagtacttactaactgaatttctatataatttcaaatttttcaacattcctgtaacagaattaagatattcagaat

SEQ ID NO: 891831 - DNA, 640 bp, Homo sapiens
atgatcgtggctgtaggtttgtcatagatggctcttattattttgaggtatgttccttcaatacctagtttgttgagagtttttaacatgaagggatgttgaattttgtccaaagccttttctgcatctattaagttaattatgtggttttcatctttagttctgtttatgtgatgaatcatgtttattgatttgcatatgttgaaccagccttgcataccagggataaatcctacttgatcatgttagattagctttctggtgtgctgctggattmtatttgttagtattttgtagagaatttttgtatcaatgttcatcaaggatattggcctgaagtttatgttttttgttgtgtctctgccaggttttggtatcaggatgatgctggttcatagaatgagttgaggagcagtccctcctcctcacaaattgatattattaaatgttgcaaagcagaggcttcataagcatttgcatattggtgattgttctctaagaatgcccattcttggaacctagctgacatattctgaggaagtccaagcagtcacatgggagagatccacatcaaagaaaaatgagggtttcagctgacagccccatttaagacccaggtagagaccaactgtcagccatg

SEQ ID NO: 891832 - DNA, 640 bp, Homo sapiens
atgatcgtggctgtaggtttgtcatagatggctcttattattttgaggtatgttccttcaatacctagtttgttgagagtttttaacatgaagggatgttgaattttgtccaaagccttttctgcatctattaagttaattatgtggttttcatctttagttctgtttatgtgatgaatcatgtttattgatttgcatatgttgaaccagccttgcataccagggataaatcctacttgatcatgttagattagctttctggtgtgctgctggattatatttgttagtattttgtwgagaatttttgtatcaatgttcatcaaggatattggcctgaagtttatgttttttgttgtgtctctgccaggttttggtatcaggatgatgctggttcatagaatgagttgaggagcagtccctcctcctcacaaattgatattattaaatgttgcaaagcagaggcttcataagcatttgcatattggtgattgttctctaagaatgcccattcttggaacctagctgacatattctgaggaagtccaagcagtcacatgggagagatccacatcaaagaaaaatgagggtttcagctgacagccccatttaagacccaggtagagaccaactgtcagccatg

SEQ ID NO: 891833 - DNA, 611 bp, Homo sapiens
tgtggcacatatacaccatggaatactatgcaggcataaaaaaggattagttcatgtcttttgcagggacatggatgaagctggaaaccatcatcctcagcaaactaacacaggaacagaaaaccacacaccacacgttctcagtcataagtgagagttgaacaatgagaacacatgaacacaggaaggggaatatcacatactgggccctgttggggaatggggggctagaggagggatagcattaggagaaatacctaatgtaggtgacaggttgatgggtgcagcaaaccaccagggcacatatatacctatgtaataaacctgcatgttctgcatgtgtattccaaaacctaaagtataataataaataaataattaaaatgaatracatagattggcaaagtggagaaagagtcaagacccattgaagtgctgtattcaggagacccatctcatgtgtaaaggaacacacaggctgaaaataaagggatggaggaatatttaccaagccaatggaaagcaggggttgcaaacctagtctctgataaaagactttaaaccaataaagatcaaaaaagacaaagaagggcattacataatggtaaagg

SEQ ID NO: 891834 - DNA, 561 bp, Homo sapiens
ctagtgcatgtatcttagtggaagctctatgtatctgccagtggtagtgtccagttagaggtatcagttaaaggcagagctcacctgcaaaaccaaactagtggctcccacaaacaatggaaaactccacctgtttgaatatctagacagccagtgtccaygcctaagctcagatcctactacaatgcctagccgagggagagatgcctaccacagtgcatttttttttttttttaacagagcacaggggctagacctgccctacctaggagtttaaacaactctgttcacctccaaagcccaccttgagggccaacccaggcagggaggcaaacttccaatttccatttctaccaaacatagaagctagtcttatctgtcctaaccagtgactccacccaaccttgaggcccagcctgcaaccctgtctaactgtagaactcaaaaagcagtaccacatggcctggaaatatactctgtggcctggcctgaacagaggcaatcacagtgcccagccagcagcttggccagattgcagaacacatccagtattttcatcag

SEQ ID NO: 891835 - DNA, 610 bp, Homo sapiens
taaagacatatttgcttaacaaacaaatgtggaacaacatttttttgtaattctttaaaaaaaaaaaaaaatccggggtacatgtgccggatgtgcaggtttgttacatgggtaaacgtgtgccatggttgtttgctgcacctatcaacccattacgtaggtattaagcccagcatgcattagctcttttccctagtgctctccccatccaccttccccctgcargcccaagtgttgttcccctccctgtttccatgtgttctcaatgttcagctctcccttataagtgaggacatgcagtgtttgattttctgttcctgcgttagtttgctgagaataatggctttcagcttcatccatgtccctgcaaattacatgacctcattcctttttatggccgcacagtattccacagtgtatatataacacattttctttttccagtctatcattgatgggcatttgggttgattccatgtctttgctatcgtgaatagtgctgcaatgaacatacacgtgtatgtatctttataacagaatgatttgtattcctttgggtatatactcagtaatggggttgctgggtcaaatggcatttccggctctttat

SEQ ID NO: 891836 - DNA, 613 bp, Homo sapiens
taaagacatatttgcttaacaaacaaatgtggaacaacatttttttgtaattctttaaaaaaaaaaaaaaatccggggtacatgtgccggatgtgcaggtttgttacatgggtaaacgtgtgccatggttgtttgctgcacctatcaacccattacgtaggtattaagcccagcatgcattagctcttttccctagtgctctccccatccaccttccccctgcargcccaagtgttgttcccctccctgtttccatgtgttctcaatgttcagctctcccttataagtgaggacatgcagtgtttgattttctgttcctgcgttagtttgctgagaataatggctttcagcttcatccatgtccctgcaaattacatgacctcattcctttttatggccgcacagtattccacagtgtatatataacacattttctttttccagtctatcattgatgggcatttgggttgattccatgtctttgctatcgtgaatagtgctgcaatgaacatacacgtgtatgtatctttataacagaatgatttgtattcctttgggtatatactcagtaatggggttgctgggtcaaatggcatttccggctctttatcac

SEQ ID NO: 891837 - DNA, 618 bp, Homo sapiens
tgcacgtactgtagcacttggtctccctaaccccagcaacaggaaattcttattttatatccccagcttctgtgtcttttgttatttaatttacagtgtttgtttttacaggcattccacatttgtaaaataactttggtaactgggtgcctaacattcactcattcatttctcaaggaataaatctccagttgtttcaattcaaacctccaatatatgtgttttgagttaatgtgtaataagaataaattacaagtcaatatttttgttattgtactactccataagaaaaattaacattaggaatctgatgacaatatttcaacacctaaaatatataaagttgtaaggcaaaacttccatagaaaacgaaagctaaatctcacagattctaatttcttcagacattacagaggaaaggagttatttyaaaacattttagacagctaaaggtcatggagcatgtgtgtgggaggagagaacctgagtaagcatacttattttcactaggggaccaagagtagacacaatctttacaaaatgctccttttcactgcctcaaaagtaattacacaataatgggttgtctttcatgtggcaagatgacattattgcccc

SEQ ID NO: 891838 - DNA, 654 bp, Homo sapiens
gccagtctccctgatgaacatcaatgcaaaaatgctcaataaaatactggcaaactgaatccagcagcacatcaaaaagccacgatcaagttggcttcatctctgggatgcaaggttggttcaacctatgcaaaacaataaatgtaattcatcacataaacagaaataaatacaaaagctacatgattatctcaatagatgcagaaaagggcttcaataaaattcaacatcccattatgttaaaaactttcaacaaactaggtattgaaggaatatacctcaaaataatcacagccrtatatgacaaacccatagcccttagcatactgaatgggtaaaagctggaagcattcctcttgaaaactggcacaagaaaaggatgccctctctcacagctcctgttcaacatagtactggaagttctggccaggaaaatcaggcatgagaaataaataaatggtattcaaataagaagaaagaaagtcaaattatctttgtttgcaaattacatgatcttatatctagaaaatcctattgtctcaattcaaaagcttcttaagctgacagttaacttcagcaaagtctcaggatacaaaataaatgtgcaaaaatctctagcattcctataaaccaaaagcaggcaaacagaaagcc

SEQ ID NO: 891839 - DNA, 644 bp, Homo sapiens
gtgactttggaactggttaacagggagaagttggaagagtttggagggatcaaaagacaggaaggtataggaaagtttggaacttcttagagacttgttgattttgtttttaccaaaatgttgatagtgatatgaacaataatatcgagaytgaggtggtctcagatggagatgaggctcttgttgggaacttgagcaaaggtgactcttgataaatccttgcaaagagactggcagcattttgctcctgccctagagatttgtgaaactttgaacttgacagagatgatttagggcatctggtgcaagaaacacatctggtgtgtttttaaacagcacagtattcaagaggtgatttgggtgctgttaaaatcattccgttttatgtatatattcacaaatatatggttggaattggaacttatatttaaaagggaaagcagagcataaaagttcagaaaatttgcagcctgatgatgcagtagaaaagaaaatacccatcttctgaggagaaattcaagatggctgcagaaatttgtgtaagttacaaagagccaaatgttaattgccaagacaatgaggaaaatgtctccagggcatgtcagaggtttttcacagcagtctctcctatcacaggcctatag

SEQ ID NO: 891840 - DNA, 687 bp, Homo sapiens
tttgttttactcaatttaagtcttttatcaaaaaatgtttttacttactcttataattagtgaataaactagatttcatatctttaaaactttttcgctgatttcattaaccttaagcattattttaatcatctgaagagtggaaaaatttgctaactatgaaggtcctgggcagaacaaggaagagagtccttctgcctcctgtccaccacacttccccttatcctaatgtttgctgagcacttttcatattctagatcctgttctaaaagtgccatatgcattatcttacctaattttctaaagaacggtaagtattcatatgacattttgaagttatcactaagaagtgactrtacagccagggattgtgtttctcagtcagctttgcatccaggtatagccacgtgacaagttcttgaccacacagtcagtatgaatggcagagataactactaatttgggcccttataaaacaggcggtgctttcccacatactcctgcccctgccccttttactgaccagatgctaatgtaccaagtaaacttggaagccactcatcaaaaatgaaaagccaccatacatcgggattcctgaacgattatctgcagctaaagtacaagttctcacaccagtataatcctgctccctatgccctatcaccttgggttcttttaacgtggaaa

SEQ ID NO: 891841 - DNA, 588 bp, Homo sapiens
gcattacaaaaggatttacacttttagttctatattctgcaaaggcattatgctgagaaggtcaactatgttttgtatgaaggaggagattaaatagcaaaagtagcagcaattactcccttttcaccaactgtaacttgatttaaacaagtcataagctttttaagttgagaataactgtaaggaaatgatgtccytatatccaaagccctgtatttgacagtgatgtaaaaaaattgaatttgttttgtatacagaaattctaagtcacataaggcactcaaattcattaagcaaaagagaacatgatagaatcaaaaatatttcacaggcaaatagttaaatacttctgtggctttaattctttcttcaatttatcttcaggtaactattccataaataaaaatttatatttccctcacttgattttggatcagaaaatctattaggaaaagtaatgcaaatgtgttcttttgaaattgtgtttagtccctttagattgttatgtttacaccaaccactgatattggaagaacatttgaggacatgttaccccagggtggagagccagttacatagtagttatgc

SEQ ID NO: 891842 - DNA, 606 bp, Homo sapiens
tgatttttctgattctaagagattcttgactaattttacatttttgaaattgaacttgtaccaatataccatagaccgtcaaaacgatgttaacattacatcacattatcttgtagatttctttaacttttaaaatggtcagcaatacaactgcaacattatacttattatagatttaagtggaattctgtctgtaactgattgacaatatcaataatttttatatcaaataggaatagcagttttttttctttagttggggcctctttgttttattcatatgcctayagctagatcctcttttctgtctgtagacagtgattcctgctgtgcactgttaagaaaatgagaagacaaaatggagaatcaattaaaaaaaagctttagttgatgaagcttcatagtagatcaatggaatccagctagttaagctatctttagtagctgagataagattttataatcactgtaaatacttacacatttctatgtcttcctcattttgaatttctgtatttggacaaaatcttcctaagtattcaaaaatttatgacatttgagtaagtatttccttagttatactatagataaccaactttggaaagc

SEQ ID NO: 891843 - DNA, 574 bp, Homo sapiens
tcgggatgcaaattttcgaaacttttatgctctgcttcccttttaaatctaagttctagtttcagataatctcttcactcatgcatatgagtgtacacagttagaaacacacagagcacctcttgaatgttttgctgcttagagatttcttccaccagatatccaaattatctctctcaagttcaaaggtccacagatccctaggacaagagcacaatgccaccagtctctttaataaagtatagcaaaagtgatctttagtctagttcctaagaagtttctcatctccatctgagactccatcagccatctctgtccatatcactatcagcattttggtcaaaaccattcaacaagtctctaggaagttccaaaccttccctcatcttcctgtcttcttctgagctctycaaactgttccaacttccacctattactcagttccaaagctgtttccaaattatctttatagcaatgccccacttctctggtaccaattttctatagtagttggttattacactgctataaagaaaactgaaactagataatttataaaaaaaaaaagaggttt

SEQ ID NO: 891844 - DNA, 561 bp, Homo sapiens
agtagttatacatttgttatattttatatatcttaaataattaaatgtaaatattgcactaagactttgagacacctagtgtgaattgggggtgccaggtaggaagtatgtgaaccatttttatatgatagaaagccagttgtgtatgtgtggcggttatgtagacgkatatgtagtttctcccatgttgcttgcctcctgataagtggtcatatccatttatcccttcccatgagtgtgtgtggttcttatgacctgcttctaactaataaatatggaaaagattatgggatattattcttctaattatgtaacattgtaagagactgtctcttgctagctttctggctttggggggtctctctccttcactagctgtgagaaagaaaactactatgaatcctacaactgcaagaaagtaaattctgcaaataatttgagaaacttggaaatagacccttccccagtagagtctccagatgagtacctgcttttgaccaacacttcctttgtagccttacagaggacatagctaagctgtgcccaaactcatgtcttaca

SEQ ID NO: 891845 - DNA, 561 bp, Homo sapiens
agtagttatacatttgttatattttatatatcttaaataattaaatgtaaatattgcactaagactttgagacacctagtgtgaattgggggtgccaggtaggaagtatgtgaaccatttttatatgatagaaagccagttgtgtatgtgtggcggttatgtagacggatatgtagtttctcccatgttgcttgcctcctgataagtggtcatatccatttatcccttcccrtgagtgtgtgtggttcttatgacctgcttctaactaataaatatggaaaagattatgggatattattcttctaattatgtaacattgtaagagactgtctcttgctagctttctggctttggggggtctctctccttcactagctgtgagaaagaaaactactatgaatcctacaactgcaagaaagtaaattctgcaaataatttgagaaacttggaaatagacccttccccagtagagtctccagatgagtacctgcttttgaccaacacttcctttgtagccttacagaggacatagctaagctgtgcccaaactcatgtcttaca

SEQ ID NO: 891846 - DNA, 561 bp, Homo sapiens
agtagttatacatttgttatattttatatatcttaaataattaaatgtaaatattgcactaagactttgagacacctagtgtgaattgggggtgccaggtaggaagtatgtgaaccatttttatatgatagaaagccagttgtgtatgtgtggcggttatgtagacggatatgtagtttctcccatgttgcttgcctcctgataagtggtcatatccatttatcccttcccatgagtgtgtgtggttcttatgacctgcttctaactaataaatatggaaaagattatgggatattattcttctaattatgtaacattgtaagagactstctcttgctagctttctggctttggggggtctctctccttcactagctgtgagaaagaaaactactatgaatcctacaactgcaagaaagtaaattctgcaaataatttgagaaacttggaaatagacccttccccagtagagtctccagatgagtacctgcttttgaccaacacttcctttgtagccttacagaggacatagctaagctgtgcccaaactcatgtcttaca

SEQ ID NO: 891847 - DNA, 588 bp, Homo sapiens
atggctaccacttgtgcactttgaactccttgtattcaggaatcaccaagtaagaagagaaattatcattatcatattgccagtgtaattgaccctgatcagggaagaggtggggctgctgttttacaattggggcaggkaagaatatgtgtggtgactcacttgggcatttctttcttctttttttttttttagatggagtttcactcttgttgcccagaccggagtgcaatggcgccatttggctcactgcaacctccgcctcccaggttcaagtgattctcctgcctcagcctcccaaatagctgggattacgggcatgcgccactacaccctgctaattttttgtatttagtagagatggggtttcaccatgttggtcaggctggtctcgaactcctgacctcaggtcatccgtccgcctcagcctctcaaagggctgagattacaggcatgcgccactgcgacttgggcatttcttggtactcctttgcttagttatgactatgaatgataaatgcagcaaccctggcctgagaaaggggcctcagacccctgaggaattagggtttgggccacagcatcagt

SEQ ID NO: 891848 - DNA, 588 bp, Homo sapiens
atggctaccacttgtgcactttgaactccttgtattcaggaatcaccaagtaagaagagaaattatcattatcatattgccagtgtaattgaccctgatcagggaagaggtggggctgctgttttacaattggggcagggaagaatatgtgtggtgactcacttgggcatttctttcttctttttttttttttagatggagtttcactcttgttgcccagrccggagtgcaatggcgccatttggctcactgcaacctccgcctcccaggttcaagtgattctcctgcctcagcctcccaaatagctgggattacgggcatgcgccactacaccctgctaattttttgtatttagtagagatggggtttcaccatgttggtcaggctggtctcgaactcctgacctcaggtcatccgtccgcctcagcctctcaaagggctgagattacaggcatgcgccactgcgacttgggcatttcttggtactcctttgcttagttatgactatgaatgataaatgcagcaaccctggcctgagaaaggggcctcagacccctgaggaattagggtttgggccacagcatcagt

SEQ ID NO: 891849 - DNA, 564 bp, Homo sapiens
tagttggagtggaatgtgattcttcgctaaatgtttttttgaaaataaaaatttacctgaggggttggatattggtttatatggggcactgaaaacagctattatgtgggttgccttctgttagtgtaaatgtgtacttgtcctggcacttggtgagagctgtcttatgayttcaattgtcatcgatctgttcaatgttaaaggatgtcttagaaaatcagtccaaagccagcctcataggctacaaatctagttttagtgctattataattttttgtggccaaggtaacagaaattccataatcctaacttggtataaccttttcttttccctataatgtattcaaaaacatatatacataatagactatgatgaatgggaattcaaaacatcaatttattattattggttgagtttatgcttaaaattcaagtgcagatttctctgtaagctaaacaggcatatgtggcctagttagaaggcctaagggactttactctcttgctaaggccaactacaaatctaaaaatcttacccctctcctgcaaattacatatgactgg

SEQ ID NO: 891850 - DNA, 576 bp, Homo sapiens
gaaaatgtgactaattttaagcttatttctcattttgttatgttattgaagagacaaaagagaatttttatgcagacattttataatagatgcattgtaaaacatgttggtttaactgaaaatctgattttgtactcataattgaaagatagttctttgttaggctgagaaggtaaactgggcaatggctttttagagtgaagactgtgctcagaataagctggaggagattcagttcaccgtcttaaccccgagttgattttttctacctttctactccatcatccataaatgaatatagtgtgctgttatatgtatgagacactaaataaacttatgctgaatrttgagtgaataaatggtcgtattcaacaataccccaactacataaatatctcagctaaataaaaataccatcattcattttctgaattccaatatttctgatttccactttcctcatggttcaactggcaattaatataatttcttttttattatactttgagttccgggatacatgtgcagaacgtgcaggtttgatatataggtatatgtgtgccatggtggtttgct

SEQ ID NO: 891851 - DNA, 576 bp, Homo sapiens
gaaaatgtgactaattttaagcttatttctcattttgttatgttattgaagagacaaaagagaatttttatgcagacattttataatagatgcattgtaaaacatgttggtttaactgaaaatctgattttgtactcataattgaaagatagttctttgttaggctgagaaggtaaactgggcaatggctttttagagtgaagactgtgctcagaataagctggaggagattcagttcaccgtcttaaccccgagttgattttttctacctttctactccatcatccataaatgaatatagtgtgctgttatatgtatgagacactaaataaacttatgctgaatattgagtgaataaatggtcgtattcaacaataccccaactacataaatayctcagctaaataaaaataccatcattcattttctgaattccaatatttctgatttccactttcctcatggttcaactggcaattaatataatttcttttttattatactttgagttccgggatacatgtgcagaacgtgcaggtttgatatataggtatatgtgtgccatggtggtttgct

SEQ ID NO: 891852 - DNA, 585 bp, Homo sapiens
atttcactgtttacccagtagtcattcaggaacaggtcgtttagtttccttgtagttgtgtggttttgcacgagtttcttaatcctgagttctcttttgattgcctgtggtctgagagactgtttgttatgaaatctgttctcttgcatttgctgaggaatattttacttccagttatgtggtyaattttagaataagggcaacatggtgctgaaaagaatgtatattctgttgatttgggatggagagttctgtagatgtctattaggtctgcttggtctagagctgagttcgagtcctgaatatccttgtttattttctgtctcattgatctgtctaatattgaccgtggggtgttaaagtctcccagtattattgtgttagagtctaagtctttttgtaggtctctaagaacttgctttatgaatctgggtgctcctgtatcgggtgcatatatatttaggatagttagctcttgttgttgcattgatccctttatcattatgtaatgcccttctttgtcttttttgttctttgttggtttaaagtctgttttatcagagactacaattgcaatctctgctt

SEQ ID NO: 891853 - DNA, 583 bp, Homo sapiens
tcctaggggtcatagtactccgatactatcttagtcaaaattcctctgtaaaatgttcagggatcctctgcttcagtgccttccacatatcccaacagtttattccattactgtttatgctatccctttaattaaaaaaaaaactaaatattgaaggtatatacttcatctaaagtcacagaagactagacctgaaacctaaatcttttcacatcaccctaaagatctttcatcttcattttacagcttgaacgtattttgtaggatgagaatttttattttcctggtcttaagtctttctatcagtacagatgacaacacactatggtggtccctaatggcatcttgagcagatgggggctgccttctcagatgcmccatggagctgaatccatagatcataaaaaggcaattatatcgatcacatgattcatttaggctatggatttatattaatactatgtaaaaatccactggactagaatcagctgtcctcatgtgcctgagcaaaaaataatccaaacaattctctttggtatcagttagatacaggtactccttcagaatcagagaattccagctt

SEQ ID NO: 891854 - DNA, 641 bp, Homo sapiens
gtctcgcctttgtagcagaggaaaaacaggcctagactacacactatttgtcctgcctagcaaatttaaaaagcaaagcctgaaaggatcaatctgtttacaggtaacttcactgggacccagaataaagatcaagaatatttataggaatacaaatatatttggtacccattcacagtatctggcatccaattagaaagaatcaccaggcatgcaaagaagcaggaaaatacaaccccataataaggaraaaaggcaccgagaaactgagtctacagtttatatagacaaaagacctaacagtcaaagcaatcttgaaaaagaataaagctgaaggatttaaactacctgatttcaagacttactgtacagctacatgaaccaagaccactctgtactggtataaggagtttatcaattttgttcatcttttcaaaaaaccaacttttagctttaattttctctattgtctgttttctattttgtcgatttttgcttttgtctttattatttccttcattctatcttggacttatttcacttcttttgctgactttttaaaactgtaactttagatcattgatttgagacatttcttctctaacggcatttttaaagctatttatcttcttacaagcccc

SEQ ID NO: 891855 - DNA, 619 bp, Homo sapiens
aaaaaattcctaaagtctcttttaacactaaggttttcttttcttatttatattagcttttgtgtattagaattctatccactccaaattacattgaatgtggcaaatcaatgtcaatattgatctgaaatctttctcaagtgacatatatcaccacacaataaaaggaattatttttcttctgataacacagaaggttggcctgcttatcttttaatcctatctcaaattttatttcctactttatttcttacaatatttttttgttaaggactatraaaaatgtactcacaacactctcttttcttccttaactttgaaaataaatgcataatttcccattgatgggtattctttcattcttgtggtcattctaaatcatcctggttagaaaatgtaccttagacaaatggatttaataatagttacaaaagttactttagtacctatttttgtattaaatcaatggcacattactattataacaaattttatatttttgaatcagtatagaatataacatttttatatattgggctgggaaatgcaatgccactttcagcatatacacagaaaaaatgtgaagagtcacttgcgcaaatggaaatacacacatgca

SEQ ID NO: 891856 - DNA, 679 bp, Homo sapiens
cggtttttgtctttggttctgtttatatgctggattatgtttattgattttcgtatgttgaaccagccttgcatcccagggatgaagcccacttgatcatggtggataagctttttgatgtgttgctggattcagtttgccagtattttattgaggatttttgcatcaatgttcatcaaggatattggtctaaaattctctttttttgttgtgtctctgccaggctttggtatcaggatgatgctggcctcataaaatgagttayggaggattccctctttttctattaagtggaatagtttcagaaggaatggtaccagctcctccttatacctctggtagaattcggctgtgaatccaactggtcctggactttttttggttggtaagctattaattatttcctcaatttcagagcctgttattggtctgttcagagattcaacttcttcctggtttagtcttgggagggtgtgtatgtcgaggaatttatccatttcttctagattttcttgtttatttgcgtagaggtgtttatagtattctctgatggtagcttgtatttctgtgggatcagtggtgatatcccctttgtcattttttattgcatctatttgattcctctctcttttcttctttattagtcttactagcagtctattaattttgttgatctttt

SEQ ID NO: 891857 - DNA, 628 bp, Homo sapiens
gcataatccataaaaagagaaataaaaaactggacttcataaaatttacaaatatttgctcgtgaatatacttttaagaggatgttttcatactcctgataaagacatacctgaaactgagaacaaaaaaaaaggtttaactggacttacagttccacatggctggcaaggcctcagaatcatggcaggaggtgaaaggctcttcttacatggttgcggcaagagtaaatgggaagaaacaaaagcgaaaacctctgacaaaaccatcaaatctcatgagatttattcactatcacaagaatagcatgggaaagactggctcccatgattcaaytacctccccctgggtccctccacatcacataggaatcctgggagatacaattcaggttgagatttcagtggggacacagccaaaccatatcattctgcccctggcccctccatatctcatgtcttcacatttcaaaaccaatcatgccttcccaacagtcccccaaattctttactcatttcaacattaacctgaaagtccacagtccaaagtctcatctgagacaaggcaagttccttctgcctatgagcctgtaaaatcaaaagcaagctagttacttcctagtgcagtaca

SEQ ID NO: 891858 - DNA, 635 bp, Homo sapiens
gccaaggcatggtgctcccaccctctgaagccacagcctaagctgtacactggcccctttcagccacagctggagcaactgggacatagggcaccaagtccctagactgcacacagtgtgaggacccggggcccagcccacaaaaccattattttccttctggacctctgggcctgtgatgggaggggctgccaagaagttctctgacgtgacctggagacattttattcatggtcttggggattaacattaggctccttgctacttatgyaaatttctgcagccagcttgaatttctccccagaaaatgttttttcttttctatcatatagtcaggctgcaaattttccaaacacttatgctctgcttctcttataaaactgaatgcctttaacagcacccaagttacctcttgaatgcttcactgcttagaaatttcttctgccagataccctaaataatctctctcaagttcaaagttctacaaatctctagggcaggggcaaaatgctgccagtctctttgctaaaacatgacaagagtcacctttgttccagcttccaacaagttcctcatctccatctgagatcacctccatctgaattttattgtcaatatcactgtcaacattttgg

SEQ ID NO: 891859 - DNA, 635 bp, Homo sapiens
ttttaatggacatgagaacaaaacaaacaacaacaaaaaaaagagtgtgccaccttttgaggaaaaccagtaaggacacccacaaaagcacagtagggtccatggaatttactctcactcacagtttacttttgtgttattgaatatcacaaacaatacagtgtgaagaacacatagctacagatgcctcctcccatcactttgctttcttatttgacatgaacattattgcacaaagaacactgaacactgacagtgtttccatgacaaaatcaaattacaaagataaacataattcggctgggacaggagaagctggcttctccttgggccagtgccttcccatctccttgcctgcrtgagtaagtgaattggaactactctgcatgtgatcttgccctcctgtttccaactggattttacggtttgataatttcatactatttgtctccccaccatcctatccctatccagagttcataatttgccaggaaacttagcatttattttccatttcttcctcactgcattgctcagcaaccacagagatgccttggactgattttgcaacaccccccaccattgtccccaggcgaggaacacaagtttctattggacccatcatttggatgtgc

SEQ ID NO: 891860 - DNA, 617 bp, Homo sapiens
tcaggagggtgaggcaggagaattgctttaacctggaaggcggaggttgcagtgagccgagatcgcgccactgcattccagcctggcgacagagcgagactccatctcaaaaaaaaaaaaggaaatatatatatatatatatatatatttatataatatttctaatatgtaatacataacataaatttaagttatgaaacaaacaatactaacacttgtgatcctaccaccaaaagttaagaagtagaaccttacagctgggtgcagtggctcactcctgtaatcccagcactttgggaggctgagrggggcagatcacgaagtcaggagtttgaggccagcctgaccaacatggcgaaaccccatctctactaaaaacataaaaattagccaggcatggtggtgtgcgcctgtaatcccagctactcaggaggctgaagcaggagaatcgcttaaacccgggaggtggaggttgtagtgagctgagatcacgcaactgcacgccagcctgggcgacagagtaagactgtgtctcaaaaagaaaaaagaaaaaaagaagtagaaccttacttcttccattgaagctatctccatgattcttccctgaacccaaaagg

SEQ ID NO: 891861 - DNA, 615 bp, Homo sapiens
ccttggagattaagtttcaacatataaattttgggggaaagcaaacattcagaccacagcattttttgttagtgtttcctataaatggtatggctattcactcctttggcaatcattttgttggcttgtctatcttttgcttataaacttataatatttctttatacaaaatakatacttatcctttgataggattatgtgcagcaagaatcttttccaagcttatggcttatcttttcacataccatttttggaatcttttaatgagctactattcttcattataataaactttaattaatagcattatatacattcatcttatggctagcatttttgcatcttaattcagaaacctctacctgtcataaggtataaaagatagtttccaaaattttcttcttaaatgttggcatttgtcttacacagttaagtcttaagtccatctgaaattttgctttttacatctgttaacaggttccaatccaaatttctttcctatgaatacccaattgtcccagaataataattaaatagcctactcaataaccatttttttgctatgcgaatttttttatattatgttgttatatatatatatgtatatatatgtgt

SEQ ID NO: 891862 - DNA, 608 bp, Homo sapiens
caatcctttagcctgaattagttatagagttgcactatgcatctccttgggttaccccttgtaaatgtaaattatcttatcgcctaaatttagaaagccatatgcagaaattgacaggtcatttacattcagttcaaagaagaggataggcagccaattatattgtgttgaagccttgagaaacattttacaaatcaaatgattcaaaaacaggttttaaattcctaactcctgtcacttcttgataagtatgggaagatcattccgctatcatttgaaagatttagaacaaacttaaaatttagrggactggctttattcctctccaaataaatatagtgtagcttttttattataaaaatgtatattaatgtatctttttatttgcatattttatcatatatttttattataaaatataattgtatgtaacattttaagagatgctaacctatttgatctatagatcctgatctattcctgcattagtcaagattttttagtggcaaataaccaaaatcaacaagtttcttttcagaacacaggagtttatgcagaacacatggccagaaaagaattgagtctcaagacaaattggaaccaggaat

SEQ ID NO: 891863 - DNA, 648 bp, Homo sapiens
tcaaagacacaattaacatgaaccaaaatgttttcctgagagtcagataatttacatcctaacaacttccaaaatgatacatttgtcacagtgaattttgtatttacttcttggggtatatatagctttagctggaacaagaaaaacctccatggagcttatagtttactgcagtattcaaatagtattaaatattttgaaggatataagaagaaacagatatattttaccagtgcaggatgggacctccctccctgctttttaggtttcagttatcaaatctggtgatatccaataaaactcttaataaacygtgaagtgatatgccaattgctgtaaataaagacaaacgcaaatccatcgccacacatttttctggggtgttattaacatgtaccgctattgttaaaaatgtcaactagaatctctctcctgagatcaactgccatatagcgcccaatgtgggctggcaatctatcccaactcacttgggatagtctgaatttatgtcaattgctattaataactacgtacaagcattcatttcactttaaaatatactcatttgaatggtagataaattatgtagtcactccaccaattggcatttcctcttaaagttgcacagaaacttcaaattcagcgcag

SEQ ID NO: 891864 - DNA, 616 bp, Homo sapiens
ttttccatttcaatatggataccttttaattttttttttttttttggtcttattgcacttactagaatctacagtgtaatgttgaattaagatggtgagtgaagacatatttgcgctgttcttgaccttagaaggaaagcatttggcttgtcaccattaagtatgttaatgagttgcttcttttgtttgttcaattgttttttatagacgctggtttttgtttttttttttcttttttttgagatggagttttgctcttgtgatccaggctggggtacagtggcrtgatctctgctcactgcaacccacacctctagggttcaagtgattctcctgcctcagcctccagagtagctgggattacaggtgcccactaccacaaccggcttattttttgtatttttagtagagacaatgttttgctatgttgggcaggctgatctcaaactcctgacctcaggtgatccacccaccttggcctcccaaagtgctgggattacaggcatgagccaccatgcctggccagtagatcctgtttaaagacaggaagttatttctttgtactcttggtttgctgataatttttttaaaaatcataaatggatgctgagttttt

SEQ ID NO: 891865 - DNA, 616 bp, Homo sapiens
ttttccatttcaatatggataccttttaattttttttttttttttggtcttattgcacttactagaatctacagtgtaatgttgaattaagatggtgagtgaagacatatttgcgctgttcttgaccttagaaggaaagcatttggcttgtcaccattaagtatgttaatgagttgcttcttttgtttgttcaattgttttttatagacgctggtttttgtttttttttttcttttttttgagatggagttttgctcttgtgatccaggctggggtacagtggcgtgatctctgctcactgcaacccacacctctagggttcaagtgattctcctgcctcagcctccagagtagctgggattacaggtgcccacyaccacaaccggcttattttttgtatttttagtagagacaatgttttgctatgttgggcaggctgatctcaaactcctgacctcaggtgatccacccaccttggcctcccaaagtgctgggattacaggcatgagccaccatgcctggccagtagatcctgtttaaagacaggaagttatttctttgtactcttggtttgctgataatttttttaaaaatcataaatggatgctgagttttt

SEQ ID NO: 891866 - DNA, 620 bp, Homo sapiens
atatgttgagcatggaagacatgtaatttggtcctttatttcacagatctactgatagaaactggacaagaactatgcctgaggaacctcaactaaacctggacctgatttagatgaagagatcctggacctcaaaattgaattttgtgccataatgggctgaggtcttttggaggtttttagatggagtgagcataatttggatgtggaacgaatagaaataacttgtggtcagaaggtgaaaggttaaaaamaatggctgcaaaaattcaagtaaaaatttttaaaaaattgaaagaaagttgggttacagattccctcaccttgaatctgagtgagtttgtgattatatttttacaatatggtagaaatgatgctatgtaacatctgaggtgacacgtaaataagaaagacaaaaatatgcagtgttcatattgttcactggaacaccaaatgagatgtgtgactaccaggaggccatcatgctgtgagtaagcccaagacaaatggaaaggcaatgagcagaccatttggtctatggtctcagctgactccagcctttgcatctccccagctaagacactaaatatgtttgtgaaggaggttccagatgattccaa

SEQ ID NO: 891867 - DNA, 595 bp, Homo sapiens
cctttaaataaacttttcaagccaatctattaaatggttatctgctgtctgctccagggagtgcaggcagatggagagctgggctggggtagaccagttgtaaattcatacacacatacacacacacacacacacacacacacacacttgaagtcctgcacgargtcacctacaaggtcaggccacctcttcctgggaccttgctcaggttttggtgtctcagaagatgctgcattaccaacctttgaggagaaaaccaaatgggcttgtcacaaagaaatacaaagtgtgactcagagcagggagcaagtgtggagggaagggcctggagaggacagtgagtgggagagctgccatttgggctggtctggcttcagaaccctgctttgctttctctccttttggctcaggagatgattgcacatgtggctcacagctgactcttgcaggatctcagataaatgatgagaagacaggtaacacctgggcaactttttctcattctgtgtggatagaggttggggccagatggcctctctcctcctcccccattatttatggaaggcttcacttactttccaacaggaagaagcag

SEQ ID NO: 891868 - DNA, 595 bp, Homo sapiens
cctttaaataaacttttcaagccaatctattaaatggttatctgctgtctgctccagggagtgcaggcagatggagagctgggctggggtagaccagttgtaaattcatacacacatacacacacacacacacacacacacacacacttgaagtcctgcacgaggtcacctacaaggtcargccacctcttcctgggaccttgctcaggttttggtgtctcagaagatgctgcattaccaacctttgaggagaaaaccaaatgggcttgtcacaaagaaatacaaagtgtgactcagagcagggagcaagtgtggagggaagggcctggagaggacagtgagtgggagagctgccatttgggctggtctggcttcagaaccctgctttgctttctctccttttggctcaggagatgattgcacatgtggctcacagctgactcttgcaggatctcagataaatgatgagaagacaggtaacacctgggcaactttttctcattctgtgtggatagaggttggggccagatggcctctctcctcctcccccattatttatggaaggcttcacttactttccaacaggaagaagcag

SEQ ID NO: 891869 - DNA, 654 bp, Homo sapiens
agtaatctataactctctgagttattcatctctgagtaatccatagttatctgagttattacagttctctacagttattagaatgttactggattgaatcttttgaaacaagtagataatattatgctccagctatgctaggtgcattacataaagactttataatcttcgcaacaatccattggagtttaaattattagtcctatttcataaagattgaggtttagagctagtaaatggcttgcccaaggtcatacagctggaaaggacatagtaactatgaatccaagtctatctagcttaactgctgcatggacatattgaaatgcttaaatgctstttgtggttatagggtgacaattttatgactccttatcaaggtggtacaaaagaaaaataaatatttgttggttttttttttaatcagtctggccaacctataattctgaggggagaaaagggaattttatggacagacttatttgagttggcattgacctaatcaagttaatgggaaataagcaatcaaatgaataaacaaactttcatttgactctagagcaacagttctcagaatatggttcccagaccaaacaacatcagcatcacctggggaacttgctagaaatgtaaattctcagaagaaatctacta

SEQ ID NO: 891870 - DNA, 612 bp, Homo sapiens
ttgctgcacctattgacccatcctctaagttccctcccctcaccccctacctgtcaacaggccctggtgtgtgttgtttccctccctgtatccatgtgttctcaatgttcaactcccacttataagtgagaacatgcagtgtttggctttctgttcctgtgttagtttgctgaaaataatggcttcccgcttcatccatgtccctgcaaaggacatgatctcattcctttttatggctgcatagtattccatggtgtatatgtaccacattttctttatcctttgtakcattgagggcatttgggttggttccatgtctttgctattgtaaatagtgctgcagtaaacatacgtgtgcatgtgtctttatagtagaatgacttatagccctttggatatatacccagaaaggggattgctgggtcaaatggtatttctggttctatgtccttgaggaatcgccatactgttttccacaatggttgaactaatttacattcccaccaacagtgtaaaagttttcctgtttctccacaacctcaccagcatctattggttcctgacttttaataatcaccattctgactggcatgagatggtatctcattgtga

SEQ ID NO: 891871 - DNA, 561 bp, Homo sapiens
ctttttcttttttctttcttttttttgagacagagtctcactctgttgcccaggctggagtgcagttgcacgatctcagctcactgcaacctccacctcccaagctcaaatgattctcctgcctcagcctccctagtagctgggattacaggtgcgtgccaccacgcctagctaatttttttttttttttgagatggagtgtcactctgccgcccaggctagagtgcagtgatgccatctcagttcactgcaacctccrcctcttgggttcaagcaattctcctgcctcagcctcacaagtagctgggactacaggtgcccgccatcatgcctggctaacttttgtatttttagtagagacaggatttcaccgtgttgggcaggctggtctcaaactcctgacctcaagtggtccacccacctcgacctcccaaagtgctgggattacagttatgagccactgtgcctggcccacttctgttttctcaatgaagaatgcagttgccagccattcagagtaagagaaagaagagatctcagagagtgaaaatcaaaccttct

SEQ ID NO: 891872 - DNA, 561 bp, Homo sapiens
ctttttcttttttctttcttttttttgagacagagtctcactctgttgcccaggctggagtgcagttgcacgatctcagctcactgcaacctccacctcccaagctcaaatgattctcctgcctcagcctccctagtagctgggattacaggtgcgtgccaccacgcctagctaatttttttttttttttgagatggagtgtcactctgccgcccaggctagagtgcagtgatgccatctcagttcactgcaacctccgcctcttgggttcaagcaattctcctgcctcagcctcacaagtagctgggactacaggtgcccgccatcatgcctggctaacttttgtatttttagtagagacaggatttcaccgtgttgggcaggctggtctcaaactcctgacctcaagtgrtccacccacctcgacctcccaaagtgctgggattacagttatgagccactgtgcctggcccacttctgttttctcaatgaagaatgcagttgccagccattcagagtaagagaaagaagagatctcagagagtgaaaatcaaaccttct

SEQ ID NO: 891873 - DNA, 609 bp, Homo sapiens
tagaacttgtaaaactcagactgaaataattttggcatcattgactggctttatgctgaaacaactttatatttagatttaacataatccctgtatctaaactatatgcaatataatttgaaagttgctaacatctcctacataaaaatatttaccaaagttatcttgatatagggctaagcatttytctaatattaactcctttcgctttaaaattcttcaacttttacaaatattccttcagagaggtcatatatttagtcaccccaaccatgctcaccttagttgaaattcatcagaatggttcacaggtatctagcagtcatgtgacaacatgacatgggatgataagttttaaaataaggagttaagtattctggctactaggccctccccttcctgaatccgtggctttagagtcctgggatataataaaagatagcattaacaaaggccatttttcatcctacacattgaatcaaacaatgtatcagagacagaaaaaaactgtcttaaatagttgaaagctccaaactttacaacttctcccatctactatggacatagagctgcactagtaagtggcacagtcaggattcaaaacaaaga

SEQ ID NO: 891874 - DNA, 528 bp, Homo sapiens
ccacagatctctagggcaagggcaaaatgctgccagtctctttgctaaagcatagcaagagtgacttttactccagtatccaacaagttcctcatctccatctgacacacctcaacctggaattaattgtccacattactatcagcattttggtcaaagccattaagtctccaggaagttccacactttcccacatatttctatcttcttctgatccctccaaactgttcccaacctctrcctgttaataagttccaaagtcacttccacattttcaggtatctttacagcagtgccccactaccttggtaccaattactgtattaattcattctcatactgctatgaaggaataactaatactgggtaatctataaaggaaagagctttaattgactcacagttctgtagagcttgggaggcctcaggaaacttacaatcatggcagaaggcaaaggagaagcaggaaccttgttcacagggtggcaggaaggagtgagtgcaagcaggggaaatggcagacactta

SEQ ID NO: 891875 - DNA, 528 bp, Homo sapiens
ccacagatctctagggcaagggcaaaatgctgccagtctctttgctaaagcatagcaagagtgacttttactccagtatccaacaagttcctcatctccatctgacacacctcaacctggaattaattgtccacattactatcagcattttggtcaaagccattaagtctccaggaagttccacactttcccacatatttctatcttcttctgatccctccaaactgttcccaacctctacctgttaataagttccaaagtcacttccacattttcaggtatctttacagcagtgccccactaccttggtaccaattactgtattaattcattctcatactgctatgaaggaataackaatactgggtaatctataaaggaaagagctttaattgactcacagttctgtagagcttgggaggcctcaggaaacttacaatcatggcagaaggcaaaggagaagcaggaaccttgttcacagggtggcaggaaggagtgagtgcaagcaggggaaatggcagacactta

SEQ ID NO: 891876 - DNA, 621 bp, Homo sapiens
tctgctcattgttacttaagcaaatttctgcagctggcttgaatttctccccagaaaatgggttttccttttctactgcatcatcagcctgcaaatttttcaaccttttatactctgcttcctcttgaatgctttgccacttagaaatttcttctgccaggtaccctagatcatctctctcacattcaaagttccacagatctctagagcaggagcaaaatgctgccagtctctttgctaaagcacaataagaatcacctttgctccagttcccaagttcctcacctccatctgaaaccacctcagcctagactttttggcaaaaaccattccacaagtttctaggaagctccaaactttcccacatcttcttgtcttcttctgagccctccaagtctctaggaagttccaaactttcctacattttcctgtcttcttctgagccctccatrtgattccaacctctgctggttccccaattccaaagtcactttcacatttttgggtatcttttcagcagtgccccactcccagtcccaatttactgtattagtctattttcatactgctatgatgaaataccagagactgcataaattataaagaaaatgaggtttaatg

SEQ ID NO: 891877 - DNA, 621 bp, Homo sapiens
tctgctcattgttacttaagcaaatttctgcagctggcttgaatttctccccagaaaatgggttttccttttctactgcatcatcagcctgcaaatttttcaaccttttatactctgcttcctcttgaatgctttgccacttagaaatttcttctgccaggtaccctagatcatctctctcacattcaaagttccacagatctctagagcaggagcaaaatgctgccagtctctttgctaaagcacaataagaatcacctttgctccagttcccaagttcctcacctccatctgaaaccacctcagcctagactttttggcaaaaaccattccacaagtttctaggaagctccaaactttcccacatcttcttgtcttcttctgagccctccaagtctctaggaagttccaaactttcctacattttcctgtcttcttctgagccctccatgtgattccaacctctgctggttccccarttccaaagtcactttcacatttttgggtatcttttcagcagtgccccactcccagtcccaatttactgtattagtctattttcatactgctatgatgaaataccagagactgcataaattataaagaaaatgaggtttaatg

SEQ ID NO: 891878 - DNA, 632 bp, Homo sapiens
atctcattctgatattgctgatatctgtgtcactgaccatatactcttagcagaaaatgggaaagtcagaagcatgtccagcttcattttgtacctaagagagtagagtgatgctttttctgtgaactcaatgaaaaaaaaaatagagctaaatgtgtttctaacaggtatgtgtctggttaaataccgttaaataaagctaaacattaatagtgcactttaaaaaatactatgcttaaggtagcaatatttaagacaccaaagttattttaacagcaagagtcatctactttccattcttgttttgtgattcacatgtaatgattcacagattttgtaaggtgttagtttagtcatcatttgcactgcacaattttgggatataatttcattgttgtgggaaaaaaatcacttckgttgtgtgcacatggtggcatcctcttcatttgtctcccagcttctagatttattctgtttgctacagttagcatctcatctgttagattgcctcttgttagctcattggcatcagtgttaaccattagatgattcttcttcatctataaataagaattttgagacatcatctggttcaattgtttttctttatgaacatttttagggtcatcata

SEQ ID NO: 891879 - DNA, 640 bp, Homo sapiens
gggttgagggagggggaagggatagcattaggagatatacctaatgtaaatgatgagttaacgggtgcagcaaaccaacatggcacatgtatacatatgtaacaaacctgcacgttgtgcacatgtaccctagaacttaaagtataataaaaaaaagaaaatatgctgtgtgaaagaagccagtcacaaaagaccatatagtgtatgattccattgctccgaaatatctagaataggcaaatctatagagacagaaagcagattagtggttgcctagggctggttgggttggagggaaattggagagtgactgctaatgggtatgaggtttcttttgaggttcataaaaatgtactaaggttgattgtgctaatagttgtacaactgtcaatatactaaaaaccattgaattgtatactttaaatggaggrattatgtctatattatacctcaaaaatgtttttagaaaagcagtggagaattaaaaagttgaaaaatacatagtcaaatctaaacaagcattgactgtatgaaacaatagtaacaaaagcactaatggaggttccataaaaagatggaattaaaatactagaaacaatgtgtgagaggaaaagaagaataagagagaaaaccacctaag

SEQ ID NO: 891880 - DNA, 640 bp, Homo sapiens
gggttgagggagggggaagggatagcattaggagatatacctaatgtaaatgatgagttaacgggtgcagcaaaccaacatggcacatgtatacatatgtaacaaacctgcacgttgtgcacatgtaccctagaacttaaagtataataaaaaaaagaaaatatgctgtgtgaaagaagccagtcacaaaagaccatatagtgtatgattccattgctccgaaatatctagaataggcaaatctatagagacagaaagcagattagtggttgcctagggctggttgggttggagggaaattggagagtgactgctaatgggtatgaggtttcttttgaggttcataaaaatgtactaaggttgattgtgctaatagttgtacaactgtcaatatactaaaaaccattgaattgtatactttaaatggaggaattatrtctatattatacctcaaaaatgtttttagaaaagcagtggagaattaaaaagttgaaaaatacatagtcaaatctaaacaagcattgactgtatgaaacaatagtaacaaaagcactaatggaggttccataaaaagatggaattaaaatactagaaacaatgtgtgagaggaaaagaagaataagagagaaaaccacctaag

SEQ ID NO: 891881 - DNA, 681 bp, Homo sapiens
gaacatgatgactcataaggtctgattgttgagggagaggaagaaccagtgggaacacctgggtggagatctcagatgagggatgtggtacagttgatgatacggggagggggtgtgtgtgcagaaatagtgatttagaggtaaagtgaaagttttacctctaaattttactacatgtattgagatctggaggggctatgaggcagacaaatggagctggccaggcaagcacatgggaagtgggactgagaaaatcacagttgctttgcatattagaaatatgtgtgttacatgctaatcttatttactcatgcactattgcactgggcaggtacctctgtactccatttaacataacttctaacttgtttgagggtaaatttattagtgtttcaaaacatctgacatttatactgcttttctagccccattctatttctcttttagtgaatgtagtgagtggttgctatttcaacccaagcacttggtgttcacrtcttgcttgttccttggtggcttctgtttgttagtttctattgtggcttttgaagaaggtacctgggtttgattaaatttgttacacccttcaattatatcaaattatagtggaagtgttttttgtgttttttgtttgctgtcttaaaaaggcagcagaaaacaatatccacatggacaggtctt

SEQ ID NO: 891882 - DNA, 605 bp, Homo sapiens
tcacttgaaaatataaattttcattcctaaataaaactgaattgtatttgacatttccttgatacattgtagctctgcaagcctgagagtattgtccatttgtggacacaattaacttcatatgttgcaaatcagtctaacttggggcatgacatttggaaaattaatttagtgaaagtgcattgccagggcaatgaataaatgaacttcaaatcagtacccctatgctggctaattcaaaagctaatcagtgactagataaatacataattcttccattttatccattacaatgccttatttttcacacatttcargaatctaaggatttggatatatattatgggttattgtcattataatttttaaataaggtcaaaatccaacattttgacatattcaccattagtttactacttcaggtacgttcattctttgaatacatccatattgagaacccactcagtgccaaactctgttcagggattgaaggatacagatgttaacaaggaaagcaagattctaattttgaggaaaactacactctaatagagaaaaaaacgacaataaatatgtaggaattgaataaataagctaattttaga

SEQ ID NO: 891883 - DNA, 640 bp, Homo sapiens
tcagcaatatttatatgcccatatagacaagaatagaagaaatactgaaagaaaatatacctaatgtctgtgtgtggtagaattgtaagtgggttttctatatttttgatattttctagattttctacaatgagtagtatctttataatcataaagatgaataaaagttttaaaaatagtttcaattctcawttcaacaataaagaattgatctttgctgaagtttgccctttgcccccaagtgaaccataactacttcattactcacacaataagaaaccagtgagaaccatgtctcattcattcattcacttcatttgtttgtaacctccacttcattccccaaaaaagaattctcactgtcttataagaatccagttataggacaagctggatttagtgggatgaaatcataaaatgcttttacttttctgatttgattgcctttcaaagcttccaactagctctccctccctcaaccctggattatgctacattgagagatcctgtagttttccagtcactttcctagttaacacacaatctcattctcctatgctcttgaatatgaatgagtcttgcaaatttaaggctgtataaaaaaaaaaaaagcaagttgtttaaaacagggatccccagc

SEQ ID NO: 891884 - DNA, 640 bp, Homo sapiens
tcagcaatatttatatgcccatatagacaagaatagaagaaatactgaaagaaaatatacctaatgtctgtgtgtggtagaattgtaagtgggttttctatatttttgatattttctagattttctacaatgagtagtatctttataatcataaagatgaataaaagttttaaaaatagtttcaattctcaattcaacaataaagaattgatctttgctgaagtttgccctttgcccccaagtgaaccataactacttcattactcacacaataagaaaccagtgagaaccatgtctcattcattcattcacttcatttgtttgtaacctccacttcattccccaaaaaagaattctcactgtcttataagaatccagttataggacaagctggatttagtgggatgaaatcataaaatgcttttacttttctgatttgattgcctttcaaagcttccaacyagctctccctccctcaaccctggattatgctacattgagagatcctgtagttttccagtcactttcctagttaacacacaatctcattctcctatgctcttgaatatgaatgagtcttgcaaatttaaggctgtataaaaaaaaaaaaagcaagttgtttaaaacagggatccccagc

SEQ ID NO: 891885 - DNA, 557 bp, Homo sapiens
ggtcaggagtttgagaccagcctggccaatatggtgaaaccctgtgtctactaaaactacaaaaattagcaggctatggtggcaggtgcttgtaatcccagctactctcataagctgaggcagaggtagcagtgagccaagatcacaccactgcactccagcctgggagacagagcaagactctgcctcaactaagaaaaaaaaaaaaaaaaaaaaaaggaagaatcaccccaayccaggaagtatattagttagaactaataaatgaattcagtaaaaattattcaggataccaaatcaacatacaaaaccagtagcttttctatacactaacagcaaactatctggaaaagaaattgagaaaacagtctgatttacaatagtaacaaaaaaattaaaatacttggaaataaatttatccaggacgtgaaatacctctatgccccaaactgtaaaacactgataaaagagactgaaggagacacaaacaaatggaggtatatcctatgtttatggactggaagaattaattctgttaaaatgcccatactacacaa

SEQ ID NO: 891886 - DNA, 631 bp, Homo sapiens
aaataagcatttataaggtacattactttttccagtcattaatacataagtgagattattttagaatcttcagatccaacaagggcatgaattgtatatagttaataaaaatagtggggacagttttgcaagtgtcatccattttagccaaaatgaaacatgtgctagtttttctgttagatttagtggattatataagtagtgtatcttcttcagtagtaaaattcataataaaaaatagtttaccatttaatgtgttttataacactagaggaacatcaatatcagcaagtgttaagaagctctttgagcttgttaaattatttgtattctccaacaaagggcggcgtttgcaggcaagcatgctgcagtgtttgaaggggcagaagttttacacaatcgaataattcggcataggagatttrttgaatctttttcctgcattttcacttctttagtcttcaaaatactcactgcgtgtattagtctgttttcacactgctgataaagatataccccagactcggcaatttacaaaaggaagaggtttaatggacttacagttccatgtggctggggaggactgacagtcatggtggaaggtgaaagacatgtatcacatggcagcaga

SEQ ID NO: 891887 - DNA, 598 bp, Homo sapiens
atctgggagaggaaaggaattccaaacaatgtcagtgaagaataattttgtgaactgaacctactgagccaagagaaggacttacttaagggatggaggtggatatttgtgtgtattttgtaggagaagtataaggatgttcatgggttggacagggggtctgttagttgtccttcaggattactgtaattgctatggttccaaagggtagaccagaacctcctggctgaaaacgctttagaaacttacccttcagaataaaacttataattttcaccacatcatacgtagtctgcttacgttgctatcctcatttgccatgcatcctctcctccttcatcttattctctagcaattcatgttccttgtyacaactctaaggttcatgttttcctacctctgtccctttgttaaaaaaggtggttgtgggaggctggtaagagttaaaacctggatactcagctccaaactttccatcaaatctagtttccttcttactaattggaacatgattatgatgtacacctagttttagataccatcctaaaagtaatagacccacttgcttatacaatcattacagaaagatagatcagaa

SEQ ID NO: 891888 - DNA, 663 bp, Homo sapiens
ctcctcctccaaaggaatgcagctcctcaccagcaatggaacaaagctggacagagaatgactttgatgagttgagaaaagaaggcttctctgagctaaaggaggaaattcaaacccatggcaaagaagttaaaaaccgtgaaaaaagattagacgaatggctaactagaataaccaatgcagagaagtccttaaaggaactcatggagctgaaaaccacagcacgagaactatgtgatgaatgcacaagcttcagtagccgattcgatcaactggaagaaaggttatcagtgatggaagatcaaaccagctaacatcataatgacagtatcaaattcacacataasaatactaaccttaaatgtaaatgggctaaatgctccaattaaaagacacagactggcaaattggatagagtcaagacccatcagtgtgctgtattcagcaaacccatctcacgtgcagagacacacataggctcaaaataaagggatggaggaagatctaccaagcaaatggaaaaccaaaaaaggcagaggttgcaatcctagtctctgataaaacagactttaaacaaagatcaaaagagacaaagaaggccattacataatggtaaagagatcaattcaacaagaagaacttactatcctaaatatatatgca

SEQ ID NO: 891889 - DNA, 638 bp, Homo sapiens
gtgacttgaccagaaaacaacaacaacaaaaaaaaacagactacaaaatattgcacaagtttataataaaaaacctgcattatttccctatctaccatggcccctcttctaattagtactgaatctgagatcatcaggagaaggaactaggccagaatgcaagtgtttctggatcactaacacttcaatatgctgatggtaatcttataaatgtgaaaataaaaattgttcatcaggaaaagtcgtagaatccttgcttcattggaatatttattatattcttagattattgtacaatataatagcacccatattgccaaattatagattggtgcaaaagtaattatagttttgccatttaattgcaaaaactacattacttttgtaccaacctaatacctgtgcatatgaaaatcatgaaatcaattttccctaattctgtttgaaaaccacattgttttgttcccagtgtaacyaaaattattgtacagaggtagggtgaattaaaagggcactattgggatcagatgaacataagcagaatccaacaaatttcaataagactttgaaatatgtagagggaattattaattaatgtgctagcagaagcagtcctactctcagactctacaagaata

SEQ ID NO: 891890 - DNA, 639 bp, Homo sapiens
attttcaaaagaatacagagggaaataaatccataatggacatgaatgaaatcactaataattttttaaaaactgctgaaaaagacactgcttatggaaacaatcagacagaaccttaaggaaaatgcacactaattactagttaagtctgctgggaaaacacattctaaactgtaaggaaagacaatcagtagatataaacgcttgaacactgaaactttttctatgttgtgcttttacttacctcctcttaagataagcaatggtacatcagcacctactggaaactgctttagcacctctaccacttggagatgtgttaaattctgcacattttgatggtatatttccttaattatatctcctttctgaaggccttgacaccactgactatccagtatcattttcaccttctgtccagtagggctgtcagcaattgcaaacccaaaccctttagggccyttaatcaaagggatagtcactagttcaggctgggagctgcctgacgatgccatggatactctctgctcacttgcatctgatggtccattgagaccatcaccagtcaaagtgtgtcccgattttccattctgctccagaaccattgctcctggcttaaaatcctgaggattcatgcaa

SEQ ID NO: 891891 - DNA, 626 bp, Homo sapiens
aaggaatgctggattttgtctaatgctttttcagcatctattgagatgatcatgtgatttttgtttttaactctgtttatgtggtgcatcacatttattgacttgcatatgttaaaccatccctgcattcctggtacaaaacctatttgatcatggtggattatctttttgatatgttgttggattaagttagctagtattttgttaaggattttagcatcaatgttcatcataagtattggtctgtaattttctttttggttatggcctttcctggtttgggtattagcatgatgctggcttcataaaatgaattagagaggattccttctttttctatcttgtggaatagtgtcaaaaggattggtatcaattmtttgaatgtttggtaaaattctgctgtgaatccgcctggtcctggacttttttgtttggtaattttttaattaccattttaatcttgctgcttgttattggtctgctcaaggtatctaattcttcctgatttaagctaggagggttgtatttttccaggaatttacccatctcttctaggttttctagtttatgtgtgtaaaggtgttcatagtagccttgaatgatcttttgtatctctgtagtgtcag

SEQ ID NO: 891892 - DNA, 603 bp, Homo sapiens
accaatacgaccagtaagctgacttcttaatttatctctatgatcaacaaatgctttagagtctaaattcgcagaaaaagatccttcaacaacatctccattatcaataggtttgaatcttcaaattattgtcaacatagttagcaagccctatccatttatccattctttcattcactcatttgtttactatttatgttttacttttaaaaatacaagtaaaacaaaataacaacaaaaaattaaactaagtatctcttacgggctgggaatagaaataggcctcagggatatgtctaattcagatttcagaagcaaaactgacatttttctatgtagtgggatttggaagcatcccctgccccaaatatgtcccttttttatcctacattttcttttttattgcctacttttaraccccccaaaaacaggttgtctaccaaggaatggtaattagatttttcatcagcaaaaaacaaaaaaactaaaagctaataacataaccatgaaaatagaatgtatagaaaattatcatttacttctgaagcatatgaagaattaatcacctgcagtcaaccctatctgaaagaattattaaaacgt

SEQ ID NO: 891893 - DNA, 521 bp, Homo sapiens
gacagaatatcaaatagaaaaatggaagaaaaactttatctctttaccaaggaggatatccacatggtcaatatgcagagaaaaaatatgctcaatgtcatcacttaatagtaaaatgtaggccaggcatagtggctcattcctgtaatcccagcactttgggaggccaagacaggcgaatcacctgaactcagaagtttgagaccagcctggccaacaaggtgaaaccctgtctctaccaaaaatasaaaaattagccaggtgtggtggagggcgcctgtaatcccagctactctggaggctgaggcaggagaattgcttgaacccaagaggcagaggttgcattgagctgagatcttgccattgcactccacgctgggtgacaagaggaaaacttggtctcaaaaaaaaaaaaaaaagtaaaatgtaaactaaactgttactactattccatacccactataataccacaagaaaataacagataataccaagttttactgataatgtgaatttattgg

SEQ ID NO: 891894 - DNA, 673 bp, Homo sapiens
tactgacgtctgattccttttgttttgagaagccaagagctggtatttttttaagggtgaaagaacagtgcagggaagccattgctatttaagtgttttggttttttttctaatatatctagaaacaaacctggagtttagtagtacttctctgcttttatgagttttgccttattaaaagtagaggaacctgttatcttatgaatacagtttacacaccctcctctgtcctgcaggggtgacataggcaattgaaaaaggcacaragaagatttcttgggctttttcttttttaaagctttccacaccatgccatatatttaaataacaggctaagatagggagtgatgagtctctcaaggaaataaagacggtgcactcattacaaggctcattaagaataaagtgcaggaagggggctctgagaacagactctcatcctggtatttattaggacaaagcactctctttaatggggcacctaaaaagctttctgctacaattattattaggcattagtgcttttactaacttcttgggatcgtctttgcccttctgtctgccttggcaaacagttgacaacaacacccttgtgttccaggctcctgtggcaaattcattctcacttttcctgtctgtgctcaggagtcctatgtttccagtctgtgagggc

SEQ ID NO: 891895 - DNA, 581 bp, Homo sapiens
tggtgctaccaccaataccaacatcaccactctctcttaaatacagaaaggccttgaggcttttcaaagaaattccatatgtatcatctcattccattttcattggctatgattagtatagggcaagtagtattttaaaacttggtagatgagaaatgagacacattatatcaatagtcgtgacttagtatgtcaaaaaatttaatgagtttcagtgatctgtgtaaagagaacacagatccatgaccgagtaattcttatatagagtttttctgttttttattttgtaaacatttttctccrtttcagcactctgtccagaggaagtgtttttaatgtgtgtagtgatttctgcatgatttcagatactgtcccatatggacagaaatatgcttcagactcagcattaacatgccaaatgcatttatttgcctgtgtaaaacagattaattcaatgttagatcataatggaattaggagaaaaagagtccttattgaaaaccagccaaaacatctcatttatagcagagaatttggtacagatttattagaaattctgcatataggcaactcattttgaa

SEQ ID NO: 891896 - DNA, 583 bp, Homo sapiens
actcttagcggactcactctgcaagcgtgacaaaccaggcttcatctcagattaaattagggtaattgtctctattctgctttccagttcggcctgttttgaacagaaggttgatgctagttcttgaggcatcttccaaatagtattcttttattaggtcatttgaattaattagagaaagtaaaaataaaaccttatcagcytgagcaaagaggaatgaagcacactcccagaatgtggtgagcccagaaaattaaagttggccttgggagaagagatctctgtgggacaataatgacatcatcctggcgccatattgccactgtccaggaaagagaaatttacctccaggccagttgcgcatttccatcccctccccattcctccccacaaagtctctcccactagactccctaccactgggacccaaaatagttactttatattccatgggtggttgtttttcttccatgaaatgagcctctcaccctagattttgaggcattatcttaagattttcctttatccatctcccatcgagatccaaagtgaccagaatatgcagaaataataagatccttag

SEQ ID NO: 891897 - DNA, 600 bp, Homo sapiens
aaacatgaatgtggtatgtgactaaattttaacttggcttcaatattatttaaaatctgaattaaaatatcagaacattactatcataatacaaattaattaaaatgaagatggccaagaagctgaataattgccaagagagtgaaaaacaaaaaaaggttctgggaataaaggcattattgatcttgtgttcattttttcatcaaatattcccccattcaatctgatttgtctattgaaaatgctttctattaggttggtgcaaagggaattgcagtttttgacattaaaattaatgtcaaatagaaggtgaagggtgcatttcaccaacaaatccaaaggtcctttatctgtccctgttgtctctgacccttcatcattaarcattattaaacaccccttgtcttcatgactcaggataaagtttctgaaggtagatgacttatcttatttttctttgtattcccagtacttatagaaatacttgacacatagtaagtgcttaagatgactaagtgatcttccccttgcctcctggattgaatcatcctctcctcaggtcctggcaatttctggtgttcctaatgcacacctcaggtt

SEQ ID NO: 891898 - DNA, 609 bp, Homo sapiens
tgaaaaaattgtttattctcatattgggtggagtgttctataaatgttgattgatgcctgtgggttgatggtactcttaagttttaagtcgttgatgattttacatctagatgtgttaccagttgttgagagaggggtgttgaagtctttagctattctgaatttatgtatttcctcawtcagttttattagtttttgcttcaaatacttttcagctttgttgtttgatacatacacattcagaagaagatgccttcttggtgaattgacatttttgtcattacatgaagtgcttctctgtctctgataattttctttgttctacttatttgatatgcatatatatacttctggtttattataaccaaggtgtgtgtgtgcttgtgtgtgtatgtttgcatgtgtgtgtgtgtgaatctccatcattttactttcaatctatctatataataacatttgaaatacatttattgtagaaagtatatagttgcatctctctcttttatttagtcatgctgccaatttctgctttttaattgctgtaaataaggccacttacatttaatggaattatgcatatgttagggcttgattctataattttgttta

SEQ ID NO: 891899 - DNA, 562 bp, Homo sapiens
acattattttgcaagtcctcaagtccctagatggtctgccttctttactccacctttcatagtcttcttatgttttatataaaatgttcagggttttagttgcatttactaggaaaactagggaaaaatatgtctactacatctttctggagccacaattccagcctctctgatttcacagcagaaagtcataaaacagtgtttctacattgcaaattaaggaagctactctgtttctacaataatctatatacaaacttctgtgagagatcctttattccctttgccattataagtacttttgtattggtcattggcttagcaaagtaaaagagtaaatgccatgcctttttaatatggaagtttttctctacaattttctggaaatatgtgatggtgaaaagattgtgcytaccattaagctgcaattttatttaaatcaagaaagaaagtggctttctcctaccttggcctctgcctactaaaaaagtacagcaaactatttctttaaaaaaataaatctggaattaagaatttaatgtaattatctattaatttaaga

SEQ ID NO: 891900 - DNA, 595 bp, Homo sapiens
tacttttattatcttttaccctccgaaactaaaaagggaatttctcatctcttctcaggcataatatgttacacccttgcagcttcagacttcatctcagaaagattatcatatatttttcaaacacatacagagctttcaatgaataagatttttttctacctttgtaattattattattattacaggaatgataacatcactatttattgagtacatatcttatgccaagtactttataaatattgttctatttaatactcacaaaagtcctargacaaagatattttatctctacattacctattagaaaattgtgggtccaaaaggttaggtaaatgacttgcccaaggtcacaaagctgtggagttttaaagcctcattgtacttcaggatgtactggtggtgctttctacatcaggatatactgcttctcagtcttagggagagagtcaaatggtaagagaataaacaaggacaaaggaagtgctaaaattctaccaaaggagcgggtaggttgaatttctaggcaggacaagttttctaaaaatcttttttgttgaattcttaggtcagcatgatttatctctgctgt

SEQ ID NO: 891901 - DNA, 595 bp, Homo sapiens
tacttttattatcttttaccctccgaaactaaaaagggaatttctcatctcttctcaggcataatatgttacacccttgcagcttcagacttcatctcagaaagattatcatatatttttcaaacacatacagagctttcaatgaataagatttttttctacctttgtaattattattattattacaggaatgataacatcactatttattgagtacatatcttatgccaagtactttataaatattgttctatttaatactcacaaaagtcctaggacaaagatattttatctctacattacctattagaaaattgtgggtccaaaaggttaggtaaatgacttgcccaaggtcacaaagctgtggagttttaaagcctcattgtacttcargatgtactggtggtgctttctacatcaggatatactgcttctcagtcttagggagagagtcaaatggtaagagaataaacaaggacaaaggaagtgctaaaattctaccaaaggagcgggtaggttgaatttctaggcaggacaagttttctaaaaatcttttttgttgaattcttaggtcagcatgatttatctctgctgt

SEQ ID NO: 891902 - DNA, 595 bp, Homo sapiens
tacttttattatcttttaccctccgaaactaaaaagggaatttctcatctcttctcaggcataatatgttacacccttgcagcttcagacttcatctcagaaagattatcatatatttttcaaacacatacagagctttcaatgaataagatttttttctacctttgtaattattattattattacaggaatgataacatcactatttattgagtacatatcttatgccaagtactttataaatattgttctatttaatactcacaaaagtcctaggacaaagatattttatctctacattacctattagaaaattgtgggtccaaaaggttaggtaaatgacttgcccaaggtcacaaagctgtggagttttaaagcctcattgtacttcaggatgtactggtggtgctttctacatcargatatactgcttctcagtcttagggagagagtcaaatggtaagagaataaacaaggacaaaggaagtgctaaaattctaccaaaggagcgggtaggttgaatttctaggcaggacaagttttctaaaaatcttttttgttgaattcttaggtcagcatgatttatctctgctgt

SEQ ID NO: 891903 - DNA, 543 bp, Homo sapiens
taaagggcagttcctttgcacatgctttcttgcctgctgccatgtaagacatgcctttgctcctcctttgctgtatgctgtgattgtgaggccttcccagccatgtggaaccatgagtccactaaacctctgttttttggaaattacccagtcttaggtattttcttcatagcagtatgaaaattgaccaatacaagtactcgccaagaagatactactaacacgccaatccctgtgcaaggcaggacaaggcaggtggttagggaccaaagtgaagggcacttgaggtctagctaagacctggagtgtaaggtcgartaagttctatgactcttgttaaggtttgtgaccaacacaaagtgccctaatagacacagtaaggatcccaatacaaacccagtcatgcaggatcatcagggggtagcagcagtgtgcatctattcagctaggattcagaatggaaacacatccctgtgaagatacctcggcacctagaaatctgccagaataaaatctggaaactaaaaacctccaggcataaca

SEQ ID NO: 891904 - DNA, 646 bp, Homo sapiens
acaaacaaatggaaaaactttccatgctcatggataggaagaatcaatattgtgaaaatggccatactgcccaaagtaatttataaattcagtggtatcccgatcaagccaccattgactttcttcacagaattagaaaaaactactgtaaatttcatacgaaacaaaaaaaagagcccgtatagccaagacaatcataagtaaaaagaacaaagctggaggcatcatgctacctgacttcaaactatactacaaggctacagtaatcaaaacagcatgatactggtaccaaaacagatatatagaccaatggaacagaaaataggcctcagaaatagtgccacacatctacagccatctgatcttygaaaaacatgacaaaaacaagcaatggggaaaaaattttctatttaataaatggtattgggaaaactggtgagccatatgcaggaaactgaaaatagaccccttccttacaccttatacaaaaattaactcaagatggattaaagacttaaatataaaacctaaaaccataaaaaccctagaagaaaacctaggcaatacccctcaggacataggcatgggcaaagacttgatgactaaaacacccagagcaatggcaacaaaagacaaaattgacaaa

SEQ ID NO: 891905 - DNA, 647 bp, Homo sapiens
aaaactctttagtttaattaggtcccagctatgtatcttcatttttattgcattcgttttggggttttttggtcatgaaatccttgcctaagccaatgtctagaagggtttttccaatgttatcttctagaatttttagagtttcaggtcttaggtttaagtccttaatccatcttgagttgatttttgtatatggagagagatgaggatccagtttctttctcctacttgtggctagctaattatcccagcaccattttttgagaatggtgtcctttccccacttgatgttttygtttgctttgtcaaagatcagttggctataagtatttgggttcatttctgggttctctattctgttgcattcatctatgtgcctatgtttatagcagtgccacactgttttggtgactattgccttatagtacagtttgaaatcaggtagtgtgatgtctccagatttgttctttttgcttagtcttgctttagttatacaggttcttttttggttccatatgatttttagaattgtttttttctaattctgtgaagagtgatggtggtattttgatggggattgcattgaatttgtagattgctttcagtagtatggtcattttcacaatattgattctacccatccatga

SEQ ID NO: 891906 - DNA, 647 bp, Homo sapiens
aaaactctttagtttaattaggtcccagctatgtatcttcatttttattgcattcgttttggggttttttggtcatgaaatccttgcctaagccaatgtctagaagggtttttccaatgttatcttctagaatttttagagtttcaggtcttaggtttaagtccttaatccatcttgagttgatttttgtatatggagagagatgaggatccagtttctttctcctacttgtggctagctaattatcccagcaccattttttgagaatggtgtcctttccccacttgatgttttcgtttgctttgtcaaagatcagttggctataagtatttgggttcatttctgggttctctattctgttgcattcatctatgtgcctatgtttatagcagtgccacactgttttggtgactattgccttatagtayagtttgaaatcaggtagtgtgatgtctccagatttgttctttttgcttagtcttgctttagttatacaggttcttttttggttccatatgatttttagaattgtttttttctaattctgtgaagagtgatggtggtattttgatggggattgcattgaatttgtagattgctttcagtagtatggtcattttcacaatattgattctacccatccatga

SEQ ID NO: 891907 - DNA, 456 bp, Homo sapiens
cagtggtatgtgcctatagtcccagctacttggggggttgaggctggaggatcaatggagcccaggatacagaggttgcagtgagctgagatcatactactgcactccagtttggacaatagagtgagaccctttctaaaaaaaaaaaaaaaaaaaagttgtgaacaaaaaaaaacttatttttttggttcttttaagatcttcttgtctttggtattcttcactttgactatgatgtatctatagatrtgatgtatctatgaagtatgtatggatttctttctgtttatcctgtttgagatcattggaattcctgaatctgaggattcatgttttttaataatcatggaaaactctcaggtactgtctctttgaatattgcctctctccctttttacttataattttcaaaactctgcttagatgtatattaaatattttttattccatccttta

SEQ ID NO: 891908 - DNA, 657 bp, Homo sapiens
aatgtaatgatggaagcaagatttaagtgatgcagtgtgaggaaacaatctcccatctctggcttgaatatggaaggggaccatgagctaaaaaattccagcagcccctagaagccagaaaagcaagaaaatggagtctccacccagagaccccagaaataaatatagccctgcctacaccttgattatagcctagycagtgcctagttcagacaatctctgaccttcaaaactgtagaaatataaatttgttgttttaaaccactaagattttggaaatttgttacagcaaccatagtagaaaactgctaaagctaccaaataggggttaaaaatcaactcactcaaagatggacagctggctttttgcagagtacattcaattcattagtcagaatcaacaactccatactataattttaaggcagtagtcaatacatcacggctaatgatatttgcaattccacatcaccaatgatagcagtgatagaaatgttgcctcagaatcacagggaaacaatcacattattccctattaaatggggcctgctaaactaatgcaaggataagaaaagaagcatttttgccataggggctggaaatcttgtctcaacccagctagagatacctatttgccaagaaactccctgaggtttg

SEQ ID NO: 891909 - DNA, 554 bp, Homo sapiens
aaagagatttatgaaatcctagaaaaattattaaaagtgttgatattaaaaacctcagtgagagacaagagaacctcataaacagcacaaaaaaatcagaaaaacaattcagtatattaatgagaaatttatcaaagagatattattaaaaaaagaaacaaacagaaatcctggaactgaagaattcactgaatgaaaaaaaaatacattytaaagcttcaacaatagactagatcaagcagaagaaaaaatttcaggacttgacgacaggtcttttgaaatcacccagtcagtcaaattttttttaaagaaataatttttaaaaatgaacaaaacctacatgacataaaggagaccacaaattgaccaaatacttgaccttcagtgttccaaaaggtgaatagaagaacaaagggggtagaaaacctattgaacaaaataatagctgaaaacatctcaagtctagcaggagatttagacatccagacacaggaagctcagagatctccaaatacatatcgtctaaaaaggtcttatccactgtgtattatagt

SEQ ID NO: 891910 - DNA, 653 bp, Homo sapiens
ggaagctcagagatctccaaatacatatcgtctaaaaaggtcttatccactgtgtattatagtcaaattgccaaaagtcaaagacaaagagataattttaaaaacagcaagagaaaagcatctagccacttataagggaacccctaacagactaacagttggtttctcagcagaaacttaacaggccagaagagaatgggatgacatcttcaaagygcttaaaggaaaaaaaaaaaataactgccagccaaggatactatacccagcaaagttaacattcataaacaaaagataaagtctttcccagacaagccaaagctgagggaattcatcagcataagaccaatcctacaagaaatgtttaaggtagtcctacacctggaagcaaaaggacactatctactatcacaaaaagacacaaaagtataaaaccactggtagagcaaacagacaaacaaggacaaaaaaggactcaaatgttatgactacggaaaaccaccaaaccataatgaataaacaataagacagaaagaaagacacaaaagatatacaaacaacaagaaaccaagtaaaatgataggaataagccctcacatattaataataatcttgaatgtaaacaaatgaggcattccacttaaaagatatagatg

SEQ ID NO: 891911 - DNA, 616 bp, Homo sapiens
atgcaaaactccttaactacatactagcaaatcaaatccaacagcacatgaaaaagataatacaccatgatcaaatgggatctatcccagggatgcaaggatggttcaacatatacaaaacaataaacacaatacatcaaatcaacagaatgacggacaacaataatatgataatctcaataggcacaggaaaaatatttgataaaattcaacagccctttatgataacagcactcagaaactgggcatagaaggaacataactcaacatactraagaccgtatgtaaacataataaagagcacaggtaatgatatggggaaaagctggaagcctttcctctgagaactggagcaagaaaaggatgcccactttcaccactcaccacttggctaggtctttctgtacctagccaaagcaatcaggcaagagaaagaaataaaaggcattcacattggaaaagaggaagtcaaactatccacctctgcagacaacatgatcttgtatctagaaaaacctaaagacttcaccaaaaactcttagtaaagttacagaacacaaaatcaacacacacaaatcagtagtatttctacacataaataatcaactagctgaga

SEQ ID NO: 891912 - DNA, 668 bp, Homo sapiens
gttcccttatttaaagggtaatatcaggaaatcactatttttttaatttctagattaaacccagggagacctgagagctgctcttagttctctacccccagcaggtggactggctcatctgatgctagaatagcaggtagaacacctgaaaagaaacaatcatggattgaaaatcttggcctctctgaaatgcaacccaccacagtgtatttgcatgcttaaagaggccacactgttcagtggaaagagcaggggatttaaagaaatccctggtgtaaatactttctgctagttttgtaattttagacaagttatttaaattctctgtttcaaagtatccacactggtaagatacaaaaaatatgatcaacagccttctccasaggtgggtttttaaggtcagaaggtcactctgtggctggaatgggaatccttttcaagtgtgagctaagtgcacatctgaaaccccagccctggcacccggcatcagttagtgtttgttgagtgactgaccgaatgactgaaagatgctaaaacacccactgcagaacctggctggtaggcggaggcgtggctgttgagaaaagaggaagccagagaaggcatctagctccctttctttggggtatggccttaacacgagactaagcctctttctttttccccat

SEQ ID NO: 891913 - DNA, 668 bp, Homo sapiens
gttcccttatttaaagggtaatatcaggaaatcactatttttttaatttctagattaaacccagggagacctgagagctgctcttagttctctacccccagcaggtggactggctcatctgatgctagaatagcaggtagaacacctgaaaagaaacaatcatggattgaaaatcttggcctctctgaaatgcaacccaccacagtgtatttgcatgcttaaagaggccacactgttcagtggaaagagcaggggatttaaagaaatccctggtgtaaatactttctgctagttttgtaattttagacaagttatttaaattctctgtttcaaagtatccacactggtaagatacaaaaaatatgatcaacagccttctccagaggtgggtttttaaggtcagaaggtcactctgtggctggaatgggaatccttttcaagtgtgagctaagtgcacatctgaaaccccagccctggcacccggcatcagttagtgtttgttgagtgaytgaccgaatgactgaaagatgctaaaacacccactgcagaacctggctggtaggcggaggcgtggctgttgagaaaagaggaagccagagaaggcatctagctccctttctttggggtatggccttaacacgagactaagcctctttctttttccccat

SEQ ID NO: 891914 - DNA, 694 bp, Homo sapiens
caggggagctgctgatatttcataggagattaaggatccagttttaggtgttatggatacctaagccttttagttaaagaaatacacccttaatggcaggcttttaggtagtctaactccaattcctggcagaactctctattaaatttgaatgcctacatttatttaatttcagtttcaaatctgcttgggcacagaaagtgagattctatttctatttaaggcctcttccaccctggttctatatatacaatgagctcttagttttagggggtaattttactttgaagctctatgatattacagttttctccacttcccagacagctcttagtattaggtgtaattatatattctatattttggggacaatcatcaataaggttaaagtcactctcttccaaaaacaagttwctgggtggtggagttgagagtggggctgactttaccctccactggggtgattcgacacaaggaacctgttgccttggcctggcactatctgtggatctgaaaatccaatacaagacatttcctggcactttaccaaggatgcctgttaccttttggacagaagaaatttgaaaaatcatcccataaggggtagaaaggaatgacataaatggtcctattaaagggaagtcactatctgagacgactgcagaaaaactacatgcaatcgctgcagagatta

SEQ ID NO: 891915 - DNA, 621 bp, Homo sapiens
aaaagtgggcaacacaggaaaaagtgagaaagatctaaaatcgacaccctaagatcacaattaaaagaactagagaagcaagagcaaacaaattcaaaagatagcggaagacaagaagtagctaaggtcagagcagaactgaaggagatagagacacgaaaaacccttccaaaaatcattgaatccaggagctgtttttatgaaaagtttaacaaaatagacaactagccagaataataaagaagaaaacagaggagaatcaaatagacacaataaaaaatgataaaggggatatcaccaccaatcccacagaaatrcaaactaccatcagggaatactataaacacctctatgcaaataaactagaaaatctagaagaaatggataaattcctggacacatacacgctcccaagactaaatcaggaagaagctgaatccctgtatagaccaataacatgttctgaaattgaggcagtaattaatagcctaccaaccaaaaaaaacccaggaccagacagattcatagccgaattctaccagaggtacaaagaggagctgatgccattccttctgaaattattcaaacaatagaaaaagagagattcctccctaactcatt

SEQ ID NO: 891916 - DNA, 625 bp, Homo sapiens
gccccataagtccccaggctatgccagaaactcaaaccctctctccctgcagatttgctgcagagcagcctcagctcagcaggctccacgcctacctaacctgaggtgctgggtctgcgccatggtgaagcggatggcgttcttatgaagcttaagggcttatgaagtggattttgcctgcgacacattccccatgttttggcgtcagaggctggcctggtgatgttgcctgtgggctgtgagctcagggcctcctgctgccctgatgccctcatgcctttcccatttacctctcagtccaccaggtatttccaccgtgggggtctcttctgtcagaaacatagatcaccacctttgacaaaaaggcaaagacagtgaagragaggaagggagagtggaattcactctgctttccagccacgggccaggtacttaatcaacacatacacggaattaaccactatcatcccctctttacagactaggaggctgaggcttagcaggttaaatttcttaccagggtcacataaccagcgaatggaagagctgaagtgagaatgtgggtctctgcggctctttccacatggcccattgtgcctttggataatttaattcatgacagcac

SEQ ID NO: 891917 - DNA, 487 bp, Homo sapiens
ggttttataaagggattttccccattttgctagacccttccccttcctgccatcatatgaagaaggacgtgtttgcttccccttccaccatgattgtaagtttcttgaggcctcctcagccatgcagaactgtgagtcaattaaacctctttcttttataaattacccagtctcaggcagtcctttwtagcagcacgagaatggactaatacagtaaattgataccaggtagtggggtgctgctataaacatacttgaaaatgtggaggtgactttagagctgggtaacaggcagagggtggaagagtttggaggactcagaagaagataagaagatgtgggaaagtttggaaattcccagagacttgttgaatggctttgaccaaaatgctgatagtgatatggacaatgaagtccagattgaggtggtctcagatggagatgagaaatttattgggaacttgaacaaaagtaattcttgctatcc

SEQ ID NO: 891918 - DNA, 638 bp, Homo sapiens
gttcttcatctctgtctgagaccacgtcagcctgaacttcattgtgcatatcactagcagcattttggtcaaaaccattcaacgagtctctaggaagttacaaactttcccacatctgcctgtcttctgtcttcttctgagccttttaaactgttccaacctctgcttgttacccagttccaaaatcacttccacattttcaggctatcttcatagcagtaccccactgtcccggtatcaattttcagtattagtctgtttacactgctagatagaactacctaagactgggtaatttataaagaaaagaagtttagttgactcacagttctgcatggctggcgaggcctcaggaaacttacaatcatggtggaaggcaaaggaaaatcaacacatgtcttacataggggtaggagagagagagagagagctaagggaagtgcacatttttaaaccattagatcttatgagaactcaytcactatgagaatggcatgggggaaactgcctcagtgatccaatttcctcccaccaggttcctccctcaatacatgtaggtcacaatttgagatgagatttgggcagggacatagagccaaaccataacactataattcctagagcaatcacttgaaaag

SEQ ID NO: 891919 - DNA, 602 bp, Homo sapiens
tacattatttagtatttgtttgtattacccatcattatgccaggtaatttaattatcatctggaagatgatagtatatttacatagagaaggtatgtaaattgaaaaccaattaagatatctgtactgtcatataaaagtcttacactacttagcttcttttaatggactctcatgcataatatacacactcacaagtggaaactaatgtagtaatcttgatggagttttcttgctgtatttgctggactttacatcgtcyatttgattagttcacaatttacatacctacatatggctttctgtacttaaagcagtattgcttaatatttgaagactatttttaatctcaagaatatattttaaagttgtaagttattggtgcacaagcattgtgtgccatattattgtttttgttgtttaaacacagcttttaaccaatgtaacaagaaactctttgaggccgggtgcggtggctcacgcctgcaatcccagcactttgggaggctgagaagggcgtatcacctgaggtcaggagtttgagaccagactggccaatatggcgaaaccccatctctactaaaaataaaaaaattagccggc

SEQ ID NO: 891920 - DNA, 633 bp, Homo sapiens
gttagtggaaattacacaaggtgaagagcaaagaaaaaaagaatgataaaaagtgaggatggtttcagagacttatggaaatgatcaggcataacaggatatgtactactgttgtacccagaaaaagaagagagagactttttcaaaaaaaattatgatggaaaaattcccaagcctgggaaaggaacaaaaatctaaatagtgtaagcataaaggacaccaaatatgattccacagatatacacactgatacacatcataaattgccaaaagctattaaagatgagttttgaaaacaataaggaaaattgttacctatatgctacatatgtgtattgctacatataagggaacctctgtaagattatcaacagayttttcagcagaaatcttgcatagcccaaatgagtgggatgatacaatcaaatcctgaaagaaaaaaaaattgccaaacaagaatactatattcagcaacatttgaaaataaacaggtaatacagactttctcagacaaacaaaagctgagagagtgtatcacctacagaacttccttacaagaaatgctggtatttgatagtacaacaagggtactatggtcaataataatttaattgtccattttaaaatagctaa

SEQ ID NO: 891921 - DNA, 652 bp, Homo sapiens
gattagaagaatgaatattgttaaaatggccatactatagaaagcaatttatatattctgtgctattcctatcaaaccaccaacctcattcttggctgaattagaaaaaaaactattctaaaatacatatgcaaccaaaaaagagcctgaatagccaaagaacaaagcaaaagaacaaagctggaggcatcacactacccaacttcaaactatagaatagggctacagtaaccaaagcagcataacactggtacaaaaacagacatgtagatcaatagaacagaatagaaaactcagaaataaagccacacatctacaaccaactgatcttcaacaaggcaaactaaaacaagtaattaggaaaatggtgttgggataactggctagccacatgcaaaagaaakaaactggacccttatttttcattatatataaaaattaaatcaagatgaattaacttaaatgtaagatgaattaacttaaaaatagataaatgaaataaaataattgtaaaatgtaatttcacaatttgaatttaaaaatcctagaagacaatctacaaaataccattcccaacattggtggccttggcaaagaattgttggctaagtacccaaaagtaattgcaacaaaaacaaaaattgacaagtgg

SEQ ID NO: 891922 - DNA, 627 bp, Homo sapiens
ctgattagatcataggtatgaaattcccccttgctcttctcattataatgagtgagttctcatgaaatctgatggtttaaaagtgtgtggcacttccctcttagcattctcattatcctgctgccatgtgaacaaagtgctagcttacccttcaycttccaacatgattgtaagtttcctgaggactcccagtcatgcttcctgttaattctgtggaactgtgagtcaattaaacctcttttcttcctaaattatccagtttcaggtaactctttatagtagtgtgagaatggactaatacagaaaattggcattacaagaatggggcactgctataaagatacctgaagatgtggaagggactttggaactgagtattgggcagagcttggaagagtttggagggctcagaagaagacagaaagatatgggagagtttggaacttcctagagacttgttgaatggttttgaccaaaatgctgatagtgatatggacaacgaagtctagggagaggtgatctcagatagagatgaggaacttattgggaaatggagtaaaggtcactcttcctatgctttagcaaagagatgggtggcattttatccctgccctagagatctgtgga

SEQ ID NO: 891923 - DNA, 694 bp, Homo sapiens
acctggatattccttttgaaaaccggtacaagataaggatgccctctctctccattcctattcaacatagttttggaagttctggccagggcaatcagccaaaagaaagaaataaagcttattcaaataggaagacaggaagtcaaattgtctctgtttgcagatgacatgattctatatttagaaaaccccatcatgtcagcccaaaaactccttaaactgataagtaacttcagcaaagtctcaggatacaaaaccaatatgcaaaaatcacaarcattcctatacaccaacaatagaaaagcagagagccaaatcataaatgaactcccattcacaattgctacaacgagaataaaatacctaggaatacagctaacaagggatgtgaaggacctcttcaaggagaactacaaaccactgctcaaggaaataagagaggacacaaacaaatggaaaaacattccatcctcgtggataggaagaatcaatattgtaaaaatggccatactgaccaaagtaatttatagattcaatgctattcccatcaaactaccattgacattcttcacagaattagaaaataataatttaaatttcataaggaaccaaagaagagcctgtatagccaagacaattctaagcaaaaagaacaaaactggaggcatcacactacctgacttcaaactatact

SEQ ID NO: 891924 - DNA, 644 bp, Homo sapiens
cttggtttacaactttgcgctgtgatgcatgattagagatgattttcttgtctcatggacaataggaatcagaaaatgaaacaggagtttggagttctttatgaactcactgcttccaaaataattgtcaagacatttgtgtcctgaataatttggggtttatttcgaactgcatttattagcattttgtgaagtagttacatactttcagttcatatccatagatccttatctttacatattgatttctgactcacttggtctgtgtacatgccacactctcatatccaccactgccctgtcacatacaaaatgtagacaacattacttaacaatgaaatctgaatttcttattcatagaaacatagtggctcccacaattttttatcaattgaattagtaaaaacatccctatccttcatattctcactattaaggtatttataatcctagaatcccacttcaaaaaatagttctcattgccttcatttatatgaatggttcagrtataatagtgtatctaagggcacatcagcaactcgaacacatattttggcttttttctgacaaaggaagacccagcccctgagaggaaacctcctccccagcctcctgtgcacctgctctggggctggaacccataa

SEQ ID NO: 891925 - DNA, 591 bp, Homo sapiens
cacattttgattatgtttcatgcaatttattcatgcaatgcccctaaagatggagggtaatgccagaatactgtcttagattttttagtgaaattaatcttgataaatataatcaagatgtcatgagaagttattttcttatattttggaattttaaaaaattttattaataaggactgcttttgacttttttcactgatatgtaatagttgtacatatttataagatacatgtgatattttcttcttcatttttctctttgacattcatattcttctttaaaatcattatttcaccatggttgtatgccctgccagtcaytggaaatacaaagggaaaacaaatatatctgaatccaagcttaacacttcattcattattatctacttccattctctatcttttcacctactactagctgacctttaaaaaaaaaaaaaactttcctggtgtcactttaaattcacaagtaaggtccagagttcagctaagctttgatgataggggagagatttcaacagaaagggtagaatcactcacaacaatatacttaaagtgaatgagtaacaatttttccaggtttctaatatt

SEQ ID NO: 891926 - DNA, 613 bp, Homo sapiens
tttcttttctgggttctctgttctgttccattacctatgtgtctatttttatgccatttccatgctgttttggttattgtagtcgtgtagtataatttgaagtcaagtaatgtgatgcttccagctctgttatttttcttaaaattgcttgggccattcgagctyttttttttgtttaatatgaattttagggtttgagtacattgaagctttttgatgtgctgctgggcttgatttgctagtatttttttttttttttttgagatggaatctcaccgtgttgcccaggctggagtgcagtggcatgatcttggctcactgcaaactctgtctcctgggttcaagcaattctcctgcctcagcctcccgagtagctgggattacaggtgcctgccacaacacccagctagtttttgtatctttagcagaaatggggttttgccatattagccaggctggtctcaaactcctggcctcaagtgatccacccatctgagcctccccaagtgctgatattacaggtgagagttaccatgcccagcctctttaaaccattttaaataaatttttttgctggcaatttttttaaatttccatagttttgggggtacag

SEQ ID NO: 891927 - DNA, 594 bp, Homo sapiens
accaccttagttcaagcctgcttcctccctctgatggatcctggcaacagcattctgtctgagtttcctgtgtttgctctggctcttgcctcttcaaaccatttctgcatggcagcactaatgatttttgtaaagtgaaaatttgatcaggtcacttctctgcttaagttcctagtaagccatgagcttcccawtaacttcaggacaaagtgcaaatgtgagcatgtcagtaacatcccttcttgatctggcctttgtatatatttctagctccaacttttgctccttccctgaccccaggcaacactaaccctactgaactatgtgaattcattgtgatttctttggccttaggaccatctgatttgctgttctgcctgaaccagattttcctggtccttccagtctagataaaataccctttcttcagcactctcctcagatgtcacttcctccaggaagctttccatgatctcttaatgcctgattagataccactcccacctctataccaattgttctcaatgcaccctgtacctgtactccttgtctttttagttgtatctttgtttccctcagactgaaagtttcctt

SEQ ID NO: 891928 - DNA, 590 bp, Homo sapiens
ttgaagtttagggacacctgcctgtcagaggcatttgaacaagagcaactccatcttgaatgggggctgggtaaaatgagcctgagacctgctgggccgcattcccaggaggttaggcattcttagttacaggatgagataggaggctggcacaaaatacaggtcccaaagagcttgctgataaaacagactgttttaaagaagccggagctaggcgcggtggctcatgcctgtaatcccagcactttgggaggccgaggcaggtggatcacttgaggccaggagttagagaccaccctggccaaaatagtgaaccccgtctctaatacaaaaattagccaggtgcagtgatggatgcctgtggtcccagctactcgggaggctgaggcaggagaatctcttgaacccaggagkcagaggctgcagtgagccgagacctgggcaacagagcaagacatcgtctcaaaaaaaataataaaataaagaagtaaataaagaagctgggaaacccaccaaaaccaagatggcgatgagagtgacctctggtcatcctcacagctcattacatgctaattataatgcattaacat

SEQ ID NO: 891929 - DNA, 581 bp, Homo sapiens
aaattcaaaaattagccaggcatggtggtgtatgccagtagtcccagctactcaggagcctaaggcaggagaatcgcttgaactcaggaggcagaggttgcagtgagccgagatcacaccactgcactgcaacctgggtgacagagccaaactccatctccagaaaaaaaaaattattttttaatggtataaatatacataacataaaatttaccactttaacaattttaagtggcatcaagtacattgatattgttgtgcaaccatcaccatcatytatttccataactttttcatcttcccaatccaaaactccatacctgttaaaaaaaactccccattttctcctctcccagccccaacaaccaccattctacttctatctctttgaattttactactctaggtacttcatgtaagtagaatcatatagtttttatctttttgtgtctggcttatttcactccagtttcatctatgttgtaacatgtatcagaatttccttcctttttaaggctgaataatatgccattgtatgcatagaccatattttgtttatccattcctctgttgatggacac

SEQ ID NO: 891930 - DNA, 613 bp, Homo sapiens
gctggaatcaggtgggcagcaggtgatcccactagtggcaacttggtgttctgcgatgtggcacatccacttcttaaatgcagattattgcactgtaataaaaatcctccatattcagtgctttcattgtgtataattatgtaaactgtagacaaaaaatattcctgaatttgtgtgtgtgtgtgtgtgtgtgtgtgtgtgtgtgcggatgcgcaatccgagatggttgttaaagctcgaaagcgagtttagcttctagagtcgcccctcctccgaggcccagccgaggtggactcgcaccgtcgcaagaccggccaggcggtggcaatgaataaaaagccagtcttggtgctagggacccaggtgttctccgtcccgcccctgcctggcagmcccgcccctcccccgccccgggccacgccccaccctggcccagcccccaaaagtaccgtttgcatctcccgtgagcctcttcgactgtcactctttggaaaaaaaagtgacgtctgcactgaggtggccgctaaagtgcgaatcacgacgggcggtggccgttgggtcccggcgggaggcggggtttccgctcctggggcgcacgtcagtcaggaggcgg

SEQ ID NO: 891931 - DNA, 558 bp, Homo sapiens
ctacaaccttccttccccagccagccctttgtctctgaccacagctatccccctggcttcccctccccctgcctgctgaccttgcctaccttagttgaacccaccgcacagcctcgaattgcagataaaattccttctcttttcttccccctcatcgtggccaggaaagctgaggaaggagtgtgtgtgagcaagactctgttcgtgtgcatgtacatgcttgtgtccagcaggggtgaagacaggtccaggcggggtaggggctgtgcctctgtgggtctgctgggaagaggcattgcaaatatatagaggatgtgtgatttcatgtttgtggggctrcacagggcctgggccactaaacatgagcaaaatttgtagcatgaatgtgtgtgtgcacaatgcatgtgtctgtgcacatacaaatcccttgtggcagaaaaagctgctagctcttgtcagagaggcagtacattagagtggtcaaaagcatggactttgggacagactgccatttactagccatgtggccttgaacaaatttctttctgggcctcagtt

SEQ ID NO: 891932 - DNA, 626 bp, Homo sapiens
ggagaagagtaggcattcaaagccattttaccaaccacctattatatgctttcaatatagcaggtattaatctagaccctagaaccccgatctgatttaaggaacgagaaaccttaaaatagggatctgtggagaaatcctagtttcagatgttagtggaagttaactattaacccaagatatttggaacaagttgatgactacattaagcagatagcttccacccagacccattggaataattagtctattaatggttagcaacatttttctataaagaaacaggtaataaatattttaggctttcagtcytttaagtctctaccaaaactattcaactcttgcaatgtagtgcaaaagcagccataaactatacataaacaaaatgagcatggctgtataccaataaaactttatttataaacgcagttaataagccagatttgtcctacaagctgtaatttgccaaccgttggcccagatactttaaagtactgatttctaaactctcatgtaaatggtttcgtctgttttccttttagtcataatgtttctctttgctattttaacttatatgcttctaccttagtccataatgccttcttatgaataattcttgcttaagt

SEQ ID NO: 891933 - DNA, 553 bp, Homo sapiens
acaacaccttcaactgaaatatccaggtactcactttgggactaatcaaggaaacaacttggcccacagagaatgaagaaaagcaagacaggacaatagcccactggggagcaatacagagccagaggaacctccccagaccagggaagcagtgagtgaaggtgcaaccctggaaaaccatgcttctcccatggatctttgaaatgcttgggtcaagagatgcccttgcraacttactccaccaggccttcagtctgacagagctatgtggaaactcagcagagcggccactcaggcattcttggagaccctggagacttaaatactcgggctttccagcaaaaaagctgcatctccggccacatggaagattagactcctgtacatacccctaggaaagaggttgaatccagagggctgagcagcgacagcctgcaagcctcactgccattgcacatcacaagataagacccactggcttggaattccaggcagcaaatgataggggcattgcatctcccagggggagaagtgggtcaccatctttgctgtt

SEQ ID NO: 891934 - DNA, 553 bp, Homo sapiens
acaacaccttcaactgaaatatccaggtactcactttgggactaatcaaggaaacaacttggcccacagagaatgaagaaaagcaagacaggacaatagcccactggggagcaatacagagccagaggaacctccccagaccagggaagcagtgagtgaaggtgcaaccctggaaaaccatgcttctcccatggatctttgaaatgcttgggtcaagagatgcccttgcaaacttactccaccaggccttcagtctgacagagctatgtggaaactcagcagagcggccactcaggcattcttggagaccctggagacttaaatactcgggctttccagcaaaaaagctgcatctccggccacrtggaagattagactcctgtacatacccctaggaaagaggttgaatccagagggctgagcagcgacagcctgcaagcctcactgccattgcacatcacaagataagacccactggcttggaattccaggcagcaaatgataggggcattgcatctcccagggggagaagtgggtcaccatctttgctgtt

SEQ ID NO: 891935 - DNA, 627 bp, Homo sapiens; identical to SEQ ID NO: 878602

SEQ ID NO: 891936 - DNA, 627 bp, Homo sapiens; identical to SEQ ID NO: 878603

SEQ ID NO: 891937 - DNA, 627 bp, Homo sapiens; identical to SEQ ID NO: 878604

SEQ ID NO: 891938 - DNA, 609 bp, Homo sapiens
gatcttgtcactacaaggtgtgccttacaagagctcctgaaggaagcactaaccatggaaaggaaaactggtaccagccactacaaaaacatgccaaatggtaaagaccattgatgctatgaagaaactgcatcaattaacaggcaaaataaccagcaaatatcataatgacagatcaaattcaaatgtaaaaatactaaccttaaatgtaaatgggctaaatgcccaaattaaaagacacagactggcaaattggatagagtcaagacccatcagtgtgctgtattcaggagacccatttcacatgcaaagatgcacataggctcaaaacacagggatggaggaagatctactaagcaaatggaaagcaggaaaaagcaggrgttgcaatcctggtctctgataacagactttaaaccaacaaagataaaaagagacaaagaaggccactacataatggtaaagggatcaattcaacaagaagagcgaacaatcctaaatatatatgtaccaaatagaagagcacccaaattcataaagcaagtccatagagacctacaaagagacttagaatcgcacatattaataatgggagattttaatacacca

SEQ ID NO: 891939 - DNA, 609 bp, Homo sapiens
gatcttgtcactacaaggtgtgccttacaagagctcctgaaggaagcactaaccatggaaaggaaaactggtaccagccactacaaaaacatgccaaatggtaaagaccattgatgctatgaagaaactgcatcaattaacaggcaaaataaccagcaaatatcataatgacagatcaaattcaaatgtaaaaatactaaccttaaatgtaaatgggctaaatgcccaaattaaaagacacagactggcaaattggatagagtcaagacccatcagtgtgctgtattcaggagacccatttcacatgcaaagatgcacataggctcaaaacacagggatggaggaagatctactaagcaaatggaaagcaggaaaaagcaggggttgcartcctggtctctgataacagactttaaaccaacaaagataaaaagagacaaagaaggccactacataatggtaaagggatcaattcaacaagaagagcgaacaatcctaaatatatatgtaccaaatagaagagcacccaaattcataaagcaagtccatagagacctacaaagagacttagaatcgcacatattaataatgggagattttaatacacca

SEQ ID NO: 891940 - DNA, 584 bp, Homo sapiens
aagacccatcagtgtgctgtattcaggagacccatttcacatgcaaagatgcacataggctcaaaacacagggatggaggaagatctactaagcaaatggaaagcaggaaaaagcaggggttgcaatcctggtctctgataacagactttaaaccaacaaagataaaaagagacaaagaaggccactacataatggtaaagggatcaattcaacaagaagagcgaacaatcctaaatatatatgtaccaaatagaagagcacccaaattcataaagcaagtccatagagacctacaaagagacttagaatcgcacatattaataatgggagattttaatacaccattgtcaatattaggcaggtcaatgagacagaaggttaacaaggatatccaggacttgaactcagctctgcaccaagcggaygtaatagacatctgcagaactctccaccccaaatcaacagaatatacattcttctcagcaccacacctcacttattctaaaattggccaaataattggaagtacagcactcctcagcaaatgtaaaagaacagaaatcacaacaaactctctctcaga

SEQ ID NO: 891941 - DNA, 653 bp, Homo sapiens
aaagaccatcgttgctattaagaaactgcatcaattaatgggcaaaataaccatctaacatcataatgacagcatcaaattcacacataagaatattaactttaaatgtaaatgggctacatgccccaattaaaagacacagactggcaaattggatagagtcaagacccatcagtgtgctgtattcaggagacccatctcacatgcagagatgtacataggctcaaaacacagggatggaggaagatctaccaagcaaatggaaagcaagaaaaagcaggggttgcaatcctagtctttggtaaaacagactttaaaccaacaaagatcaaaagagacaaagaaggccactacataatggtaaaggaagcaattcaacaagaagagctaactatcttaaatatataggtaccaaatacaggagcacccagattcataaagcaagtccttagagacccacaaagagacttggactcccacacaataataaygggagattttaacaccccactgtcagtattaggcagatcaatgagacagaaggttaacaaggatatccaggacctgaactcagctctgcaccaagctgacctaatagacatctacagaactctccaccccaaatcaacggaatatatattcttctcagcacc

SEQ ID NO: 891942 - DNA, 616 bp, Homo sapiens
tgtagcttaatataatctatcctggagaatgctctgtgtgcagttgagaagactctgtgttctgcagctgttggattgagtgttctgtaaatgtctgttaggttcatttggtctagaatgcagtttaaattaaatctttctatattaattttctgtccagatgatctttccattgctgaaaactgggtcttaaagtcccctactgttattgtattgcagtctatctctccctttaaatatattaataatcacatatatttcagtgctccagtgttggctgcatatatgtttacaattgtatccttttgctgaatttgcccctttattataaatatgatgacctacttcttctctttttacagattttgacttgaagtctatcttatgttatatatgtatagctacccctgctttgtttwgattttcatttgcatagaatatcttcccatcttttcactttcagtctatgtattttcttacaagtgaagtgagtcccttgtaggcagcatatagttgagtgctcttgttatttataccatcagtcactctcttttaattaaaaatttcaattcatttacatttaaaataatttttaatttgtaagagcatactactg

SEQ ID NO: 891943 - DNA, 581 bp, Homo sapiens
catattttattgtctttttttcatagcttggtcattcagccctgaagaatattaacaatacacatctctatctatatattattttttaattatacttaaggacatatagaaaataagtagttaaacttggatgcattctataaactatatatggttcatgctatagcactctgtccattacatttttctagaatattgttttgttgaatcagttattaagatagaatagcttagcatgtacttataaacaattttgtattgkggttctggttttttcccactttccaaaagccctatttcaatttctgcagttctaaaggagatttgagttcttttaaaattacttattaattaagtaataataattacaaagacaattattataattcttagcaacgtaatccatgtttattctagaaaacaaactcaatggaaacaagcaaaatgaaaaggcattcataattccaccaaccaggcagaaccactcttagtattttgttatatacctttgcagatattttcattggaaaataaatgcaaatataaaatttcaggtagaagggcttcaacatggctgacta

SEQ ID NO: 891944 - DNA, 630 bp, Homo sapiens
ttatactcatgaggtgcatcatcagtgctgcactgaagatgatgcatccaacagatggaagagattaggttttcaatgatactgtcaagctcttgaactaaccttagagccactgacctttggcattattgaggagtaaaatataatcactttctgctgggtatttgtaacctgcagccagaagtattctaactaatatagcaagaayagtggactttatttttattgcaatgggaagacattggagggttttaggcaggagcactatactttgatttgtgtttaagcgatttctctggatgccgtttgaagaatggatcagagtggaagcaggagtgcagtgaggaacctcttacagtagtccatgattgaatagggctgtaaaatggggacaaaatgaaatgttcagattttggatttactatggagataattttcataagacttgctgatagattggtttggatgtggaatataaggaaaagagaagactagaggatgcctcctggatttgaggcctgagaaaatgatggataacggtgctgtttatgttgaagatttggagaggtgaggtgtggggtcaatggctctattttagtaaagttaattttgaggtgcttattagatatc

SEQ ID NO: 891945 - DNA, 630 bp, Homo sapiens
ttatactcatgaggtgcatcatcagtgctgcactgaagatgatgcatccaacagatggaagagattaggttttcaatgatactgtcaagctcttgaactaaccttagagccactgacctttggcattattgaggagtaaaatataatcactttctgctgggtatttgtaacctgcagccagaagtattctaactaatatagcaagaacagtggactttatttttattgcaatgggaagacattggagggttttaggcaggagcactatactttgatttgtgtttaagcgatttctctggatgccgtttgaagaatggrtcagagtggaagcaggagtgcagtgaggaacctcttacagtagtccatgattgaatagggctgtaaaatggggacaaaatgaaatgttcagattttggatttactatggagataattttcataagacttgctgatagattggtttggatgtggaatataaggaaaagagaagactagaggatgcctcctggatttgaggcctgagaaaatgatggataacggtgctgtttatgttgaagatttggagaggtgaggtgtggggtcaatggctctattttagtaaagttaattttgaggtgcttattagatatc

SEQ ID NO: 891946 - DNA, 630 bp, Homo sapiens
ttatactcatgaggtgcatcatcagtgctgcactgaagatgatgcatccaacagatggaagagattaggttttcaatgatactgtcaagctcttgaactaaccttagagccactgacctttggcattattgaggagtaaaatataatcactttctgctgggtatttgtaacctgcagccagaagtattctaactaatatagcaagaacagtggactttatttttattgcaatgggaagacattggagggttttaggcaggagcactatactttgatttgtgtttaagcgatttctctggatgccgtttgaagaatggatcagagtggaagcaggartgcagtgaggaacctcttacagtagtccatgattgaatagggctgtaaaatggggacaaaatgaaatgttcagattttggatttactatggagataattttcataagacttgctgatagattggtttggatgtggaatataaggaaaagagaagactagaggatgcctcctggatttgaggcctgagaaaatgatggataacggtgctgtttatgttgaagatttggagaggtgaggtgtggggtcaatggctctattttagtaaagttaattttgaggtgcttattagatatc

SEQ ID NO: 891947 - DNA, 627 bp, Homo sapiens
tggagttaacagattatttcaattttccttttttgtgcttttctctgttttgaacttttctatgatggagagaggacggcattggtgatggtgggtgtttcccccgggcctggggcactgggagaaatgaccttctctttgttacctccaggtaaccacagcctcagggagacccctctcacacagatgctggggcttggtcatgtgacttgctttggccaatggagctttagcaaacatgaaacatttaaaaagcacttctgcgttgggactatcttgctgctgggagttcttctcccttcatgtgaacaaacctgcactgataaaagattgatgggagaacaaacctgcaggattagaggctatatgacaagaagcttcagccatcccagccatgccagtcatcccaactgagagacctcagacgtgaggtcacaatatggtggctactaaacatttaaaacgtgggtagtcsacatgcggatgtgctgtctgtattgtataaaatgcacactggattttgaaaatttgtatgataaaacaaatgccaaatatttcatttataatttttctgttaattatatattgaaataatattttgagtacatcaggttaaatgttagaata

SEQ ID NO: 891948 - DNA, 637 bp, Homo sapiens
cagtgtttcccaggtgcagatgagtttgaaaatagcactttgtgaagtattcccttggagacttgtgaaggaggttgttcgcaattgctcctgtcagcctgtcttaatcagctcaagctgacattttaaaaatataataccacagagtggggtggctgaagcagaaatttatttttcacagttctggagactagaagtcagaggtcaggtgctggaggttggaagtcaggttggattctggtgagggctccctggtgagggcttgtggacagctaccttcttgccatgtcttcatatggtggagagacagaaagcaagctctctggtgtctcttcttataagggcactagtccctcatgatggccccaccctcatgacctcatttaaacctagttacctcccaaagccccaaccccacatatcctcacactgggaattaggcctcaacctgtgaattttgcrggttggagggatacaattcagtctatagcatctttgtgaaggtcctccattcactcatttagcaaatgtctattgggagcccactctgcagggcagaggggattatgtttgggaaacagcaatatagaccctgtccctgccctcacagagcttaggccttaatttacaaaatatg

SEQ ID NO: 891949 - DNA, 663 bp, Homo sapiens
ttgaggtccttgctgttcctgtgtaggaaagagagcaatgcccttggtcaatcacctaggttcctcctagaagcatctggaggctgcctgggacaagtctgcccagcaaagcctcacaggcaaccctgcacgccctcatctctgtggcgactcaatggaaagacagagtttccaaatacaaagcaagacctattgacagaggcatcaggccaaagccagcagccaccgagcagactgtggaggaggtgactggtcccagggacaccccaccacgaggccacatttttggaatctctgtacacaaactctaatttatagctgtctgggattatcctcccagacagaatacatttgtccagttctggcacagatgtgtttgatgcataatggaaaaytaaaagagaggttgcaatttaaagccatcgggcaatgggaaaaaatctgcgcttgctcatccatgcccctaacccccaaccacacgggtttcctcctgggtcaaggaaactgtggcttagctgaatgtcatcactgtgtggaagggaatcctcccagcaggctgctgccggctgtgtcagggatgctgtgggtaaggacccggccagggttgatgctgcttgtgaaaagagacagggcgatcactgctctggaaagtggcatcggcac

SEQ ID NO: 891950 - DNA, 590 bp, Homo sapiens
tgtctggagtttgttccttcagatgttcagatgtgttcgtagtttcttccttccggtgggttcatggtctcgctgacttcaggagtgaagcctcagaccttctcagtaagtgttacagctcttaaaggtggtgtgtccggagttgtttgttcctcctggtgggttcgtggtctcactgacttcagaaatgaagccacagaccctygtggtgagtgttacagctcataaaggtagtgtggacccaaagagtcagcagcagcaagatttattgggaagagagaaagaacaaagcttctacagcacggaaggggacccaagagggttgctgctgctggctggggtggccagcttttattcccttatttggccccacccacatcctgctgattggtccattttacagagtgctgattggtgcgtttttacagagggctgattggtgtgtttacaaacatttagctagacacagtactgattggtgcgtttttacagagtgctgattggtgcatttacaaacctttagctagacacagagtgctgattggtgcatttacaaacctttagctaaacagaaaagttttccaagtccc

SEQ ID NO: 891951 - DNA, 590 bp, Homo sapiens
tgtctggagtttgttccttcagatgttcagatgtgttcgtagtttcttccttccggtgggttcatggtctcgctgacttcaggagtgaagcctcagaccttctcagtaagtgttacagctcttaaaggtggtgtgtccggagttgtttgttcctcctggtgggttcgtggtctcactgacttcagaaatgaagccacagacccttgtggtgagtgttacagctcataaaggtagtgtggacccaaagagtcagcagcagcaagatttattgggaagagagaaagaacaaagcttctacagcayggaaggggacccaagagggttgctgctgctggctggggtggccagcttttattcccttatttggccccacccacatcctgctgattggtccattttacagagtgctgattggtgcgtttttacagagggctgattggtgtgtttacaaacatttagctagacacagtactgattggtgcgtttttacagagtgctgattggtgcatttacaaacctttagctagacacagagtgctgattggtgcatttacaaacctttagctaaacagaaaagttttccaagtccc

SEQ ID NO: 891952 - DNA, 641 bp, Homo sapiens
ctgctccaagaggagaaaaacattctgttgctttccttttttataggacaagtgtgcaagtggctttacatggctgaataaacatttggggttcaggccccaagcattcttagcttaggtgctgggtgttaggggaatgttggggaatgccagctgcccacacctagggatattagggggctctggttctatgaggtgttgagttggaacgcagcttttctttgggggatggagaagggaagtcccagtatcagttagttcattatcagggaaccctgaaacagctttaagggtagttgaaattacaagacattcttgcttgtcctcacaaaagcacttccgctcctcaaagtgcargcctgactcctggctcatggatccactccggagaatggggaaaggctgttctcacacttctgtgatgccactttattcaggccttcgatcctcggatatgttgaagcttgggggctggagataaagaaaggggtttaaagattttctcttaacggattaagctataagaccttcattggctggtgatgactgttgcatagctggtgtttaatgctgcctccttgtggaggcataagatgtcttctaacatgactcttttcaacttcagcctcagtccccatctc

SEQ ID NO: 891953 - DNA, 643 bp, Homo sapiens
tgcacttggcttaactggttttcacagattctgaggttatagaacctgttgtttttcaaactcctgtacagagcctggaaataatggagcaaacgcaaatgtattgagagtcattatactttaaaatagttttaaagactattggggtaccatcaggtcaaaagccactgatttgggaagcaatttttttgcaaaacactttttttggagtactgaactttacaggggcttgccttaatctctatttagtagtttcaagatrtatgcgcaattattctacgtgttaaaaatgttaaaatattctatgtagccccaaaggtgggtaaaacagtataagtaatgcctaaattaataagctaaaaggtgtcactacagctggatttttgagagaaaatggacataaaactaggctatgtgtaataaaaataatggcaccttaagattgcactattttatgcattattttatatgccatttcatagcctgcactttaatctccaaagaaacgatgtatgatgtcccacttgttccttattcttaataaactttttcctgagacagggcacttaattctattttactatactgaattagtttcttggaggtagattcatttcttgagttctctgtttccttagccata

SEQ ID NO: 891954 - DNA, 644 bp, Homo sapiens
tgtttggggtacctgaaagagatggggagaatgaaaccaaattggaaaacatacttcagaatatcatccaggagaacttccaaaatctagcaagtaggccaatattcaaattcaggaaatgcagggaaccccagtaagataatcyatgagaagatcaaccccaaggcacataatcttcagattctccaaggtcaaaatgaaaggaaaaaaaatgttaagggcagccagggagaagggccaggtcacctaaaaagggaaactcatcagactaacagcagacctctcagcagaaaccctacaagccaaaagagactggggatcaatattcaacattcttaaagaatttccaacccagaatttcatatctggccaaagtaagcttcataagcaaaggagaaataacatctttttcagaaaaggaatagcttagtgaattagtcatcacgaggcctgccttgcaagagctcctgaaggaagaactaaatatggaaagaaaaaacaattaccagccactacaaaaacacactgaaatacacagaccagtgaaaccatgaaggagtcacataaggaagtctgcaaagtaaccagctagcatcatgatgacaggatcaaattcacatataacaatactaaccttaaatgta

SEQ ID NO: 891955 - DNA, 644 bp, Homo sapiens
tgtttggggtacctgaaagagatggggagaatgaaaccaaattggaaaacatacttcagaatatcatccaggagaacttccaaaatctagcaagtaggccaatattcaaattcaggaaatgcagggaaccccagtaagataatccatgagaagatcaaccccaaggcacataatcttcagattctccaaggtcaaaatgaaaggaaaaaaaatgttaagggcagccagggagamgggccaggtcacctaaaaagggaaactcatcagactaacagcagacctctcagcagaaaccctacaagccaaaagagactggggatcaatattcaacattcttaaagaatttccaacccagaatttcatatctggccaaagtaagcttcataagcaaaggagaaataacatctttttcagaaaaggaatagcttagtgaattagtcatcacgaggcctgccttgcaagagctcctgaaggaagaactaaatatggaaagaaaaaacaattaccagccactacaaaaacacactgaaatacacagaccagtgaaaccatgaaggagtcacataaggaagtctgcaaagtaaccagctagcatcatgatgacaggatcaaattcacatataacaatactaaccttaaatgta

SEQ ID NO: 891956 - DNA, 632 bp, Homo sapiens
caatatgattcagtcctaccactttccattcactgcctcatataaactacaaaaaaattctatggggtcgctgtgattattcctaaacacacaccttcagggttgcaagcaagtggtcaaaattgtgaatactgtagatataataatctccaacaggctattagtgctgmgtaactcatcaccacatttcaaagatcaggatatggagaacaacacaatagggacaagtagaaaaaaacttgtggaagtccctgttcattcccaatgatgggaccttttaatagaaatgcaaaaaagtggtgtgccatgggaaatctggatgtagtaatgagctaaactttttttttctatcttcagatagtgtcaaatcctacttcactgcaggtaaatattttctggaacttgtttgtatttataactcattatgtatctcagttctttctgtttggttatctctggtttattttaaagtatatcccttaggaaccctattctgaaagagctggttaatcaggacattgagccataataaaatgatgggaccctctttctagccttggggaaaatctctaagaaaacatacactggctttaggtgaaagtgataaagtgctttcactgtggaggagggct

SEQ ID NO: 891957 - DNA, 625 bp, Homo sapiens
tctctgcttctatatttaacaatctattcagagcacacatataaaaaaaatcatcatgttaagatggtaatttggaaggagttccacagaacagcttctgctgtataattgaagaggtgcttctcatacatccacatggggcctctagactcttaagtgcaagtcactgccagtatctgagatgaggccagtgatgtttcaaagcaaaaactaggatacatttttcaccacagaaatgagttgaggctgctttttcttctccctcctgcagtttccttcctctcctctgcttctgtggttgtgtctmctgggaacactttgctgaatcacttgatcggtcagtcaattgcctatgttgtgtagggacctaccgtgcactgagaattgctgagatgagaaacacagtggcctgctgtgttgtatatctcagggagcaagccacttctcaggcctatggggagacatacatttccttaagggcatgaatgatgttctgaatcttattctattgttgcaaagacaacataagagaacagagtgccctgtgcatgctttaagtcaagacaagacactcaccaagtgactgatgttctgtccttttagcttaggccagatcaaaaacctg

SEQ ID NO: 891958 - DNA, 625 bp, Homo sapiens
tctctgcttctatatttaacaatctattcagagcacacatataaaaaaaatcatcatgttaagatggtaatttggaaggagttccacagaacagcttctgctgtataattgaagaggtgcttctcatacatccacatggggcctctagactcttaagtgcaagtcactgccagtatctgagatgaggccagtgatgtttcaaagcaaaaactaggatacatttttcaccacagaaatgagttgaggctgctttttcttctccctcctgcagtttccttcctctcctctgcttctgtggttgtgtctcctgggaacactttgctgaatcacttgatcggtcagtcaattgcctatgttgtktagggacctaccgtgcactgagaattgctgagatgagaaacacagtggcctgctgtgttgtatatctcagggagcaagccacttctcaggcctatggggagacatacatttccttaagggcatgaatgatgttctgaatcttattctattgttgcaaagacaacataagagaacagagtgccctgtgcatgctttaagtcaagacaagacactcaccaagtgactgatgttctgtccttttagcttaggccagatcaaaaacctg

SEQ ID NO: 891959 - DNA, 475 bp, Homo sapiens
cctaagtgcctgggatctcttgggagggtttagagttaggtctgctttgagccacaaataatcaactggctttaacagtgaacacatttgatatcttacatattaagaagtgtgggccaggtgtggtggctcatgcctgtaatcccagcactttgggaggccgaggtgggtggatcatgaagtcaggaattcgagaccagcctggccaacatggtgaaaccccatctctactaaaaatacaaaaaatagctgggtgtggtggtggrcacctgtaatcccagctacttgggaggctgaggcaggaaaatcctttgaacttgggaggcagaggtagcagtaagctgagatcgtgccactgcactccagcagcccgggtgacagagtgagactccgtttcaaaaaaaaaaaaaaaaaaaaagaagtggaggttgctggatccagtatttgaagccacgggtatcctccatcttgccat

SEQ ID NO: 891960 - DNA, 618 bp, Homo sapiens
ttgataaagtaattctctgtcaagacatttattttttcaaaacttttacaattatttcatctcttaatttttcttggaatactatgtacttaatttgctatattacacttccctataattagattgaaattttaattatctgaggattgagtctataaactaattggaattgttgtaattttaatactgagaaataagaartgtctacttatgtaaatcactgcttttagtaattaataaaatgttcataactacaagtctgtcacaaatattttgttgaatttctttctacgtattttagcatcttttaaagttcgtttttgttactgtaaatggattctgtgttccataaaaacaaaattgattatgactggcatagaaaagtgactgggttttcaatatttatgacacattcaagactttctgctcaactcacttgttaattctaggactttatcaggtttttgggggtgttttcaatatacccgtgttttacattaatttcatcaccttttctccaatggctactctccatgtttatgtttggttttatctagatctttcagaaaaagtcatcaaataataatcatgaagaattttttatgtgaatgttgatat

SEQ ID NO: 891961 - DNA, 590 bp, Homo sapiens
agaatcacttgaacccaggaggctgaggatgccgggagctgagatcacaccactgcactccagcctggacaatagagtaagactgtctcaaaataaataaacaaataaataaataaaaataacatatttatgcagaacactaaaacagtgtggggtttgtatataaaaagataaggtaggacttattttgagctacaacatatttctagataggcaaaaatgagtagtttgtcatacagccatgtgagggacctggagaaagaatgaaatttaagaggctattgaaaaaaaacttagcccctttgtagtttatttggtaaatrtatgcttgtatgttatactgtctgtttctgtaagatttttaatattttttagatactatgagcattcaagtcttcagggagaaaaattaatttgggatggtaaatatgtcactacactcagctagaaaaatagaacccagcacatataatctgttcctgctgtgtttcttaatatataactgtgcttttaatcatgttaaaggtggctgtccactgtgaacttctaacagggaagcgtctgacaaaaacatggcggtgtgctttcct

SEQ ID NO: 891962 - DNA, 677 bp, Homo sapiens
cttcattttgttggttgttttcctttgctatgcagaatgttctcagtttggtgtattcccatctgtctggcttttttttttttttttttttttttttttcagttttttcacctgtgctttggggatcctatccaaagagtccttgtccagaccaatgtcatggagctttcctcatatgttttattctactaattttgtagtttctgattctacacttatgtctttttttcattttaagttagtttgtgtacatatatgarataagggcctaatttcattcttctgtatatgtatatctagttcttccaataccatttatttatgaggctctcctttctccattgtgtgtttttggcagtggtactgccatcttttgattgcctttaaaaaattcaggttgagatcttcctggttcttggtataatgaatgatttcttttgttgaaatttggacattttcatattataagatgatggatcttatttaaaacttcttagctttctctgataccaatgcagaaggagaaagttggggctattttattacagctggtcaaggtagaattctcatttcctattgcccttaattaacacacaagagaaagggagtactcttctttctaagtgggagtaggtggtcttgttaaccctgggtgctgctgcaagtctctactttcc

SEQ ID NO: 891963 - DNA, 669 bp, Homo sapiens
aagtaaaaatcacattttatttattcattgcactcattaaaatatgcctattgcaacagcttatgtgcatgtgtaaaaatataaaaactataattttaagttaaaatataaatgctataagaatgtaataaatatggacagaagactaatacatagtacaaaaatatcctaaattcccttagcacactaggtactaagaaaaccagattggatggtatwtgatgttatataatttcaaaaatatattaattaagcttccactattcccaagaaagaaaaaatatctaagctttttctcccttttcataagtgattttgactttttcctttttacatatgcccagaggtattctgatgggttattttgaacatatactataaatatgttcaaaatatatttatagaatatatttatattctataaatagaatgagataataccatgtattttttcatgggctgagaaccacgctactgaaaaaatatgtaaggaagatatagtaactattatttagtgaaaagatgaaaaatctattttatctacaaaatctataaaatattcacttacataaggtgaattatctttttcatgcagctttgtgtatgtttcctcttctctcagtgacctgaatagcaatatccagacaccccaaaggtgcaagttaacat

SEQ ID NO: 891964 - DNA, 669 bp, Homo sapiens
aagtaaaaatcacattttatttattcattgcactcattaaaatatgcctattgcaacagcttatgtgcatgtgtaaaaatataaaaactataattttaagttaaaatataaatgctataagaatgtaataaatatggacagaagactaatacatagtacaaaaatatcctaaattcccttagcacactaggtactaagaaaaccagattggatggtatttgatgttayataatttcaaaaatatattaattaagcttccactattcccaagaaagaaaaaatatctaagctttttctcccttttcataagtgattttgactttttcctttttacatatgcccagaggtattctgatgggttattttgaacatatactataaatatgttcaaaatatatttatagaatatatttatattctataaatagaatgagataataccatgtattttttcatgggctgagaaccacgctactgaaaaaatatgtaaggaagatatagtaactattatttagtgaaaagatgaaaaatctattttatctacaaaatctataaaatattcacttacataaggtgaattatctttttcatgcagctttgtgtatgtttcctcttctctcagtgacctgaatagcaatatccagacaccccaaaggtgcaagttaacat

SEQ ID NO: 891965 - DNA, 669 bp, Homo sapiens
aagtaaaaatcacattttatttattcattgcactcattaaaatatgcctattgcaacagcttatgtgcatgtgtaaaaatataaaaactataattttaagttaaaatataaatgctataagaatgtaataaatatggacagaagactaatacatagtacaaaaatatcctaaattcccttagcacactaggtactaagaaaaccagattggatggtatttgatgttatataatttcaaaaatatattaattaagcttccactattcccaagaaagaaaaaatatctaagctttttctcccttttcataagtgattttgastttttcctttttacatatgcccagaggtattctgatgggttattttgaacatatactataaatatgttcaaaatatatttatagaatatatttatattctataaatagaatgagataataccatgtattttttcatgggctgagaaccacgctactgaaaaaatatgtaaggaagatatagtaactattatttagtgaaaagatgaaaaatctattttatctacaaaatctataaaatattcacttacataaggtgaattatctttttcatgcagctttgtgtatgtttcctcttctctcagtgacctgaatagcaatatccagacaccccaaaggtgcaagttaacat

SEQ ID NO: 891966 - DNA, 611 bp, Homo sapiens
aatgagagccaagaaaaaggggtttccccttataaaaccatcagatctcatgaggcttattcactatcacaggaatagtatgggggaaaccatacccatgatttaattatctcctaccagatccctccatataacatgtaggaattatgggagctacacttcaagatgagatttgggtggggacacaggcaaaccataccagtctgcccctggcccttccsaaatctcacgtcctcacatttcaaagccagtcatgccttcccaacagtcccctaaaatcttaactcatttcagcattaactcaaaagtccacaccccaaagtctcatctgagacaaggcaagtcccttccacctatgagcctgaaaactcaatagcaaattagttactttctagacacaataaggatacaggcattgggtaaatacagctgttacaaatgggagaaatggaccaaaacaaaggggctacaggccccatgcgaatctgaaatcaagcagagcagtcaaatcttaaagctccaaaatgatctcctttcatccatgtctcacatccaggtcatgctgcaaaaggtgggctcccatggccttgggcagctctgcccctgtggct

SEQ ID NO: 891967 - DNA, 662 bp, Homo sapiens
gaaactctacaagccagaagagagtgggggccaatattcaacattcttaaagaaaagaattttcaacccagaatttcatatctagccaaactaagcttcataagtgaaggtgaaataaaatcttttacagacaagcaaatgctgagagattttgtcaccaccaggcttgccctacaagagctcctgaaggaagcactaaacatggaaaggaacaaccagtaccagccactgtaaaaacatgccaaattgtaaagaccctcgagtctaggaagaaactgcatcaactaacaagcaaaataaccmgctaacatcataatgacagaatcaaattcaaatataacaatattaactttaaatctaaatgggctaaatgctccaattgaaagacacagactggcaaattggataaagagtcaagacccaacagtgtgctgtattcaggggacccatctcacatgcagagacacacataggctcaaaataaagggatggaggaagatctaccaagcaaatggaaaacaaaagaaaagcaggggttgcaatcctagtctcggataaaacagtctttaaaccaacaaagatcaaaagagacaaagaaggccattacataatggtaaagggatcaattcaacaagaagagctaaatatatatgcacccaata

SEQ ID NO: 891968 - DNA, 662 bp, Homo sapiens
gaaactctacaagccagaagagagtgggggccaatattcaacattcttaaagaaaagaattttcaacccagaatttcatatctagccaaactaagcttcataagtgaaggtgaaataaaatcttttacagacaagcaaatgctgagagattttgtcaccaccaggcttgccctacaagagctcctgaaggaagcactaaacatggaaaggaacaaccagtaccagccactgtaaaaacatgccaaattgtaaagaccctcgagtctaggaagaaactgcatcaactaacaagcaaaataacccgctaacatcataatgacagratcaaattcaaatataacaatattaactttaaatctaaatgggctaaatgctccaattgaaagacacagactggcaaattggataaagagtcaagacccaacagtgtgctgtattcaggggacccatctcacatgcagagacacacataggctcaaaataaagggatggaggaagatctaccaagcaaatggaaaacaaaagaaaagcaggggttgcaatcctagtctcggataaaacagtctttaaaccaacaaagatcaaaagagacaaagaaggccattacataatggtaaagggatcaattcaacaagaagagctaaatatatatgcacccaata

SEQ ID NO: 891969 - DNA, 700 bp, Homo sapiens
aatgatgaattcatgtcctttgtagggacatggatgaagctggaaaccatcattctctgcaaactatcgcaaggacaaaaaaccaaacaccgcatgttctcactcataggtgggaattgaacaatgagaacatatggacacaygaaggggaacatcacataccggggcctgttgtggggtgcgggtagggtggagggatagcattaggagatatacctaatgctaaatgacgagttaatgggtgcagcacaccaacatggcacatgtaaacatatgtaataaatctgcacattgtgctcatgtaccctaaaacttaaagtataataataataacataataaaaaaagaaaaatgtacactgttaaactgaagcccaattgcaatggcctttgtgtatttgctatgggtacccttttttaactttattctcatggcaacagggagattggaatttttcaaacattaatcagtagcaatagggataagtatctcctggcagtgtggaagatgtgttggcttgaggagagacaaatgacccataaattaggagcaattaacatagatagacatagatttagaaactgtagttcagagatgaggttatgccacactgaaattctacagcagtaatggaaataaaggagaaatgagaggcattccataggccaaatccacagctcctggtaagtggtagaagatt

SEQ ID NO: 891970 - DNA, 700 bp, Homo sapiens
aatgatgaattcatgtcctttgtagggacatggatgaagctggaaaccatcattctctgcaaactatcgcaaggacaaaaaaccaaacaccgcatgttctcactcataggtgggaattgaacaatgagaacatatggacacacgaaggggaacatcacataccggggcctgttgtggggtgcgggtagggtggagggatagcattaggagatatacctaatgctaaatgacgagttaatgggtgcagcacaccaacatggcacatgtaaacatatgtaataaatctgcacattgtgctcatgtaccctaaaacttaaagtataataataataacataataaaaaaagaaaaatgtacactgttaaactgaagcccaattgcaatggcctttgtgtatttgctatgggtacccttttttaactttattctcatggcaacagggagattggaatttttcaaacattaatcagtagcaatagggataagtatctcctggcagtgtggaagakgtgttggcttgaggagagacaaatgacccataaattaggagcaattaacatagatagacatagatttagaaactgtagttcagagatgaggttatgccacactgaaattctacagcagtaatggaaataaaggagaaatgagaggcattccataggccaaatccacagctcctggtaagtggtagaagatt

SEQ ID NO: 891971 - DNA, 575 bp, Homo sapiens
cactactcacttcaaagctgtcagacagggacatttaagtctgcagaggtttctgctgccttttgtttggctatgccctgccctcagaggtgcagtctatagaggcaggcaggcctccttgagctgtggtgggcctcacccagttccagcttcctggccgctttgtttacctactcaagcctcagcaatggcgggcgcccctcccccagcctcactgtggccttgcagttcaatctcagactgctgtgccagcaatgagtgaggctccatgggcataggaccctctgagccaggtgtgggatataatctcctggtgtgcagtttgctaagaccattggaaaagcacaatattagggtgggagtgacctgattttccaggtgccatccatcrccacttcccttggctaggaaagggaattccctgaccccttgtgctttgacctgaccgagcatgctttggttcatgctcagtgggctgcaccgactgtcctgcccccactgtctgacaagccccagtgagatgaacctggtacctcagttggaaatgcagaaatcacccgtcttctgcgtcactc

SEQ ID NO: 891972 - DNA, 660 bp, Homo sapiens
atgtgaaactcaaaagcaaaagctgaaaaccactgggtgaaagttcattaatcagtgtgaaaaccatttcaggagtccatccataggcaggaaaggtttcactctttaggaaaggccttcaaaagcccaacagttcatcccctgcctttctttgccaaaacagcaaaaaacatttaatccttgccttttgtgctggggttctactgacactgctgctgatagcctttatcttcctcatcataaagagctacagaaaatgtaagtggtctccaagggataggacagcccttctctctctgccattgatactagaattagctatgagtgagtaatgggaggaggtaggggagggtgcagtgtgataaaacctgcttagcccaccctgtctgcagactgaagattcaaatcccttcatttttcttccgccctgccccccacccacctgmcaacacctcctccccaccccacccttcacccaagatcgaagggagaggcttcccatttccccaggcccattgctgagatgggtccctcttctttctggcaccatggcagatcactccaagccccaggccccagatcctcactcagatcctccagccaaggtaagatgaccacactgttttggggacactgaagggctaccgtcattggaattcc

SEQ ID NO: 891973 - DNA, 497 bp, Homo sapiens
tggcagcagttatttttattgcatattaaatcgactttcacaggaaatgtacacaaaatatgtaatagaagacaccgaataactccccccattcctcaaaccaaaacatctagctgcagtaaaaatctcagaagcattgccaaatagcgtatttaaattatttgccttctacatttcctcgatgaatttcagggttgtttgttcttgaatctttaaatgaattaataatacttcacatatcactgtaccaaaggccccaaaggcaggtgtggccaaaggtgtgtrgatgaggaataggactagataaagttgcttgaatttctagaaagaaacacttgttaaagagtaagtaaaaactatggtatatcattgttctgcactttcttttccatacaaatcgtgtattggtgaatgtatcaaaatcgataccagttttctttgtcaaagcttttgcatgctaccttttgtattaaaaaaggatgttttaaatgtgaagt

SEQ ID NO: 891974 - DNA, 577 bp, Homo sapiens
ggtagagtctctgaaaaggaaaagttgccaaaacccagaattgaaccagtctcctttagatcttcaggctgatgccctcccaaccgagctatctcagcttactgtagactgaaaattttattcaatttctctttcaatacttcgattgtttccaactttttagctttcargtttcttaagtacttttattatacaatgtatttacccactaagaaagacttggaacttattgactcctacatatgatggctgaatccaattccctggcagtgtggaatggataggtggaggagggagatagaagaaaagtaacaggaattaaaaaacaaacaaaaaactttctgctcttccacatcctgttggttgagccagacacagcaaagaaaatttaaaaataaaaataaaaaataaaatgtggtggcgttctttgtttttcttttctttttgtctttaataatcttcgaagatgtggagaattggaacccaaggttaatttctgttaatgtggggtcaggtttctgtctcctagcgatgattttgaatgagctattaatcctttgttttatcctctttcatc

SEQ ID NO: 891975 - DNA, 568 bp, Homo sapiens
atttatctttatcatccacctttatccacagtcctcctcatgattagcacattgtcaataaatatttactaagctgaactgaaagtttttattatgcataaatactaagatgtccatgtccatggtcatgcaggacagcagaagtcctatttttttttttttaccagtgtatctattactaccaattgcttcaaggtcaggagccaactcatgtaytagacatgtaaatcttgtgaaaatattcatattggaaacagcatgtagcaagtgcaaacagaactaaataaatccttaaatttatcacagtcccttcaaagtatgaattcttcttctagcattacatcaaatttgataaaatcaaaaatattttatctcaatgttttaaaagtgttgatgctgtatacattgagttgttgtacaattgaatggaacccacattcaaagtttttcctcaatgttaaaattaaatggttctctctgtgattctttctgtttgcaggtcttctaatttcattggtagaatttgcctctactaatgtcattcttttggcattgcagactttctgat

SEQ ID NO: 891976 - DNA, 620 bp, Homo sapiens
ccaggttcaagcaattctcctgcctcagcctcctgagtagctgggattacaggcacctgccaccatgcccagctaatttttgtatttttggtagatggggttttgccatgttggccaggttggtcttgaactcctgacctcaaatgatccaccctcctctgcctcccaaagtgctgggattataggcatgagccaccccaccccagcccctaatcgacttctttacaaaccttatgactcgttaaggtttgtaacccaaaaactttgcctcccacattcatcagagttggccccagtgacttttggacatttccatgactgggattgttcacaatcatttgctcccagctccagagagggatttccaagcagcaatggcagtgcccctgggacaaggggtcagtgctcacccrggcacggcaggcctgggtgtcatggaagcccaccctccttcccagagaactgaagttgtctttggcactgccttcaggttcctgggcacctggagggtgtctatttctcactgaggtcaagagttccttaaggaacagtcctgtgacctgttcatctttatgtgcccagtgcctggcacccagcaaggatgatggcagcagagcaga

SEQ ID NO: 891977 - DNA, 669 bp, Homo sapiens
ttacagtttgttttgaacacttctgtcatctattgttcagtttgttttcattatgaaattcaggtttactctcagtttctcccaaaaatagtaattaactattctgggaataataattttaactggttcataaatgagcatatactaaacaacactactgtgctgtatataaatctgactcatatattttatagctcttacttcttagaaatagaaaaacttgcttctatattagaaaagaaatcacttttctaagcctataagactaatasctagacatttagattgtggtgggttcacttttcttcttgttagagggcactctgaatcactcttctggtgaagatctctgggagttacatgcaagcggtgggcctgggccccatttccacatcccacaaagagtgcatttactttgtgtatccagaagagcaaaactcccaactctactgctttgttttcaaacggacagccaagcattcgatgtcttcagcttcactctctactttgtgcttgggttccatttctggttcatataggtatttaccttattttttaacttgactttgcctttttatccctctttatgtttttatttatgttgtatattcttttatgtatttgaaagagaaggggagtgtcctgttatgaacatgctataccatcttg

SEQ ID NO: 891978 - DNA, 607 bp, Homo sapiens
atggttgtaatcccagcactttgagaggctgaggcagcaggcagatctcttgagcccgggagtttgagactagctcaggcaacacggtgaaactctcttaaaaaaaaaaaaaaaaaaaaaaatatatatatatatatatatatatatatatayacacacacacacacacacacacacacatatacatatatatatacacacacacacacatatatacatatatatacggaggtgtgtgggcacatgtctgtggtcccagctattcaggagtctgaggtgggaggattacctgagcccagggaggttgaggctgcagtgaactgtgagtacaccactgcactccagcctgggcaaaagaatgagatctcatttcaataataataataaaaataataataataaataagcataaacttattatataacccagaaattttattcctaggtatgtgttcttgagaaataaaaacatatgttcatacaaaaccttcacgtaaatattagaagcaactgtattcataatagttacaaactagaagcaacacaactatcaatcaactggtaaataaataaaaaatcatgttgtagctatagttagtatgttgaa

SEQ ID NO: 891979 - DNA, 597 bp, Homo sapiens
ttaagcaaaagtttgctaactgcagaagggttaacactggtaacatactgtggcagacaagtttcttttttaaaaaaacttttgaggttccccccctttaaattaaccctttccggtccatatgccactaagcaggtaccaacctagagraaaaaaaaaaactcatccactcagcaatagtggccctttcaaattaacagaggggtggggtaaggttgagggggaaggaaacagacagggggagaggaagggcctggtagaggaggggatctttcttgtcattcaagttagggcagccacgaatgtcccaaatctgttggagatgtcagaatgcagggaccgccaggtgggcacggaggctcgagccttggcgtcacccacgtcgtctgtgcagtggacagacaggcactgcaagtggctgccaggctgggatgctgaggccttgtttgcagggaggtcgtgggctgtggagagagaaggaagagaggacattagtggcacactcgtctctgagggacaccataatgggggccaaagtggcagaggcatacaagacaggcaccgtccacgccctctttccatggctaaagctggtcc

SEQ ID NO: 891980 - DNA, 685 bp, Homo sapiens
cacagatcacagggatgtctgtgttagacacgcttgaggagaaaggagcctgacaaccattcacatcttagtataaattagaccaaagcagggaatttgcaggacttctcatttacggctaccacatgaccactggctctgtcctgagacctgccatatgtcaatgaagagtctcattattctcatttcctagactctgactttagagtatgtccaaggtcacacagcctggaagggacagaaagctgggtttgaatatgggctgatgttgaatttctgcctcagtagtagtgagaaaagctgaaattgggggtggggggctctrctccagctgagggagcacacccagatactgaactccatgaccggcctgccctcaatcctctgtgcaagcccagccaagggccctgtgccaggcaggagtcaccggcccgccctgccctctgggattaagcaggaggcctcccccaggagctgagccacagcctgcagagaaaatcctcccagagggatgggcccaggcagctgaggacaggccatgactaactgggcttggggcccccaccctggagccccagagacactcagctttgggacctgcatgctgggaggagccggagctgggcagaaaggagacttccttggccccttccctcattcatgcaactaacatgcctttattgag

SEQ ID NO: 891981 - DNA, 541 bp, Homo sapiens
tgcagtggtgtgaacagtgagaaaggggacagaagatgagagctgaaaagtaagaggaacagatcttttatttttaaggacattggctttaattctcagtgaaatgcaaaattattgaaaggttttgagcagaggaatgacataatctgaggcaagttttcaagaggccaccctggctgctgtgagaacagaatccagggcccagtggtraaaacagggagacagtcaggagactgtgtcaataaaccaagagagggagcacaactgcttgaactaggtggtccacattggtggattccatcagtagaactgacagcatttactggagcacaatatgagaaaaagagagggatgaaggatgttttcaaggtgttttgacataggcaagtgtatgaatagaattgttctttcatgttctaggaaagacagtgagaggagatttcctgggggctgagaggaattaggcttttgacatgctaaattttaggtatctattagaaagccaagaagaaatgctgagtaggtgattaaatatattagg

SEQ ID NO: 891982 - DNA, 654 bp, Homo sapiens
ctatggcacctccataaatcagcaaggaaaggcacctaagagagcagtaaatcagtaccctgggctctgtcctctcattatactcccttcttgagcacgatgaggctatatttattccctaaagcagtccatctatgtaaatatttgaaaaaatgtatatatttttggcttttggctttatgaaagctttaggaatatgttttacttcttgtacatagaaatctatttctgtctgcatattttgactgatgtatgagtacatatgatctgtgagcatagttctcttttatcctctcattcttatccgtctacttcttgatacgtgtttaatttcaatttggtatacatacatccactgattaacttgatacatcataaatattgtaggtattggtgataytaaaataaatatagcatgattcctgtgtgcatatataatttgtaaacactgtaggagtgaaatgaattttttcttttcccctctgaaggtttcaatctgctgaaataaactgacaatacattaataggcaaaaaggcatacaaatttgttaatgtgcaagtgtgcatgggagccatgtaagatatgagactcaaagaagggaacagagatggttgaaggttaaaatagcatgaaggaataggggcttcagactt

SEQ ID NO: 891983 - DNA, 669 bp, Homo sapiens
gtggtttgctgcacccatcaacccatcatctaggttttaagccccacatctattagatatttgtcctaatgctctccctcccattgcctcctaccccccaacaggccccagtgtgtgatgttccccttcctgtgtccatgtgttctcattgttcaactcccactgatgagtgagaacatgcagtgttcggttttctgttcctgtgttagtatgctgagaatgatggtttccagcttcatccatatccctgcaaaagacatgaattcmttctcttttatggctgtatattattccattgtgtatatgtgccacattttttttttatccagtctatcattgatgggtatttgggttggttccaagtctttgctattgtgaatagtgctgcaataaacatacgtgtgcatatgtctttatagtagaatgatttataatcctttgggtatatacccagtaatgggattgctaggtcaaatggtatttctggtcctagatccttgaggaattgccacactgtcttccactatggttgaactaatttacactcccaccaacagtgtaaaagccttcctatttctccacatcctctctagcatctgttgtttcctgactttttaatgatcaccattctaactggtgtgagatggtatctcattgtggttttgattt

SEQ ID NO: 891984 - DNA, 669 bp, Homo sapiens
gtggtttgctgcacccatcaacccatcatctaggttttaagccccacatctattagatatttgtcctaatgctctccctcccattgcctcctaccccccaacaggccccagtgtgtgatgttccccttcctgtgtccatgtgttctcattgttcaactcccactgatgagtgagaacatgcagtgttcggttttctgttcctgtgttagtatgctgagaatgatggtttccagcttcatccatatccctgcaaaagacatgaattccttctcttttmtggctgtatattattccattgtgtatatgtgccacattttttttttatccagtctatcattgatgggtatttgggttggttccaagtctttgctattgtgaatagtgctgcaataaacatacgtgtgcatatgtctttatagtagaatgatttataatcctttgggtatatacccagtaatgggattgctaggtcaaatggtatttctggtcctagatccttgaggaattgccacactgtcttccactatggttgaactaatttacactcccaccaacagtgtaaaagccttcctatttctccacatcctctctagcatctgttgtttcctgactttttaatgatcaccattctaactggtgtgagatggtatctcattgtggttttgattt

SEQ ID NO: 891985 - DNA, 503 bp, Homo sapiens
ttgtaggattttttcccagtgtgtatcctaagccatcttcttcttttttttttttttttttggcctggcatggtattaaaattaatttaactttgcatgtgaaatttttctgtgggactagaacattccagattagaataggaaggaaattagtaactttgtattttatttctctagcaaaagaattaccaatttttatgggtaaaagctggaagcattcctcttgaacacaagaacaagacaagggccctttctcaccagtcctatttaacatagtagcggaaatcctggccagagcaatcagtcaagagaaagaaataaaargcatccaaatagcaagagaggaagtcaaactatccctgtttgcagatagtaagattctacacataggaaaccccatagtctctgcctaaaatctccttaatctgttaaacaacttcagcaaagtttcaagatacaaaatcaatgtacacacatcagtagtattcctatataccaacaac

SEQ ID NO: 891986 - DNA, 642 bp, Homo sapiens
catgttgttttaatttgcatttctctaatgattagtaatgttgagcattttttcatatacctgttggccatttttatgtcttcctttaagaaatgtctgttcggatcttttgcccactttttttttttttttttttttttaagacggagtctcgctctgtcaccaggccggagtgcagtggcacgatctcggttcactgcaacctctgcctcctgggttcaagcgattctcctgcctcagcctcccragtagctgggactacaggcacatgccaccatacccggctaattttttttgtatttttagtagagatggggtttcaccatgttggccaggatggtctcgatctcttgacctcatgatctgcctgccttggcctcccaaagtgctgggattataggtgtgagccaccccacccagactgcccacttttttgattatttggtttttgtttttttgtttgtttgttttgtttttggcttaaattgtttagtctctttgttctggtcattaatcccttgtcggatggatagtttaaaaatgttttctcccattctgtgggttgtctctcccactatgttgagtgtttcctttgctgtgcagaaactttttagcttaatgtaatctcatttgtctgttttt

SEQ ID NO: 891987 - DNA, 642 bp, Homo sapiens
catgttgttttaatttgcatttctctaatgattagtaatgttgagcattttttcatatacctgttggccatttttatgtcttcctttaagaaatgtctgttcggatcttttgcccactttttttttttttttttttttttaagacggagtctcgctctgtcaccaggccggagtgcagtggcacgatctcggttcactgcaacctctgcctcctgggttcaagcgattctcctgcctcagcctcccgagtagctgggactacaggcacatgccaccatacccggctaattttttttgtatttttagtagagatggggtttcaccatgttggccaggatggtctcgatctcttgacctcatgatctgcctgccttggcctcccaaagtgctgggattataggtgtgagccaccccacccagactgcccacttttttgattatttggtttttgtttttttgtttgtttgttttgtttttggcttaaattgtttagtctctttgttctkgtcattaatcccttgtcggatggatagtttaaaaatgttttctcccattctgtgggttgtctctcccactatgttgagtgtttcctttgctgtgcagaaactttttagcttaatgtaatctcatttgtctgttttt

SEQ ID NO: 891988 - DNA, 599 bp, Homo sapiens
ctttaaaagtacccaaggaatgaatgataatggtagagaagctcccatggtagctgtgggatggaggttttcttggctaaattgattttttaatttgtgttttttaggtgctagtatgataaattcgggagcatagaagttaggacttgcatcctcaytggaggcaaaaattggttattggggagcacaagcatcttagatattataatggtgtgtggccatttaaagctcaatcaacaaaagcttgtttcttaatatttgaatttctctcattgggttttacttgtgtattacactagcaacattgataatggattcatggtaagatgtacagaatatattcaaggtcaatccaacaaatttataacgtagagatggctgtggttggaagactttctctctagttgcctgatcttgaagtcattttagttggttaccttcacatacttatgggctaccattgggtgccttgtggcttgcttatatttggccctcaaatataaggatttgagaattgaatgaaaatcatttatattttattatttaattcaattaagattattcagctcaccaataattatctcaagtgccaaaaagga

SEQ ID NO: 891989 - DNA, 675 bp, Homo sapiens
tttttctttcacaaatagcttcagcaaaagtggcagaaactaattgataatcttacccaggctcaatactccaggattacttgatcgaaattcttccccttaagaccgcttctcttccccaggctacccaggcctcaggctctttggctgatttgctctgtgctaagggaarcccagatctccatgtctttggtgagcagacagatgggaagggccacagttgtacagcattgtcaaaaatgatatcataaagttctacttttgatttttaaatagaatctcaagagaaagtattttcccactcagccttgtgtgatgtcattcacagcagaagcacacagccctcattcgttatgaactgctagctgtaccacaatcagcccccttcagatgtaactgcccacaggtcaagagaaagcagtcagtcttaaacttggcttgaatagtcaactgagtttttgctgtccctgggccctcaaatccctgctttcatgctgtgtcagaactaggaaggagaagagccagcaaaaaattaataatttcagaataaaaactatagagttatttatcctaaaagaaactaataaaataaatacacactagttagactaatctagcaaaagacagagaaagtacaaatattgattgtggtttggtaaagaggaaagaattgca

SEQ ID NO: 891990 - DNA, 651 bp, Homo sapiens
tcagtattaaaatttggttttggttttgtctctatttttaagcaggtggcatgaagaaaatttcatttggagaacaaggactattatgtccatttagtttctactctgtgttgctaggtatgagaaatagagaagttaacaaaacatggttcttgcaccaaaacacataarcatgtgactaaagtgtctatttcactgggcaaatgatagttttgtcccttgagtctgcatttactattaacacctggccaatctccttagggtttaataacccacaatggacccttcttggtctacactgctaaaatgagttctttcctatcatctgtgaggtattccttaatagcacccccaaaggacagtataagaatgcaaatacttggttcccttaagggttcctttccaagttttctgaatgaactgtggggttaattccaccccctccaaacgtttgccacttgtacacttctctccttccatcttctttgcagagcagccttatgcagaaaacaagctcaaaaatacagatttttctttggacaggatctacacccaactcccagtgaaacagaattctaggaggtgagagccaaactgggagaactgaccataaaaacacttgatccatccctctttttaaatggaataacc

SEQ ID NO: 891991 - DNA, 608 bp, Homo sapiens
caaaagaaggcacacatgcagccaacaaacatatgaaaaaaagctcatcactgatcattagagaaatgcaaatcaaaaccacaatgagatatcatctcacaccagtcagaatggatattattaaaaagtcaaaaagcaacagatgctggcaatatgtggagaaaaaggaacatttttacactgttagtgggaatgtaaatcagttcaaccattgtggaagacagtgtgacaattctgcaaagacctagagccagaaataccatttgactcagcaatctcattactgggtatatatctaaaggactataaattgtcctattataaagatacatggacatgtatgttcactgcagcactattcacmatagcaaagacatggaatcaacctaaatgggcagcagtgatatgctcgatgaaaaaaaaacgtggtacatatacaccatggaaactatgcagccataaaaaggaatgagatcatgtcctttgcagggacatggttggagttgaagcccattatccttagcaaactaatgcaggaacagaaacccaaataccacatgttctcacttttcagtgggagctgaatgatgagaaaacatggactcatg

SEQ ID NO: 891992 - DNA, 608 bp, Homo sapiens
caaaagaaggcacacatgcagccaacaaacatatgaaaaaaagctcatcactgatcattagagaaatgcaaatcaaaaccacaatgagatatcatctcacaccagtcagaatggatattattaaaaagtcaaaaagcaacagatgctggcaatatgtggagaaaaaggaacatttttacactgttagtgggaatgtaaatcagttcaaccattgtggaagacagtgtgacaattctgcaaagacctagagccagaaataccatttgactcagcaatctcattactgggtatatatctaaaggactataaattgtcctattataaagatacatggacatgtatgttcactgcagcactattcacaatagcaaagacatggaatcaacctaaatgggcagcagtgatatgctcgatgaaaaaaaaacgtgrtacatatacaccatggaaactatgcagccataaaaaggaatgagatcatgtcctttgcagggacatggttggagttgaagcccattatccttagcaaactaatgcaggaacagaaacccaaataccacatgttctcacttttcagtgggagctgaatgatgagaaaacatggactcatg

SEQ ID NO: 891993 - DNA, 645 bp, Homo sapiens
cattgcactccagcctgggcaataaaagtgaaactgtcacaaacaaacaaacaaacaaacaaaagagtactacaataaggcccccacctttgggaaaataactgagcgaacacaatgagccagaggaaaaaagctaagcctcgcaccctattacctatctacctcatttagttctcatcctgaaactactcttcttgtggtcatgagctgtatgtcttttgttctccactctatccycagcaccaaatgcagtgcctggcacaaggtgcccaggaaagactattgactgaataactgatttcctacaaccagtctgcaatgtagacatccttttttttcctttttcacaggtgaagaactaatgttgacggaagttaagcaacctttcccaaagtctcatagtggtaatgtcttgggtaatttgtttccaaactgtgctttttatcctgtataggaccccaagccacttcacctttccagactccgttttcttttctttttttctttctttttttttcctgagaaaagtctcattctgtcacccaggctggaatgcagtggcgcgatctcggcttactgcaacctctgcctcctgggttcaagcaattctctgcctcagcttcccgagtaggtgagattacaggt

SEQ ID NO: 891994 - DNA, 560 bp, Homo sapiens
acgaggtcaggaaagcacaccgccatgtttctgtcagacgcttccctgttagaagttcacagtggacagccacctttaacatggtaaaatccacagtgatcattaagaaacacagcaggacagattatatgtgctgggttctatttttctagctgagtgtagtgacatatttaccatcccaaattaatttttctccctgaagacttgaatgctcatagtatctaaaaaatattaaaaatcttacagaaacagacagtataacatacaagcatayatttaccaaataaactacaaaggggctaagttttttttcaatagcctcttaaatttcattctttctccaggtccctcacatggctgtatgacaaactactcatttttgcctatctagaaatatgttgtagctcaaaataagtcctaccttatctttttatatacaaaccccacactgttttagtgttctgcataaatatgttatttttatttatttatttgtttatttattttgagacagtcttactctattgtccaggctggagtgcagtggtgtgatctcagct

SEQ ID NO: 891995 - DNA, 599 bp, Homo sapiens
gatggggagaatggaaccaagttggaaaacacacttcaggatattatccaggagagcttccctaacctagcaagacaggccaacattcaaattcaggaaatacagagaacaccacaaagatactcctcgagaagagcaactctaagacacataatcgtcagattcaccaaggttgaaatgaaggaaaaaatgttaagtcaaccagagagaaaggtcaggttaccccccaagggaagcccaccatactaacagtggatctctctgcagaaaccctacaagccagaagagagtggggatcaatattcaacattcttaaagmaaagagttttcaacccagaattccatatccagccaaactaaacttcataaatgaaggagaaataaaatcctttacagacaaacaaatgctgaggatttggtcaccaccaggcctgccttagaagagctcttgaaaaaagcactaaatatgaaaaggaaaaactgattccagccactatataaacaaaccaaaatataaagaccatcgacactatgaagaaactgcatcaactaatgggcaaaataaccagctagcatcataatgacaggatcaaattcat

SEQ ID NO: 891996 - DNA, 599 bp, Homo sapiens
gatggggagaatggaaccaagttggaaaacacacttcaggatattatccaggagagcttccctaacctagcaagacaggccaacattcaaattcaggaaatacagagaacaccacaaagatactcctcgagaagagcaactctaagacacataatcgtcagattcaccaaggttgaaatgaaggaaaaaatgttaagtcaaccagagagaaaggtcaggttaccccccaagggaagcccaccatactaacagtggatctctctgcagaaaccctacaagccagaagagagtggggatcaatattcaacattcttaaagcaaagagttttcaacccagaattccatatccagccaaactaaacttcataaatgaaggagaaataaaatcctttacagacaaacaaatgctgaggatttggtcaccaccaggcctgccttagaagagctcttgaaraaagcactaaatatgaaaaggaaaaactgattccagccactatataaacaaaccaaaatataaagaccatcgacactatgaagaaactgcatcaactaatgggcaaaataaccagctagcatcataatgacaggatcaaattcat

SEQ ID NO: 891997 - DNA, 580 bp, Homo sapiens
agttcagaaccttggagaaaaatactcgaaaatttatgtccaagacatttttaagctcaaatacagagagaagacacaggagtaaggggagaaagtccttatacaggactgcagatctgacaccaataaaagaagcraaaaaataaagaagaattcagtgggaatggtcttagacttcagcacagttctgagaaaggctgatttgacccctaattcaaacagtgtttgtttatttgttttccatttctccatgggactctaatacccagacacccatctctatttctagaccataatcccttcagactctgacttaccactgtatgtttcttttgtttatttgtttcttgatttagaaaacaattttatagtgtgttttgcttattttttgtctgtcattgctggctttgaaatggaagattgagttatattataaactcacagtactatctggaccctaattttacaagtaaggtttttcaataaataggttttcaaataggaactgaatttcagaatgatttaactggaaaaagtatgcaagacataaaagaaacacgagcaaagacaagataattat

SEQ ID NO: 891998 - DNA, 585 bp, Homo sapiens
tgctgccaaaaatacagtggtaggacacacatagaatagacatttccattctaaaagacagaaatagaaaagaagcaaggaataacaggtccctttccaattctggggtaagggttggctccccaggctcccagaaactctatccccatggctttgctgggagcaaaccatgcagaagttctaagtcttggagtcctatgcccgagtctctcccaggctgaaattgctttcctattgctctactggtctggggtcctagtggcagmcccatcaccaacctagtggggctttctgtggtggcttggcccctgtgacagtcctctgcctgggttctaaggctctctgaagcaccttttgaaatccaggtggaggcagccatgcctgtccagctcttgcactctgtgcacctgcagagttagcactgtgtggatgccaccaaggtttacctcttgtttcctccagagtggcagcctaaggtacataggggactgtttgagccacagctggggcagccaaggagtgctgttccagaatacatggagcagaaacttaaggcagctgggacagccagcctagaggtcccac

SEQ ID NO: 891999 - DNA, 629 bp, Homo sapiens
gccatatagtgtaggtgtgtagtaagctattccatcaaggtttgtgtaagtacatgctgtgatggtccattaaccataaaattgcctaaggatgctttcgtttctcagaatttatcctcatcactaaacaaggcataactacattttaaatatgttaggagagtagaccttagatattctcatttttaagaaaacatgtgaggcgatgrgtgtgttaactttattatgataatcatttcacaatgtatacttatgtgaggtcatcaccttgtatactttaaatgtgtacttttttgtgaattatacttcaatgaatctaaaaaagtctaaatgtatttaggcattcattcaacccacattctttaaactcttacaacctaggagatacttaggttttaggaacacagagacagaaaagagactttatatggtttagatatgtttcctcatccaaatctcatgtcaaattgtgatccccagtgttggaggagtggcctgatgagaggtgactgaatcatggggtagatatcctccttgctgttcctgtcatagtgagtgagttctcgtgaaagctggttgtttagaaacacttccctcttctctctcttcctcatgctccagcaaagtag

SEQ ID NO: 892000 - DNA, 676 bp, Homo sapiens
gttttggataggttgaaatgaaggtatcaagtagtagagaaagcatgagttgatgctgctgtggaagccaggttcaatgggtgacactgggctgcttcattggggcaagtccattcctgattgactcactttggaaatagagaactcccaataattggttcgcatgcagaagcatggttgctgagaaaaattgttgttttcttttttttttgagatggagtttcactcttgttgcccaggcggagtgcaatggcgcactctcggctcaccacaacctccrcctcctgggttaaagcaattctcctgcttcagcctcctgagtagctgggattacaggcacctgccaccatgctgagctaaatttttttgtccttttagtagagatggggtttctccacgttggtcaggctggtctcgaactcctgacctcaggtgatctgcctgccatgtactcccaaagtgctgggattacaagcatgagctaccatacccagccgaaaaattattggctgatattcaaacatgcttaaaactaattcttatgtctactttttcccataataaaaaaggaaagcaggtttttcctaggacatgagtaattgagataactggtctttcatttttattattttcaagtgacagggtaaacagatgatttccttcttacatttgtatt

SEQ ID NO: 892001 - DNA, 676 bp, Homo sapiens
gttttggataggttgaaatgaaggtatcaagtagtagagaaagcatgagttgatgctgctgtggaagccaggttcaatgggtgacactgggctgcttcattggggcaagtccattcctgattgactcactttggaaatagagaactcccaataattggttcgcatgcagaagcatggttgctgagaaaaattgttgttttcttttttttttgagatggagtttcactcttgttgcccaggcggagtgcaatggcgcactctcggctcaccacaacctccgcctcctgggttaaagcaattctcctgcttcagcctcctgagtagctgggattacaggcacctgccaccatgctgagctaawtttttttgtccttttagtagagatggggtttctccacgttggtcaggctggtctcgaactcctgacctcaggtgatctgcctgccatgtactcccaaagtgctgggattacaagcatgagctaccatacccagccgaaaaattattggctgatattcaaacatgcttaaaactaattcttatgtctactttttcccataataaaaaaggaaagcaggtttttcctaggacatgagtaattgagataactggtctttcatttttattattttcaagtgacagggtaaacagatgatttccttcttacatttgtatt

SEQ ID NO: 892002 - DNA, 596 bp, Homo sapiens; identical to SEQ ID NO: 888308

SEQ ID NO: 892003 - DNA, 668 bp, Homo sapiens
ttgattaggtaggatttcttctatgtttcttaccattcatccagtattgctccagcctatcaatgaaacaccaaagaatgctggtcaaagacttactacaatctagatatattctattgacaactttcttccattccattctatctactggtgtaataaccttatgaaaatatggaacaaggctattctgacattttacattttgactttcaatagtcaaaatttsttttaaaattattttccaataataataatgttattgctggtattatcactattggtataatagcaataattttaatgtaacaaatccccatgatataccaactctcttgatgataacattatagtctttgagctcctcaacaccactctaaggcagaagtgtttgtctctgtttttaaaaagaaaacattaaagatcaaagagtttaacttatttaaggacataagtcagaattgatatggtccaggattcaaatgtaggtgtttatctctgcactaaactatataaacctttagtgcactgtcaagcacatcattttgcttcatttttattacttttactttatcatgttggaaaaatagatcagaggaaaaataaaggacataagtagagttttaaaattcattaaaaatggcaattttatttaactctatagaagatga

SEQ ID NO: 892004 - DNA, 668 bp, Homo sapiens
ttgattaggtaggatttcttctatgtttcttaccattcatccagtattgctccagcctatcaatgaaacaccaaagaatgctggtcaaagacttactacaatctagatatattctattgacaactttcttccattccattctatctactggtgtaataaccttatgaaaatatggaacaaggctattctgacattttacattttgactttcaatagtcaaaatttcttttaaaattattttccaataataataatrttattgctggtattatcactattggtataatagcaataattttaatgtaacaaatccccatgatataccaactctcttgatgataacattatagtctttgagctcctcaacaccactctaaggcagaagtgtttgtctctgtttttaaaaagaaaacattaaagatcaaagagtttaacttatttaaggacataagtcagaattgatatggtccaggattcaaatgtaggtgtttatctctgcactaaactatataaacctttagtgcactgtcaagcacatcattttgcttcatttttattacttttactttatcatgttggaaaaatagatcagaggaaaaataaaggacataagtagagttttaaaattcattaaaaatggcaattttatttaactctatagaagatga

SEQ ID NO: 892005 - DNA, 621 bp, Homo sapiens
cttctcaaaagaagacatctatgcagccaacagacacatgaaaaaatgctcatgatcactggatagagaaatgcaaatcaaaatcacaatgagatatcatctcacgccagttagaatggtgatcattaaaaagtcaggaaacaacagacgctggagaggatgtggagaaataggaatgcttttacactgttggtgggagtgtaaattagytcaaccattgccgaacacagtgtggcgattcctcaaggatctagaactagaattaccatttgacccagcaatcccattactggttatatacccaaaggattataaatcatgctagtataaagacacatgcacatgtatgtttattgtggcactattcacaatagcaaagacttggaaccaaaccaaatgtccatcaatgatagactggattaagaaaatgtggcacatatacaccatggaatactatgcagccataaaaaagatgagttcgtgtcctttgcagggacatggatgaagctggaaactgtcattctcagcagactatcacaaggacagaaaatcaaacaccgcatgttctcactcataggtgggaattgaacaatgagatcacttggacacagggcaggaaac

SEQ ID NO: 892006 - DNA, 621 bp, Homo sapiens
cttctcaaaagaagacatctatgcagccaacagacacatgaaaaaatgctcatgatcactggatagagaaatgcaaatcaaaatcacaatgagatatcatctcacgccagttagaatggtgatcattaaaaagtcaggaaacaacagacgctggagaggatgtggagaaataggaatgcttttacactgttggtgggagtgtaaattagctcaaccattgccgaacacagtgtggcgattcctcaaggatctagaactagaattaccatttgacccagcaatcccattactggttatatacccaaaggattataaatcatgctagtataaagacacatgcacatgtatgtttattgtggcactattcacaatagcaaagacttggaaccaaaccaaatgtccatcaatgatagactggattaagaaaatgtggcacatatacaccatggaatactatgcagccataaaaaagatgagttcrtgtcctttgcagggacatggatgaagctggaaactgtcattctcagcagactatcacaaggacagaaaatcaaacaccgcatgttctcactcataggtgggaattgaacaatgagatcacttggacacagggcaggaaac

SEQ ID NO: 892007 - DNA, 660 bp, Homo sapiens
aattgaggagaggggtccatcatcttgtgcctaaattacataaatatccgctagcctacttttagaaattagtattttttcttctttgagaaatacaacctttagaaacttggtttcctaagctaatcacattctaattctgcaactgtactgaactacctaggaccatgggcatgtaacaaggtcaaaggtcagacattgagtctttrtgaaaaatcaatatctttcctgttgtaagagtaggagaactaaggatcgcctaatcttttcttaaaaaaaatctgcccaaagagctaagaccccaaaacctgtcattttccttagttctgggcaccagcaatatttgagcactgaggatatcatatcctggctctgatgggggaagaggcccctgggtgtgaacttgtttgctttctataatgtaaaaggatgggccctggactcagctacaagattcgtgacttaattgtatgacaacacgcaaacccacttaacctctctaagcatcgcttgagtcaataaggggatggaatgagatgatatttgtggatattgtgcaaaagaaagatttcaaggtacacacttgtgcccagcagaggaaaacacactgtggtaccggtcttaataatggtcccaaagatacccatgccctaaccctgg

SEQ ID NO: 892008 - DNA, 660 bp, Homo sapiens
aattgaggagaggggtccatcatcttgtgcctaaattacataaatatccgctagcctacttttagaaattagtattttttcttctttgagaaatacaacctttagaaacttggtttcctaagctaatcacattctaattctgcaactgtactgaactacctaggaccatgggcatgtaacaaggtcaaaggtcagacattgagtctttgtgaaaaatcaatatctttcctgttgtaagagtaggagaactaaggatcgcctaatcttttcttwaaaaaaatctgcccaaagagctaagaccccaaaacctgtcattttccttagttctgggcaccagcaatatttgagcactgaggatatcatatcctggctctgatgggggaagaggcccctgggtgtgaacttgtttgctttctataatgtaaaaggatgggccctggactcagctacaagattcgtgacttaattgtatgacaacacgcaaacccacttaacctctctaagcatcgcttgagtcaataaggggatggaatgagatgatatttgtggatattgtgcaaaagaaagatttcaaggtacacacttgtgcccagcagaggaaaacacactgtggtaccggtcttaataatggtcccaaagatacccatgccctaaccctgg

SEQ ID NO: 892009 - DNA, 611 bp, Homo sapiens
aactgtctttaatctacaatggtagaccaaagatcattaagagtaaaaatttcagaaaggaaataataataataataacaacttgaaagagaagacagccattatattttgatagcttgcataatgtttctatgatacatggtgcattataatagcattttgaattactgtgttgttattgacaatctgtgcaaaccatttagaagataattcagtatatggctcctatcatcaccaaaggctaatgagaaagacaatactttaaagctctgtaaatgtgagcagagagaaataaytaaaagaaaatttcagcgctatattttttaaaagctttgatgctgaaaaattacagtttttattttattcattttctaaccaaaggcttttgtgagaaagacacataaatgacagcaaggaaaagctgaatgtctgcaaaatattttttgtcaagtggaatacatcactctttttaaaatattgctttgttatgcatttgatgctgcatatagtgaatttgtgttagcacataaaatatagaagagtcatatatttagagggacaggttaaagaaaaattataaacactaatattagcagaagtgtgaaaaatga

SEQ ID NO: 892010 - DNA, 603 bp, Homo sapiens
tttatgctttgtttcccctttaaagctgaatgcctttaacagcacgcaagtcacatcatgaatgctttgctgcttagaaatttcttctgccagatactctaaatcatgtctctcaagtccaaagttccacaaatctctagggcagcggcaaaattcctcccagtctctttgctaaaacataacaagagccatctttgccccagttcccagcaagttcctcatttccatctgagaccacctcaacctggacttcagtgttcatatcactatcagcagtttgggtaaagccattcaacaagtctctaggaagttctaaactttcccacattttcctatcttcttttgagccctcmaaagtatttcaaccgctgcctattacccaattccaaagtcatttccatgttttcaggtatatttcttagcagtgtgccactctactggtaccaatttattgtagtagttaattttcaggctgctaataaacacctacccaagactgggcaatttacagaagaaagaggtttattggacttacagttccacgtggctagggagacctcacagtcatggtggaaggtaaggaggagcaagtcacatcttatg

SEQ ID NO: 892011 - DNA, 603 bp, Homo sapiens
tttatgctttgtttcccctttaaagctgaatgcctttaacagcacgcaagtcacatcatgaatgctttgctgcttagaaatttcttctgccagatactctaaatcatgtctctcaagtccaaagttccacaaatctctagggcagcggcaaaattcctcccagtctctttgctaaaacataacaagagccatctttgccccagttcccagcaagttcctcatttccatctgagaccacctcaacctggacttcagtgttcatatcactatcagcagtttgggtaaagccattcaacaagtctctaggaagttctaaactttcccacattttcctatcttcttttgagccctccaaagtatttcaacygctgcctattacccaattccaaagtcatttccatgttttcaggtatatttcttagcagtgtgccactctactggtaccaatttattgtagtagttaattttcaggctgctaataaacacctacccaagactgggcaatttacagaagaaagaggtttattggacttacagttccacgtggctagggagacctcacagtcatggtggaaggtaaggaggagcaagtcacatcttatg

SEQ ID NO: 892012 - DNA, 649 bp, Homo sapiens
ctggcaagtatataaaacctcagacccaggtgccgtctgtcacccctttctttgactaggaaagggaactccctgaccccttgtgcttcctgagtgaggcaatgccttgccctgctttggctcacgcacagtctcgctgattgctagcacagcagtctgagatcaaactgcaaggcagcagcaaggctggggggaggggcacccgccattgcccaggcttgcttaggtaaacaaagcagcctggaagctctaactggrtggagcccaccacagctcaaggaggcctgcctgcctctgtaggctccacctctgggggcagggcacagacaaacaaaaagacagcagtaacctctgcagacttaaatgtccctgacagctttgaagagagcagtggttctcccagcacgcacctggagatctgagaacggacagactgcctcaggtgggtccctgacccctgacccccgagcagcctaactgggaggcaccccccagtaggggcagacggacacctcacacggccaggtactcctctgagacaaaacttccagaggaacgatcagacagcagcattcgcggttcacgaaaatccactgttctgcagccactgctgctggtacccaggcaaacaggggctggagtggacctc

SEQ ID NO: 892013 - DNA, 640 bp, Homo sapiens
gatgttttgaagaaagcaagaaatacaaataacgtgtgtgcttagatatttctttgtttataatttgacaggaagaaagaaggatagaggtttattgttgcataaagcctggaaaaaagctgaaagcaatacctacaatgattatttcagaggttttatttmgatggactctaaaacaatccaaatgtacctttgcagaagagattcgaatgaatgcattcgaatgaatttgtgaccagtggtaaaagttaataaaaaatatatttaaaaaatccacacaaggactatgggctcagatcttaaaaagtaaagaatttacttgtctctcaagataaaaaacactgacaacatgaggcattttctgaaggcaaatggatcgtgaaataattagtggagaagcatgaatatcaactacagcctttgatcagttgcagaaattaggactgtagtagctacctaatatccttttgataaattcattttcctggtgaataacaaataataagctgaagccaactgaaaacatcaaatcaatgtaatcataaagaaacaaatttttagatggaaaagactttcttggtgctgagtagaattttatcataaaattgtatcatatgaatacaaaatagaaagtcttaaa

SEQ ID NO: 892014 - DNA, 624 bp, Homo sapiens
gtgtgctgggagaaccactactctcttcaaagctgtcagacagggacatttaagtctgcagaggattctgctgccttttgtttgactattccctgcccccagaggtgcagtctacagaggcaggcaggcctccttgagctgcagtgggctccacccagttcgagcttccaggctgctttgtttacctactccagcctcggcaatggcaggcgcccctcccccagcctcgctgccgccttgcagttcgatctcagtctgctgtgccagcaatgagggaggctctatgggcrtaggaccccccgagccatgcacgggatataatctcctggtgtgccgtttgctaagactgttggaaaagtgcattattagggtgggagtgacccgattttccaggtgccatctgtcacccctttctttgactaggaaagggaattccctgacctcttgtgcctcccgggtgaggtgatgcttcgccctcctttggctcatgctgggtgcagtgcacccactgccctgcacccactttctgacactccccagtacctcagttggcaaggcagaaatcacccgtctgtctgcatcgctcacgctgggagctctagactggagctgttcctatttggc

SEQ ID NO: 892015 - DNA, 624 bp, Homo sapiens
gtgtgctgggagaaccactactctcttcaaagctgtcagacagggacatttaagtctgcagaggattctgctgccttttgtttgactattccctgcccccagaggtgcagtctacagaggcaggcaggcctccttgagctgcagtgggctccacccagttcgagcttccaggctgctttgtttacctactccagcctcggcaatggcaggcgcccctcccccagcctcgctgccgccttgcagttcgatctcagtctgctgtgccagcaatgagggaggctctatgggcataggaccccccgagccatgcacgggatataatctcctggtgtgccgtttgctaagactgttggaaaagtgcattattagggtgggagtgacccgattttccaggtgccatctgtcacccctttctttgactaggaaagggaattccctgacctcttgtgcctccckggtgaggtgatgcttcgccctcctttggctcatgctgggtgcagtgcacccactgccctgcacccactttctgacactccccagtacctcagttggcaaggcagaaatcacccgtctgtctgcatcgctcacgctgggagctctagactggagctgttcctatttggc

SEQ ID NO: 892016 - DNA, 638 bp, Homo sapiens
ccccattatatgactctagattgataaattacctagttttgattatggccttagattttagagattcagactttggttttgcccatagacacgtggtagattttatctaacacacaaattaaaaggaatagggctccataacttaaagagaataagccatcttttgtagttgtggcagataaacagttcagtgaagttactgcaaacccacagcattcattactgctatgaagtactgagacctccaactccagccaagatgtagtagtatatatcaaactaaacctcccacttcagggggaaagtgggataaaatatrcataaatatttacatatttgtatatatttatgtgtgtgtgtatatatatatatatatatatatatatatatatatatagtcatgcaatgcataaccaagttttgatcaaagacagactgcatatgcaactggtggtcatatgcagttgcatatgacttgctatacattttccaagtttagatgtacaaatacctaccattaggttaaaattgcccacaatatttagtacagtaccatgctgtacaggtttccagccaaggagcaataggctgggtgtgtagtaggctataccatctaggtttgtgtaaatatattctga

SEQ ID NO: 892017 - DNA, 632 bp, Homo sapiens
tttgaatggtaaatactctgtcattttaataattaatacttaataatttctttcaatatgacacttttcttctgactttattttgacttttactattaggaaatttaaaatttatataaagtaaatctgacagtttcttttatgatttctaggtattgcctcctgcttaagaaagaatttcctagactagaataattkcaaaattatatattttttattgcttttatagtttctagaacataaaagagtttgtttttgcacatagtgtgatcttggaaactaagtttttttcccaaaagcctaaataatgtcccaacactatttattgaataataaactcttataacgagaaaaatatatttcaaagagatatctcaatttagtgtcaccgtacaaactggactggaagggatcgaggaaaacagttgggagatggacaggaatgctatcttccttgttaaagcacactccaggatttgttactaaaaagaaagctttcaggtcagaaagctaacagcctaaactaaggaactggctttggcagccgtaaaggtgacttagaaaagaggctataaaattgaaagagcttgaggaatagaataaataagagtttgtaactgattgagagacag

SEQ ID NO: 892018 - DNA, 577 bp, Homo sapiens
ctcccctttctgagcctccatgaggacatctgctcccggtgtccactgccttccgggatctccctcccttctttcactggctctcctgtacttaccctttttcctggtcctggactcttctactcctttcttcaaagtccctggctttcaacactaccacgtgctaaggactcccaaagtgagagtcattcattcattcattcagcacatctctgatggccartgaggtgccaggcattgctgttggtgctggagctagaacagggggtaagacaggccaaagccctgccctcctagagctcttcttctggtacagggagacaggcaataaagaacacacctaaaaatgcaaaagtctgctgggccagtggctcacgcctgtaatcccagcactttggaaggctgagataagagataccttgaacccaagagttcaagaccagcctgggcaacagaccccatctctacaggaaaaaaaaaaaaaaattagccgggcctggtggtgcgcacctgcggtcccagctactggggaggctgaggcgagaggatcacttgagcctgggaggtcaaggctgca

SEQ ID NO: 892019 - DNA, 577 bp, Homo sapiens
ctcccctttctgagcctccatgaggacatctgctcccggtgtccactgccttccgggatctccctcccttctttcactggctctcctgtacttaccctttttcctggtcctggactcttctactcctttcttcaaagtccctggctttcaacactaccacgtgctaaggactcccaaagtgagagtcattcattcattcattcagcacatctctgatggccaatgaggtgccaggcattgctgttggtgctggagctagaacagggrgtaagacaggccaaagccctgccctcctagagctcttcttctggtacagggagacaggcaataaagaacacacctaaaaatgcaaaagtctgctgggccagtggctcacgcctgtaatcccagcactttggaaggctgagataagagataccttgaacccaagagttcaagaccagcctgggcaacagaccccatctctacaggaaaaaaaaaaaaaaattagccgggcctggtggtgcgcacctgcggtcccagctactggggaggctgaggcgagaggatcacttgagcctgggaggtcaaggctgca

SEQ ID NO: 892020 - DNA, 577 bp, Homo sapiens
ctcccctttctgagcctccatgaggacatctgctcccggtgtccactgccttccgggatctccctcccttctttcactggctctcctgtacttaccctttttcctggtcctggactcttctactcctttcttcaaagtccctggctttcaacactaccacgtgctaaggactcccaaagtgagagtcattcattcattcattcagcacatctctgatggccaatgaggtgccaggcattgctgttggtgctggagctagaacagggggtaagacaggccaaagccctgccctcctagarctcttcttctggtacagggagacaggcaataaagaacacacctaaaaatgcaaaagtctgctgggccagtggctcacgcctgtaatcccagcactttggaaggctgagataagagataccttgaacccaagagttcaagaccagcctgggcaacagaccccatctctacaggaaaaaaaaaaaaaaattagccgggcctggtggtgcgcacctgcggtcccagctactggggaggctgaggcgagaggatcacttgagcctgggaggtcaaggctgca

SEQ ID NO: 892021 - DNA, 582 bp, Homo sapiens
gttcattccatcaacaagtatttactaaacacatagcatactccaggaaccacgctaagcaccagacagtatagttctcagttcacagaaaggaagaagcagccctgcaccctggcctcccagtgcagcgattgcccagtatctcctgaggcttccactrtgaagccagtcctgtctgaaaagctatggagcattttatttatatatttatttatttatttatttatttatttatttatttatttttgagacagagtctcactctgttgtccaggctggagtgcaatggtgcaatctcagctcactgcaacctccacctcccaggctcaaacaattctcttgcctcagcctcctgagtcactgggattacaggcacctgccactatgcctggctttttttttttttttttttttttgtatttttaatagagacagggtttcaccatgttggccaggctggttttgaactcccgacctcgagtaatccacctgccttggcctctcaaaactctgggatttcaggtgtgacccaccatgcccagcagctatggaacacttaaataacacagagaaaatcacatt

SEQ ID NO: 892022 - DNA, 582 bp, Homo sapiens
gttcattccatcaacaagtatttactaaacacatagcatactccaggaaccacgctaagcaccagacagtatagttctcagttcacagaaaggaagaagcagccctgcaccctggcctcccagtgcagcgattgcccagtatctcctgaggcttccactgtgaagccagtcctgtctgaaaagctatggagcattttatttatatatttatttatttatttatttatttatttatttatttatttttgagacagagtctcactctgttgtccaggctggagtgcaatggtgcaatctcagctcactgcaacctccacctcccaggctcaaacaattctcttgcctcagcctcctgagtcactgggattacaggcacctgccacyatgcctggctttttttttttttttttttttttgtatttttaatagagacagggtttcaccatgttggccaggctggttttgaactcccgacctcgagtaatccacctgccttggcctctcaaaactctgggatttcaggtgtgacccaccatgcccagcagctatggaacacttaaataacacagagaaaatcacatt

SEQ ID NO: 892023 - DNA, 610 bp, Homo sapiens
cctccaagctgcctggctactgttaatgcacacatcacggcctctgtctcagtgcttgaatgccaggacagcagggatttggattcagcagagcaagttttctgaaggtaagcctcatgaagctgtggttagctaaggagattgtatagttccgcaaagacttttaaaaacaggaagccagcagaaggatttttttcttaccccaaaagttttcccctaataaaaggtctttcttacatgtctttcttatatttggttcttatttatactttctatttctttgctaagactttctgttcttttatttattttaagtttgatcaaaattgtccactgaggggccgggcgcagtggatcacgcctgtaatcctagcactttgggaggcggaggcgggtagatcactggagatcaggagttcgaaaccagcttgaccaacatggtgawaccctgtttctactaaaaatgcaaaagagttagccaggcatggtggtgggcgcctgtaaccccagctactcggaggctgaggcaggagaatcgcttaaatccggaaggcggaggatgcagtgagcagagattgcaccattgcactccagcctgggtgacagagca

SEQ ID NO: 892024 - DNA, 618 bp, Homo sapiens
gcaccctagcacccataacttggtttctttaccattttacactaaaacgaactaggacatcttggaaaaatggctaattccagggcttgacaagatagatgtaagatgagtctagaatatcgtgttattccagaaagtaaagaagtacttttttaaaacaatggttgcatgccatgtaagcaagatttaagggactcctaccggccamatttggcacaattttgatcaccaaaattagcaatttcttacacaaatgtgaacatcaaaaatggaaattcatcagccataacatgatttcatgagccatcgattaataaatggaaggaaggaaggctcttgattacaggggaatgttgagggccaactggtaaatgtgaagactggagtgttccaaagttgtaaaatcaccattttgcaaccacaagggtaaagatccaatcagccaagaatcatcagtggacaaacaaataaaccaatgtagtacataatacaacacagtagttttcagtcttagaaaaaggaaggaagttcggtcatgtgctacaatatgcatgaagatggaggacacgatgctaagtgaaataagtcagtcacaaaaagacaaacaccgctgggcat

SEQ ID NO: 892025 - DNA, 618 bp, Homo sapiens
gcaccctagcacccataacttggtttctttaccattttacactaaaacgaactaggacatcttggaaaaatggctaattccagggcttgacaagatagatgtaagatgagtctagaatatcgtgttattccagaaagtaaagaagtacttttttaaaacaatggttgcatgccatgtaagcaagatttaagggactcctaccggccaaatttggcacaattttgatcaccaaaattagcaatttcttacacaaatgtgaacatcaaaaatggaaattcatcagccataacatgatttcatgagccatcgattaataaatggaaggaaggaaggctcttgattacaggggaatgttgagggccaactggtaaatgtgragactggagtgttccaaagttgtaaaatcaccattttgcaaccacaagggtaaagatccaatcagccaagaatcatcagtggacaaacaaataaaccaatgtagtacataatacaacacagtagttttcagtcttagaaaaaggaaggaagttcggtcatgtgctacaatatgcatgaagatggaggacacgatgctaagtgaaataagtcagtcacaaaaagacaaacaccgctgggcat

SEQ ID NO: 892026 - DNA, 635 bp, Homo sapiens
cttttcaaatttaaacttttaatttcacagtagaatttaaatttgttcaaattcttctggttatgtttctcatttgtcgtgtgtgtgtatgtgtgtgtgcgcttgtgtatttatgtctgtgtaattttatcacatagctttgtgtatccaataccacagtcaaggtacagaacagttccaacaccacaaggattcatcttgctgcctttttacaaccacattcccctgcatctcacccctctcaccctcctaaaccctggaaaccactaatctcatttctataactttgttattttaaaaatattatacaaatggaattatacagtggataacccgtttactgtgttgttcatattttatcttttttttctttgatggagtttcactcttgttgcccaggctggagtgccatggcgtgatttcrgctcactgcaaccttcacctcccgggttcaagcgattctcctatctcagccttccaactagctgggattacaggctcccgccaccatgcacggctaatttttgtattttcagtagagacagggttgatcaccatgttggccaagctggtcttgaactcctgacctcaggtgatccacccgcctcagcctcccaaagtgctgggattacagg

SEQ ID NO: 892027 - DNA, 599 bp, Homo sapiens
aggtccctgagtagaactccttcatccctgcagaaattatctttgcttccagtactttcaaggtggaagagaaaaggaaatggctgggggtgaataacttaggctgaaacttctatgtccagagaaggcctcaccaatgtttctgcatcctgtcacccaggaaagaaaacatacagctaaaatttactgaggccacactcggtcttgggcagcatctcagcattctacgaatgcatacggagtaaacagtggtccctggagcaagatgtagaaggaggcagtatgtctatctcaggctcagctcayggactcaggggaaacctccctggaaggagataatgtggtttttgtcagggtggtgccagccgacagactggcctgtggatacttgtaaggcatctcatgaaggacacccaggaaaccatatgggaatgggaggaattttgcaagtaaggccagaggtccagcaagctccatatagaaactctaggttgttattaactgcttctacctaaacccaatgaatgagaaacctggtacttacattcaggttacacatatattatctctaatcttttcaagataggtgaagtatcatt

SEQ ID NO: 892028 - DNA, 626 bp, Homo sapiens
cagcccccaacattttaactcattccagctttaactcaaaagtccaactcctaagtctcaactgaaacaaggcaaatcccttccacctatgagcctgtaaagtcaagagcaagttagttacttcctagatacaatgagggtacaagcattgggtaaatacacccattcaaaatgggagaaattggccaaaaccaagggcttacaggccccaggcaagaccaaaatccaatagagcagtcattaaactttaaggtttcaaaatgatctcctttaactccatgtctcacatccaggtcacaytgatgcaagaggagggctcccacagccttgggcagctctgcccctgtgactttgcaaggtacagcctcactcccagctgctttcatgggctagcgttgagtgtctgtggcttttccaggcacacagtgaaagctattgatggatctaccattctgagatttggaggatagtggccctctcctcacagctctactaggcagtgtcccagtggagactctgtttgggggctccaaccccacatttcccttctgcactgtcctagcagaggttatccatgaaggctgtgcccctgcagcacacctctgcctagacttttaggtgtttcc

SEQ ID NO: 892029 - DNA, 704 bp, Homo sapiens
actgtggatgttgtcactagtattgttggtgttggttggttggtttggtaattgttttggtttagtctttttcatcgtggttgttgttcagggtttccttttaattatggctttgtatatacacagcacatcttctgggtgatcctgtatccagctcaacatggctattgagactcatttgttttgtcctatagcaccactctaactgatgcagtctcatggacagaaactaaacaacgtctgtggaatttctgggaataaaaccagctataactttctaaaattatgacaagtatcttaaaactattcaagttcttattagttacaaatgccaaaatctactaattgaaataaaaatgcaaaaatgacatgttttctgcttccaaaaaaagttactatcaagtacagaaaagaaacaagtagataaatgattacaaaatggtatagctgtttctttgcattggatgatggtcaggatactggcaacatataggaaagtcaactttcatctttaaccctgaaagtacaggaggtctattatatgtaktgatgtttcatgttcttctagggaatattaatttaggaaaaaaatgaaagctcgtaaaaaaaaaatcttccctctccatttttaccttcctggacatgtgaagggctaaagttttctttgacctttgctacatctaaaatgatttgatcatcaaaat

SEQ ID NO: 892030 - DNA, 563 bp, Homo sapiens
ctgatgggtttccctttgtgggtaacccgacctatctctctggctgcccttaacattttttcgttcattccaactttggtgaatctgacaattatgtgtcttggggttgctcttctcaaggagtatctttgtggtgttctctgtatttcctgaatttgaatgttggtctgccttgctatgttgtgggagttctcctggataatatcctgaaragtgttttccaacttggttccattctcctcttcactttaggtacaccaatcaaatgtagatttggtctttcacatagtcccatatttcttggaggctttgttcatttctttttactcctttttctctaaccttgttttcttgctttatttcattaatttgatcttcaatctctgataccctttcttccacttcatcgaatcagctattgaagcttgtgcatgcatcacgtagttcttgtgccatggttttcagctccatcaggtcatttaaggtcttctctacactgtttattctagttagccatttgtctaatcttttttcaaggtttttagcttcttgcaatgggttcg

SEQ ID NO: 892031 - DNA, 563 bp, Homo sapiens
ctgatgggtttccctttgtgggtaacccgacctatctctctggctgcccttaacattttttcgttcattccaactttggtgaatctgacaattatgtgtcttggggttgctcttctcaaggagtatctttgtggtgttctctgtatttcctgaatttgaatgttggtctgccttgctatgttgtgggagttctcctggataatatcctgaaaagtgttttccaacttggttccattctcctcttcactttaggtacaccaatcaaatgtagatttggtctttcacatagtcccatatttcttggaggctttgttcatttctttttactcctttttctctaaccttgttttcttgctttatttcattaatttgatcttcaatctctgataccctttcttccacttsatcgaatcagctattgaagcttgtgcatgcatcacgtagttcttgtgccatggttttcagctccatcaggtcatttaaggtcttctctacactgtttattctagttagccatttgtctaatcttttttcaaggtttttagcttcttgcaatgggttcg

SEQ ID NO: 892032 - DNA, 622 bp, Homo sapiens
tactgtccatatcaataccagcattttggtcatagcaatttaacaagtctctagaaagttccaaattttccctcatcttcctgtcttcttttgagccctccacactcctccaccttctgtctattacccagttccaaagctgcttccacatttcaggtatctttatagcaatgccccactacttggtgcccattttctgtattattcctctcttgcactgctataaagaaataatgtagactgggtaatttataaagaaaagaggtttaattggttcacarttttgccagctgtacaggaagcatagtggcttctaggggagcctcaggaaacagtcaatcattttagaaagtgaaaggaaagcatgcatatcttatatggcagagcgtgaggaagaggagagaatggggaggtgccacacacttttaaacaaccagatctcatgagacttctatcacaaaaacagcaccaaagggggaaatctacccccatgatccaatcacctctcatccggcccagtcttcaacattggggattacaatttgacatgagatttgggtggggacacagatccaaacatgtcagacagtaagagggctttagagtaagacagacccagttc

SEQ ID NO: 892033 - DNA, 647 bp, Homo sapiens
  misc_feature 125, 371: n = A,T,C or G
tgaagataagatggttgtaggtgtgtggtgttatttctgggctctgtattctgttccattagtccaggtaactgtttttgtacagtaccatgctgttttggttactgtagccttgtagtagaggncgaagtcgggtacagtgatttctccagctttgttctttatgcttaggatttccttggctacytgagccatttttttgatccatatgaattttaaaatagtttttctttgttctgtgaagaatatcattggtagtttggtagcaatggcattgaatctataaattgcttttggcaatatggccattttaacaatattgattcttcctgcccatgatcatggaatgtttttccatttgggtcatcttngatttttttgaacaatgttttgtaattctcattgaaaagatctttcacctccctggattagttgtattcctaagtattttattctttttgtggctattgtgagtgggattgcatttgcttttttttttttttccttttttttttttttcttttttgagacatggtttcactctgtcacccaggctgcagtgcagtggtgtgatcatggtttactgcagcctcaacctcctgggctcaagcaattctcccatttcagcctctcacgtagctaggact

SEQ ID NO: 892034 - DNA, 647 bp, Homo sapiens
  misc_feature 125, 371: n = A,T,C or G
tgaagataagatggttgtaggtgtgtggtgttatttctgggctctgtattctgttccattagtccaggtaactgtttttgtacagtaccatgctgttttggttactgtagccttgtagtagaggncgaagtcgggtacagtgatttctccagctttgttctttatgcttaggatttccttggctacttgagccatttttttgatccatatgaattttaaaatagtttttctttgttctgtgaagaatatcattggtagtttggtagcaatggcattgaatctataaattgcttttggcaatatggccattttaacaatattgattcttcctgcccatgatcatggaatgtttttccatttgggtcatcttngatttttttgaacaatgttttgtaattctcattgaaaagatctttcacctccctggattagttgtattcctargtattttattctttttgtggctattgtgagtgggattgcatttgcttttttttttttttccttttttttttttttcttttttgagacatggtttcactctgtcacccaggctgcagtgcagtggtgtgatcatggtttactgcagcctcaacctcctgggctcaagcaattctcccatttcagcctctcacgtagctaggact

SEQ ID NO: 892035 - DNA, 601 bp, Homo sapiens
aggcatgtcactgaccctgttttccagtcttttgaatgcccttctcattcagttgttgtgagatctaaatgaaattctattcatcaaagtttctttataatctacaagtgctttatgaatgcacgatatcatatgtactgcaaataacttatgtgacccaaactacatcaatgcgtcctaccacaccacgcctcatactgaatgggcctcccatatgccccatctctgcggctgggatctccagatggaggggatccgaggcctggaggcgcctgggctgtgggggatggaggtgaggtgagagtgtggagggttgggcagcatggttcattatcaccttatctcccttttcacatktttcagccctcacccaccagcagtttgccccttccccctacttggcgctttctctgcctggacttgacatacatggtgagtggaagagtcctcctgggctgtgggctgtagcattggaggacagggggtgagaaatggactgagattacaatggaagggatattattgggattctaagaagaattctgaccttccaaggcaagagacccagtaatattctctccccagagaaaagtcccctaac

SEQ ID NO: 892036 - DNA, 594 bp, Homo sapiens
gctcaaaacccttcaatgtcttcccatttgtatcagtttccttttgctgctctaaccaatgaccacaagtggtggcttaaaacaacagaaatctagtctcttaatgttctacagtgcacaagtccaaaaattggattttatggaactaaaattgargtgccaatagggctgcattccttctggaagtttcagggttgggagcagaaatctggctgcatgcccttccagtttctggaggctgcctgcctcagctcgtggcccctttcacgagtgactcaagcctcttgctcctgtcaccacgtcttctactcctacctctgaccctccttcctccctcttatgaggacccctgtgattacattgggctcacctgggcaatccaggatactctccccatctcaagattccaaagcccataagcaaagtctgtttccctacataaggtaacaaattctcatatactggtgattaggatgggagcatctatgggggtgtccatttcacacagagtaaaagcccaagtcctgacaatgtcctactagttcccaggtgaaccagaccccacttcctgtataagctcattggttacaactc

SEQ ID NO: 892037 - DNA, 594 bp, Homo sapiens
gctcaaaacccttcaatgtcttcccatttgtatcagtttccttttgctgctctaaccaatgaccacaagtggtggcttaaaacaacagaaatctagtctcttaatgttctacagtgcacaagtccaaaaattggattttatggaactaaaattgaggtgccaatagggctgcattccttctggaagtttcarggttgggagcagaaatctggctgcatgcccttccagtttctggaggctgcctgcctcagctcgtggcccctttcacgagtgactcaagcctcttgctcctgtcaccacgtcttctactcctacctctgaccctccttcctccctcttatgaggacccctgtgattacattgggctcacctgggcaatccaggatactctccccatctcaagattccaaagcccataagcaaagtctgtttccctacataaggtaacaaattctcatatactggtgattaggatgggagcatctatgggggtgtccatttcacacagagtaaaagcccaagtcctgacaatgtcctactagttcccaggtgaaccagaccccacttcctgtataagctcattggttacaactc

SEQ ID NO: 892038 - DNA, 582 bp, Homo sapiens
aagaaatttgttggcatataaaagaataaagtgtgttcacctatggccaataatttcttaatgcctgtgtactggataaataggtcaataagagtactttttaaaaggctggaaataagaatcctggctagaaaatttaagaattctgttagtgatttattaataaatatttttataaataactgattcggacttcctgggcaaatatcctgcaaagaattaataccaacatgggaggatacttttttttggcatgctatttaaaaagaaagtcaagtctcttagctaaatgtgaggcttgatctcatttaggtatataatctctctcagaatgttaatatgatgttactaagtccacttcagcccaayggtgtcacataacgatatatcaaatgcacatactgctgagctactaaggaatattcaaaaggagtctctaaagaaaaaattatctctgtccaataatttctcttggagtttaggtcctggcaaataaatttcactctgagaaggcaaagtatagtgttgaggagatttatagaactgaaagtttcttactcaggtagaagtttccagggggcc

SEQ ID NO: 892039 - DNA, 641 bp, Homo sapiens
ttgcatgaatcctcaggattttaagccaggagcaatggttctggagcagaatggaaaatcgggacacactttgactggtgatggtctcaatggaccatcagatgcaagtgagcagagagtatccatggcatcgtcaggcagctcccagcctgaactagtgactatccctttgattaarggccctaaagggtttgggtttgcaattgctgacagccctactggacagaaggtgaaaatgatactggatagtcagtggtgtcaaggccttcagaaaggagatataattaaggaaatataccatcaaaatgtgcagaatttaacacatctccaagtggtagaggtgctaaagcagtttccagtaggtgctgatgtaccattgcttatcttaagaggaggtaagtaaaagcacaacatagaaaaagtttcagtgttcaagcgtttatatctactgattgtctttccttacagtttagaatgtgttttcccagcagacttaactagtaattagtgtgcattttccttaaggttctgtctgattgtttccataagcagtgtctttttcagcagtttttaaaaaattattagtgatttcattcatgtccattatggatttatttccctctgtattcttttgaaaatct

SEQ ID NO: 892040 - DNA, 564 bp, Homo sapiens
ctcggagtgccagaatgcggcccagatctaccgcaaggtcacctgtgtgagtccacctggccccttggttaattaataaggacacagaggccttgggccgtaccctgggctgggctccatgtggctctgtaaagccatcctggcagctgtgtaaggagcttggccattttgcagagggggaaactgaggagattggccattttacagagggggaaamtgaggcttagtagcggggtggttactcaaggtctcctacctgaagggatggtggtgcatggggtgctgtgggcagtgcttacccatggaggctgtcgctctcacagcagggatggtggggagactgaggctcagagaggctggagcttcaccatagccccctgcctggaggcgtgcctaggccacccatccccagtgctcacactctgggccgcccatggctgcctgctttcctatcttcttcattttgaaacaatggtttgatttctttttcagctaaaccagtcactcctacaccaagtgtgtctctaggcagtcgtcagcgccaggcagctgggaacgttaatc

SEQ ID NO: 892041 - DNA, 662 bp, Homo sapiens
aacgagggtgccaagttcactgcgtccaaccacaccaagccaagggcaccagagcgactgacaggctgaggaactgggcaatggcagcccagggtaggcgtcgaattgccgagaggctgaaggggacaacaggccatcaytgtccagccagcaactgggctccccaacactgtggttctcccaccaccgctggctcttgagggaacatgcagaacgtgccctcctctgggcagacacagacagcctcgggtctccctcctgtaaagatcacccagccatatccagctgacccaggacctgctgcagtgacagacaaagtctggatagcccatcagacaaacctgccctggacctctggctcaaggggccagagcaaggccaggcctcgaggaggccccccgataagccatccatgtccccaggggtgtcagggccaataattccactcaatggaccttccccacccctcagcaccttaactcctgcaaccccccatggtgtgcactcccaggtggggactagggcaggggaggctgagactaagccaggcagcatccccacgcaacgcctgctcagcatggcctgccacttgccctccttgaggggatggagcaccaggctggggctgccctggacacacacaggacctgcccaaccgctgc

SEQ ID NO: 892042 - DNA, 623 bp, Homo sapiens
tttcgggtgtctataattacacacctaaacatatgtttggaacaaaattggaatcctgttgtatataaagctctgaagcctatctttatgtccatatgtcaataacaacatgaaaaattctttagaaatatgttttatttaatgactgcattatttaagtgtgaagaacttcagtaaaatctttttcttatttttggaaattttgattgtttgccttttgtcaacattgcaagtaacgtggaaacaaatttttattcacaaatttttgttatttctatttttaggatcgaataccatargaggaattctggactgaagagttatgaagtcatttcagacacttccagacatttgtgttaattaaattctcactggttgagttccattctacactggaagagcatttttcctggaaaggctcctcaaaatggtaataaagggtaattcttttagatgatcttgcatttgtttgaatgggaactgagcttaatcaaacatgttaggaagactatgtctgtttcactttttaaaattattttggatggacacaataattatatatatttatggggtacagagtgatattttgacacatgtatacaatgtgtaatggtcaacttagg

SEQ ID NO: 892043 - DNA, 621 bp, Homo sapiens
ggacttcccagcctccagaaccatgagaaacaaatgtctgttgtttaactcacccatctgtgataatatattacagtagcctgaactcactaagacaatcactgaagcagaccactgcaatccaaggtgttgagtgtttaaagagggcaatactgaaccctgtgggcatacagataggaaagcaaaagactgttagactgacaaattcatattccaattgaagcaggcaaaacatgacttgtgtcctgaaggatagaagttatttargctaggaggagtaataaaaagggaatggtacttgatgcaagggaaaagaatgtgcaagatatagcagctagggtatatggtttgtatagggatatgcaaattatttaatttacttgtttattaaacagaagtttgactacttatcatgtctcaggtactatgctaaatacagctgagaacaaaggcccagactcatgacaccagaatctctaagggtgggatccgatgaaatgtattataaaactttctagatgattatgatgcacagcagggttgaaaaccactggtctagatgaattcactttgctggcttccacagaaaagaagtaaagggactgactgaataaaaaccaa

SEQ ID NO: 892044 - DNA, 539 bp, Homo sapiens
attggctctgaggcagttactgaaaagagcagctataatcaacagctgtgtcctgatgttttgccaatctgtgctcataaaacatgatgtttggtaacatatttccaacacagtttgcctttgtcttttcaacaccaaaattcccacttctgtattttctttcatctaacaatttctaaatagtttgagggcattaattatgccatacaaaatcctstcacagtaattactgatgttcctgcttcctaattatgtgtaataccaacaaatccactttctatactggattgcaccaacgctacctagaaatatctgctgccttgttgacaaataaagagctctcaaatgtagagtacagaatcttctctgctctgcatcttgcttttgcacattagattttggtgctgagcttctctatgtaaaatgcctcttctgtacacagtacacactttcccctttgaataggaattaagtttactggctacatttcttgatcaatttcagacaaaccggggctaggtatatcaaagacagttaca

SEQ ID NO: 892045 - DNA, 539 bp, Homo sapiens
attggctctgaggcagttactgaaaagagcagctataatcaacagctgtgtcctgatgttttgccaatctgtgctcataaaacatgatgtttggtaacatatttccaacacagtttgcctttgtcttttcaacaccaaaattcccacttctgtattttctttcatctaacaatttctaaatagtttgagggcattaattatgccatacaaaatcctctsacagtaattactgatgttcctgcttcctaattatgtgtaataccaacaaatccactttctatactggattgcaccaacgctacctagaaatatctgctgccttgttgacaaataaagagctctcaaatgtagagtacagaatcttctctgctctgcatcttgcttttgcacattagattttggtgctgagcttctctatgtaaaatgcctcttctgtacacagtacacactttcccctttgaataggaattaagtttactggctacatttcttgatcaatttcagacaaaccggggctaggtatatcaaagacagttaca

SEQ ID NO: 892046 - DNA, 638 bp, Homo sapiens
tgctatagattttattcaaaggaaaaaaaatctagccatatatctttgtagattgtcctactacactcttgtccatatgcactgcagatgaatgtccacatgttctgaaaatcaaagattaaaaatcccactgcaagctaggacaagggttcagttcagcttgtagctagtttaaaaggtcttaattggtctgaacttggatatgcctaagagaaaatgaaattccaagacctatgaagttcactttgtgtaattcctaagtgagacataattatgcacttgttgaatgttcttttgattatttaattacacttagctagaatttattgaattcttattatgtgcttttatctcattgattcccacaaccagcatgcaagacaggtgttatcatcctcatgcttaggggaaacctcagtaagcacaggggcttgaaggatttgtyaggtcatatagtgagtgagtagcaaagctagaattcatacccaagacactttttaccacagccagacacctcataagctttaggaaccaaagacagtgactctgtgctctcatactgaaagtagctggttaataaatctatgtttaaatacatgagatagaactgggtgcactggctcatgcctgtaatccca

SEQ ID NO: 892047 - DNA, 624 bp, Homo sapiens
atagtcactgacaacatgtgactgggaagcatttgaaatacagctagggtacctgagtagcagcatttgaaattttattttattttaattaagttacataacacatgttagaaaacacagttccaaatcctgctttttcctgcttttctgccacagctgttctctgtgactgaaatatccttccatcttcttcatgcacagacaccttcgcaactcaacacagtgatgcccaagttccttcttygacctctccagaaagagttcagttttctttcttatactccttctagggtctagcccatgcttttattaaaatgcaagcattatacggctgtaattattttcctgtgtaccggcctgactgtgacagtgagccctggaaagaatgctctggtattgtctcatgcctagcacagtgcctggtgcgtaataagcacattgtacacatttgaataaatggaattgggtgactataatgaggccaacaggtaaagccaatttctcttagctgtaatagacaattaaatgtgggtaaatgtgggttctgtttattactattattgttattattattattggatagggaaattttaaacatttaaaaaggataacagaaactcctgt

SEQ ID NO: 892048 - DNA, 657 bp, Homo sapiens
agtttgctagaggtccactccagaacctgtttgcctgggtatcagcagtggtggctgcagaacagtggtggctgtagaacagcggatcttggtgaaccgcaaatgctgctgcctgatcgttcctctggaagttttgtttcagaggagtacccggccatgtgaggtgtcagtctgcccctactagagggtgcctcccagttagattgcttgggggtcaaggacccacttgaggaggcagtctgcccgttctcagatctccagttgcgtgctgggagaaccactactctcttcaaagctgtcagacagggacatttaagtctgcagaggttactgctgtctttttgtttgtctgtgccctgcccccacaggtggagcctacagaggcaggcaggcctccttgagctgtggtgggctccacccagttcgagcttcctggctgctttgtttacctaatcaagcctgggcaattgcaggcgcccctcccgcagcgttgctgccaccttgcagtttgatctcaractgctgtgctagcaatcagcgagactccgtgggcgtaggaccctccaagccatgtgtgggatataatctcctggtgtgccgttttttaagcccgttggaaaagtgcagtattagggtgggagtgacccaattttccat

SEQ ID NO: 892049 - DNA, 588 bp, Homo sapiens
caaaaggcctgcttacttattacagttttcactcctttgctgtgcttgtgtgtggttatgctaatttggactctttacatttggattttgaactacagctgtcccttatttgtaagtctccctttctttggtttcctagatactcctcctggcttactcttatgtttagagaagttctctcaggctccatggtctgggcctagtctcctgccattatctcggatactggtgttcccacagcttctttgttttttttttttttttttttttgagacggagtctygctcggtcacccaggcaggagtgcagtggtgtgatctcagctcactccaacctccacctcctgggttcacgtcattctcctgcctcagcctcccgagtagctgggattacaggcgcccatcaccacgcccggctaattttttttttttttttgtatttttagtagagacggggtctcactgtgttagccaggatggtctcgatctcctgacctcgtgatccgcccgcctcagcctcccgaagtgctgggattacaggcgtgagccaccacacccggcccccacagcttcctttttgggctcttct

SEQ ID NO: 892050 - DNA, 563 bp, Homo sapiens
acaatgctgcagagattttgtttatggccagttttggtgccagtttatggcagatttgggggcctattcccaacagaaggggttgactgtcctcagtgaaccataaaaagctttctttacctggtgaaaatacactgtagcataatagtctacattataacgtcagcccacttggatgggagagcttttatacaaccagaaaacatgcattgaaaatgacaattgaatgaaatccctttataaaatgtttaagtggcccaaccatctggttaccgtcaggtaaccaaatgkagctgaagctttgattgttttcccatgaatatgggtttgacaaaccaaacattggttataaactattttagcaatttgtaagttaccacaccaatatttaatttgaattattttctcttttccatgatgttttggaatgcataactttaataacaaaaactttaaggactcaggaaggacaaggtggctgttctggttctccaagagtccatgcttgacattggacttatgtcatcttgaatgccagttgttttttccaatttaggtgtata

SEQ ID NO: 892051 - DNA, 564 bp, Homo sapiens
cttagagaaagaaaattgtaatacagtttatggaggggaagagaatcaacagatggtaagtttcatacagatatcaaaccagaaaggactcgttccctaagccaggaattgaactcaggccaccattgtaaaaaggcaaggccttagctactgagctatattggatagcttccattgctcttcctagaagtctagagcagtcaattttgagtttgcaaaggcttttaactgctcaagataattttcggagctagctatgacatgaaccccaaaattccttttccctggaaggyggagactaagagaaagtaccaccacatgattacacagttaagctcccaaggacaaaacaagatggagacctcaggcagtttttttgtttgtttcagggaactgcagcaacgtttgttattgaccagcttgctgggccgtctttaatagtgagcttatggggtcctaagcctatgttatattcctaaagtactctttataacagaaccatacagaaagacaaggacaccaaatttgctacagcttaagaatagcctcagaatcctttttttg

SEQ ID NO: 892052 - DNA, 564 bp, Homo sapiens
cttagagaaagaaaattgtaatacagtttatggaggggaagagaatcaacagatggtaagtttcatacagatatcaaaccagaaaggactcgttccctaagccaggaattgaactcaggccaccattgtaaaaaggcaaggccttagctactgagctatattggatagcttccattgctcttcctagaagtctagagcagtcaattttgagtttgcaaaggcttttaactgctcaagataattttcggagctagctatgacatgaaccccaaaattccttttccctggaaggtggagactaagagaaagtaccaccacatgrttacacagttaagctcccaaggacaaaacaagatggagacctcaggcagtttttttgtttgtttcagggaactgcagcaacgtttgttattgaccagcttgctgggccgtctttaatagtgagcttatggggtcctaagcctatgttatattcctaaagtactctttataacagaaccatacagaaagacaaggacaccaaatttgctacagcttaagaatagcctcagaatcctttttttg

SEQ ID NO: 892053 - DNA, 591 bp, Homo sapiens
tctctccaattctaatctaagtcactgtcctacccagtttactatactgtaattactataatagcttattaacaggtctctttgcatgtgcccttgtgtctgtacagtttcctttcaaaacaacagtcacacaacaatttaaaaatataaaccaaataaagtaactcatttgccagcaacactgcaatayttgccattgtacttagagtgaaaatgaaggactttacaaaggcattcatgatctaaagctgccccagattctggtttctcttctaacttcatttctgctacttcccttgctttctccagagcagttagactggactcatgcatggatagggcctgaataggccaaggattttgcaataggtactccctctgccatgaacactcttcccttagacagctgcacattccctcgcatcattcaaatctccgccaaaatattagcttttttgatgagacttccattcactatttgacatgtacctgaatgaaggttcaaaacaatgaggtcaagagggaggctattgaaatgttccagctgagaatttggcttgaacaagggtgttaacattcctaatgataaaa

SEQ ID NO: 892054 - DNA, 571 bp, Homo sapiens
taatttctaagtcagacacagtaagagattaacaatagctaaaaataaaatagaacaattattggctgggtgcagtggctcatgcctgtaatcccagcattttgggaggtcatgcctgtaatcccagcattttgggaggcagaggtaggcggatcacctgaggtcaagagttcaagaccagcttggccaacatggtgaaaccctgtctctaccaaaactacaaaaattagtcaggtgtggtggctcaygcctgtagtctgagctactagggaggctgaggcaggagaatcacttgaacccgggaggtagaggttgcagtgagctgagatcatgccacagcactccagcctgggtgacagagtgagactctgtctctaaataaataaatagaagaattataacaatatactgtaataaatgttatgtgaatgtcgtctctccctcaaaatattttattgtactgtactcaagttgacctcgattaactgaaatcttgaaagaaaaccatggataattgggaactactgcaccaatccctccccaacagtggacttaaaactttggttggctt

SEQ ID NO: 892055 - DNA, 687 bp, Homo sapiens
ttattttcttaactaattagcacttaattttctcagtattggatatggtccttaagaaaatatgaatgcggccgggcgcggtggctcacgcctttaatcccagcactttgggaggccgaggtgggcggatcacgaggtcagsagatcgagaccatcctggctaacatggtgaaaccccgtctctactaaaaatacaagaaaattagccgggcgtggtagcgggtgcctgtaatcccaactactcgggaggctgaggcaggagaatggcgtgaacctgggaggcagagcttgcagtgagccgagatcgcgccactgtgcactccagcctgggcgacagagggagactccgtctcaaaaaaaaaaaaaaaaaaaagaaaatatgaatgcatgaagtcttatagataaactaaagcttatttttaagttaaatcttatttcaggtcaaaaatcacgtatataatttttaagtgtttatcagtttaacacactgcaggttgtgtatttaaattcaaatgataaaaagacttgaatttgtacggtctcttttgtattcaaagtggtaactaaaagctaaattttagtcattttaattttcatcaagaaaaaagatcatatttataatttaatattgtacatcctgaatattaaaatagtttatataatgtgttgttatgttccatttttttt

SEQ ID NO: 892056 - DNA, 620 bp, Homo sapiens
gtgctcagtaacagtcggctatggctgtttgagtctctgccagtccatccgtttttgttttcttatgtcctgaagtacatgagagtctaacactgtcttatagatactttagtatgtattaatcttgtttatccaagaagactgtcagctccttgtgggcaaaggccatatcttaaaattattttctatttcatagtgtttttagtctatattaggcatatragaggggcttggtaaatttttgattattggttgactcttttttaaaaaaatgtttaacttgtgtaaaaactatttcaaggagggtactcaaatgccacacttttgtgacttttgctgtccttaccaaaatgaaatatgggtggtggcttccctctaaaggctgataacaatgcctttaatctaatcttgcaaggtgtgtaaatcacaaaccccacttgctgactctctgcccccgtctgtcatgctttaccacaatggtgaacaacagctttgaatcatgctaaatgtcaaccttcctgcccattagttgattgctttccattctgtaaatacaggagttatgcagaattgattgtatcaaagtgatatatttcaggttgcagtataatatcttatgt

SEQ ID NO: 892057 - DNA, 681 bp, Homo sapiens
agttcatcactaggggtgacgatgagaggggcttctcacttctataactgtgattctccatgttttatggctaactaggaacacagtgatgtataatgtccattggttcaattatatatcagattttgaagaacagcaccccaagctgtcattctcaagttgtcatattaactgtatttgtaaatagactattgagaaattcaatcagcaagtgatatagtatattacaggactgaagaatccgtaatcatgcacccatattgaacctctttcatcaaagtcccaggtgatgatatgagggactccttgaaggtattcaggtagtcttaccccacaaacagtggattgggcaaggcgatgagggcaaagaaggctaactcatatccccaatttgtacaaaatacctgtgaggttagaatcctggatcttataggaaataagaattataatgtcattaaattacctctaaggagctagttggtttcctcaagggatggtacgatatcagcattattttctgttgctgctacattgaacattyggtagcagcagtagttaggtaactctgggtgagaaggagctcatgctttaaggcctaccaattgcctccatcactgccaccatgactgttgaaactctggagtggttgacgccaaaggctagctcacatctacagagagg

SEQ ID NO: 892058 - DNA, 518 bp, Homo sapiens
taatgggttttggacttgcgtggggcctgtctgtagcccctttgttttggccaatttctcccatttggaatggctgtatttacccaatgcctgtacccccatgctttctaggaagtaactaacttgcttttgattttacagactcacaggtggaagggacttrccttgtctcagatgagaggttgaactgtgggcttctcagttaatgctgaaatgacttaagactttgggagactgttaggaaggcatgattggttttgaaatgtgaggacatgagatttgggaggggccaggggcagaatgatatgctttggctgtgtcctcacccaaatctcatcttgaattttaacccccataattcccatgtgtcatgggaagaacctggtgggaagtgattgaattatgggggcaggtctttcctgcactgttctcatgatagtgaatgagcttccaaaaatctgatggttttaaaagcaggagtttccctgaacaagctctctctttttgcctgccaccat

SEQ ID NO: 892059 - DNA, 605 bp, Homo sapiens
cttcaaggagaactacaaaccactgctcagtgaaataaaagaagacacaaacaaatagaggaacattccatgctcatggataggaagaatcaatattgtgaaaatggccatactgccctaggtcatttatagattcaatgccaaccccatcmcgctaccaatgactttcttcacagaattggaaaaaactactttaaagttcatatggaactgaaaaagaacccgcattgccaagacaatcctaagccaaaagaacaaagctggagacatcacgctacttgacttcagactatactacaagcctacagtaatcaaaacagcatggtactggtaccaaaacagagatatagaccaatggaacagaacagagccctcagaaataataccacacatctaatctgatctttgacaaacctgacaaaaacaagaaatgaggaaacgattccctatttaataaatggtgttgggaaaactggctagccatatgtagaaagctgaaactggatctcttccttacaccttatacaaaaattaattcaagatggattaaagacttacatgttagacctaaaaccacaaaaaccatagaagaaaacctaggcggt

SEQ ID NO: 892060 - DNA, 605 bp, Homo sapiens
cttcaaggagaactacaaaccactgctcagtgaaataaaagaagacacaaacaaatagaggaacattccatgctcatggataggaagaatcaatattgtgaaaatggccatactgccctaggtcatttatagattcaatgccaaccccatcccgctaccaatgactttcttcacagaattggaaaaaactactttaaagttcatatggaactgaaaaagaacccgcattgccaagacaatcctaagccaaaagaacaaagctggagacatcacgctacttgacttcagactatactacaagsctacagtaatcaaaacagcatggtactggtaccaaaacagagatatagaccaatggaacagaacagagccctcagaaataataccacacatctaatctgatctttgacaaacctgacaaaaacaagaaatgaggaaacgattccctatttaataaatggtgttgggaaaactggctagccatatgtagaaagctgaaactggatctcttccttacaccttatacaaaaattaattcaagatggattaaagacttacatgttagacctaaaaccacaaaaaccatagaagaaaacctaggcggt

SEQ ID NO: 892061 - DNA, 601 bp, Homo sapiens
catgaatattgggggatatattcagaccatatcaggatgtgattaggtcatgaatacagagcccttgtgaatgggattagggtccttacaagaagaggccagagaactcccttgttctttccaccatatgaggcacagggagaggagagacatctgtgaaccaggaagcaggacttcactggacaccaaatcttccagcactttgattttggacttcccagcctctagaactatgagaaataaatttcttttgttcataagccacctagtctatggtattctcttatagaagcccaaatagactaagacactcagcttcttaaatctgtgggattttgtcttccaccaatgttaggaagttttytttcttatttctttgagtactctttcagccccattctctttgtactcttctcctggactctgataataaaaatgttgaaccatttgttattatcctacaggtccctcagtctctgatttttgtcttatttgttattttaatttttttttattattcagaccaggtaagttttattgatctgttgtcatgttcactgattctatcctctgttatttccactctaccattgaatccatc

SEQ ID NO: 892062 - DNA, 630 bp, Homo sapiens
aatgttcttaccataatgaaattttaaaatgttaagtatgtgaggtgatgagtatgttagttgcttgatttcatcattctgccatgtcagcatgtatccaaacatcacattgcaccacataaatatactgtgcagttattatttgtcaattaaaataaggtaaaacttaaaaattgaattaaaattgttatacagtattcattatttgggcttaattacatttcactgaggtacaatggcatttcccagttacccagaacaagttattattcagtaaagggaaataagtttctgtccagcgacacagtaaatgtctrtattatccagattaaaacccaacagctcttttcttagtggttaattgttgatacttctacactgttaagagggatttgtggaagcagatggccattagtagttcagtagactagttactcttcagtagtagtgagaggtgacagcgtgctggcagccctcgcttgctctcggtgccttctcggcctcagcgcctactctggccatgcttgaggagcccttcagcccactgctgcactgtgggagcccctctctgggctggccaaggctgcagccggctccctctgcttgcggggaggtgtggagggagaggtg

SEQ ID NO: 892063 - DNA, 714 bp, Homo sapiens
cgcggattcattctggaagtcagtgagaccaagaacccaccaattttggacacagtatgatttagtgaatctcatggtacacttaagatcaccactgcaccccagcctgggcgacagagtgagaccctgaatcttaaaaaaaaaaaaaaaaaaaaaawgtactgatacatacaacctatgtatctcaaaaacattacgctgagtaaaagaagtcttacatgaaagagaatatactgtacagttcaatttatataaagttctataacaggcaaaactagttggaagaaaattggaatagtcactgcctctagaagagaagacttcctggaaaggggcttgagtacagttttcagggtcagggtcatattctatatcttgataggtgtgtaggttactcacatgtatgatttagtgaatctcatggtacacttaagatttgtgcatttcacatttcattgtacataaatttaacatgaaattttaaaataagaattacaaacaaatatagaactctatatgttatgtaggaactctgagtgatatgtattctgagttatttggaaaaaagtatatcgatatctgcaacttactttgaaaagcatttttctaaaaacgtggattgatggatagagagagagatgtgacaaagtaagcacaataaaacattaattgtgtgatcactgcaaaattctttcaacttttctgcttgaaaat

SEQ ID NO: 892064 - DNA, 625 bp, Homo sapiens
ttccatacatctcctgaaatctaggtggaggttcccaaacttcaattcttgacttctgtgcacctgtaggctgaacacaatggtgaagctgccatggcttgggacttccacattctgaagccacagcttgagttctacattggcccctttcagctgtggctggagcagctgggatacaaggcaccaagtccctaggctgcatacagcacggggatccttggcctgacccatgaaactactttttcctcctgggcctgtgatgggaggggctgccatgaaggtctctgacatgccctgtagacatttttcccatggtcttggggattaacattagactccwtgccacctatacaaatttctgtagctggcttgaatttcttctcagaaaatggatttttcttttctactgcattgttaggctgcaaattttctgaacttttatgctgtttcccttttgaaactgaatgcttttaacagcacccaagtcacattctgaatgctttgctgcttagaaatttcttctgtcaaataccctaaatcatctctctcaagttcaaagttccacaaatctctagggcaggggcaaaatgctgtcagtctgtttgctaaaacataacaagagtca

SEQ ID NO: 892065 - DNA, 668 bp, Homo sapiens
aaaaaaagcaaatctagacagaaagaaagtagatttgtctctattctcaacaaacgctgttctaaaggagatataaagctggcaaaacagcatatgataaggtgtcaacaccattagtcattagtggaatgcaaattaaaaccacagtaagataacactacacactttttacaatggttaaaataatgaaaattccatatgctagtaagaatggggagttataaagacatacgagactgggaagaaaaagaggtttaattggacttacagttacacatggctagggaggcctcagaatcatggcaagaggtgaaaggcacttattacatggtggggcttagagaaaattaggaagaagcaaagcagaaaaccctgaaaaacccatcagatctcatgagacttatttactatcatgagaattgcatgggaaagacgggmccccatgattcaattaccttcccctgggtccctcccaaaacatgcaggaattctgggaaatacaattcaagttgagatttggtgatgacacagccaaaccatatcattccaccccggcccctccaaatcaaatcacacatgctcacatttcaaaaccagccatgccttcccagcagtccccaaaatcttaactcacttcaacattaacccaaaagtccacagtccaaagt

SEQ ID NO: 892066 - DNA, 597 bp, Homo sapiens
actccatactatactacaaggctacaataactgaaacagcgtggtactggtacaaaaacagacacatagaaaaatggaacagaataagaactcagaaataaaactgcctgtctacaaccatctgatctttgacaaacctgacaaaaacaagcaatggggaaaggactccctgtttaataaatgttgctgagagaaatggctagccacatgcagaaaaccgaaacaggaccccttccttacaccttaataaaaaattaactcaagatggatcaaagacttaaatgtaaaaccccaaactataaaaactctagaagaaaatctaggcaataccattcaggacataggcaagagcaaatattttatgatgaaattgcyaaaagcaattgcaacaaaagcaaaaattaacaactgagatctgattaaactaaagagcttctgcacagcaaacaaaactatcatcagagtgaaaagacaacctacataatgagagaaaatttttgcgatctatccatctgacaaaggtccaatatccagaatctataagaaacttaaggaaatttacaagaaaaaaaaaacaacctcattaaaaattgggcc

SEQ ID NO: 892067 - DNA, 599 bp, Homo sapiens
gctagatggatctagtaactggtgtccccgttttccctaataaggagtggaatagtacaatatgcactgagggctatctctacccagattgcaaagagatgtaacatagcatgtgacattttgagagagttatttgatagaaaactctgtgaagggagagataagatcagaatgtatgtgtgtatgtttgtgtgtgtgtgtgtgtgtgtgtgwgagagtgagagagagagagagagagtgcttatgcaatgggagaagtagtggttgggacagaagtgctccagatggtaagtaagcggagagtaaactcaagagattattctgagttgtgtgatttagcattatcctattgtccttgaggcatctttggcttaaagcctttcacaaacttttcaagttttaagaagccaaactaccaatccctaattcttgtactgttcgcagagcagagggactcttggataccaaaggaagtgtggttggtagtcaccaatacatctgcataagaaccagagattataattgatactaggagatggcaaatgcagtttagaaaattagaataaaaggcacgcttctttagataccagctttgttgg

SEQ ID NO: 892068 - DNA, 599 bp, Homo sapiens
gctagatggatctagtaactggtgtccccgttttccctaataaggagtggaatagtacaatatgcactgagggctatctctacccagattgcaaagagatgtaacatagcatgtgacattttgagagagttatttgatagaaaactctgtgaagggagagataagatcagaatgtatgtgtgtatgtttgtgtgtgtgtgtgtgtgtgtgtgagagagtgagagagagagagagagagtgcttatgcaatgggagaagtagtggttgggacagaagtgctccagatggtaagtaagcggagagtaaactcaagagattattctgagttgtgtgatttagcatkatcctattgtccttgaggcatctttggcttaaagcctttcacaaacttttcaagttttaagaagccaaactaccaatccctaattcttgtactgttcgcagagcagagggactcttggataccaaaggaagtgtggttggtagtcaccaatacatctgcataagaaccagagattataattgatactaggagatggcaaatgcagtttagaaaattagaataaaaggcacgcttctttagataccagctttgttgg

SEQ ID NO: 892069 - DNA, 616 bp, Homo sapiens
tttctcctctgtcttgtagtcatactcttctccctcctgttccttcacaacatcaggcacatcatctgctctggtctttgttctgactcttacctctctttctgcgctcttcccctagatgtccatacagttagatccctcacttccttcttgttcttaaataaaaatcttgtctataaaccttacacaagatgtcaacaatctctcactgacatttcttatcctgtttcccatgttcatatgtttcccctcagctatttggatcaaataacataataactgtttagtacatgctatttgttttctttctctcacttcaaaatataaacttcatgaaaataaggagttttgcttgtttggtttattactaatgacatccccttcatctactrtgctgcctaaaacggtaccctctcaacaacaactgtaatgctgaggcaatcaaaatcttattcaacttcacatttggaatctatgtctctccataaacatataccaaaaatcttgtaaagagtcagtgaatgcaatgcaagatgactccttaattctttattcatcttttatttttcacttaaatttacatcacatactactactcataaatactctcatttgt

SEQ ID NO: 892070 - DNA, 576 bp, Homo sapiens
attatagttatttcaagtttattcttaaaagtaaaccacacttttctgaaaaacttgtatgtaaatccttagagaagagtgttattttgccttacttaaaaattattaagttcagacataataactcatacctgtaatccctacgctttgggaggccaaggcaggaggatcacttctggccaggagttcaagaccagcctgggcaamatggtgagacactgtctccacacaaaataataaactaaaaaaaaaaaaaaaaattgaaaatgaacacacctttgtaacgatcctgaaacatattgccaagctagccaccagaaagttacatcaatttgcttacagccctagataaatgtattagttaggataggctaaagtgttgtaaaaaatgtaacatagaagtgttcatggtgcgaaagagtaaacaattgttttgtggatattcctttaagtggatttatgacctctgactgatcattaacgacctggtgtctttctctttggcacctacatccaggacacataaaggaaaaagggataaaataaatgatgactgctttgaaagctttgttcctt

SEQ ID NO: 892071 - DNA, 583 bp, Homo sapiens
aataactatggcagtttcactgaatccactgtctttaaaaaaagaatactttttaaaactgaataatgtcagaataatttcccaggattctaacatatctcctcatttatgtcctgtattttacattgtatttggtgaaagcaacactcactgtaaaattgcagtatactaagattattgaaaatggtgctttttccctaaaaaktaatttatttatatcatgtatagcattttatatattgaaacaaaaagaaaaatcctaaatgcattgttattagggagcttactatgttggcatgcatatacatgccttctcacatatacctatttatacgctaaatctgactcacaaacatagtcagaaaaactgccagtaagaataggagaagatccactcctcaaaactttggtattccttggcttgtaatcactctaatctttacctctattgtcatatatccatctttttgtgtatgtctttgtctcctcttatatgggtacaagccatgaggattagagcccactcaaattcagtattactttatcttatctcgattacatcttcaatgtcactacttttaaa

SEQ ID NO: 892072 - DNA, 583 bp, Homo sapiens
aataactatggcagtttcactgaatccactgtctttaaaaaaagaatactttttaaaactgaataatgtcagaataatttcccaggattctaacatatctcctcatttatgtcctgtattttacattgtatttggtgaaagcaacactcactgtaaaattgcagtatactaagattattgaaaatggtgctttttccctaaaaagtaatytatttatatcatgtatagcattttatatattgaaacaaaaagaaaaatcctaaatgcattgttattagggagcttactatgttggcatgcatatacatgccttctcacatatacctatttatacgctaaatctgactcacaaacatagtcagaaaaactgccagtaagaataggagaagatccactcctcaaaactttggtattccttggcttgtaatcactctaatctttacctctattgtcatatatccatctttttgtgtatgtctttgtctcctcttatatgggtacaagccatgaggattagagcccactcaaattcagtattactttatcttatctcgattacatcttcaatgtcactacttttaaa

SEQ ID NO: 892073 - DNA, 583 bp, Homo sapiens
aataactatggcagtttcactgaatccactgtctttaaaaaaagaatactttttaaaactgaataatgtcagaataatttcccaggattctaacatatctcctcatttatgtcctgtattttacattgtatttggtgaaagcaacactcactgtaaaattgcagtatactaagattattgaaaatggtgctttttccctaaaaagtaatttatttatatcatgtatagcattttatatattgaaacaaaaagaaaaatcytaaatgcattgttattagggagcttactatgttggcatgcatatacatgccttctcacatatacctatttatacgctaaatctgactcacaaacatagtcagaaaaactgccagtaagaataggagaagatccactcctcaaaactttggtattccttggcttgtaatcactctaatctttacctctattgtcatatatccatctttttgtgtatgtctttgtctcctcttatatgggtacaagccatgaggattagagcccactcaaattcagtattactttatcttatctcgattacatcttcaatgtcactacttttaaa

SEQ ID NO: 892074 - DNA, 583 bp, Homo sapiens
aataactatggcagtttcactgaatccactgtctttaaaaaaagaatactttttaaaactgaataatgtcagaataatttcccaggattctaacatatctcctcatttatgtcctgtattttacattgtatttggtgaaagcaacactcactgtaaaattgcagtatactaagattattgaaaatggtgctttttccctaaaaagtaatttatttatatcatgtatagcattttatatattgaaacaaaaagaaaaatcctaaatgcattgttattagggagcttactatgttggcatgcatatacatgccttctcacatatacctatttatamgctaaatctgactcacaaacatagtcagaaaaactgccagtaagaataggagaagatccactcctcaaaactttggtattccttggcttgtaatcactctaatctttacctctattgtcatatatccatctttttgtgtatgtctttgtctcctcttatatgggtacaagccatgaggattagagcccactcaaattcagtattactttatcttatctcgattacatcttcaatgtcactacttttaaa

SEQ ID NO: 892075 - DNA, 592 bp, Homo sapiens
cacttttggagggagtgtaaattggttcaaccattgtggaagacagggtggcaattcctcaaagacctaaagatagaaataccatttgacccagaaatcccattactggatatatacccaaaggaatataaatcattcgattataaagacacatgtatgtgtatgtttattgcagcatgattcacaataggaaagacatggaattaacctaaatgcccatcaatgatagactggataaagaaaacatgggacatatacaccatggaatactctgcagccataaaatgagatcatgttctttccaggaacatagatggagctggaggccatcgtattagtccattctcwtgctgctataaagaactgcccaagactgggtaatttataaaggaagaggtttaattgacttacagttccacatggctagggagacctcccatgtggggaggaaacttacgatcatagcagaaggggaagcaaacatgttcttcacattgcagtaggaaggagaatgagagctaagcaaagaaggaagccctttataaaaccatcagatcttgtgagaatttactatcatgagaatagcatgggg

SEQ ID NO: 892076 - DNA, 551 bp, Homo sapiens
ctccgagcagatcgaggtgggagagcttttaactagaattagaaccttctcttctaagagactttctgcaggcaggaagtcatttgcccagggtattggttctcctgctgtggtgttggtgagagtcctttagggctctgcaagagggaccttaacttgtgtagttaatgagccaaaggccttctgcctgacaatgttttctgaagatctatcttcctctgaatgcagcagttttcctctctttaataaggatgatctgatttacaaaacaacaaaaaaacagtaaatcaagaccaaaaggtaagacactctgccctcaggattaatgaacccaaaggctkgtgtccatacagatccttctgatcctaatatcctacagtagaagatagagcagcctccatgtttgggacaatatttttattatgtgttaacatcaaatctgtagaagctccaagctctgaaaagattatacccactccttgtcatgtaatttaaaataatagaagaattttctaaaccaaaaagttaaaagttaaacaagataaacagtt

SEQ ID NO: 892077 - DNA, 579 bp, Homo sapiens
ccagtttgtgtcttttaattggagcatttagcccatttacatttaaggttaatattattatgtgtgaagttgatcctgtcattatgatgttagctggttattttgctctttagttgatgcagtttcttcctagccttgatggtctttacaayttggcatgattttgcagtggctggtaccggtttttcctttccatgttcagtgcttccttcaggagctcttttggggcaggcctggtggtgacaaaatctctcaacatttgcttgtctgtaaaggattttatttctccttcacttatgaagcttagtttggctggatatgaaattctgggtcgaaaattcttttctttaagaatgttgaatattggcccccactgtcttctggcttgtagagtttctgctgagagatcagctgttagtctgatgggcttccctttgtgggtaacccgacctttctctctggctgcccttaacattttttccttcatttcaactttggtgaatctgacaattatgtgtcttggagttgctcttctggaggagtatctttgtggtattctctgtatttcctgaatttgaa

SEQ ID NO: 892078 - DNA, 699 bp, Homo sapiens
cacagagtccctactgtggcactgcctagtggagctgtgagaagggggccaccatcctccagacaccagaatggtagatacactgacagcttgcactgtgcacctgaaaagttgtagacactcaatgccagctcatgaaggcagccgggagggaggctgtaccctaaaagccgcagggacagagctgcccaagaccatggaaaccctcctcttgcatcagtgtgacctggatgtgagacatggaatcaaaggagatcattttggagctttaagatttgactgccccactggattttggacttgcttggggcctatagcccctttgttttggccaatttctcccatttggaatggctgtatttactsaatgcctgtagccctattgtatctaggaagtaactaacttggtttgattttacgggctcataggtggaagggacttgacttgtcttggatgaaactttggactgtggacttttgagttagtgctgaaataagttgagactttgggggactgatggggaggcatgattcattttgaaatatgaagatatgagatttgggagggaccaggggcagaaagatatggtttggttctgtgtccccacccaaatctcatttatagctcccataattcctacgtgttgtgggagagacctggtgggagatgatcgaatcatgagggcaagtctttcctgt

SEQ ID NO: 892079 - DNA, 607 bp, Homo sapiens
gtcttgatttaatgtagctatataataagtcttaaaatcagataggtgggtccccctactttgctcttcttaaaaattattttgactactctaggtcctttatgttttcttaaacacttcagagtctacttgtcaaayttgacaaaaaatatctgtttggattgctttaaatcattacactggttgagggaaattagcatcttaacaatattgagtcctctattttctctcagtaatgttttaatgcttttagtgtgagagttttgaatgccttttgttaaatttacttctaagtattagtgcattttgatgctctttctaaatggaatttttaaaaaatttcatttgtaatttgttagtagaatataaaaatagaattgatttttatataatgaccttgccaaattcactaagtagttctcacagttgattttagctatagggttttagtagattccctacactccttttctttcatgattgagaaatatccataggatggtgaaatttttttttttttatcagaaattgacaataaattctgtcagcattgttttctgtatgtgttgagatgattatttggtttttcttttttattgtgttaatt

SEQ ID NO: 892080 - DNA, 646 bp, Homo sapiens
ttgtttgctgctatgtagtttaggatatttgctactaggatcataagtgagattgatctactgtataaattatcttccttgagtttacattattctcatataattatatgggaagtttttccttctaaaacagcttctataaaagagcagtcacctagtctttgaaggttggacaaaggtgtataaaagcatcggggtatgttaagtcttttggaatttttttctaaatactatttctgtaatggttgttggtctgtatgttttgtatttttcttttttaaaattttattattattatactttaagttttagggtacgtgtacacaaygtgcaggtttgttacatatgtatacatgtgccatgttggtgtgctgtacccattaactcgtcatttaacattaggtatatctcctaatgctatctctccccacttcccccaccccacaacaggccccggtgtgtgatgttccccttcttgtgtccatgtgttctcattgttcaattcccacctatgagtgagaacatgcggtgtttggttttttgtccttgcaatagtttgctgagaatgatggtttccagcttcatccatgtccctacaaaggatatgaactcatcattttttatggctgcatagtattccatggtg

SEQ ID NO: 892081 - DNA, 670 bp, Homo sapiens
ggcacgactataaaggtatctgaaaatgtgtaagtaactttggaactgagtaatgggcagagattggaacagtttggaagactcagaagaatacagaaagatgtgggaaagtttggaagttcctagagacttgttgaatggtttccatcaaaatgctgatagtgatatggacaatgaagcccagtstgagggagtcttagatggagatgaggaacttattggggactggagcaaaggtcactcttgctatgcttcagcaaagagactggaggcattttgccactgccctagagatctgtggaactctgaatttgagagagatgatctgaaattggaactcatgtttaaaagggaagcagagtataaaagtctggaaaatttgcagcctgaccatgtgatagaaaagaaaaacccattttctgggaagaaattcaggtcagctgcaagaatttgcatgagtaaccaggagccaaatgttaattaccaagaccatgggaaaaaaatgtctccaaggcatgttagaagtcttcacagcagcccctcccatcatatgtcccaaggccttggagggaaaaacggttttgtgggccagatccagggccttgctgctttgtgcagtctccagacttggtgccctgcatcccagccatagaaaaaatgggccaacata

SEQ ID NO: 892082 - DNA, 618 bp, Homo sapiens
agctcactttcctgggaaggagcatggagtaatcagacagaataaagggtactccattgttttgctggccagtaatgatagagagctctggtagagtctgcttttaatagaggcaatgtaataggcaaggctttttgtattggtaaatgtcagatgccaggctttctctaggggtgaagcagggtggggtaagtggaatgttgagatgtcagtgcacagggatcttttttgcttatgaggtcaccataagtgatgcaaattaccagaaaatccagtggctgtatgatcacatattctgcttctaacagtggcagttgtttcataataaactcattataaagacaacrgttcccatcattgccagttgattagaaaaacaactctgattattttttgtttcaaatttttgggaggtgaatcttaagctaagcagaaggaaacaatctagtatttgagagctggactcatgttgcaactagtctagtgttatgaaaaactcatatatgtggtttctgcatataagaagcttacaatctaaaagaggaaaggagtcttagacctttgtaacaactggagaaacagggaggtggtttgctagaaaatgcaatcagaattgga

SEQ ID NO: 892083 - DNA, 589 bp, Homo sapiens
ccaaggtgctggaattaaaggcgtgagcaactgtacctggccccaatccagtgttcttttatgtcattttccctcttcctttcagggctgttatggcacctacctttttttaacgatattggggatgttattgcaaactgccaagatattactagatagaatgagcctttggcccaggcatcagatatgcaattcagaaccatgcaatttctgtctgtttttataggcatccccaacccctaacttactggcctcargcagcacgagatggatgggtgagtggtagctccctgctgctaccccatcccctcccagctggggctcatggccatgtctgcttcatgcacacactgcatacaatagccatgcggggctagaatgagctgcagctgccacccgggccacaaggtggtttcaggggctaaggacccagtgtgtctggctggctagtttttcctgttcgctgtcccttcctgcctcgtgcccacggagtatttcctcctatggctgaaccaggaagagggtacaaacaattatgagttttccaccatgttggaggaacccatttgaaaaaagccggaggcttttg

SEQ ID NO: 892084 - DNA, 641 bp, Homo sapiens
gcattactctttctctcctccccagtcctttccagcccaagaggccttgggtctcaaagctttgagctatgtgagctgctgtatagatgaagtgggtgctgtgttggtgttcacttgcatcagctcctaagggctgattgtgttcatctctttccaactccatatttagtgacatgctactagcttgaagttaattatggtggasatattttcactatggaaattggcaaatgtttcaaatcaaggcttccctccccacatcacagggctagtcattgaacatttaccagcacatccctgggcagaataaactgccattgtgtcagatacagctccttcatatggttaggtgaggtgagaaccttttggcccttggcaaacattgagagcttttaactagccgaagagttcactgaattaggactggacagttttggttccatttttcacttcagggttgttggctgtggcagtgctaacaacatatctgcaaagggcactagattacccagcctttccacacctaagaggtctcaccccatcaaagaagaatttgaggcccaagatgctagacgttgctctaaagagcaaatccaaaacaagctaaaattggaagaaactgaattcaatcaaaggagcag

SEQ ID NO: 892085 - DNA, 628 bp, Homo sapiens
gtgagttgccttttcactttcttgttgatgtcctttgaaacacagaataatttagttctggtgaaatccaatttattttttctttttacacatctttttttctcatatatctaataatcttttgtgaaacacaaggtcatatttagccctatattttcttctaagagttttacagttttcattctttcatttaggtctgtgattcattccaagtcaataggcatccaaattcattatttttatgttgtccctgtaccatttgttgaaaagatcatttttttcattatactataagttctgggatacatgtgcagaacatgcaggtttgttacataggtatacacgtgccatggtggtttgctgcacccatcagcccrtcatctacattaggtatttctcctaatgctatccctctcctaagcttccaccccctgacaggccccagtgtgtgatgttttcctccccgtgtctgtgtattctcattgttcaactcccacttatgagtgataaaatttggtgtttggttttctgttcctgtgttagtttgctgagaataatggtttccagcttcatccatgtccctgcaaaggacatgaactcttccttttgtatggctgcatagtagtcc

SEQ ID NO: 892086 - DNA, 604 bp, Homo sapiens
ttagtgcaaatattttcaaggtataaagaaatgaagattaacaagaatacttgctcaaatacttgatgtatattaggttcagaaaagtaatgcttaactcagtcctttctttcctcgttttttaagataaatgagaatcactcmcttacacaacatctttatgaccaggataataagtgaagcaatatttgaagtagctgtaatataaattattcaatcagtaaaagctttttcataccatgaaattctgaatgacatcctgcaagtagaaaaaaaaaccataagtaatatgcaatttcctattctttttctaaaaagaacaaaactctaaaattaaaaactcttttggcaccaaaggaatgtctgactcacattggtgggtcatctctgaattacatattgaatcactcttaaaggtcatcgtgactcttctgagcagttatttgtgttattaacgaaagaactgccaaaaaaattccacatgctactctttttcacagaaaaatatctgtctctaagaagaggccagtacaagccaaagtacaagccaaatgacagtgataaatgcattataaacacttcttggaagcttgtaatgatgcaa

SEQ ID NO: 892087 - DNA, 654 bp, Homo sapiens
actcaaggtctctgagactctgtctttcccctagaaatttggcgaaaccaccatcctactactagctccagttagaaccactagtaaaacagaataatagtaggttggtataaagcaatggcaagaagaaaatgtaaatttagccttgccaaatttaaaggcagttcaatttatatgttcttggccttctattttagagtaaaataaataataccaaataaagcaaaacaargagtataggagtgataacgtggctcctacagaactccatatttattgtaactaagaaaaacacaaactgaggaaacaactattaaattacagctaatgcaaaatgtgacaatatactgtacaaaacccatggtcttctatcatgaggagaaaatgaaaactcacttctcagtgaaatataatatttcaaacaggtgtgtccatgattaaacttttaattcgatttgattcattcattcctccttttcttccttctagtggatgggctaatcacatgtaaaagtatagaatagaatgattgaaaaaacaagtttttgtccactttaagttacaaaattcaacattttgattggttggaaatgactttctatcttcctgtcacctctgatagctacaaatgggaagttgttatttatctacttt

SEQ ID NO: 892088 - DNA, 616 bp, Homo sapiens
actaatttacactcccaccaacagtgcaaaagcattcctatttctccacatcctctccagcatctgttgtttcctgactttttaatgatcaccattctaactggtgtgaaatgatatctcattgtggttttgatttgcatttctctaatgaccagtgatgatgagcgttttttcaaatgtttgttggctgcgtaaatgtcttcttttgagaagtgcctgttcatatccttcacccactttgtgatagggttgtttttctcatgtaaacttgtttaaggtccatgtagattctggatattagccctttgtcagrtggatagattgcaaaaattttctgccattctgtaggttgcctgttcactctgatgatagtttcttttgctgtgcagaagctctttagtttaattagatctcatttgttaattttggctattgttgcaattgcttttggtgctttagtcataaagtctttgcccaggcctatgccctgaatagtattgcctagattttcttctagggattttatgattttaggtcttatgtttaagtctttaatccatcttgagttaatttttgtataaggtgtaggaaggggtctagtttcagttttgtgcat

SEQ ID NO: 892089 - DNA, 594 bp, Homo sapiens
cattgattgctttaccattatgtaatggccttctttgtctcttttcatctttgttggtttaaagtctgttttatcagagactaggattgcaactcctgctttgttttactttccatttgcttggtagatcttcctccatccttttattttgagcctatgtgtgtctttgcatgtgagatgggtctcctgaatacagcacactgatgggtcttgactctttatccaatttgccagtttgtgtcttttaattggggcatttagcccatttacatttaaggttaatattgttatatgtgaatttgatcctgtcattataatgctagctggttgttttgcctgttagttaatgcagtttcttcatagggtcgatgttctttacaatttggtatgtttttgcagtggctcgtactggttgttactttccacatttartgctttcttccagagctcttgtaaggcaggccgggtggtgacaaaatccctcagtatttgcttgtctgtaaaggattttatttctccttcgcttatgaagcttaatttggctggacatgaaattctcggttgaaaattcttttctttgagaacattgaatat

SEQ ID NO: 892090 - DNA, 605 bp, Homo sapiens
ataagatattggggtgagaaataagaggatgtgcaggagtgttattcgcagcaagcaagatcttgaaaggtatattattccccaaacagtacttctccattttgttggcatagcaattcagaagggcactttggaagaggagctgggtcattcgtgacttcttagtgctcctgtagaacacaggcggttcgtgcttgttgatgtgactgaaggccctagagttctcactgtgccagatcacaggggccatcctggcactgagtgggcctgtggcctgtgtccacagggaacaccctgcaggttgggtccatgggtaccagcctggtgcttgtggccaygggggaaactggcctgcagttggtgggcttagagcctgtatctgtagggccagcctggatactgggtctgctggtgttggaatggtgcccaaggccatggtggacggcctggtgctgtggtcttcaggtgccaatctggcactggagtaggcctgaagcctggggttatagggttgggtctggcactgaaacagtctgggtcctgtggtcactggggctgccctagtggtggagcaagtgatggagaacctcaggcaggtctggagt

SEQ ID NO: 892091 - DNA, 606 bp, Homo sapiens
taggcgatcaatgtcagaaaactagaacaaatagaaacacattttccagtagagagacattcagttgactccattttggttttctttctcggtttaacttttgatttacccaagaaagaccaggaaatcagtgattgcctagagtgaaaactgccagaagaagagattatatacaaagaaggataaggaatattttggatatgatgaaaatagtctgccctggttgtggtggtggtttcataggcatatacaactgcgaaaactcctagaattgcatactttaaattgatacagtttaccctacataaattccagctacattatttgatatgggtgaaaatccatttcagagtttggcttaaayactatagaagtctgggaatgaggactcccattttactggactagaccaatccaaagcaaaattaaaaaaaaataaagtgagtcgcagatgctaggaaagatcattgtagaaattgctcaatatttttaggtgtcttgaatacataattgatattctttttctttgaatctcaacattgaagacagattctgaagaccagcaaaaagactagactgatgtaaatacacatttcctagctaatc

SEQ ID NO: 892092 - DNA, 566 bp, Homo sapiens
ccaggtgtggtagcatgtgcctgtagtcccatccacttgggaggctgaagcaggaggattgcttgagcccaggagttcgaagctgtagtgtgcaatgatcatgcccgtgaatagctactgcacatcagcctgagcaacagagcgaaaccgtcccatcattagacaaaacaaaacaaaacgaacaaacaaaaatttatttctttctttcctagctttgttgatatattgatataaaagaacgtgaatataattaatgtacataatttgatgagtttggacatatgcgtacatttatgctaccatcaccacagtcaaggtaataaagatatctatcatctccgacagtttccttgtakctcttcgtgattttttcttttttctttttgtagtaagaacaattaacatgagatctacactcttgacgaattgttaagtacacaataccttatgtttaactagagatactatgctgtaacaatgagaatgaaaaggcaacctatggagtgggagaaaatatttgcaaaccgtatatttaataaggggttaattaccaaaaaatttaagga

SEQ ID NO: 892093 - DNA, 588 bp, Homo sapiens
tttggataggacttccagtgttatgtagattaaagtggtgaaagtgggtatcattgtcttgttctagatctcctgggttctctattctgttccattggtctatatgtctgcttttatgccagaaccatggtgttttggttactatacctctgtagtgtaatttgaagtcaggtaatrtaattattccagttttggtctttttgcttaggatacctttggctattctgggtcttttgtggttccatataaattttaggatacttttttatatttctgtgaagaatgtcactttatagggattgcatcaaatctatggtttgctttgagtagtacaaacatttttaacactattgattcttccaatccataaacatggaatatttttccattttttggtatcttcttcattttcctctatcagtgtgttatagttatcattacagagatctttcacttctttggtgaagttaattcctaggcatttaattttatgtgtggctgttgtgagattactttttgatttccttttctgattattcacttttgacatatagaaatgctactgatttttgttgttgattttgtatc

SEQ ID NO: 892094 - DNA, 619 bp, Homo sapiens
aaatgttaaagaaaaactgcttgtgtattttaaaaaaaaatagatggtaatggttatctgataccacttttgaaagaatggcatcacagttttattttgtaaatgtcagtatttataacaatttcaaaattatatattttgcaagtatttaaatttattattaaaaattacatctcaatttaaacattttcaagtgactgcrtaattttccaaaattattttatggagtacatgtgtaaaaagcttagatgcccaacagtatgctgaaagtggagttgttatgtaggagggtgtgtatatccttacctagattttttgccaaattttaagtggttgccttactttgcactcccacaacagtatatgggaattctcttatttccgtattttctcaaacattttgtattgtcaacttttaggtttttgcgtgtccaaagagtgtaaaatgctatcgctttgtgtttttaagtttgcactcccctgattgctagtgagttcctcttctgtgaactgcctgctcatatcttcacccatttttcaattgattaatgtacatatttgtaatgtaaggaactagtttttataggatgttggcctttgcagcttattttggggaaaa

SEQ ID NO: 892095 - DNA, 576 bp, Homo sapiens
aatcaatacaggatgggtccgtcttttcgcagattagtgagtttccccggcagatctttcactcattcagtcaagaaggctgattagtaactagtgtgtgtcaaatataataatagatgctgaggatacaactttaaacaagaaaaaatttctgctttccattagctcatagtcctgggtggagacagagaagaaaatagagagttacagggtatcagtgatcaagctgtcagttgcaaataatgggagtacaaactcttaattgaaaacatgatttgacatctatgtagcttgtgtgatcttatataaatccaagataagactccttcaagaaaattttatgcaagggttcaatgatgttataaaaacttagyttctttacattcccagcatatgggtattctagtatactagcacttctgctagacagaatatggctgccttagtgctagaacacacaggtagagcaacagaggaggaagaggaagtagaggcaacaatggcatcttcctgtacacctctttatcggtaaagcaacttttcccaaaagccctcaggagacgtctgctcttagcc

SEQ ID NO: 892096 - DNA, 627 bp, Homo sapiens
attaggtctgcttggtgcagagctgaattctattactggatatccttgttaactttctgtctcgttgctctgtctactgttgacagtgaggtgttaaagtctcccattattattgtgtgggagtctaagtctctttgtaggtctctaaggactcagcacagagtttttaaaacaggtaagcatctggatttccaaagaacctggtgaagaccgtacttatttcaggaagacagagtggaagcaggaagactttgtgatgtagagtattaatgcaaatgtgttctcacacactaatgtggcacatactagttaaaattataaaaggaaaatttaattttagtttggattttaaaaaattaaaaagcagtgcatycaattgcaaagaaaaacatgctgcagctgaagctctgaccaaaaaaagctcaggaagaaaatgaacccgaaattaactttgttagatttatgtatgcacacacatgtgtgtgtttgtgtgtgtgtctgtgtgagtaactgatacagaattgcatcagccttcactagatccacatctcttaatgtcaaagaaatggaaaaggattttgttagatattaaattttgtatcagacccctgattttgctggtggcca

SEQ ID NO: 892097 - DNA, 590 bp, Homo sapiens
tccagaatctacaaggaacttaaatttacaagaagaaaacaaacaactccatcaaaaagtgggcgaagtatatgaacagacacttcaaaagaagacatgtggccaacaaactatgaagaaaagctcatcatcactagttattggagaaatgcaaatcaaaaccacaatgaggtaccatctcacaccagttagaatggtgatcattaaaaagtcaggaaacaacagttgctggagaggatgtggagaaataggaatgcttttacaccattggtggagtgtaaattatttcaaccattgtggaagacaatgtggcaattcctcaaggatctagaaccagaaataccatttgactcagcaatcccattactggrtatatacccaaaggattataaatcattctactataaagacacatgcacacgtatgttaatttcagcactattcacaatagcaaagacttggaaccaatccaaatgccaatcagtgttagactggataaagaagatgtggcacatatataccatggaatactatgcaaccataaaaaaggatgaattaatgttctttgcagggacatggatgaagctgga

SEQ ID NO: 892098 - DNA, 596 bp, Homo sapiens
tcttgaggtgtgggaaacatttttaaccaaccttgccgactctgaagatatgaaagaaaagatatctctgattataaaaattaaaaattgttttggtaaaagttataagaaagtcaacagacaaacaatagatcttggggaaaactgcaatatacatgacaaagagttaatatttgtaataataaaagggttctcataatttttttaaatgaaagagtccaaagaataatgggcaaatcatatgactaattaaatcccccaaataaatccaatagccaacaagcatttaaaaagatgctcaacttattakaaataaaaataacacaatgaaagtaatgatgcaatatcactctacacctgtaaaattggcaaattttaaaaacaggataaaacttatcgctatgtgaatgcagagagaaggccattttcatacttcgatggtagaaatgtttgaaaagttctgacctctttggaaattaaaacttagaaggaaacattcccttcgttccattaatattcctcttgcaagtttgttcaacagaagtaaaagcaccagtatgtaatgatataggatatagtagccaaaaactggaata

SEQ ID NO: 892099 - DNA, 611 bp, Homo sapiens
ccctttgttttggccaatttctcccatttggaatgagtgtatttacccaatgcctgtacccctattgtatctaggaaggaactaacttgcttttgattttacaggctcataaacagaagggattttccttgtctcagatgagactttggacttggacttttgggttaaggctggaatgagctaacactttgggggactgttggaaaggcatgattctgtttttaaatgtgaggacatgagatttgggaggggccatgggtggaaacatatggtttggctctgtgtccccacccaaatctcatcttgaattgtagtatattgtttgtaaaaattcctgcctatccagagattttttwaaaaaaaacaatactttcttcaattttctcttacaatttaattttttacatttaactttttaatacttcctgtagactaaaagttattttggtgcattgtgtgaaccaaagatcaaagtagttttatttttttctgaaaacatctattcattttttcaattaattgattgtttatattaaggatctaggaggatctaaaattatggaattgtgggcaagggcaatttttgccttacatttcatgtaaggcaaaat

SEQ ID NO: 892100 - DNA, 560 bp, Homo sapiens
taaagtatcaaaatagtaaagaaaccacctacagaatgggagaacatttttgcaaactgtgcatctgacaaaagtctaatatccagcatccataactaacttaaacaaatctacaaaaaaagcaaacaaccccaaacaaaaagtgagcaaaggacatgaacagacatttttcaaaagaagatatatgtgcaaccaacaatcatatgaaaaaaagctcaaaatcattggtcattagagaaatgcaaatcaaagctacagagagatgccatctctcaccagtcagaatggckattactaaaaagttaaaaaataatggattctggcaaagttctggaaaaatataaatgtttacacagtgttgttgggtgtgtaaattagttcagccattgtggaagtcagtgtggcaattccacaaagacttaaagacagaaataccatttgacccagcaatcccattattgtgcatatacccaaagaaataaaaattactgtattataaagacacatgcacatgtatgttcattacagcaatagtcataataacaaaggcatggaaacaa

SEQ ID NO: 892101 - DNA, 652 bp, Homo sapiens
tgtatatgtaccacattttccttatctaatctactgttgatgggcctttaggttgatccatgtatttgttattttgaatagtgctgcaatggacatatgtgtgcatgtatctttatggtagaacaatttgttttcttttgaatatatatccagtaatggtgttgggtcaaatggtaattgtgtttttagttctttgaggaatcactacactgctttccacaatagctgaactaatttgcacacccaccagcagtgtataagtgttcccttttctccacaacctcgccaaaatctgttgctttctgattttgtaatagtagccattctgactggtgtgaaatggtatcttgctgtggttttgatttgcatttatctaatgagtggatgttaaggttttcacatatgctcgttggcagcatgtatgtcttctyttgaaaagtgtctgtgcatgtcctttatccactttttacttaggttgtttttattttttatttttttttcttgttaattggtttaagttccttacagattctggatattagacttttttcagaagcctacgttgcaaaatttttcccccattctttaggttgtctgtttactctgttgacaatttcttttgctgtgcagaacctctttagtttcattagat

SEQ ID NO: 892102 - DNA, 644 bp, Homo sapiens; identical to SEQ ID NO: 888449

SEQ ID NO: 892103 - DNA, 624 bp, Homo sapiens
tttcttcatccaatctatcattgatgggcatttgggttggtcccaagcctttgccattgtaaatagtgctgcaataaacatacatgtgcatgtatgtttataacagaatgatttatatttccttgggtatatacccagtaatgggattgctgggtcaggtggttcttctgcctccaggtctttgagtaatcatcacactgtcttccacaatggttgaactaattcagtctcctactaacagtataaaagcattccctttcctccacgacatcatgagtatctgttgtttcttgactttttaacactagtcattcagactggtgtgagatggcatctcactgtggttttcacttgaatttctctaatgatcagtgatgttgagctttttttcatatgtttgttggttggatgtttgtcttcttttgagaagagtctgttcatgtcctttgcccactttttgatgtggtttattttttttcttgtaaayttgtctaagtttcttgtagatactggatattagacctttgtcagatggatagattgcaaaaattttctcccattctgtaggttgtctgttcactctgatgatagtttcttttgctgtgcagaagttctttagtttaa

SEQ ID NO: 892104 - DNA, 645 bp, Homo sapiens; identical to SEQ ID NO: 879722

SEQ ID NO: 892105 - DNA, 587 bp, Homo sapiens
agcccgactaataaagaagaaaagagaaaagagagaagaatcaaatagacacaataaaaaatgataaagggaatatcaccactgatcccccagagatacaaactaccatcagagaatactataaacacctctattcatctaaattacaaaatctagaagaaatggataaatttcaggacacatacactcttccaaatctaaaccaggaagaagtcaaatccctgaatagaccgataaaaagttctgaaattgaggcaataactaatatcctaccaaccaaacaaagcccaggaccagasagattcacaaattctatcagaggtacaaagaggagctggtaccatttcttctgaaactattccaaacagtagaaaaagagagactcctccctaactcattttgtgaggccagcatcatcctgataccaaaacctgacaagacataacaaaaaaagaaaatttcaggccaatatccctgatgaacatcaattcaaaaatccttgataaaatactggcaaactgaatcagcaacacatcaaaaagcttatccaccacgatcaagtcggattcatccctgggatgcaagtc

SEQ ID NO: 892106 - DNA, 669 bp, Homo sapiens
tgaacaagagcactactccaggaaatgggctcaaggcccaatcaaagaacattctctattctcaagatatggaagctcaaaacatgagatttcagaatcattacagaccagtgctcactgtggtttcccatgcttcacttttcatcttctaaatgggagtgttcactgtggttatcccacttctgttcaatcagtgtcttagttcattctgtgttgctataatggtatgccacagacttgtaatttataaacaaatttcttccttagtcctggaggctgggaagtccaaggtcaaggggctcgcatctggtaagagccttcawgctgtgtcatcccaaagtggaaggcaaaagggcaagagagtgcaagaaagcaagaaggtaagagagcaagagagggccagacttgctttcacaaaaacccactcctgcaatatcaaaccctctcccaagataacattaatccattcatgaggatgggccctcttcacagtcctacctcttaataccatcactatggcaattaaatttcaatgagttttactgggcacattcaaaccacagaaaccagtacatacattgtgtgttgagggcaaataactgttaagctcacggtgtccagatcaattggagccacatttggattcaaaataagacaagagggcatgcc

SEQ ID NO: 892107 - DNA, 653 bp, Homo sapiens
gaagatgtcactatctacgtaactggcaaaaggttaactcttttatcattcatcaatttaataaaattctgtaagaaaaagaaaactcaacaggaaacaggcaaagatgtaaataggcaaatgagaaaaaaatatatagatgacagatatacatgtggakaaatttgtaaactaggcaatataaacttaaaaattagattctcatttttagccatcacgtaatgtcctgagccagcaaagagcattggaaaaaaatatttttatatgtttactggagtttacactggaacaatcttaagtgaggaggacaatttggctggatttataaaaatgcaaccaccttttggcccaggaattctactaatcataatctgtcttctataaatgtacctgtgcacagaaatatacatacaatgatgttcacaacagtttgtagtggccaaatgtctatggaccactttaataggtatagtatatccatcccatgaaatgaaacccagccatcaaaaagaataggagacatttaggcatactgatctggaaagagatccaagacatattgtaaacagtgaaaaaaaaatcacagaaaaatacattttgatcccatttgtgtggaaaaaatggtttgtgaatgtatatacataaatggctcc

SEQ ID NO: 892108 - DNA, 632 bp, Homo sapiens
accatcagatctcataagaattcgctataacaagaacagcatgggggaatctgcccccaggatccaattacctccacataggccctcctttgacacatggggattaaaatttgagatgagatttgggtagagacacagaaccaaccatatcgttctgccccttgctcctcccaaatctcatatcctcatttttcaaaaccaatcattccttccgaacagtccycaaaagtcttaactcattctagcattaactcaaaagtccaagtccaaagtcttacctgagacaagtcaagtcccttccgcctatgaacctgtaaaatcaaaaacaagttacgttacatccaagatacaatgggagtacaggtattggttaaatgttcccattccaaatggtagaaattggccaaaacgaaggggcttacaggcctcatgcaagtccaaacccagcagggcagtcattacttaaagctccaaaatgatctttgactccatgtctcacatctaggtcacactgatgcaaagggtgggctcccaagaacttgggtggctctgactctgtggctttgcagggttcaacccccactgctattctcatgggctggcattgagtgcctgcagcttttccaggtgca

SEQ ID NO: 892109 - DNA, 632 bp, Homo sapiens
accatcagatctcataagaattcgctataacaagaacagcatgggggaatctgcccccaggatccaattacctccacataggccctcctttgacacatggggattaaaatttgagatgagatttgggtagagacacagaaccaaccatatcgttctgccccttgctcctcccaaatctcatatcctcatttttcaaaaccaatcattccttccgaacagtccccaaaagtcttaactcattctagcattaactcaaaagtccaagtccaaagtcttacctgagacaagtcaagtcccttccgcctatgaacctgtaaaatcaaaaacaagttacgttacatccaagatacaatgggrgtacaggtattggttaaatgttcccattccaaatggtagaaattggccaaaacgaaggggcttacaggcctcatgcaagtccaaacccagcagggcagtcattacttaaagctccaaaatgatctttgactccatgtctcacatctaggtcacactgatgcaaagggtgggctcccaagaacttgggtggctctgactctgtggctttgcagggttcaacccccactgctattctcatgggctggcattgagtgcctgcagcttttccaggtgca

SEQ ID NO: 892110 - DNA, 632 bp, Homo sapiens
accatcagatctcataagaattcgctataacaagaacagcatgggggaatctgcccccaggatccaattacctccacataggccctcctttgacacatggggattaaaatttgagatgagatttgggtagagacacagaaccaaccatatcgttctgccccttgctcctcccaaatctcatatcctcatttttcaaaaccaatcattccttccgaacagtccccaaaagtcttaactcattctagcattaactcaaaagtccaagtccaaagtcttacctgagacaagtcaagtcccttccgcctatgaacctgtaaaatcaaaaacaagttacgttacatccaagatacaatgggagtacaggyattggttaaatgttcccattccaaatggtagaaattggccaaaacgaaggggcttacaggcctcatgcaagtccaaacccagcagggcagtcattacttaaagctccaaaatgatctttgactccatgtctcacatctaggtcacactgatgcaaagggtgggctcccaagaacttgggtggctctgactctgtggctttgcagggttcaacccccactgctattctcatgggctggcattgagtgcctgcagcttttccaggtgca

SEQ ID NO: 892111 - DNA, 620 bp, Homo sapiens
ttaagaggagacttccaactacagttagaaaccattacactttgagaatattgattgagaggtgataaaacatgatgtgtgttatcaaagagcagagccttctcatgtggaaatgctaggacagcaagagtaggagagcagactaaccactagaatcagggttaggccttcataaagcaactgatatcccccaacctgcagaggtctgtttccttgtgttactcagtgaactggtattttgtattttcctggtattcttaggtggccattattgctgttattccagctgtratactgaaaagaaatagcgaagattttgccttcagaaagttctcagtgacaaccaggtcagctaaaagatatattatgtgatgtgcatttacctttccttttctgctagtgtctgtgttagactccatcccactatcatttggttgactacagaacttgaaactacttagatttcaatcccttaaattctcattaactatatattttattgccttattaaagaattttgttgttaacacgttttacctttgacgaaggagtaaactggcatttaaattcagcattgcaagtccttaaattaacattctaaataatattccaccaattag

SEQ ID NO: 892112 - DNA, 707 bp, Homo sapiens
atttgagtgggaaaagagcaaaaccttagtattctgcccctggcccctcccgaatctcatgtcctcacatttcaagacacaatcatgcctttccaacagtcccccaaagtcttagctcattccatcattaatccaaaagtccaagtccaaagtctcacctgagtaaaggcaagtcccttccagctatgagcctgtaaaatcaatagcaagtaaataacttcctcgatacaatggaggtacagggattgggtaaatacacccattccaaatgggagaaattggccaaaacgaagggactacaggcccaatgcaagtctgaaatccagaagggcagtcattaaaccttaaagttctaaaatgatctcctttgactgcatttctcacatccaggtcacattcatgcaagaggtgggttcccatggccttgggcagcttcttctctgtggctttccaggatacagcccagttctcagctgctttaatgggctggaattgagtgcctgcagcttttccaggcactcggtgcaagctgtcagtrgatctaccattctggtggctctcttctcacagctccatgtacctcatgtacctctaggcattgtcccagtggggacgatatgtgggggcttcagctccacattttcattccccactgcactgcaagactttctccatgagggctctgcccctgcagcaaacttctgcct

SEQ ID NO: 892113 - DNA, 670 bp, Homo sapiens
tgtagtggcttcacatttgtctagtttgtcaaggtcttgaaatgtataagacaagggagtttttaaatttaacttctctccatcagtcccttggctttctaccatgttttataccttttatgcccttcctcctaccttgtcaccctttccttccatctcagcagatttcttcaattttgaattaaaattatctgctcatagaataactgtttcttctcatgttcatcatcttcaaaaactartatttaatatttgcagtgtcagcctagtgaactaagaaagtattgaaatagtttaaaaaccagaaccatctcagttaagctacagatttgttatttgttttattcatttctttgtttggcttacacaaaagctgtatttttaatatcaataatgatgtgcatgctcttgtaaaaacacaaaagcctaaaagatacataaataaaaaattaataatctcactctccctcagtccagtccttcctctgagaaaagcaatgggaaagtgggttgtatattcttccacattaatcttctgcttatagaaatagacatataaaaaatttccatagagaatgaatatattattttctttataaaaagcatttgacttttctttctgtgtctacagaaaaagaataaattgtgcaccttagtagctcaatagtgt

SEQ ID NO: 892114 - DNA, 602 bp, Homo sapiens
tctgtcccccaggctggagtgcagtggcacgatctcggctctctgcaacctccaactccctggttcaagcgattctcctgcctcagcctcctgagtagctgggattacaggcatgtgccaccatgcccagctaatttttgtatttttagtagagacggggtttcaccatgttggccaggatggtctcgatctcttgacctcgtgatccacccgcctcagcctcccgaagtgctgagattacaggcatgaaccatcaagcctggtgctggcatatgtgtctttatagtagaatgatttataatcytttaggtatatacccagtaaagggattgctaggtcaaatggtatttctggttctagatctttgaggaatcaccacactgtcttccacaatggttgaactaatttatactcccaccaacagtgtaaaagcgttcctatttctccacatcctctccaggatctgttgtttcctgactttttaatgatcgccattctaaccggcatgagatggtgtctcattgtggttttgatttgcatttctctaatgaccagtgatgatgagctttttttcatatgtttgttggctgcataaatgtctt

SEQ ID NO: 892115 - DNA, 597 bp, Homo sapiens
tgggaaataccattctggacataggcctttgcgaaggttttataatgatatctccaaaagccactgcaaccaaaacaaaaattgacaaatgagatctaattaaactaaagattttctgcacagctaaagaaactatcaacagagtaaacagacaacccacagaatgggagaaatatttgcaaactgtgcatctgacaaaggcctaatatacagaaactctaaggaacttaaattgataagcaaaaagcaaacaactttaaaaaagtggacagaggacattaacaaacacttttcaaaagaagacatatgsatggccaacaagcgtatgaaaaaatgctcaacatcactattcattagagaaatgcaaattaaagccacaatgagaaaccatctcataccagtcagaatggatattattaaaaagtcaaacaattatagatgctcgcaaggttgtggaaaaatgatcacttatacactactggtggtaatataaattagtttaaccattgtagaaagcattttggtgatttttcaaggaacttaaaatagaactaccatttatcccagcaatcctattaaatcccattattgggtaca

SEQ ID NO: 892116 - DNA, 643 bp, Homo sapiens
caaattttaacctcgaaagccttaatttcatcagtttggaatgaacaatgtaaattttgcctctagtgtctctcatctatcagactgtgagcttttctgggacatggatatggcctatttttccttcatatccctcctctctagcatagtgcccaatatcataaaggttgaataaatatttgtagaatgaatgaatgaaggaaggaatgaatgaatggcataaagtactaaggaatatggctagcatgtaagagctcacctgcctgtttactgctgtatggaattagcttatgcagggtamtctacacaaatgatcacttataaacttttgggaaaaacttacatgttgattttagtctatacaaacaaagatatccctttagtttttccaaatgtctcctctctttcaaaattcttttgtgaaaacgatggggcaaatgaaaacactcttgtcttcctgtgattaaaattttaaagaaaaagcatggtattttcccaaaaggattcttgactttgaaatctccttgctccacttactgctaaaactttggtttattgacctgttacaaggtctatcaatgttaattttacttacactgggtaaacaggaagtattttcatttgttaaatggttgtctaatgt

SEQ ID NO: 892117 - DNA, 609 bp, Homo sapiens
attttttttttgctcttctccctcctcccaacctcctactctaagtaagctgcagtgtctgttgttcccttctttgtgttcacatgttcttattatttagctttcacttataagtgagaacatgtggtaatttgttttctgttcttgcrttagtttgctaaggataatggcctccagctccatccaagttcctacaaaggacataatctcattcttttttatggctgcatagtatttcatggtgcttatgtaccacattttctttatccagtcttctattgatgggcatttaggttgattccatatctttgctattttgaatagtgctggagtgaacaacgtgtgcatgtgcatgtgtctttatggtacattgatttatattcttttgggtacatacacagtaatgggattgctgggttgaatggtagttatgtttttagctctatgaggaatctgcacactgctttccacaaagcatgaactaatttacactcccaccagcagtgtataagtgtttcctttgctctgaaagtacaccaggatctgtgttttttgatgtttaaataatagccattctgactggtgtgagatggttatctcattatggtt

SEQ ID NO: 892118 - DNA, 609 bp, Homo sapiens
attttttttttgctcttctccctcctcccaacctcctactctaagtaagctgcagtgtctgttgttcccttctttgtgttcacatgttcttattatttagctttcacttataagtgagaacatgtggtaatttgttttctgttcttgcgttagtttgctaaggataatggcctccagctccatccaagttcctacaaaggacataatctcattcttttttatggctgcatagtatttcatggtgcttatgtaccacattttctttatccagtcttctattgatgggcatttaggttgattccatatctttgctattttgaatagtgctggagtgaacaacgtgtgcatgtgcatgtgtctttatggtacattgatttayattcttttgggtacatacacagtaatgggattgctgggttgaatggtagttatgtttttagctctatgaggaatctgcacactgctttccacaaagcatgaactaatttacactcccaccagcagtgtataagtgtttcctttgctctgaaagtacaccaggatctgtgttttttgatgtttaaataatagccattctgactggtgtgagatggttatctcattatggtt

SEQ ID NO: 892119 - DNA, 617 bp, Homo sapiens
gcaaaagacaacttagggtcttcagaatacattgactaaagtatttttaatgttccaaatattgaagaatattccattcccctcaaaacagtcttagggaagtatacatatggtaggaatccctcttgcccttgataacaccatcaacagcaatgacaagaagaagaaaaacccacattatcaagcatccatgtgccaaatattgtgctaaacacttgtattatttcatttaattctcaaaacagtgtataaattaggtgctaaaatgattctaatttcaaaaataatgaaataaattcagagagataaaatagctagtgaaagtgaattgcctaagatcacatargttttttctttttctgaacaggtatttttttatctttgttatgtctaaaatataaattttggacatttaaaagtggtaacagttaatatgcctgtggataatatcacagtaaaaattatataaacaaagtcagtgatagtttttcatgaatgctctaaagttctggcagtattctccgagtctatatatatatatatatatggagagatgtataatatcatgttagcttatgttcctcttcacaaaaattggaccattttttgtacaaagt

SEQ ID NO: 892120 - DNA, 663 bp, Homo sapiens
agctaagtgaaattgaatcccagacagtcccccagttctgccatttttaacccattgttacttgataaacattagaatcatctcgtggcagcagagctctgtggtaaggagtgcataggtaaaaagtgcataggtgtgtgcccaatggacacaagtgcattgggctggggtttctttaacgtcatgttgagccctgtgattccttactctcgctttttccctaatatcctcacaatttgaaaataactaatctaccttccctgatattaaaattagctcctggagcatttcactaattgtaccatcatcgatattcatgctcttttaaataaataaattttaccttttaggataaatttataattacttgctttgcrcatttccccccttctaggcaatgacctatttttaattgaggttttctggtctcctatagggatagatcataaaatctgagctctaaatgaagaattgcatttttaatgttatgtaatttaaccacttctgaggagtaaaatagatgaaaatgattgctttgcctactgggccaagtaagggtcctgtctgcggaattccccgctgtgggaaagtggggaggtctttgctactggagatgcaggtgtggtcttgatgcttccaacagcccccattccgaaacgtgct

SEQ ID NO: 892121 - DNA, 602 bp, Homo sapiens
gagaatgatgatttccagcttcatccatgtccctacaaaggacatgaactcatcattttttatggctgcatagtattccatggtgtatatgtgccacatttgcttaatctagtctaccattgttggacatttgggttggttccaagtctttcctgttgtgaatagtgccgcgataaacatacgtgtgcatgtgtctttatagcagcatgatttataatcctttgggtatatacccagtaatgggatggctgggtcaaatggtatttctagttctggatccctgaggaattgccacactgacttccacaatggttgaactagtttacagtcctaccaacagtgtaaaagtgttgctatttctccatatcctctccagcacctgttgtttcctgacttaaagtttttaagagctaagcttctgtatccactgacagaaatgcaatacytagtttatgatgacttgaaacaaaacaaatacccataaggaaaaagctgtattttatctaaatttactttcagtcaatagttaagtagcgttttcctcccagtactatatataaggctgttcttgggagccagacggtttaggtaataaggtagcc

SEQ ID NO: 892122 - DNA, 610 bp, Homo sapiens
cttgtagggctggtcttgtagtgtcaaatgccctcagcatttgcttgaaaaatctttatttctcctccatttataaaacatagtattgctggataaaaatttattggtcaatagttattttgtttaaggaagccaaagctaggaccccaatccctcctggcttgtcaggttcctgctgagaagtctgctgtttgataggttttcctttataggttgccttatgcttttgtcttgctgctcttagaattcttttctcccttagaccctcttgtatttggatgtataaatctctatcaaggccagggaggttttcctcaattatttcctcaagcaagtttttcaaagtttttgcttcttcttcagaacaccagtgattcttargtttggcaattgtacatagtcccacatttcttggagactttgttcttttatttatttatttattgtctaattggactaattaaaaaaccttttttgagctctgaaattctttctctttggtatagtgtattgttaaaattttccattgcattttgtaatttcctaaatgtgtcatttacttccaaaatttctaattttttattcttcatctttttttagtattcatgat

SEQ ID NO: 892123 - DNA, 587 bp, Homo sapiens
tgtcattgatgggcatttagattgcttccatgtccttgctattgtgaatagtgctacaatgaacatacatatgcatgtgtctttatgatagaatgatttctattcctttgggtatatacccagtaatgggattgctgggtcaaatggtaattcgattttggctctttgaggaatcaccatactgctttccataaggattgaactactttacactttcaccaacagtgtataagcattgccttttctccacaacctcaccagcatctgttattttttgacttttgaataatagtcattctgactgatgtaagatggtatctcattgtggttttgatttgcatttctctactgctcagtgatattgagctttttttcatatgtttgtggcccgcatgtatgtcttcttttgaaagtgtctgatcatgtactttgtctactttttaatgggktttttttcttataaatttgtttaagttccttataggtgctggatattagatctttgtcagaagcatagtttacaaaaaagaatgagatcatgttttttgagaaacatggatggagctagaggccattatcctcagcaa

SEQ ID NO: 892124 - DNA, 704 bp, Homo sapiens
tatgtctaataatcacttttagtagaaacaatataaataatttagtaatatcagtagttactacttatggagaacttaagcacaaataaaatgtcatttaggctgggcgcagtggctcatgcctgtaatcccaacactttgggaggctgaggcaggtggatcacctgaggttaagagttcaagaccagcctggccagcatggtgaaaccccgcctctactaaaaatacaagaaattagcggggcactgtggcagacacctgtaatcccagctactcgggagctgaggcaggacaattgcttgaacctgggaggkggaggttgcagtgagccgagatcacgctattgcactgcaacctgggcaagaagagtgaaactctgtctcaaaaaaaaaaaaaaaatttcatttagtcatcacaacaatcctatgaggtagatgctattaaaacctcattaaacatatcaaggaaccaaactacagttagaatatcagttcgatagaggaagagagttggaatttgaatccatcgcctaatcctgctgctactttttcctctggagcaaataggccagagtgtcacacaaaacatgtctcatgatgaggatactcagtgtccatattagagctaggcaacttctgctggaaaaggtgggaaatttccaaatactggattatgaatgagactgaattcataaaacaagacgc

SEQ ID NO: 892125 - DNA, 688 bp, Homo sapiens
  misc_feature 660, 661, 662, 663, 664, 665, 666, 667, 668, 669, 670, 671,672, 673, 674, 675, 676, 677, 678, 679, 680, 681, 682, 683,684, 685, 686, 687, 688: n = A,T,C or G
agtgtgaacactgcaatggggatcatattctacctctcattcctaaagtacataaaatctgagaaaattatttcattcattcattcatcagcaaatatatattataaatctactataccaagggctaggccaggatatatgttggtggaacaaatcatatatagatcctgttctcatggctatagtgaactatatggacatcaaaccaatgacatcagctataaattcacaattacatattatgttgaatccaatgaagggaaagatcagagtattcggaggaaaattactgagtggctctgcacatagaaggggctgtgcagtgggaarggaagggtacacagatggatgaggaaaagcctccaagagaaaggagcatttcaaaaagggcttgaaaatgagtggtaatttgggaaaggttcaggggatgagcattttaagccaaggaaagagcctgaggatggagtcaactttgttacactgaagaaacagaacaaggacccaaatgtggggagtgcagtgaataagagtagaaagagctgtgagatgatgctggagagaagggaggacccaaagtgtgcaaggccaggggagccatacttagagtatgatgtgatcatacagtgaggagacactgcgggatctaaagcaggaaactgnnnnnnnnnnnnnnnnnnnnnnnnnnnnn

SEQ ID NO: 892126 - DNA, 599 bp, Homo sapiens
tcagaagccaagtgaagcctgaaattaaatttgggaactttattatacagtcagccccccaaaactatcagaattgtgtatgtctggacattgcttttgaaaatgcaggaaaaataacctctgttttaatgcacagtcctattggaaagtaacttgtcaattatgctgaatagtgggtgattttcaatgcgtagaaaatggacagggactgaccttagactccttgaagcaatgagctcagttggttgtaaacccagatccttagggtgtcaaggcggctgtattaccctctgcattaagtagcccctgtgtgtttacttttattgatgccctatattgtgctttctcagacagaactcatcagttgcaggttagtgtccttggtgttagaaytttagaaaatgtcattgcaatttaggcagcagtgatcaaaagtaactatctcatatcaccaggagccagttctagtttttacactaatccaaaataagtaaagaacatcatgttcaaaggaactattttgtacaagatttgacttttaagtctgatgaatttatgggtaaaaaatattccttttgatctgagttcagtggtttcta

SEQ ID NO: 892127 - DNA, 637 bp, Homo sapiens
ctgaaatgaatattactaaactaacattttttctatttaagtgttttgctatcacaaactgaaagaaaaattaacgtttcagattatttaggagaatgagccagggattgcaaatatctcacctcaaatatcgtttttgttttttgttttttgtttttttttttttgagatggagtcttggtctgttgcccaggctggagtgcagtggcacgatctcagctcactgcaacctccacctcccaggtttaagtgattctcctgcctcaacctcccaagtagctgggactacaggcatgtgccaccrcacccggctaatgtttttgtatttttagtagtgacggggtttcaccatgttagccaggctggtctcgaactcctgacctcaagtgatccaccctccttggcctcccaaaatgctaggattgcaggtgtgaggcaccacacccagacactttgcaaatatctttattattcattatatataatagattgttctatagtacagatagttaaaatggcttaagtaacaaaaattaatttttgattaaaatattaggaagtataaagtagatcagtcaaaaagatatgaacataactgaataattcagccagccaaatagcacacactggacaaaat

SEQ ID NO: 892128 - DNA, 637 bp, Homo sapiens
ctgaaatgaatattactaaactaacattttttctatttaagtgttttgctatcacaaactgaaagaaaaattaacgtttcagattatttaggagaatgagccagggattgcaaatatctcacctcaaatatcgtttttgttttttgttttttgtttttttttttttgagatggagtcttggtctgttgcccaggctggagtgcagtggcacgatctcagctcactgcaacctccacctcccaggtttaagtgattctcctgcctcaacctcccaagtagctgggactacaggcatgtgccaccgcacccggctaatgtttttgtatttttagtagtgacrgggtttcaccatgttagccaggctggtctcgaactcctgacctcaagtgatccaccctccttggcctcccaaaatgctaggattgcaggtgtgaggcaccacacccagacactttgcaaatatctttattattcattatatataatagattgttctatagtacagatagttaaaatggcttaagtaacaaaaattaatttttgattaaaatattaggaagtataaagtagatcagtcaaaaagatatgaacataactgaataattcagccagccaaatagcacacactggacaaaat

SEQ ID NO: 892129 - DNA, 618 bp, Homo sapiens
cctttaaacaatcttgttttggacagaggaaagttacacaaaattggtttcaaatcaaaccagtttctgcctaaactggctcagggatttatgctgaatttaactttctcaacggcttcccattaatcttgttaaaagtaaaaccttacacaaattacattcaacagagtttaattgagaaaagaacaattcacgaacctggcagtcaccaaaccagaagtttagggaggttccattgctaccacatggtcaaagaagatttatgaacaggaaaaggaaagtgacacacaaaaaaacagaagtgaggtacagaaacaactggattgtttacagtgtggcatttgccttatttgaacatggtttgaagagctggctgctcttcaytggccaaaacttggtgattggcataagagtaggttacagtctgttcacacatccagtcagggagcagttcactatgtacagagaaacctttaaaatatataaaaacctttaggctaaacttaatttaacaactctcttcttttggtcaaactctcagttgaaagatagactaaaactttggatgtcattctgtcaccatcataaatgtacttatttggtctcaaatcccactgg

SEQ ID NO: 892130 - DNA, 689 bp, Homo sapiens
taggttaaataagcaaaaataattagctaatgagtttaatttcttggtcacattacttggaaaaatccctcaaaattatcctaaaatatcttgcgttgtgtaatatacaatttgtccctttcaaaaaagaaatattcaaaaatatttttggatttatttgtgtgagctaatgatttttgaggggctcaragggagtactggtggtagcataaatatctgaaaggacagtagacatgagggatgaatgatgttaccattgtagataaaatgcatgctcatcaccttcactgcttaatgaactagcaatgaatggcataatttttttttttgagatggagtcttactctgttgcccaggctggagtgcaatggcgtgatctcggctcgctgcaacttgcgcctcccgggttcaagtgattctcctgcctcagcctcctgagtagctgggactacaggcctatgccaccatgcccatctaatttttgtatttttagtagagacgaggtttcaccatgttggccaggatgttctcaatttcttgacctcgtggtccaccagcctcagcgtcccaaagtgctgggattacaggcgtgagccaccacgcccggcagaatggcatatattgtaactctaagtgtgacacgctaatgtctagagtagatacatacatgcaatataaactgtgtgccc

SEQ ID NO: 892131 - DNA, 635 bp, Homo sapiens
agcaaaagcagtcacttctgtattcttattagaaaagcaagaacttcagaggtgacccccagaggatttctctttaggtctggaaatcagtttagattggccagaacctgatctcatgaccatccctagcagtagagaatagcattgtcatgattgactttggatcaawcataatttattgactgagagtgcacatgtggtcccccaaagaagatcaagaaaggagggaatttgcagtctgtactacagcatgcatgctgttttataatctgctctttctcttaattgcatatttcaaacatctttccatactaagaaatatagattcagtcattcatttaacaacaaattattgagagtgtactctgttccaggaacttaacttggcatggaggacacaataatgaacatagtatactccttgtctccatggagcttagcatctaatgagggatacagaaattcatcaaagaggttcacaaagaaatgtaaaattacgattgtaatttgtgctgaaaaggagggaggtgtgtggtgtgtgagagcattgacaggagatttgactcaatcaggagggtctgtgatctgaatggccataagccagccccttgcctagctgtagcacaattattgct

SEQ ID NO: 892132 - DNA, 635 bp, Homo sapiens
agcaaaagcagtcacttctgtattcttattagaaaagcaagaacttcagaggtgacccccagaggatttctctttaggtctggaaatcagtttagattggccagaacctgatctcatgaccatccctagcagtagagaatagcattgtcatgattgactttggatcaatcataatttattgactgagagtgcacatgtggtcccccaaagaagatcaagaaaggagggaatttgcagtctgtactacagcatgcatgctgttttataatctgctctttctcttaattgcatatttcaaacatctttccatactaagaaatatarattcagtcattcatttaacaacaaattattgagagtgtactctgttccaggaacttaacttggcatggaggacacaataatgaacatagtatactccttgtctccatggagcttagcatctaatgagggatacagaaattcatcaaagaggttcacaaagaaatgtaaaattacgattgtaatttgtgctgaaaaggagggaggtgtgtggtgtgtgagagcattgacaggagatttgactcaatcaggagggtctgtgatctgaatggccataagccagccccttgcctagctgtagcacaattattgct

SEQ ID NO: 892133 - DNA, 612 bp, Homo sapiens
tctttttgcagaatctggaagtggacatttgtagcgctttgaggcctatggtgaaaaaggaaatatcctcacataaaaactatacagaagcattctcagaaacttctttgtgatgtgtgcattcaactcacagagttgaacatttctttgatagagcagttttgaaacaatctttttatagggtatgcaactggatatttggagggctgtgaggcctatggtgaaaatggaaatatcttcacataaaaactacacagtagcattccaataaacttcttttgttgtttgctttcaactcacagagttgaatattccttttcatagagcagttttgaaacactgtttttcagaatttgcaagtggatatttrgactgctgtgaggccttcgttggaaacgggatatcttcacataaaaagtagacagaagcaatctcagaaacttctttgtgactttcatgtcacagagttgaacattccttttcatagaacaattttgaaacactctttttgtagaatttgcaagtggatatttggaccgctttgaggccttcgttggaaacggtatatcttcatataaactacacagaagtactcccagaaacttctttgtg

SEQ ID NO: 892134 - DNA, 674 bp, Homo sapiens
taggtcaatctgaaaaggtggaagagaagtgaaaagcaattcttgtgctctagtcagtagtgtgtttatctttgacagccattacgtgtcaaaaattactgacccttacttaatgatatctctattgttttgggaagcctaagcagtggtaataaataggcccaataggtatcatgaatcctacatcatcgatgatcattcttgcttgcttcaccacacaggcacgtgttcccaatttgcagcaattctttgcagctattccggtgtccatgcttcttgctttttgtaaccctactatttctataatccctataatctgcactcattcataggggaggaaagaagacacagacggggcaaggccactttttgaacgcctcagcctagaaatgcgctatgccactcattctcacattctttcttctagaaatggccacacctaacagcaagggaggaaggaacacatagtctggtatgtccaggatgaagagaacataaatttaaataaacagtttgcagtctccatcacattattcrgagattaaaaatatttttctcaagtaaagatctttcttagagattagctttgaaaataaagatggtacaatatcctaaatttatttgctgcaagataattttacaatgtggccacatctgatcaggcttaataacca

SEQ ID NO: 892135 - DNA, 626 bp, Homo sapiens
ccaaatgcctgatttcaaaattcacttttaaaccgtttagtgctttatcatttctctttattttctaccattctgcttctcttctagacagatttataacagccattttaggtagataccatttaaggtagatactyatttcttctcgggtgatttttcttccctacatttttttttaacctggatttctcaccctccgttattccaaatgataaatatttctttaactccatagacatttctcttcataaataaaggtattacctttatcctgttcttgtcattgccatatagtgtcacatgtaaagaacacatgtataagaacacacacacaatcacacataagaatgcctatataaaatatacatgtacttatgttttatttatttactttttttgtatattttatacttatgtacgtaggtatacgtatgcttacttatacatgcatacacagtagaaagcccttaaaacaaaagtttttaagtgtttcttcttacattttgaatcattgctgattaccaatgtgacctgtatccctgagaatatttcgacttttgtctgtttttaatctgtgtagtctctgtttcagaattagtagtgaaaactattgaatatttgctatt

SEQ ID NO: 892136 - DNA, 626 bp, Homo sapiens
ccaaatgcctgatttcaaaattcacttttaaaccgtttagtgctttatcatttctctttattttctaccattctgcttctcttctagacagatttataacagccattttaggtagataccatttaaggtagatactcatttcttctcgggtgatttttcttccytacatttttttttaacctggatttctcaccctccgttattccaaatgataaatatttctttaactccatagacatttctcttcataaataaaggtattacctttatcctgttcttgtcattgccatatagtgtcacatgtaaagaacacatgtataagaacacacacacaatcacacataagaatgcctatataaaatatacatgtacttatgttttatttatttactttttttgtatattttatacttatgtacgtaggtatacgtatgcttacttatacatgcatacacagtagaaagcccttaaaacaaaagtttttaagtgtttcttcttacattttgaatcattgctgattaccaatgtgacctgtatccctgagaatatttcgacttttgtctgtttttaatctgtgtagtctctgtttcagaattagtagtgaaaactattgaatatttgctatt

SEQ ID NO: 892137 - DNA, 626 bp, Homo sapiens
ccaaatgcctgatttcaaaattcacttttaaaccgtttagtgctttatcatttctctttattttctaccattctgcttctcttctagacagatttataacagccattttaggtagataccatttaaggtagatactcatttcttctcgggtgatttttcttccctacatttttttttaacctggatttctcaccctccgttattccaaatgataaatatttctttaactccatagacatttctcttcataaataaaggtattacctttatcctgttcttgtcattgccatatagtgtcacatgtaaagaacacatgtataagaacacacacacaatcacacataagaatgcctatataaaatatacatgtacttatgttttatttatttactttttttgtatattttatacttatgtacgtaggtatacgtatgcttacttatacatgcatacacagtagaaagcccttaaaacaaaagtttttaagtgtttcttcttacattttgaatcattgctgattaccaatgtgacctgtatccctgagaatatttcracttttgtctgtttttaatctgtgtagtctctgtttcagaattagtagtgaaaactattgaatatttgctatt

SEQ ID NO: 892138 - DNA, 672 bp, Homo sapiens
ctaccatctcgactcctctgagcctgaatgcaataactgatgggcaaagggatgcaaaatgcagagtctccttgcctcaaggttaggctacctatgagatgcaactcatgttgcagagctttttagtgatcaagctgagaccctgccattgctcagctccctcacctgctttatcctgcttccttcacttcctttcttatagaagccactctccataagtcrcatactccagaattcttttctcaggatctgcttctgggaacgcaacctaaggcagtgctttatgtgaattagcatcctcctcctcttttattttatctcaagcctcttaaactactggtttaatgagtattgcaacaactttggagcgagcagaacatatataaacataaaaggccatttggaaaaaaaaataatgtcagcaccttgacctaagattttcaatggttcaaaacacttttggaaataatggaaaagtaaaactatttctggatcaaggaaaatatacaaagaactggcatgcttgtttttgaggagaaattatccttaacagatttttaagtattactgtgaaaaagacaaataattctcttgaaggggatagcctcctagattctgtctcttgacttaattgcattgctttatcttgcttattcttaactaaggattaaa

SEQ ID NO: 892139 - DNA, 623 bp, Homo sapiens
taactaaaagaatgaaattaaaatgttcctaacacaaataaatgataaatgtttgaagtgacggatctctgaattaccctgatttgatcatcacacattgtatgcttctatcaaaatactacatgtaccccataaatatgtacaactattatgtatccataataactaaaamtaaaaaaatgtaaatgcatctcttaatatgtatgtgtttaaaattagaaacttgctacattttaaataaaagagaaacaaatgacttctatgaactattcaatcatttcaagtatacaagtttagtaatctttacacaactttacattaattacacttatttttactaatagtagcattacatgttcaaaatttgaatgttatttagttttctgacattacaatggcacaactttaaaatatgtattactttttcctttatattttaggagtcttcctaggccaaagtataaaatctgtagctctatcttaaactaaataaaatgaaaaaaacaaggtatctgtcaccctacacctcctaatcaatatggcttatttttttgctaatttttttttttttttgagacagaatttcactcttgttgcccaggctagagtgcaatggcacgatc

SEQ ID NO: 892140 - DNA, 623 bp, Homo sapiens
taactaaaagaatgaaattaaaatgttcctaacacaaataaatgataaatgtttgaagtgacggatctctgaattaccctgatttgatcatcacacattgtatgcttctatcaaaatactacatgtaccccataaatatgtacaactattatgtatccataataactaaaactaaaaaaatgtaaatgcatctcttaatatgtatgtrtttaaaattagaaacttgctacattttaaataaaagagaaacaaatgacttctatgaactattcaatcatttcaagtatacaagtttagtaatctttacacaactttacattaattacacttatttttactaatagtagcattacatgttcaaaatttgaatgttatttagttttctgacattacaatggcacaactttaaaatatgtattactttttcctttatattttaggagtcttcctaggccaaagtataaaatctgtagctctatcttaaactaaataaaatgaaaaaaacaaggtatctgtcaccctacacctcctaatcaatatggcttatttttttgctaatttttttttttttttgagacagaatttcactcttgttgcccaggctagagtgcaatggcacgatc

SEQ ID NO: 892141 - DNA, 595 bp, Homo sapiens
agatatagaccaatggaacagaacagagccctcagaaataataccacacatctacaaccatcagatctttgacaaacctgacaaaaacaagaaatggggaaaggattccctatttaataaatgctgctgggaaaactggctagccatatatacaaaactgaaactagatcctttccttacaccttatacaaaaattaattcaagatggattaaagacttagatgtcagacctaaaaccataaaaaccctagaagaaaacctaggcaataccattcaggacataggcmtgggcaaggacttcatgtctaaaacaccaaaagcaatggcaacaaaagctaaaattgagaaatgggatctcattaaactaaagagcttctgcacagcaaaagaaactaccatcagagttaacaggcaacctacagaatgggagaaaatttttgcaatctacttaaatgacaaagggctaatatccagaatctacaaagaacttaaacatatttacaagaaaaagtcagacaatcccatcaaatagtgggcaaagaatatgaacagacacttctcaaaggaagacatttatgcagccaacggacacttg

SEQ ID NO: 892142 - DNA, 595 bp, Homo sapiens
agatatagaccaatggaacagaacagagccctcagaaataataccacacatctacaaccatcagatctttgacaaacctgacaaaaacaagaaatggggaaaggattccctatttaataaatgctgctgggaaaactggctagccatatatacaaaactgaaactagatcctttccttacaccttatacaaaaattaattcaagatggattaaagacttagatgtcagacctaaaaccataaaaaccctagaagaaaacctaggcaataccattcaggacataggcctgggcaaggacttcatgtctaaaacaccaaaagcaatggcaacaaaagctaaaattgagaaatgggatctcattaaactaaagagcttctgcacagcaaaagaaactaccatcagagtkaacaggcaacctacagaatgggagaaaatttttgcaatctacttaaatgacaaagggctaatatccagaatctacaaagaacttaaacatatttacaagaaaaagtcagacaatcccatcaaatagtgggcaaagaatatgaacagacacttctcaaaggaagacatttatgcagccaacggacacttg

SEQ ID NO: 892143 - DNA, 581 bp, Homo sapiens
tggtctagcattaataaaaacagaaataccttgttaaaataacaaacataaattggactcaaaagatgacagattttgtatgtgcccaaagtttcagagatggttttattcatggccatgagcccagcacatgcttttgtaacttcccaagctttgcttcttcaaccccagtatgcttcaacctcaggaagtcctccttgttaccctctttaagttcataggtaaagatgtgtttcattttgtttattgagaatgttttgaaattattttgtgtccaggagagattggaatggattggaaaccattaaactgtctcattattacatagccaaatgctatttaaatgagcaattatttaaagtagtcraaagcagtatttttttttcctctaaggaagaatcaattttatcactatttatttccccaattattttatcttcaccttcaaagaaatggagtttttttgttttttgttttttttaagttgaagtctcactctgtcacccaggctggaatgcagtggcacggccagggctcattacagccttgacttcccaggctcaagcaatcttcccacctca

SEQ ID NO: 892144 - DNA, 620 bp, Homo sapiens
aatcatgcgggtggatctttctcatgctattctcatgacagtgaataagtctcacgagatctgatggtttcataaagggaagttcccctacacacgctctttcttgcctgccaccatgtaagacatccctttgctcttccttcttctttcaccataattgtgaggcctccccagccatgtgcaactgtgagtccatttaacctctttcctttataaattatgtttttattagcagcatgagaacagactaatacactctctaatacccaataccttgggcttacacgagcactgctcccctttcctgaaactctcctcccttccttctcacccagaagcatccctgtgatgtctctgatcctactgtaaattccatcttttctctgctatcaaatctgcaagcaaagctctgtcyctgagccccatgtcctcccagtgtcatgcatatgcagtagcccctcatccatgttatccaaccccagtggatgccggaaacctcggaaaattctgaacgccatatagcctatgtttttccctacacatatgtattcatgataaagtttaatttatgaattaggcacagaaagagatgaacaacaataaccactaataaaatggaa

SEQ ID NO: 892145 - DNA, 611 bp, Homo sapiens
aagggagtgacttacttaagggcacatgattagggtcagagttgaggccagacccttacatctagggtgtgctcatattagaagtgctgagaagcaccagcctcaccctccctatcattaaggatttgaaggctcragctaatcagacctctgaagtttactgcattttcatttgtcccattcagataataaggcaggcaatgtaaaaccaaattaaaatttgaagcatggttacattattaaaatattttgactgcccttcagctgttctcttcagcttctgatcttatctcacaagcattttaattgcaacgggcacagatttaaagtcaccatacctgccctaatgtaaacaccagcacattaaagacactcagggacttcagaggccaagctccaggggatggacagagggtctacttccagcttttctagacttctggcctaggaaagttcctctccaggcatgatgtgggtcatctgggaatattaccaggagaggaaagacacattttcaaagcttattgtcgtgctaatgataatggctgcttatccattccccgtgtgctttcacatccaatagctcatctcatctcctcttcacaacagcc

SEQ ID NO: 892146 - DNA, 627 bp, Homo sapiens
gggttatcccgggtaatcgtatcatatgaatccttcaaagtggagaagcttttccagcttttgtggggatgaagatgtgaacattgaagaatgtagagtggaatgctacctggttggctttgaagatggaggaagggggtcagaaaccaaggaatgctggtgtcctctagtagctggaaaaggcaaagcaatgaattctaccctcaaacctccagggtgactgactaacagacatcttgcttttagcctgatgaaacctatgttgggtttctaaactatcaagaaggtaatacatttatgttgtttaagccagggttccccagtccccrgtcacggatgggtactggtccatggcttgttaggaactgggctgcacagcaggaggttagcaggagggtaagtgaagcttcgtctgtatttacagccactccccatcactcacattaccgcctgagctcctccttctggcagatcaatggcagtataagatcctcacaggaacacaaaccctactgtgaactgcacatgtgagggatctaggttgtgttctccttatgagaatctaatgcctgatgatctgtcactgtctcccatctccccaagataggactgtgtagttgcaggaaa

SEQ ID NO: 892147 - DNA, 531 bp, Homo sapiens
tggtgttaattgcagcatttttataacataaaaatgaaagtgatataaatatttgtcaactcggaaacaacaccatataagcatgctatatttactagagcaggaaaaaatttatagttccatattcagtaagttagacaggtacctaaaacatactattcagtgtaaaaaataagttacagagtracataagaagttaaagaaccatagaaaaaaattaaaatacccaaaacaaagttttatattttctaagaaaacataaataatagaggtcatgtattacttgattaattttaaaagtcaacaaatatagtatgttgatagcaaaaagacaagagatgggaagaaggaggagtgttgaaaaaaatcagtgattaaacacattccctgactaagtagagattgaagaaataaagcaataaataaatatatgtgtatcaccttaagttacaatgcaaaatatccaagaaactagaaatagtgataaacacatataggaaggaaggcataagaagagctgaaaatgtaaga

SEQ ID NO: 892148 - DNA, 655 bp, Homo sapiens
aaacattgtggctgcatgagctgtctagtccccagcagaatgctatgcatatgacattataattctgtatttttgaaaagatccttgactagtgttttatgcctatcctcacccaaattcttctcaactggacctgaaatttgttaaattgaagaatatggttgtctcatgttatttttccatctggcttttaaaattgcttttggaggaaggaacatctgttattacacatctcagtcttcaacagttaaataatcagatcactactgggatgttttctttcttggactcatcgtctgtcctgggaactcttatagcttttataatcagctatataagctgttctgttggaagctgcattctgccaagggtaaatgaactgggtccacaaagtttagtgcttgattaawttttttttttctttagctcatgagttattgcaggttctaaacttagcaaaatgcctctcttgaaacccaatatgaatattaatgtaagacggacttggagtgccaaagcagttgagagtgggtcaggtactttctagatgctggaacatttgcatatatttcagttgaactatgaaatgtctttacatgaattttttgtcagagtcttttattaaaaggaagatgtagttatatctgtattggct

SEQ ID NO: 892149 - DNA, 648 bp, Homo sapiens
acacacacacacacacccatggtccttaaaaatttcatggaaaatgcatatataaaaaaagaatgaattttaaaacattttttgcatcagaaataaactggtgctaacttgttataacatgtctcaacaggatctaatttgaggtgctaagaaggacaagatatcagtttgaaaagagctcctatcatagcagcatgaattattctaaaattgagtcaagarcaaacatcaaatttattgtgaaacttgcatgggagaatggtgaaatcattgatgctttataaaaagttaatggagacaatcccccccaaaaattagcaaatagttacaaatggttaacccattttaagaagacaggagactatgttgaagatgaagtctgcagtggcagactatccagatcaatttgcaaggaaaaagttaaccttgttcatgtccttattaaaaagaaccaatgattgacagtacaagcaatagccaacaccataaacatcacaattggttcagcttgcacaattctgaatgaataaagctgagcagacttgtgactcagatgtcaaaacctttgctcccaaatcagctgcagacaagagcagggctttcgatgaaaattttaaacaagtacaatcaagaacctaatgcattttt

SEQ ID NO: 892150 - DNA, 638 bp, Homo sapiens
ggcaacagttttttgggggtggtgctcaaggcattttgcttgttgactttctggaggaccaaataaagataacattttcttattataaaagtgttttgagagagcttgtcgaaacataggcagaaaaacactcagaaaaccaccagagagtccttctccactacagcaatgcccctgttcattcctttcatccaacaaaggcaattttgcaagagttttgatgggacactattagacatccacattaacagtttgatttgggtctctctgattatgtttgtttttcaattaaaaaacaaatctctaaagggtatgcatttttcttcaggcgatagtgtaaaaaagactacattgacatgactaaattcccaggacactcagttcttgaataaacttaatggctggtatcatcatttacaagacaatgttgaactttatgtatatagcttatgttaaaaaataaagtttatattttttatttttarattttaattccattttccagaaactttttgttgtcctcttgtttgtgtatatatgtctgtgtgtagatatgcttatgtataaatatacgttaaatatattcaattttttgagccgaaatttgttgccaaagtcatatgcatatgaatatgtta

SEQ ID NO: 892151 - DNA, 618 bp, Homo sapiens
acaaacaaagcctccaggaaatatgggactctgtgaaaacacgaaaactactttgattggtgcctgaaagtgacagtcagaatggatccaaattggaaaatattcttcaggatattatgcaggagaacttccccaacctagcaaggcaggccaacattcaaatacaggaaatacagagaacaccacaaagatactcctcaagaagagcaaccytaagacacataattgccagattcaccgaagttgtaatgaaggacaaaatgttaagggcagccagagagaaaggtcgggttacccacaaagggaagcccatcaggctaacagtggatctctcatctctctgcagaaaccttagaagactgaagagaatgggggccaatattctacattcttaaagaaaatagttttcaacccagaatttcacatccagccaaactaagcttcataagcgaaggagaaataaaatcctttacagacaagcaaatgctgagagtttttgccaccacaggtctgccttacaagagtttttgaaggaagcactaaatatggaaaggaaaaaccagtgccagccactacaaaaacataaattgtaaagatcatcaagaatataaagaaact

SEQ ID NO: 892152 - DNA, 543 bp, Homo sapiens
tttatgaaaatgaaaaataaccaaccacttacatacacagaaacatagatgaatctcaaagacataatattgagcaaaagaagctagactacatgacccagcaattccactcctaggtatatattcaaaaaggtgaaaagcagggackcaagcagaaacttgtacatcaatcttcatagcagcaatattcacaacagccaaaaatggaaaccaccaaaatgtccatcaatgcatgaacgggtaaacaaaatttggtatatctctagaatgggatgttattcagtcattaaaaaataatgtatggatacctgctatgatatgggtgaaccttgaacacattatgctaagtgaaagaagcgagacacaaaaggaccaacattgtatgattccactcatatgaggtggctagaataggtgaattcatagagacagaaaatagaatggtggttaccagaggttaaggggaagggaagttattatttaatcagtacagagtttcagtttgagataatgaagtagttctggaaatgaacagtggtaacg

SEQ ID NO: 892153 - DNA, 573 bp, Homo sapiens
aacagtaaggcagccctggtcctcatgaagggttatggagaagggggcttcttatcttcctcattcaccactgcaggcatagcgggggcttctcacacaggtatgtggtgtgggtacacctataaccagcctctctggaatacttcagggtgattgcatcctcacaggaagagcatcttccaggctcagcttgcacaataggcagagtcacaaatcttccctacttggaacatcaacattcttacaaatgaaaagaggtgcctgtctgacctgaacagccagaacactgagataggagtgtgtctgggaagtggatagctttcctgctggcctagcagggcagctgaggtagctcccgctcttcccactgagaagactttgcagcatctcaccgagagytccctcagaaacctgttcaatgctgaacctctgcccaccattgggtattacattgacccacctgctttagccacaaccagttcatacccaaggacaccttctctacttccctgaagcctgaaccatcaacccaataaataaaatactggggaaaagtaaataaataaataaata

SEQ ID NO: 892154 - DNA, 656 bp, Homo sapiens
ttagtacttattagtcgccactgccattataatataagcttcccaaaatgtaactgtcattgtttcacatcccctgctgatctgcagcactccccggcgcctaccaaattaaggaatgcctcgcccaatgttcagctgagacattgctgtttgtwaaaaaaaaaaaaaaaaaaaaaaaagtttaacagattttttaaatagctaatatttgatgtcatttatttatcaaatattatttgggggcatttcatgtgccaggcatatgtaacacttaaaagaatgttttgtaagttagggtagtattattatccttatattacatatgagggaactgaggcttacagaagttaggtaacttatgaaagctcccatggtttatggtggagctagatttccaggttgggtctgaatgttttctgagacatgctaactgctttgaaatttttacaatgttatatgcatttttaaaggatctgattttttttctccttcattctcctctcttgatgctatcactcatattttgctatctgcagtttttcacttttatatgtaagtggaggatgacgggtggaattgtgaagatgggagtggacttggagccagtaagcagggttctcatcacagccacagtacttacttctcaagcagatgtc

SEQ ID NO: 892155 - DNA, 656 bp, Homo sapiens
ttagtacttattagtcgccactgccattataatataagcttcccaaaatgtaactgtcattgtttcacatcccctgctgatctgcagcactccccggcgcctaccaaattaaggaatgcctcgcccaatgttcagctgagacattgctgtttgtaaaaaaaaaaaaaaaaaaaaaaaaagtttaacagattttttaaatagctaatatttgatgtcatttatttatcaaatattatttgggggcatttcatgtgccaggcatatgtaacacttaaaagaatgttttgtaagttagggtagtattattatccttatattacatatgagggaactgaggcttacagaagttaggtaacttatgaaagctcccatggtttatggtggagctaratttccaggttgggtctgaatgttttctgagacatgctaactgctttgaaatttttacaatgttatatgcatttttaaaggatctgattttttttctccttcattctcctctcttgatgctatcactcatattttgctatctgcagtttttcacttttatatgtaagtggaggatgacgggtggaattgtgaagatgggagtggacttggagccagtaagcagggttctcatcacagccacagtacttacttctcaagcagatgtc

SEQ ID NO: 892156 - DNA, 656 bp, Homo sapiens
ttagtacttattagtcgccactgccattataatataagcttcccaaaatgtaactgtcattgtttcacatcccctgctgatctgcagcactccccggcgcctaccaaattaaggaatgcctcgcccaatgttcagctgagacattgctgtttgtaaaaaaaaaaaaaaaaaaaaaaaaagtttaacagattttttaaatagctaatatttgatgtcatttatttatcaaatattatttgggggcatttcatgtgccaggcatatgtaacacttaaaagaatgttttgtaagttagggtagtattattatccttatattacatatgagggaactgaggcttacagaagttaggtaacttatgaaagctcccatggtttatggtggagctagatttccasgttgggtctgaatgttttctgagacatgctaactgctttgaaatttttacaatgttatatgcatttttaaaggatctgattttttttctccttcattctcctctcttgatgctatcactcatattttgctatctgcagtttttcacttttatatgtaagtggaggatgacgggtggaattgtgaagatgggagtggacttggagccagtaagcagggttctcatcacagccacagtacttacttctcaagcagatgtc

SEQ ID NO: 892157 - DNA, 682 bp, Homo sapiens
gaagtgaattaatgtcaggactttctctttgtgtgatctttgatccttgggtactagacagtttcttcataaggtaatggtaatgttcgaagtatcacatttgcggatgtcaaattagccacccagccaagaccagagtctatggtggaggggattacacaaggttgtggatactcaaaagtgattcactggccatcatcagtataaacatctactgcagctactaccaagaaagttacctgcatttcccaaaaactgtaatttatagagaggtaattttatgtcctgtcttctggagaaaaaccacatgsaaatagatacacggaaatgacaaagattgttctggaaattatcataagtagaagtaatttttagaaaagaaactgtatttgtatctaagtggctcattgaaatatctctctggaggtagggctggtatttctaagtcttctttaatctttgggaacaaaatagagaaaggaggacaaactgaagctttggtaatgctgagttaattggtgtttttttcaatatgaaccatgctctgtgggcaatccttcattcagcaaatcacctgtgaggctatcccacaaaaagacagtggacagaagtgtagctaagttctactgttagtggaagtaaaggtgggaggaatagggagggccttgtgttgctgttcggt

SEQ ID NO: 892158 - DNA, 431 bp, Homo sapiens
  misc_feature 416: n = A,T,C or G
ttctaaagcacttcctacagggtgtcaatttatgatgattggttgtggaatcatgccagctgcagaaggaacaggctctttcaaatcttcagaagacacttgcactgccagtggtgatgattactcgatctggccawcctgaaaacctaaaaagtggtccaggaagaaaggtgaggaaggagagggtcaggaatttgtaaggtaggcctgcttgtttagcattactgggcaacagaagagagttctattgcagcataaatttgggggttaccctaaatgagtgggtctcaactaaaggctgccccccatgggatactgagttgctacaacttagggggcagggtggtaagctactgacatctaataggcagaggtcagagatactgctaaacatcctacaatgtacatgacagctncctacaacatatact

SEQ ID NO: 892159 - DNA, 646 bp, Homo sapiens
ccctttttcttgtggtagagaagggataaagcagaatggtgtgagatttcatttgctactcagaattgcatgcaatttaaaacttatgaactgtttatttctggaatttcccatttaatatcatcagactgcaattgaccatgaaaaccattgaaaccacagaaagcaaaactgtggataatggggaaagtgcttagctaatggtaaactctrcaaatgtcaatgttgatattattctagttacagtggtaataggagagaggggtacacaagggagcgttttaaagcctattccagacatcaatcatccatttatttcttcattcaaaggaagtatacagattgtcatattgcatgcctactgtattgaggtagacataactgctttgggaacaacacaagatcttggtgagattctcaaatagggatatttgcatctaaaagcttctcgctctttcagcttccctcctctagagcagcagtccccatggtttggggatgattcaagcacattccatttatcattagagtctcataaggagcacggaacctagattcctcacatgcagcaattcacaatagggtttgccctcctctgataatctaatgcctgctaatctgacagcaggcagagctcaggcggtaa

SEQ ID NO: 892160 - DNA, 618 bp, Homo sapiens; identical to SEQ ID NO: 888298

SEQ ID NO: 892161 - DNA, 688 bp, Homo sapiens
agtactcttattgtttaagggctatatgtcatatcaataaatactctgttttctaaatactgacttgaggattgtgatctatagaaatatatgatggggttaggagaacaacatatctgatattagaatcatgctggaaattccaagacawatggccatcatacacatggcataatactgcatgggcagggtgggaagggaatactacttatttattataatagtaataaatataatataatataataatagtaatataatataatatatatattatataatatattatattatataatataatagtagtataaataaatactacttatttattataatgccggacactgtgctaaatactttgtattctgttcttgcattaaatcctcacaatttaatgaatgggtggtgttattatctccacatgtgtaacattattaggctttaaaataagaaagggagcacaaatgtactctttgggagaaacctgcagaattagtttcctctgtactagagcaaattaaaagtttatatccatgcaaattatacctgtgcaagtccatacacaagttggttaataacaatgggaaaagaaagataggaagcagtgatgtagtaagtagaacattgctttgtatgtttatgaagattcagataaaatgaaacaacaatctagattgaaaactga

SEQ ID NO: 892162 - DNA, 688 bp, Homo sapiens
agtactcttattgtttaagggctatatgtcatatcaataaatactctgttttctaaatactgacttgaggattgtgatctatagaaatatatgatggggttaggagaacaacatatctgatattagaatcatgctggaaattccaagacatatggccatcatacacatggcataatactgcaygggcagggtgggaagggaatactacttatttattataatagtaataaatataatataatataataatagtaatataatataatatatatattatataatatattatattatataatataatagtagtataaataaatactacttatttattataatgccggacactgtgctaaatactttgtattctgttcttgcattaaatcctcacaatttaatgaatgggtggtgttattatctccacatgtgtaacattattaggctttaaaataagaaagggagcacaaatgtactctttgggagaaacctgcagaattagtttcctctgtactagagcaaattaaaagtttatatccatgcaaattatacctgtgcaagtccatacacaagttggttaataacaatgggaaaagaaagataggaagcagtgatgtagtaagtagaacattgctttgtatgtttatgaagattcagataaaatgaaacaacaatctagattgaaaactga

SEQ ID NO: 892163 - DNA, 625 bp, Homo sapiens
agtctgattcactggcaggtaacctatgaaccgtaacataccaagacagctctttcatcttaccgcctcctcatactaacccagtaaggcactacagagctagaaggcacctaatttcaacttaccttctgcttttcttttcttgggcaatatctaatgttaatgtgttaagtaaacaatacacccttgtaagacacaactagagaagaaagtcatttccaattttatcagttattctatactgagaaatatagtaattccatatgtaagtctaagaagtcaaaagaggcactggttggtaagaaatatttccctttgtcttcaaaatgtgattgtcacaagcactgatccmtatagccatgaagacggggcttagaagatcagctttgtcaagggcagagcatttacagaagtttagaactgaactctgtcaaaggtaaatacccacctctatatacgcatgtgtaccttaatgatgtcaacgtactgactccaacacagttagatttccttgctgcaataactgcctagtacccataatatagagagtgcactgtttccaaaataaactaggaaaaattgtacattttttgggatagagaaattcaggttacttgccttgatt

SEQ ID NO: 892164 - DNA, 549 bp, Homo sapiens
attacaaaaatacagtatctagtattgaatgataaggtagtatcttcatgcaccatacacatgtccgaaaagtaacatatcagtcactcaaacagacattttgtgtttattaggttagtttggtattttttaaaacggaattatctrgtttggttggaataatgacacaatcctgacaatatgtctttgtataatagtaaccaagaaatggctaagatatttataagggatgtgaagtgtctttctccaatagaaatccaaccaattgttctcctactaatatcatcacttcagaatctgaacacttaactgccaaacatattcatgtctcattaatcttgtcctggatatatgtaatttacatattacatatagctaggacattatcagtacaatattcatattcctatcaaggtttatgtttttgcatgtttgttctcttttttaatcagaagatagtacaacaggactactgcagttccatatagctaatgattgtttcatttctatcacctatgagtagcacacatgaataattttgctataggc

SEQ ID NO: 892165 - DNA, 692 bp, Homo sapiens
gacgtacctggttcatctctctgggactggttagacagtgggtgcagcccacagagggtgagcacaagcagggtggggcatcacctcacctgggaacagcaaggggccaaggaactccctgccttagccaagggaagccatgaggaactatgccatgagggactgtgctatccagcccagatactatgcttttcccaaggattttgcaacctgctgaccaggagatgccctcctgtgcctayaccaccaaggtcctgggtttcaagcacaaaactgggcagctgtttgggcaggcatcaagctagctgcaggagtttttgtttgttggtttgtaccccagtacaattgttctggagacagaaccattcatccctctgtaaagggggctgaagccagggagccaagtggtctcactcagcaggtcccactcccacagagcccagaaagataagaatcactggcttgaaattcccgctgccatcacagcagtctgaagtccacctggaatgactgagttggtagggggaggtgtatccaccattagtgaggcttgagtagacagttttcccctgatggtgctaaggaggcctggaagttcagactgggctgaactcaacacagcgtggcaaagcagctgtggccaaactgcctctctagattcctcttcactgggcagggcatctctgaaagaa

SEQ ID NO: 892166 - DNA, 692 bp, Homo sapiens
gacgtacctggttcatctctctgggactggttagacagtgggtgcagcccacagagggtgagcacaagcagggtggggcatcacctcacctgggaacagcaaggggccaaggaactccctgccttagccaagggaagccatgaggaactatgccatgagggactgtgctatccagcccagatactatgcttttcccaaggattttgcaacctgctgaccaggagatgccctcctgtgcctacaccaccaaggtcctgggtttcaagcacaaaactgggcagctgtttgggcaggcatcaagctagctgcaggagtttttgtttgttggtttgtaccccagtacaattgttctggagacagaaccattcatccctctgtaaagggggctgaagccagggagccaagtggtctcactcagcaggtcccactcccacagagcccagaaagataagaatcactggcttgaaattcccgytgccatcacagcagtctgaagtccacctggaatgactgagttggtagggggaggtgtatccaccattagtgaggcttgagtagacagttttcccctgatggtgctaaggaggcctggaagttcagactgggctgaactcaacacagcgtggcaaagcagctgtggccaaactgcctctctagattcctcttcactgggcagggcatctctgaaagaa

SEQ ID NO: 892167 - DNA, 631 bp, Homo sapiens
tcccatgctattcttgtgatagtgaataactctcatgagatatgatggttataaaaaggggagtttgcctgcacaagtgctcctttctttgtctgccaccatccatgtaagatttgacttgctcctccttgccttccaccacgattgtgagacttacccacccacatgaaactgtaagtctgattaaacctcttccttttataaattgcccagtctcaggtatgtctttatcagcagtatgaaaatggactaatacagtacattggtaccagtacagtgaggtgctgctgaaaagatactcgactatgtggaggcaactttggaactgggtaacaggaagaggttggaacagtttggagggctcagaagaagacaggaaaatgtgggaaagtttggaacttcctagagacttgttgaatggctttgaccaaaagcctgatagcaatatggacaatawggtccagactgagatggtctcagatggacatgaagaacttgttgggaactggagcaaaggtgacccttgttatgttttagcaaagagactggaggcattttgctcttgccctagagatttttggaactttgaacttgagagatatgatttagagtatctggcagaagaaatttt

SEQ ID NO: 892168 - DNA, 609 bp, Homo sapiens
gaacaatagtaataaaatagttttcatttgtgaaacccttctttgttctagaagctgtactctatagtttacaggccatctccttcagtactgtcatcaccaagaggtggatattattgtcccttccattttacaagtgagaaaattgaggccaagttaggtgggtagtttaatataagactctgcctcaggagaggtatgyaggattaaaaataaatttagaggcccagcgtggtggctcacacctgtaatcccagctctttgagaggccgaggcgggcggatcacaaggttaagagatcaagaccatcctgtccaacatggtgaaactccatctctactaaaaataaaaaaaattagctgggcaaggtggcacatacctgtagtcccagctactcaggaggctgaggcaggaggatcacttgaattcgggaggcagaggttgcagtgagccgatatcatgccactgcactccaccctggtggcagagcgagactccgtctaaaaaaaaaaaaaaaaagaaaaaagaaaaaaaccaaaaatgaaaacaaaaaataaaaataaaaaaataaatttagaaactcacagctcacagcccacacagatacca

SEQ ID NO: 892169 - DNA, 609 bp, Homo sapiens
gaacaatagtaataaaatagttttcatttgtgaaacccttctttgttctagaagctgtactctatagtttacaggccatctccttcagtactgtcatcaccaagaggtggatattattgtcccttccattttacaagtgagaaaattgaggccaagttaggtgggtagtttaatataagactctgcctcaggagaggtatgcaggattaaaaataaatttagaggcccagcgtggtggctcacacctgtaatccyagctctttgagaggccgaggcgggcggatcacaaggttaagagatcaagaccatcctgtccaacatggtgaaactccatctctactaaaaataaaaaaaattagctgggcaaggtggcacatacctgtagtcccagctactcaggaggctgaggcaggaggatcacttgaattcgggaggcagaggttgcagtgagccgatatcatgccactgcactccaccctggtggcagagcgagactccgtctaaaaaaaaaaaaaaaaagaaaaaagaaaaaaaccaaaaatgaaaacaaaaaataaaaataaaaaaataaatttagaaactcacagctcacagcccacacagatacca

SEQ ID NO: 892170 - DNA, 609 bp, Homo sapiens
gaacaatagtaataaaatagttttcatttgtgaaacccttctttgttctagaagctgtactctatagtttacaggccatctccttcagtactgtcatcaccaagaggtggatattattgtcccttccattttacaagtgagaaaattgaggccaagttaggtgggtagtttaatataagactctgcctcaggagaggtatgcaggattaaaaataaatttagaggcccagcgtggtggctcacacctgtaatcccagctctttgagaggccgaggcgggcggatcacaaggttaagagatcaagaccatcctgtccaacatgrtgaaactccatctctactaaaaataaaaaaaattagctgggcaaggtggcacatacctgtagtcccagctactcaggaggctgaggcaggaggatcacttgaattcgggaggcagaggttgcagtgagccgatatcatgccactgcactccaccctggtggcagagcgagactccgtctaaaaaaaaaaaaaaaaagaaaaaagaaaaaaaccaaaaatgaaaacaaaaaataaaaataaaaaaataaatttagaaactcacagctcacagcccacacagatacca

SEQ ID NO: 892171 - DNA, 609 bp, Homo sapiens
gaacaatagtaataaaatagttttcatttgtgaaacccttctttgttctagaagctgtactctatagtttacaggccatctccttcagtactgtcatcaccaagaggtggatattattgtcccttccattttacaagtgagaaaattgaggccaagttaggtgggtagtttaatataagactctgcctcaggagaggtatgcaggattaaaaataaatttagaggcccagcgtggtggctcacacctgtaatcccagctctttgagaggccgaggcgggcggatcacaaggttaagagatcaagaccatcctgtccaacatggtgaaactccatctctactaaaaataaaaaaaattagctgggcaaggtggcacatacctgtagtcccagctactcaggaggctgaggcaggaggatcacttgaattcgggaggcagaggttgcagtgagccratatcatgccactgcactccaccctggtggcagagcgagactccgtctaaaaaaaaaaaaaaaaagaaaaaagaaaaaaaccaaaaatgaaaacaaaaaataaaaataaaaaaataaatttagaaactcacagctcacagcccacacagatacca

SEQ ID NO: 892172 - DNA, 695 bp, Homo sapiens
gtatccctcgatgccctgcaaatcttcaagcatattcattaattcctatattaatttattcattcatgaactacttattgaatacggcagggactctttgtcctgttactactatattaccagcatataccacagtgcctgggatatggaaaacattcaaatctttgttagatgaatgatgtataaattgcctatttgtgtgtcaattgcctaaataagtaaaccataacatctgcagagggttttcagcttcctagtttgctctacgccaactcctggccgaagtatttacaataacctgccttatttattgctcccacattagaaaccttttaagtgcaaggcacttggctcctatctgcagactaattctgactctgcgtttgggaygggtgatgttctggaaggcaacacttgagaagcttttactctgctgttttgggtaatcagaaagcatcactcattcctgggcatgctctgactgtagacttctgtgcctgtgctaggcgcttgcatttcccttgtttagggcatgctcccactttttagtccagatcattaatgctatggtagatccttctactccaaaagggcagtgtggtgcaatgtcacagtcatgggctttgaactgccttgcacctgggttcaaattttagtactaccttttattagcttgagccctttctccctcatct

SEQ ID NO: 892173 - DNA, 621 bp, Homo sapiens
ttattaacacatttaataatgcatgcaaccattacagtttacaaagtagtaagtattattaatttcatttgtaaatcctaattatattaccaaataaattagtgagttttaatagcataattatgtgaataaaaatccattatatgccccaaatcagtacaaaaatgaacattcttattaacgttaataaaattccaaagaaattcataattwtaaattaatctgatagtttttagactatatctaacttcaaatggaaaaaatatgtaaaaaaacaaaacaaaaacgaaacagcatgatttgttgtctcacgtaataatatcctagaatcaaaactctacgaagattgatttaccctttatcttttatgtgtacaaaactttcaaatctggatagctgtcacgactgtgattaggattgaacattggctcttttcacagaacattgggcagattagaaagtaaaatagaaatttctgacagccatgacttgaatgtagccatcctgttcattttttttccattatttactcttgttatatttcttaattgatgttaaaaacaaatacaaatttgtaattttctttacagggtggttaacatattatattttttgcaataa

SEQ ID NO: 892174 - DNA, 600 bp, Homo sapiens
tgcctgcaatcctaagtattcaggaggctgaagtgggaggatccttgagctcaggaggacgatgctgcagtgagctgagattgcaccactgcgctccagcctgggtgatgtagctagcgagactctgtctcaaaatagaaataaataaataaaataaagaacgtggacaaaagggaactcttgcatactgttgatggaaatgtaaattagtgaaactattaaaggaaataatattgaggttctttaaacattgaaaatagaactaccatatgctccacagatcttactactgggtatgcagttgacccttgaataacatggatttcatctgcatggatccacttacaagctgatttccttctgccctgccaactctgacacgctgaaaccaaycccttctcctcttcttcctcagcctattcaacctgaagatgatgaagacttttatgaggatggcttccacttaataaagagtaaatatattttatctttcttataattttcttaataacattttcttatataaagagtattataaaaatatagtgtattttatatatataaaaatatatatctgttattcaactgtttatgttattg

SEQ ID NO: 892175 - DNA, 645 bp, Homo sapiens
aggctggagtgcaatggctcaatctcagctcaatgcaacctctgcctcccgggttcaagcaattctcctgcctcagcctcccaagtagctgggattacaggcatgtgccaccacacctggctatgtttttgtatttttagtagagatggggtttcaccatgttggtcaggctggtctggaactcctgacctcaagtgatccacctgccttggcctcccaaagtgctgggattacaggcatgagccaccacgcccagctgcaaattctatyttacaacccattattttaacctgataacaacctaccactgtttgcataaacaaacaaacaagcaaaaagaaaactagtaaaaactctatgccttaacttcatcaccccagtttttaacgttttgttgtttccatttatatcttattgtactttctatgtcttgaaaagttgtcgtagttattatttttgattggttcatcatttagtctttctacttgagtagtttacacatcacagttacagtgttatagtaattctgtttttctctgtatttgctattaccagtgagttttgtaccttctttttgctcattaacagccttttcttttggattgaagaactccctttagcatttcttgtagggaaggtctggtg

SEQ ID NO: 892176 - DNA, 638 bp, Homo sapiens
cctccttgtttattcctttgcagaatcccctcccctgtgcatgtgtaagacctaatgaacagaatatataaaagtgatgggatgtcacttctaagactaagttgtaaaaatactttgacctctgtcttgctcagtctctattggtctctctttctcaaaacacttgctctggagaaaccaaactgacatgttataaatagccttcacataggtctatgagacccacatggcaaggaactggtatttctagtcagccacagccaggaattgagcctgtcaacaaccatgttgatcaggttggaagcagttctgcccacctttccacccatatgcatgactacagtactggccaattacttgattccagtcttgtgagagactytgagtcagaggcacacagctaagccacagctggattcctgattcatagaaactctgagataaaaatgttattttaagccagtaaatgttgggattatttgctatgcagtaatagatagcagggaatagaaaaccacataacattatctagtgtatttttaaatacatgaatacaaactttaaaatgtaaaaatacaataatcaaaattaaaaaaatataataggtttaataacaaatgagacatagtttgaaaaaa

SEQ ID NO: 892177 - DNA, 638 bp, Homo sapiens
cctccttgtttattcctttgcagaatcccctcccctgtgcatgtgtaagacctaatgaacagaatatataaaagtgatgggatgtcacttctaagactaagttgtaaaaatactttgacctctgtcttgctcagtctctattggtctctctttctcaaaacacttgctctggagaaaccaaactgacatgttataaatagccttcacataggtctatgagacccacatggcaaggaactggtatttctagtcagccacagccaggaattgagcctgtcaacaaccatgttgatcaggttggaagcagttctgcccacctttccacccatatgcatgactacagtactggccaattacttgattccagtcttgtgagagactctgagtcagaggcacacagytaagccacagctggattcctgattcatagaaactctgagataaaaatgttattttaagccagtaaatgttgggattatttgctatgcagtaatagatagcagggaatagaaaaccacataacattatctagtgtatttttaaatacatgaatacaaactttaaaatgtaaaaatacaataatcaaaattaaaaaaatataataggtttaataacaaatgagacatagtttgaaaaaa

SEQ ID NO: 892178 - DNA, 573 bp, Homo sapiens; identical to SEQ ID NO: 892153

SEQ ID NO: 892179 - DNA, 557 bp, Homo sapiens
gcagaaataatgaagttctttgaaaccaatgagaacaaagagacaacgtaccagaatctctgggacacagctaaagcagtgtttaaagggaaatttatagcacaaaaatgccaacatcagaaagtgggaaaaatctaaaattgacaccctaacatcacaattaaaataactagagaaacaagagcaaacaaattcaaaagctagcagaagacaagaaataactaagatcagaatagaactgaaggagatagagacatgaaaaacccttcaaaaaaatcaatgaatccaggaggtgattttttgaaaagattaamaaaatagatagaccgctagccagactgatgaagaaaagagagaagaatcaaatagacactataaaaagtgataaaggggagtcaccactgatcccaccatcagagaatactgtaaacacctctacacaaataaactagaaaatctagaagaaatggataaattcctggacacatacaccctcccaagactaaaccagtaaggatttgaatccctgaatagaccaataacaagttctgaaattg

SEQ ID NO: 892180 - DNA, 618 bp, Homo sapiens
tggcaggcttcagacaatcaatccaatgcacccaattcctttgggtgatgcgacttgttgctgggccacaccatccaatcacgaccctcacacagaacacggctcccaagcctgcctcccacccacaaaaaaaaaaacaaccctaacgaaatgtgtccctaaggtgctcaggaagggtattctcattcttctgsgggtagccccagatgtcagtgtccagaggcctgtctctggcgcttccctttctgcagagataaaatttctgtccccctgcctgggcagtgggaggagtgtcttgattgctaggaattctgtgggaagcagtgagtgaagtaagggtcaatgctgtctctaacgactttcaatcactcccttcttgtccctgggtcacgctgggctgtatctgagtgcggtgcctctccagaattcctgggctgccctctcttctgcatccccatatcatgggtgtctatatgggctcactccagcctggaacatcagtgaccacttctttctcctttcggcccactggaagcccactgtcttttccaccaatggctaccctctcattctcattgttgagaaatgaaggactttttatgcctccactacccgtgt

SEQ ID NO: 892181 - DNA, 587 bp, Homo sapiens
tgatattgattcttcctatccatgagcatggaatgtttttccatttgcttgtgtcctctcttatttccttgagcagtggtttgtagttctcttgaagaagtccttcacatctcttgtaagttgtattcctaggtattttatttttttagtagcagttgtgaattggaattcattcatgacttggctttctgtctgttcttgatgtacaggaatgcttgtgatttttgcacattgattttgtatcctgagactttgatgaagttgcttatcagcttaaggagattttgggccgagatgatggggttttctaaatatacaatcatgtcatctgcaaacagagacaacttgacttcttctcctcctattcgaatacactttatttctttctcttgcctgattgccctggycagaacttccaatactatgttgaatatgagtggtgagagagggcatccctgtcttgtgccagttttcaaagggaatgcttccagtttttgcccagtcagtatgatattggctgttggtttgtcataaatggctcttattattttgagatacattccatcgataccaagtttattgagagt

SEQ ID NO: 892182 - DNA, 605 bp, Homo sapiens
tgaaaggctaagtgaaaacctctgaacctggtgctttgtgtattggaaagttttaaattactgtttcattttaatagatttagggatgtgcaagttatctacatataattttataaatttttgtagtttgtgtctttcaaagagtttgtccattttatccaagttatctaatttatgggcatagagttgtttatggtattattttcttaacattttaatatccatggactcagtagtgataaccccgctatgtgatttctgtctttttgttgttgttagattggatagagctttatattttcattgatttttttcaaataactaacatttagtttctttgattttcccattgttttcaattttgtttatttgattttattatttattttcttctgtttgctttaggcttacattgtttttcttagtttcctaaagkggggtttatattattggttttagttctttcttgttctctgatatatatatttaatactataactcttcctccaaacactactttcattgcaccccactcattttgttgatatattttcagtataatttatttcaaaatattctaaaatgtttcctgagacttttcattt

SEQ ID NO: 892183 - DNA, 634 bp, Homo sapiens
caataagcacaagttatattcttcatagtttttccactcattcagaattattttctgaaaacaagcaaaggacaatttaaaaattatgcaagagtcaattgtagagaaaccttaaaatgtactttaatagagaacccctaaaattgacttaggggttctctatcatgttgacagttttgttcttcctttaactttctttcagaaattctttgccccaaatctcaattttcctcagtccaccataccccttcccctaatgaaaaaccagactcctattatcagattctaggtgattctgagattccttgtccttcctatacccttagttgtgcaccctaaacctataaccgcaagtttactatcttacytgaattgggaataattgaaagagcataaagattcagctccaccaaaattagctttcaagacaaattaaaaaaaaacaaagaacacacaatcctaacactctaagacagcaactgttttcgttaaggctgattgtctttcacagagcacattttcacatcattgctctcagagtttatatatcagtttatgttctattattttcccttacaattatgtcatgattatttgcatacttttacagtcttgatgattagtattttaatgt

SEQ ID NO: 892184 - DNA, 613 bp, Homo sapiens
tatagtgcctcttccaatgatcaatggattgagaacctagagagtataaagtaattccagggattttaacaaaggctattgatacatgccttgccacttcaaggactgattcagtgtcaggagtgccacaatgaaaatgtggcatctgagtaaatgcctggaagagatgaggaaggaagttctgccaatgcctgggaggagaactccartaagaagaaatggcaagtgcaagggccctgacagcaaagcacgtctgagtgatagccaggaaacactgggtggttttgagtagagaagtgaaaatatatgatgtcggaggtcatcctcactcctctgttgagagtgttctgaaggaggcctggggcggaaacagggagatgggttaggagacaaaattattgtcataatcccagctagcgacgaccatggcttggaccagcagtgaaaatggggagaagtggttgtactctgaagatagaaccaagagtattgcctaaatgaataaatgtggaatccaggagaacttcaaagttttcagcctgagcaaatggcaggaatttgtcatttagtaacacaagtaaggttttagatgccatagattttgaggtaaagc

SEQ ID NO: 892185 - DNA, 613 bp, Homo sapiens
tatagtgcctcttccaatgatcaatggattgagaacctagagagtataaagtaattccagggattttaacaaaggctattgatacatgccttgccacttcaaggactgattcagtgtcaggagtgccacaatgaaaatgtggcatctgagtaaatgcctggaagagatgaggaaggaagttctgccaatgcctgggaggagaactccagtaagaagaaatggcaagtgcaagggccctgacagcaaagcacgtctgagtgatagccrggaaacactgggtggttttgagtagagaagtgaaaatatatgatgtcggaggtcatcctcactcctctgttgagagtgttctgaaggaggcctggggcggaaacagggagatgggttaggagacaaaattattgtcataatcccagctagcgacgaccatggcttggaccagcagtgaaaatggggagaagtggttgtactctgaagatagaaccaagagtattgcctaaatgaataaatgtggaatccaggagaacttcaaagttttcagcctgagcaaatggcaggaatttgtcatttagtaacacaagtaaggttttagatgccatagattttgaggtaaagc

SEQ ID NO: 892186 - DNA, 681 bp, Homo sapiens
gttatatcctaagtgtcataaaaatgtcctggaaataatttgatatgaactttgaggccatcggatgttgggaacaggcccccaaaatctggccataaactggccccaaaactggccttaagcaaaatttctgcagcactgtgacatgctcatgacagccttgactgtcccacgctggaaggttgtgggtttactggaatgagggcaaggaacacctggcccacccagggcagaaaaccgcttaaggcattcttamatcacaaacaatagcatgagggatctgtgccttaaggacatgttcatgctgcagataactagtcagagcccaaccctttatttcggcccatccctttatttcctctaaggaatacttttagtaaatcttatgactggcttgctgtcaataaatatgtgggtaaatctctgtttgaggctctctgctctgaaggtggtaagacccctggtttcccactccacaccctatatttctgtgtgtgtgtctttaattgctctagcgccgctgggttagggtctctgccaccgagctggtctcggcaattggagaatattttgagtatgaaaatcaacaagttctagaaattaaagagcttctcagagaactaaagtaccagcaaatgagactggttaaggtagctttagcatttctctcagcatgactaa

SEQ ID NO: 892187 - DNA, 654 bp, Homo sapiens
gagcttaaatatgaaggatgagaaataatttagtggatgttgtgatattccacccagtttctcccttcagagcccatgcacccatctcccacttgctgatggctggcagctgtgtccttcagtggaaattgccctcagcctctgggaactatgttgctcaaggtaacagctcctcctgcttgcagggggcaccctgtggccaacagtgaacaacaatgaaagtgaaaatgctaaggccccacctcatacctatttgaggcaacgttgaaggatcttcccatttccagatcttctcttaagtttttctgaaatctcagtggcaactgcattgtaggtcagaattttcctctgcccaatacctctgcttttacttcctggcagctgtacctcctgagatcacttctcaatatatttcagcacatgattctccgcctcacaggtgaagkcaggtaatggtatcagtcctaggaagcagaatctaaaatggaatttgggagatggatcacttgccagctatatggcactaggaccctatcagtggtggtgggtggtgtttgaattgctcctggcatgttgcactgatgcgactgttaaaattttcacctgtagtgaactgtgaccagatacctgtggaaggagatacattgacagatg

SEQ ID NO: 892188 - DNA, 654 bp, Homo sapiens
gagcttaaatatgaaggatgagaaataatttagtggatgttgtgatattccacccagtttctcccttcagagcccatgcacccatctcccacttgctgatggctggcagctgtgtccttcagtggaaattgccctcagcctctgggaactatgttgctcaaggtaacagctcctcctgcttgcagggggcaccctgtggccaacagtgaacaacaatgaaagtgaaaatgctaaggccccacctcatacctatttgaggcaacgttgaaggatcttcccatttccagatcttctcttaagtttttctgaaatctcagtggcaactgcattgtaggtcagaattttcctctgcccaatacctctgcttttacttcctggcagctgtacctcctgagatcacttctcaatatatttcagcacatgattctccgcctcacaggtgaaggcaggyaatggtatcagtcctaggaagcagaatctaaaatggaatttgggagatggatcacttgccagctatatggcactaggaccctatcagtggtggtgggtggtgtttgaattgctcctggcatgttgcactgatgcgactgttaaaattttcacctgtagtgaactgtgaccagatacctgtggaaggagatacattgacagatg

SEQ ID NO: 892189 - DNA, 567 bp, Homo sapiens
aggcatagaaaccttgttaaactaagaaacaacaaagctacaaccaacaataatagacacagtcaatcagacacctgatgttttctggacagagccaagttatttccttgtgttgtgaactcattgttgattcattgtagatatcagaagaaacaaggcaaacataagccagaggtcagagaaggagttgttatcggactggcaaaaataaaataaaataaaataaaataaaataaaataaaataaaataaaataaaataaaattactttgcttactgatcaaggaaactttgggtataggcatgatttgcagagatatgataaatttatgcaaggtgagggtgagtttaaatggatgaatttaagtggttagatacaatatggaccctcrtgtaaaattcctcatagaagaatttcagaatgtgggtaatttactccagttcttttggctcccagctgcattctcaccattctgggttctcctttgcatatcagggagctacagcagtgttggcagtggtttttaaagagcagaagtaggagtgcaaattccagccccttagctga

SEQ ID NO: 892190 - DNA, 614 bp, Homo sapiens
taactgccggaatgttctgagacaaatgcttcataattagaaaggccatttgctgtttactatgcatctggagcatgccaatgtctccactgcacaaattgcctcacagttagtttggaggatatattttaacctttcttaactggaaaagttatcctttcaatgacatatagaggatgggtcataaaattggacactgcagataagaatcattattatatacttaatagtaagaaaaattaccatcaatgttgtcaccatattcatacattggaagggagtgggctgccctgtaattaatgaaggagatagaaataaaatagctgtttctctaacttctgtttgacgtcataccttgtagaaagtaacctgtaaaggccaatggtgacttccaataattgttggaaaccaattcaccaacataatgattytaaaatgtaaactgactttcaaatgttaaggatactagaaggaccaagtggataatgattttagtacaaatatgttcataataatgatcattatttagggtatctttattgaacatttactacgcataatgaaactttgttatgtttgcttaacatatgttaatcctatgaaatagtcctatc

SEQ ID NO: 892191 - DNA, 634 bp, Homo sapiens
aaacgcatttaacgccctgataaacccattgtaaagtcaaaaaatcataagttgaacccttgtaagttgaggaccatctgtatttgctttttatatattctttaaaagtgcttaaagttaagcagtccttgtttaggatgagagaaaagtgtctgtataagattaaatattaatacttgatttaatagaattcttcatctctctattgctattgcattttttacaatacttaagacttgcatatagaacaaccttgccccttcagatttcgatacttttttttttaacatctaaggcaatactgaactaaatacaatgggtgttgggggctgaagtgagggggaacgtgatgatgaggagaaagaaaaaattaataagtactttgcccaatrttgcagacataactgatggtgaatgttcacatataactatttacttgatttgtttgtaaaagggaattacagggacttctaactccctctggatttctcaaggacaatagttattacagacatagaaacatacttgctacagcctacttttcctgcccctctccagtggacagaagtagtgctaattccagctgtgactacttaagagtgcttgtactagctcttgttttctaaaggggaat

SEQ ID NO: 892192 - DNA, 634 bp, Homo sapiens
aaacgcatttaacgccctgataaacccattgtaaagtcaaaaaatcataagttgaacccttgtaagttgaggaccatctgtatttgctttttatatattctttaaaagtgcttaaagttaagcagtccttgtttaggatgagagaaaagtgtctgtataagattaaatattaatacttgatttaatagaattcttcatctctctattgctattgcattttttacaatacttaagacttgcatatagaacaaccttgccccttcagatttcgatacttttttttttaacatctaaggcaatactgaactaaatacaatgggtgttgggggctgaagtgagggggaacgtgatgatgaggagaaagaaaaaattaataagtactttgcccaatattgcagacataactgatggtgaatgttcacatataactatttacttgatttgtttgtaaaagggaattacagggacttctaactccctctggwtttctcaaggacaatagttattacagacatagaaacatacttgctacagcctacttttcctgcccctctccagtggacagaagtagtgctaattccagctgtgactacttaagagtgcttgtactagctcttgttttctaaaggggaat

SEQ ID NO: 892193 - DNA, 532 bp, Homo sapiens
gcacatgtatattacttgttttttttttctgttgaagtatactcttggaataattattttcagtgaggtttttggttccaaaaagtataaacattttggtgatctttagttaagttgtattgctttccaaagaagtgatagaaattatacttgccaccccaacagtgaaagagtagtcatttaatttcagtgtaacaggggatgctactgttgctattatattttctattataatgaaaagatttcaaccaagctggattgtccttcmggagctgccgctaaatcaacaccttgatatctttgttctgggagaaaaacgagctaaggaggaagaccacctaaaaaacccattagacaatttgtgctcactggagtggtctctactgggcaaaaggcttttagaatgtcttgtggatcttctggcaagtggcaaaccatacaagtgctacatcaggcctggaagacaggtgcagccctgtcagggtcaaagaggaacaccagtggcagaagagctaagagtgaatgaaaattg

SEQ ID NO: 892194 - DNA, 532 bp, Homo sapiens
gcacatgtatattacttgttttttttttctgttgaagtatactcttggaataattattttcagtgaggtttttggttccaaaaagtataaacattttggtgatctttagttaagttgtattgctttccaaagaagtgatagaaattatacttgccaccccaacagtgaaagagtagtcatttaatttcagtgtaacaggggatgctactgttgctattatattttctattataatgaaaagatttcaaccaagctggattgtccttccggagctgccgctaaatcaacaccttgatatctttgttctgggagaaaaacgagctaaggaggaagaccacctaaaaaasccattagacaatttgtgctcactggagtggtctctactgggcaaaaggcttttagaatgtcttgtggatcttctggcaagtggcaaaccatacaagtgctacatcaggcctggaagacaggtgcagccctgtcagggtcaaagaggaacaccagtggcagaagagctaagagtgaatgaaaattg

SEQ ID NO: 892195 - DNA, 628 bp, Homo sapiens
gaatcagagcaaatcctggcgatgttctgcaggcagtggcccagttatacgaatgcctgttcaataagtttgcctggataaaggaagaaaggggcaagaaatgaatcaaattctacagtggggaccactacgtttctctgctttcaatgcctgctttattattcttttctttttctctctttctttatcagggtcaccctcaggaaaaagtcagacacactcccctgaaaccactgctggctggaggaaacaggtttagcatatgtcaatgagaaccacacatgctatggaatttcatgccaaagctatcaagcttccctttgacagcctcactgagaaaacaagtcaatagagattcattaattggaatttagaaaccttacktatttaaaaaaaaaaggctgaaaattattatacattacagaacaatgattctcacactccagggcacttaagaatcccctgaggtgttaagaaaaagagactttttaattgaaataagtttctgaatttataataaaattagcattttgagattaaagtcttaagaaatctaaatttataaactcataattttaataaattgaatattcactaaaacaccagcaactccaggtattttttcaag

SEQ ID NO: 892196 - DNA, 652 bp, Homo sapiens
agaaagtgaattgcagaaatatacagggatagtggatttaagttttgcataacattagtcatggaattcccctgtgatgtttctagaaaagatgtgatttggtttttaattttttttttgtgggggtaggcagaagttgatggaccttaaacaattttttttgtagttactgccaaggtgtaactataaggcacccagatttatatgcttacctaaagaaagcatcaggtatcaaatacagtactggtmgattccaaaatgataaatatttaaaagcaagaaggcatgtgtatttgcctgtgtgtgtcgtaggggatggtatacaagattgtgcagtgtgggttctagaaacattgtttctgtatcaggtgacattctatggctgacttcctaggattagattaagaagtatcaacaaattattttctgtatcttcagcagcactctactggtggaataaaagtcgggtctgaaagctggtggaataaatgctcaacagtgtaaaggggctggatctgcaagtagtctattggcagtgggtggcatggccaacaataatacaattaactttcaattgttcttgaagctgattgtctggttcctaggcatgtatattcctctgagaagatacctgtgagatctccttaggtca

SEQ ID NO: 892197 - DNA, 640 bp, Homo sapiens
gaagtgagaattttgtagttgaaaaagaatcagaaagagaagcttttgataaataaaccagagtactgagctaaaccttgtacaacacaagctagatttcaaagtagatggtgagaatgagcctagagtttgaaaattctgccagaaagttttgttttatgtttttgtggagttttttaaagaaacattttgcttttttgttttggacttgaagattgtgctcaatacagtttttcttcctttaagtgacacctattaaaagagaaaagtaaattgttcaaatagaagaattaataagacaaataaatgcccttttctgaagaatytaaattttcttacttgggatctgattatgaaattccaattataaataaactcccaaccccttacccaaaaaaggaatgtctccaagtttagactgaggtaggataaatactcaacattctattccaaataccaagaacaaggtaggtattttccctgctgcttccttaccctgaaatttgacgttcattttaatgatgcttactttattacttgtcagaaaagtgaaatggcctgtcaattttatggagtttctcctacctttcaaatgattatattacattttgaaataagtgtatagctcccacctcctttt

SEQ ID NO: 892198 - DNA, 596 bp, Homo sapiens
tagataatcctttatttataaagaaaatgttaccagaagtttatgtataagaaatatagtgtctcaagaacaatacattctcagcccaaatacatatttcaggccttgctataatgtcttcaggagaaaacatccttgtagaaatcactggcctctgctgggaatacacattttcattagaatttaattgcattttccccgaaacaggtggagccattttgtccagatgattagaagtggtggtgaaaccactccagagccctgcagctacccyctgtggtcctatctcagcatcttgtgcctgctgcagctgtcacttggaatagctggttttccctactgtgcatattatgcctgaactaattaacatgctaccagcttgttaaaactttgttttaataactagatatgtgggtttcccttttggtctgagactactcatcatcagagtcctgtggatttaccttcaacacatccctcccgttgcttctttctcacttggttcctctgctgccttaggctaggccttccctggtgttccagattgaaaaccagtatctctgtaatcagattctccctctgaaattcgtactgtg

SEQ ID NO: 892199 - DNA, 680 bp, Homo sapiens
atttcctaccgaacagcaacacaaggccctccctattcctcccacctttacttccactaacagtagaacttagctacacttctgtccactgtctttttgtgggatagcctcacaggtgatttgctgaatgaaggattgcccacagagcatggttcatattgaaaaaaacaccaattaactcagcattaccaaagcttcagtttgtcctcctttctctattttgttcccaaagattaaagaagacttagaaataccagccctacctccagagagatatttcaatgagccacttagatacaaatacagtttcttttctaaaaattacttctacttatgataatttccagaacaatctttgtcatttccgtgtatctatttscatgtggtttttctccagaagacaggacataaaattacctctctataaattacagtttttgggaaatgcaggtaactttcttggtagtagctgcagtagatgtttatactgatgatggccagtgaatcacttttgagtatccacaaccttgtgtaatcccctccaccatagactctggtcttggctgggtggctaatttgacatccgcaaatgtgatacttcgaacattaccattaccttatgaagaaactgtctagtacccaaggatcaaagatcacacaaagagaaagtcctgacatta

SEQ ID NO: 892200 - DNA, 678 bp, Homo sapiens
gattataggattgaacttgatgctcagaaattaaggacatactgtgagatagataggcctactttcaaagtggggtggccccctgaaggtacaatagacaggaaattaattggctatgtgtttaaggtggtcactggagttggaggacaaccaggatacccaggccagtttccctatgtagactcttggcttaatgtgccacaaactcaccccaagtggctacagccctgcctatgatattgcaaggcattagtggcttggggcagcccaaccaaaggaagcagaggaacctaaagtccctagcatctcccaggaaaaggaatccccaaagcctcagctgaaaccagttcttcaggccccacctgaggaaatgggatrtctgccccccatatgtgccagtctacctgtttttggcaagaatacacaggaggcagagttgggagcatctgaagagtcgggctcggaggaaagtgaggctcagtctccccaccaagtggaacagaagcccccattagaaaaaaacaaagaagatggaaagggtgatgcagctaggcacctctgctctggccaaccatgggctttgcagatgccactttgagagaccaggacacaagtttttgatgaccaggggcagatagaaggtggtcctaggcattatgttcatcagcctttctccac

SEQ ID NO: 892201 - DNA, 597 bp, Homo sapiens
gtaatatctaaaaataattgggccctatcttggcccttaaaactaacttctacatccctagtgagaataggagcagctcaaagtgttcaacagagttctatcctgtctcggaccagatggacagctatatacttttcaaccttatgttacgaatatagctgttaatctatggggtcgagatttacttacagcatgggatatgagacttacaaatgaaactattgataatccaggatttaaatgttaaagaaaatgggatatcagaatggaaaagccttaggaaaatccctacagggaaaccctgatctaatatcaataactggacacacagatagaaaagggttaggacatcaggacttctgawggggaggtcattgatatttctcctccacctactgctttgccgctagagtggctgactgacaaacctgtatgggtggatcagtggcccctatcacaggggaaactgattcaactccatcaattagtaaaagggcaattggaagcaggacatatagaagagtcggttggcccatggaattcaccagtatttgtgattcctaggaagtcaagaaaatggtgattgctgcatgattt

SEQ ID NO: 892202 - DNA, 578 bp, Homo sapiens
gctgaggagaaaatataaagacattattgggatatggcttccactactttttttcccccctgagcattagatttcagattactgtcaaaagacaaaaaattacaactttaaagatcttagttggcttttattcatgattcaagaattgggcagccytcagaactacagcaggttcaaaaaactccagccagcaaagtgattagacagtatttactgacagaaaatggaagtgagatatagagacagcttaattggttacagctcggcatcttgccttatttgaatcagctggctgcctgcaattgactgactgaagctcagctgctgtaaccaactaaagcccagctgtttacccaagtgcactcctaagttaattagtttcatttagcatgagtgactccatattggtttggtctgttgggcccagtgcagcagcctagtccaaatcaataggcgcctacaaattttattatttaacattttaaatgaaatggaataatatttaaataaaatgttcccactacttatttttctcttctggatgttagattttggattacaaacccatctcagggaag

SEQ ID NO: 892203 - DNA, 578 bp, Homo sapiens
gctgaggagaaaatataaagacattattgggatatggcttccactactttttttcccccctgagcattagatttcagattactgtcaaaagacaaaaaattacaactttaaagatcttagttggcttttattcatgattcaagaattgggcagccctcagaactacagcaggttcaaaaaactccagccagcaaagtgattagacagtatttactgacagaaaatggaagtgagatatagagacagcttaattggttacagctcggcatcttgcyttatttgaatcagctggctgcctgcaattgactgactgaagctcagctgctgtaaccaactaaagcccagctgtttacccaagtgcactcctaagttaattagtttcatttagcatgagtgactccatattggtttggtctgttgggcccagtgcagcagcctagtccaaatcaataggcgcctacaaattttattatttaacattttaaatgaaatggaataatatttaaataaaatgttcccactacttatttttctcttctggatgttagattttggattacaaacccatctcagggaag

SEQ ID NO: 892204 - DNA, 578 bp, Homo sapiens
gctgaggagaaaatataaagacattattgggatatggcttccactactttttttcccccctgagcattagatttcagattactgtcaaaagacaaaaaattacaactttaaagatcttagttggcttttattcatgattcaagaattgggcagccctcagaactacagcaggttcaaaaaactccagccagcaaagtgattagacagtatttactgacagaaaatggaagtgagatatagagacagcttaattggttacagctcggcatcttgccttatttgaatcagctggctgcctgcaattgactgactgaagctcagctgctgtaaccaactaaagcccagctgtttacccaagtgcactcctaagttaattagtttcatttagcatgagtgactccatattggtttggtctgttgggcccagtgcagcagcytagtccaaatcaataggcgcctacaaattttattatttaacattttaaatgaaatggaataatatttaaataaaatgttcccactacttatttttctcttctggatgttagattttggattacaaacccatctcagggaag

SEQ ID NO: 892205 - DNA, 610 bp, Homo sapiens
catgcaatttaaaatgtaaattttaaaatttaaaaagtaaaaagcaagtgaaattaaatgatttagttttattttatccaaaatagcaaaaatatatttcaaaatgtaatcattataaaacttactgagatattttacatttttttaatttactaaacaaacactcgagatgcggtgtgtatattatagcacctctcaatgtgttctagtcacatttcggttgtttaacagccacatgtgagtggctgccatactggactgtacaggtgtagacattaagaatcagactttttccaatttcaacacttgtcattttctattcctatgaactattatcataggattgtgaactattatacaatattcwttatttaatgccgatctatcatttcccttattatatttccaaagaagctccaagagggttgtatttcagctatgaccaaacacttcatcaatccacattcctccactggtagggtagtcagggacttgcagtgagtagaagggctttttacgtgaccctacatgatgaggaagcattagagtaaccaaaggctagttgcccaggaatgctctggttttgctgcctaattcaaagaggtgactg

SEQ ID NO: 892206 - DNA, 715 bp, Homo sapiens
aattccaaaatttcaaaaatacatgttttcatattttgccacctattcacattgactaggacatctttataggtctaaatggctgttagttactatctatttcctctccttcatcctgaattattcacttcagcatttcttgtagagaaaaaaataatgaatcagggattggaggtccctatacmattttcttacattcccaagtgttcctaaaaaccaagtgttgagctttgagaaattacaagtttttttggttcctttccttttttttttttttttaactaggagttctgtggaaatagagggctaagtaatgaactggctggaataagcctgtagcagatctagtatttacaaatgactgccctaatgattatctcacatctggaaaaacatgttatgcttgctaaagaaattcgacatttaaaattttttcttaggagttacacacttgacctgtaagttttgagaaaatgtcactgttttcttggtaattacctcaatcaactttatgagatgtgaaataattattagttaaaataagaaagtgcaggtggaacaggatggcactggtttacatggtttgcttgagacatgctaagggtgaatgttcattagacactaatacggagatgtagagcacacattattatgttctgtcctggagtttggaagggaaaagctcagctacaaatatttttagagtgtttctcaa

SEQ ID NO: 892207 - DNA, 664 bp, Homo sapiens
cattctctctttcctgcatcatcagttttttttctctctgctaagttctccctaagagcacacaggcatgctgtttttactgtcatcacaaaaataaccctcattttactccgttttcttcttcggtggttgctcaatcgtctggtcccctttacaggccattatttgaacatgttctacactctgtatctaattactctcatcctacactttattgaatgcacactattctgactcttgcctccatcatgctatcaaaacattcttgactttgtaaaggtcaatagtcaatsccaatggtcaatgttgagactccatcttacttgtcctattaatagcatttgactcttttcttaaaacaatttcttcatctgacttctaggacagaacagtctcactttgtcttgtaatttcatcaccactcatcagtcttctttcctcatacatgccattccattaccatgtaggggcctgggaaatgtgaaatttgaaattggaaaattgcccaacacagtataacaatgctggcatgtgatcacttccctggggtcctgagactgggctgacccaaccagatgacaccaatatagctgataccaacacagaagtgctgaaaggtggagcctctccttctatctccatgaagaagcagcattaccacctc

SEQ ID NO: 892208 - DNA, 664 bp, Homo sapiens
cattctctctttcctgcatcatcagttttttttctctctgctaagttctccctaagagcacacaggcatgctgtttttactgtcatcacaaaaataaccctcattttactccgttttcttcttcggtggttgctcaatcgtctggtcccctttacaggccattatttgaacatgttctacactctgtatctaattactctcatcctacactttattgaatgcacactattctgactcttgcctccatcatgctatcaaaacattcttgactttgtaaaggtcaatagtcaatgccaatggtcaatgttgagactccatcttacttgtcctattaatwgcatttgactcttttcttaaaacaatttcttcatctgacttctaggacagaacagtctcactttgtcttgtaatttcatcaccactcatcagtcttctttcctcatacatgccattccattaccatgtaggggcctgggaaatgtgaaatttgaaattggaaaattgcccaacacagtataacaatgctggcatgtgatcacttccctggggtcctgagactgggctgacccaaccagatgacaccaatatagctgataccaacacagaagtgctgaaaggtggagcctctccttctatctccatgaagaagcagcattaccacctc

SEQ ID NO: 892209 - DNA, 652 bp, Homo sapiens
tttacaatttgttctttttaattgggtgacattaaagagtaccttctaagcagttaaatgtgccaggagtcatattgacacagggccacagacatgagtaagacaatgcattcacagtctcataaggcagatcacagacttatacttagcctctgggtacagaaaagttacttcccacatttttctcattgaaaatgtttcctctcagaatcttggtgtggttttacataaaggaggattcttcagatcttttttggagactgagtctttactctggcaaccaaaattgtatttcccctgcttctaaactttcctctaaactcctctctatttagccttctstctccttagtcctgagatcctgcagtagttgagcaactggaacgtcacgtttataaataaaccaaagtcaagggatgttgggctctccagaggtggacttcaggtggacaaagatgacactggagtaagagtcatgccttgaggatccagagaaactccaaaggatcttatcttggtaaaggctattgacacctcagtcactagcatttgagggtctattaatctcataattcattcacaattcagcatggtgagattatatagctgaggaaatgggagttgtggtaggtaaagagggccaagaaagaca

SEQ ID NO: 892210 - DNA, 554 bp, Homo sapiens
tattgtctcagaaggaaaaaaaataacttctttgggagataacaagtttgtataccacattagggatgtgggttacagagtatgtccatttgccaaaattgtacagcattacagcctaggcaaatcttacctaaagaccactttaaaatttattttaggagtgsggttgggagtaagtagtcacatagatgaaacaggaaggaaagaatgttggtgacgtttaagctcagtagtgatacatgggaacaaactacaccgttgcttttcgcttttaatctttgagcttttttataatacaatttttaaaacttcgctttaatagtttttcagcatcagcagaattcccgccataggttaactctttgacattcttattaccactgtgggtctctttgggatcccagggcactgtaggcaactagaacaatgtccttggacttgcagaactccaggagtttgctctggttgaggtaagggtgacattccacctgtaatttttcaagaccaaaaggtgtcacaatatatgagccaataaccacatgcaaatttaaaat

SEQ ID NO: 892211 - DNA, 596 bp, Homo sapiens
ttcttttcattgaaggagaatacacaactatgcaaagcttacaatttacatcccacaggaggacctctcagcttacctccagatcctagcctccctataactccccttcctattaatgataatcctcctctaacctcccccgcccagaaggaaataagcaaagaaatctccaaaggaccacaaaamcccccgggctattggttatgtccccttcaagctgtaggggaggggaatttggcccaacccgggtacatgtccccttctccctctctgatttaaagcagatcaaggcagacctggggaagttttcagatgatcctgataggtacatagatgtcctacagggtctagggcaaacctttgagctcacttggagagatgtcatgctactgttagatcaaaccctggcctttaatgaaaagaatgcagctttagctacagcccgagagtttggagatatgtggtatcttagtcagtaaatgatagcatgacagccgaagaaagggacaaattccctaccagtcagcaagccatccccagtatggatccccactgggaccttgactcagatcatggggactggagtcgtaaacatc

SEQ ID NO: 892212 - DNA, 570 bp, Homo sapiens
atggtgactcctagcaatcttaattgtaatgtaaaacctgctaagttgtgttctgataagattagaatgtttccagcatagttaggggcatggccaactccccatggagagggggtggcagggactcagggggatcttcaggcaggcagaggggagaagaggcaagagcacagggaatgctgrgagcctcccaagaaggcctctttcatctcagaagcccccagggccatcccgagtgggctgtcctcaggccttacctagctggaaagcaggcaagttaaacaaatttcaaacaccaaagaagcagtttatgaccttaaagcatttagcaaacctaatatttgaacataacttagaccacatgtttacattttcaagacaactgtattttaccaataatctttaaaactgtttatttcctaaagattactcaagtcacatgaactaaataaaaagcattacatttttcacttttctgacaaaatatttgatttaagctcttatattattattaaaccaatttaaaactttacagaagggacaaatggtgacttttacctttcatttaac

SEQ ID NO: 892213 - DNA, 570 bp, Homo sapiens
atggtgactcctagcaatcttaattgtaatgtaaaacctgctaagttgtgttctgataagattagaatgtttccagcatagttaggggcatggccaactccccatggagagggggtggcagggactcagggggatcttcaggcaggcagaggggagaagaggcaagagcacagggaatgctgggagcctcccaagaaggcctctttcatcycagaagcccccagggccatcccgagtgggctgtcctcaggccttacctagctggaaagcaggcaagttaaacaaatttcaaacaccaaagaagcagtttatgaccttaaagcatttagcaaacctaatatttgaacataacttagaccacatgtttacattttcaagacaactgtattttaccaataatctttaaaactgtttatttcctaaagattactcaagtcacatgaactaaataaaaagcattacatttttcacttttctgacaaaatatttgatttaagctcttatattattattaaaccaatttaaaactttacagaagggacaaatggtgacttttacctttcatttaac

SEQ ID NO: 892214 - DNA, 480 bp, Homo sapiens
agcagctgtaactgattgaaatgtattttatgaacaataagacttgaaagttaaaattgctcctttatccatgtactgaagaataaatattgtgaaagcagtcataaaaacagaagtaatcttttggtacctctgcattagaactctttattaaccaggtgtattgccattcaacagtaatattttgaaaggaatctctatttttgagcaggtttcaacttctgctttttattttaaacagtagacttgaaatattcagtaaccatgctataaagagctatgctgtaagacagctttttctatttatagagcatggttttgaaattataacaaagcatkggttttatcctgaaatcaccaggaataggagctactaacacaagagtcagcctgtcttttgaatccaggcattgacttccttttaaatatgaaagtcctagatggcaccttttttggtacaaggccctttcatctacattc

SEQ ID NO: 892215 - DNA, 556 bp, Homo sapiens
gtaacaagtgaattctggctttattacttttttcatagctgcttgttaaaaagagcctggcaccttactttcctctcttgctttcctctctcactctgtgaactcggaacatgctggttctcctttcctttctgccatgagtggaagcagcctgaagacctcaccaaaggcctaagagatgccaatgctatgcttcttgtacagccaccagactgtgagccaacaaacctcttctttataaatwctcagcttcaggtattcctttatagcaacacaatggactaagacagtttctaatttctctacacacctagaaccagcatgtcctgagtgggtgatcttaatacctgataatcacagacataccatttgtgacaaagttttccaaattggagacaatctggagggtatcaatcctaccccaggtcctggcttgcttcagaaatcctcgattgagggtggatatgtttcttcccatatctccatgaaccagtatctcctatagttgaagaccaccctggagccaaatgtacaaataggtcttgttatctgaggg

SEQ ID NO: 892216 - DNA, 593 bp, Homo sapiens
accctgcctcatgcatcatcagccaaactgtcagtaaagtgctaattgcagaaactttattacttgaggtgatactgaaccagagagaacacagcttgatttttcataatctaaactttgcaatgtgagcaattagaaaaaaaaaaaaactttcctttttgtttcaatttctaagctaagcaaaattaaaatggatgtcattgacagtaaaatagaaacttaaaaatgttgtccttctaggtgactttataacttagtataaaatcccattaacccctttttataaaaatgcataatttgaagcctaacagcacttgcaattctatgacacatttggctacctgtaattggagaaagacagaactttattttctgcttctgtcatttttgtattttytgtagaggaaatatacttcaaagatatgctttatatatactctctaaatttatatatttcctatgggatctgaaatatttaaagcacctttaaacactatttcagaaaatgggtttgcaggtagcacaagaaatttcctctagaaatataaaaatagatgaggatggtttaatggaaaatttattggaatagatgc

SEQ ID NO: 892217 - DNA, 594 bp, Homo sapiens
aagctgccaaggcttggggcttgcaccctctaaagccatggtctgagctttacattggcccctttcaaccatggttggagtagctaggatgcagggcaccaagtccctaggctgcacacagcacggggaccctgggcccagcccatgaaaccactttttcctcttaggcctctgggcctgtgatgggagggactgtcgtgaagacctctgacatgccctggagacattttccycattgtcttggggattaacatttggctctttgttacttatgcaaatttccacagctggcttgaatttctcctcagaagatgagattttcttttctattgcattgtcaggctacaaattttctgaacttttatgctctgcttcccttataaaactgaatgcatttaacagaacccaagtcacctcttgaatgctttgctgcttagaaatttcttccgccagataccctaaatcatctctctcaagttcaaagttccacaaatctttagggcaggcacaaaatgtcaccaggctctttgctaaaacataacaagagtcacctttactccagttcccaacaagtccctcacctccatctgagac

SEQ ID NO: 892218 - DNA, 587 bp, Homo sapiens
taggcatttgctaattgtttcctttatttaatttagcatttggaaatatataaatttatctacagaaataggattatggaggcatctaaaactcctctgttgtacttctatgccattcaacaaatacctgctctctgaaagccttcaaattgatgtctgcccttaagggagatgaatgggagaagataactagcagtgagcaaacactatatctgatcgtttacagatattaaataatttaatcgctakaaaaagaaagcaaagcatagataacatatataattatcccacttttagagatgcagttcagagaatttaagtgataaaattatctagtaataaacagcattgtcagtaatgttagtaataaaatctgaaaatactaccacttatcaaccacacaccacgcagaaggacctgggctaagcactagatgtatattttatcctctcagcatccctgggtgttggctactgttatttaaattgcataggtgagaatatgaatggttcctaagaactgtgcttctcaaaattttatctacatacaaataaactactgatcttgttaaaatgcagcttcagatt

SEQ ID NO: 892219 - DNA, 582 bp, Homo sapiens
ttttcttttctataattcaggactgcattgtacatttatgtaatttttttcataaaatcaaaatttgtttatatcttctctctcttaaatgtttaagattttctgtccccaaatgagtgcatttagtaggctgttgcacatactatcagaaattccatgaattcatacctaaatttatttacttatttaaacaatttatgtttttccttttttaaaaaaaacacattttctttagcrttgactcatttttgtgtaatttttggttaaattaggttacatgttttgtttgcttttacatttttaataatgaaagtacttaacaccatgattgtttttgctgagtgtgtataattgcttagttggttgttttaatagaattgttactatgtttttatttattttctccttcactcaattgttatttggtaaagagattaaaaatataaaagaggggattactatttaaatttttatctcaaagtttatgttacagtaatctgacattgtgatctgtaagcatagagactgcatttatacatctctacagctaaatttactgattttagaatgaggaagaatttt

SEQ ID NO: 892220 - DNA, 582 bp, Homo sapiens
ttttcttttctataattcaggactgcattgtacatttatgtaatttttttcataaaatcaaaatttgtttatatcttctctctcttaaatgtttaagattttctgtccccaaatgagtgcatttagtaggctgttgcacatactatcagaaattccatgaattcatacctaaatttatttacttatttaaacaatttatgtttttccttttttaaaaaaaacacattttctttagcattgactcatttttgtgtaatttttggttaaattaggttacatgttttgtttgcttttacatttttaataatgaaagtacttaacaccatgattgtttttgstgagtgtgtataattgcttagttggttgttttaatagaattgttactatgtttttatttattttctccttcactcaattgttatttggtaaagagattaaaaatataaaagaggggattactatttaaatttttatctcaaagtttatgttacagtaatctgacattgtgatctgtaagcatagagactgcatttatacatctctacagctaaatttactgattttagaatgaggaagaatttt

SEQ ID NO: 892221 - DNA, 656 bp, Homo sapiens
attctcacatgtgcttattttgaaattaaaccaatgcaaaagtttttaccctgaggtgttgctaattcatgaacctattctcttgacagtttttccctccaatataacctatatcttattaaatgtcttttcttcttctagattgtttccaatagtagctcaattttagctttgttcargctccaaattagaaaaacgctgagattagccaaatatttgaacactgtaaggtattaatcagtttaatctgaaaaaaaaggtataagaacacttcctacagttccagaagagtgagctgtcctggctgagggttatttcataagcacctacatgtatggacactaatggtgagtcatcaccagaggaagatgaaaaatctggactctgtatttgtgttgatgccacatttcagggcaaaagttttgcatccagaccatgcactctagcatcctaagtccatggctgctgtggcagtggctcttttcacaccaaaaatggagggagaaaaccagctaacttctgggctctctgactgcagtcaggccaaggaccagggaacctgcatctgttcactagggtgaggatttaaagcatcttctgggttttcagatcctaccaagaaaagcttcagaggcagaccttgagtctctgtgaac

SEQ ID NO: 892222 - DNA, 656 bp, Homo sapiens
attctcacatgtgcttattttgaaattaaaccaatgcaaaagtttttaccctgaggtgttgctaattcatgaacctattctcttgacagtttttccctccaatataacctatatcttattaaatgtcttttcttcttctagattgtttccaatagtagctcaattttagctttgttcaggctccaaattagaaaaacgctgagattagccaaatatttgaacactgtaaggtattaatcagtttaatctgaaaaaaaaggtataagaacacttcctacagttccagaagagtgagctgtcctggctgagggttatttcataagcacctacatgtatggacactaatggtgagtcatcaccagaggaagatgaaaaatctggactctgtatttgtgttgatgccacatttcarggcaaaagttttgcatccagaccatgcactctagcatcctaagtccatggctgctgtggcagtggctcttttcacaccaaaaatggagggagaaaaccagctaacttctgggctctctgactgcagtcaggccaaggaccagggaacctgcatctgttcactagggtgaggatttaaagcatcttctgggttttcagatcctaccaagaaaagcttcagaggcagaccttgagtctctgtgaac

SEQ ID NO: 892223 - DNA, 635 bp, Homo sapiens
tcatgttctttaatatgtcctgtcattgagaagccacacagttcagatgagagttcagctaaatgtagaattgacatctcatcagtgaaagtgtaattaattgatcagcttggatatatacttaaagcataatactaaatataaatattcattgattttyataaccatatgctataatagtatgccaacatttttgtaatttccagcttagccatctcaatatttcttgatccactcatggaggaagatgtacaaacttcatcaggaatagcaaatttaataagctttcaatattgctgtatttcatttaaatttagttgcaatagacttttaaatattaataacattttctatgttaaaatcagtaaaatacctatgaataacaacaatttaagtattcaagtcataaattcagaattttatggtttttaaaattagtctggtttcgtgtatcatgttatttgctaatgaggttttataaaatggcaattttaccaacacaatttgcttccttaaaaataaagccaaggttcttacattcaagtatatcttattcaaattgtgaatatcaacaacatacatacatacatatatacataaatatatttgatgcctcatagtaataaagaaaatta

SEQ ID NO: 892224 - DNA, 680 bp, Homo sapiens
aattccctcagcatttgcttgtctgaaaatgaccttatttctcctttgcttatgaagcttagtttggcgggatatgaaattatgggttggaatttattttctttaagagtgttgaatattggcttccaatctcttctggcttatagggtttctgagatgttcactggtaatctgatgatgggcttccctgtgtaggtgacctgaccttctctctagctgcatttaacattttttctttcatttcaaccttggaaaatctgatgattatgtgtcttggggtcgaccttctcaaagagtatcttcytggggttctctgcatttcctttatttgaatattggcttctctagttaggttggggaaattctcatggatgatatcctgaaatatgttttccaagttggttctattctccccatctctttcagggacaccaatgagttgtgtcttccctctgtccactctcagcaccttcactctgaagatctgttaaaagcacacgagtcgtctcagtccctcagtgggagctgtttcacctggcgtcatctagtcagccatcttcaataataactgttaaatgaacatttatatccactgaaaccactaagtgaaataaagatgtgtttaggcaaagaactgagtttatgacttatagatcctcaccaaggaaacttccaaaaga

SEQ ID NO: 892225 - DNA, 631 bp, Homo sapiens
cgatcaggatcaacttaatgaaataaagcgagaagacaagattagagaagaaagaataaaaaggagcaaacaaagcctccaagaaatatgggactatgtgaaaagaccaaatctatgtttgattggtgtacatgaaagtgatggggagaatggaaccaagttggaagatacacttcaggatattayccaggagaacttccccaacctagcaagacatgccgacattcaaattcaggaaatacagagaacaccacaaagatactcctcaagaagagcaaccacaagacacataatcatcagattcaccaaggcagaaatgaaggaaaaaatgttaagggcaaccagagagaaaggtcgggttacccacaaagggaagcccatcagactcagcagatctctcggcagaaaccctacaagccagaagagagtggggaccaatattcaacattcttaaataaaagaattttcacacggcgtggtggctcaatcctgtaatcccagcactttgggaggctgaggcaggcggatcacaaggtcaggagtttgagaccagcctgaccagtgtggtgaaaccctgtctctactaaaaatacaaaaattagctggccatgatggtgcacacctgcagtcc

SEQ ID NO: 892226 - DNA, 546 bp, Homo sapiens
ataatgtaattagaaacaatctgcaatctgaaagagaataatcttaacatagtgttctgaaaagttagagttgccaaagtcaaagagaagtttaaagagttttaaagttttatcctggactaaaaatgtactaaaaagtattcacaattttactccagttaccagacctattcctaaagtagaaatgaccctaatatcccrgaaacttagagcaaatcaaaacctgttgactgaaaaaacatgccattatcaattctatggaaaacaggatatgacatcaaaactgactctgagagaacaaactgtggccagattttataagctcctatattatattgctcacttggtgttaaaagtggtcttggttattttattattattattattattattaataatattattagtactgatttgagacgaagtcttgctctgttgcccagactagagtgcagatggcatgatcttggctcactgcaacctccaccttccaggttcaagcgattctcctgcctcagcctcccaagtagctgggactacaggcgc

SEQ ID NO: 892227 - DNA, 546 bp, Homo sapiens
ataatgtaattagaaacaatctgcaatctgaaagagaataatcttaacatagtgttctgaaaagttagagttgccaaagtcaaagagaagtttaaagagttttaaagttttatcctggactaaaaatgtactaaaaagtattcacaattttactccagttaccagacctattcctaaagtagaaatgaccctaatatcccagaaacttagagcaaatcaaaacctgttgactgaaaaaacatgccattatcaattctatggaaaacaggatatgacatcaaaactgactctgagagaacaaactgtggccagattttataagctccwatattatattgctcacttggtgttaaaagtggtcttggttattttattattattattattattattaataatattattagtactgatttgagacgaagtcttgctctgttgcccagactagagtgcagatggcatgatcttggctcactgcaacctccaccttccaggttcaagcgattctcctgcctcagcctcccaagtagctgggactacaggcgc

SEQ ID NO: 892228 - DNA, 566 bp, Homo sapiens
ctgacagtggacctccacagaaagcctacaaccagaagatattgggggcctatattcagcatttttaaagacaagaatttccaaccaagaattttatatactgccaaactaagcttcatacaataagaaatagtaagatccttttcagacacacaaatctgagagaatttgttactactagatttgccttacaagaggccctgaaggaagtgctacataaggaaagatctttaccatgcactacaacaacacacttaagtacacagaccagtaacattaaaaagcaaccacacaaacaagtctgcataataaccagctaataagacaatggcagaattaaatccatacatatcaatactaacyttgaatgtaaataggttaaaaaccccaattaaataagacagagtagcaagttggataagaagcaaggtccagtagtatgctgccttcatgagatccatctcacatgccatgacacacatagattcaaaataaaaggatggagaaacatctaccaagtatattagtctgttttcatactgctatatgctagaaagaaatacctg

SEQ ID NO: 892229 - DNA, 590 bp, Homo sapiens
  misc_feature 267: n = A,T,C or G
caggtacaatattcacatggtagagcagaagaaagacagtgaggggggggggggtttacacacttccaaataatcagatcttgtgagaactctatcatgaaaacagcaaagggggaagtccacccccatgattcagtcacctttcaccaggccttttctttaacacttggaacaattcaacatgagatgtggttggggacacagagccaaagcatatcacccaacaaatgaaaaagagaaaaaagctatggttgctattctaatttnagacaacatatactttaaaccagcatgtataaaaaagacaaagaagggcattacataacattaaggggtccaattcaacaaaagatctaactattataaatatacatgcaccraacacaggagcaccaacatttataaagaaacttttgaaagacctatcaagagagttagattcccaaacaaaaatagtgggagatttcaacaccctactgacagtattacacagatcatcaggcaaaaaaattaaaaaaaaaaaaaattcatgagctcaactcaatacttgaccacatggacaaaatgaaaatctacagataccctaaaac

SEQ ID NO: 892230 - DNA, 652 bp, Homo sapiens
attacaggtgtgagccacaatgcccagcctataggtgaatttttatcagtaagtaaaagttgctgaaactcaacctggatcttttacctgtcttattaaacaaattagaggagaaagaggatagagctattggttaatgaaatgaggttaatcaattgaaatgaatgggtttactgttttgattgaattttaatttaagacataataccttctaatttcaagcaatgtgttcacaatgacatgaagagaaaatctatataaagatttttttaatttccaaattttaatagaatacttcattttaaaattagtattaaaattacagttggtactaaacaaaattatctgaaaaaaattttctatatagctatcactagttccatttattactaaaacaagaaaatatagatttccatctggtcatgattacaaaatgtcatgtaatgtaagatttactacacatttaattatagctcttcaagaaaagaaaggctaaattaaatayatacatctattttaatgcatattataattttagttatgtacaaatgtgaacaagtgtaaatctgatgattgaaaaaataaaataattttctgtgataattatgagatcattaaaacaattaaaattacagggaagtgatggttattt

SEQ ID NO: 892231 - DNA, 430 bp, Homo sapiens
ctcctgattttatataatgtgctgaagagaaataattttttttaatgctaggcacttgtgtttatcttcaatgcaaaatagacaaaaaaatgggatccaccaatatttgatcaaaaaaaacttcattctaggaaaaataaataacaagtttctaagatcagacagcaatacaacttctaaatcattaaggtttatatacagtacaaatttgagacaattacgctctggtttaaaatacttatagagtaattaagatgtcagcataattcacaaaaaaaggagggactygccacttcttctgtcttctgaatctgtccttgctctgacagctcttcaactcaggtaccaattaataggttgaagataactttagcttcaagtgttattatacacccagagattgtactgcagatgttaatctagttagaat

SEQ ID NO: 892232 - DNA, 586 bp, Homo sapiens
ttagccagttccaaagtcacttctgcatcttcagttatccttacagcagtgccccactatctggcaccaatttactgtattagtttgttctcatgctgctaataaagacatacccaagactgggtaatttataaagtaaaagaggtttaatgggctcagctccacatgactgggaaggcctcataatcatggtggaaggaaaaggaggagcaaaggcatatcttacatggtggcaagtaagaatatatatgcaggggaactccccttttatgaaaccatcagatctcaaaagacytcatcactcttacaagaatagcataggaatgacctgccaccatgattcaattacctcccaaggggtctctcccatgatacatgggaattatgggagctacaactcaagatgagatttgggtgaggtcagagccaaaccatatcaattgaatgcactgcttattttaccaagattttgactgaaaagacatattttcagatttgatcagactgctttgaggaattgaagtttctttatggagatgataaaaagccccttcgttagcccagcatggtggtggatgcttgtagt

SEQ ID NO: 892233 - DNA, 629 bp, Homo sapiens
taatttgcattttgtaataactattgatgttgagcatattttcatgtgcctatttgtcacatacatatatatgacatatatatatatctctctcaggatttctcccttctatcactgtatccagaatattctggggtagaataaagaagtcctgatagagaattccttagagaagaagggcatgtggtcaaaggaatagacagtgcaattggttaaatggagctcgcataattgtcyttcacaaccagaggagagaaggcaaagataagcgtggatatagaaacataaatggccgagcagaactcacacgaagtaagcgacataacatctcgctattctcattccattcaagtactgcctttgtttactccctggctcacctgggagaaactttgttgcaggttggaagagctctctgccagagaaattgagttacatagtttaaggcatggtgctcctctaagacagatagtcttaatgcgtccacaggaggaaactacagactaaaatttttttagagaaccagacaaaagcagtttggggacagtagacgtaatgataagtgggaatttggataagtttttggaagccttgctatttgttgaattctgttaatatttcctctataa

SEQ ID NO: 892234 - DNA, 686 bp, Homo sapiens
tttccaaaatgttggattggatgatataaattcaggaaggaaaaccagaatttatgataagctagagcctattaaacatgtatttgaaatttcgacttagtgttttcaagatggttgtgtttcagattcatcatgagcatttagttttatctaaaagataatgctcatttggagtatatgtatataccttcaaaaycaggaaaatatggagtaaaacttcttgagtttattatccttaaattcttattaaagtttctcataatgtttattgccatcctattttaaaaaataaattatttaaggtgacttaaatacaaaaaacaagagggctcttatattccagatagtaaatagtcatgactattttttcattgtatacttgaggatttagatagatcgatgggtttaggtggcactggcttactgtctggtgagtcatttaatcctttcactgaagtgatatatctgggtgagtctccactgaagaaattacagtggtctttgatcataaaattccagattagtgcagatataaaactcttggcttggtatcctgagtttgtccttttgaaaagactaacattttctacctttgaaaagccaaccaaaaaataatcaaaccaaaccctattattctactattctactgagagttttagagaggtcagattgtgagctggttcaaa

SEQ ID NO: 892235 - DNA, 686 bp, Homo sapiens
tttccaaaatgttggattggatgatataaattcaggaaggaaaaccagaatttatgataagctagagcctattaaacatgtatttgaaatttcgacttagtgttttcaagatggttgtgtttcagattcatcatgagcatttagttttatctaaaagataatgctcatttggagtatatgtatataccttcaaaaccaggaaaatatggagtaaaacttcttgagtttattatccttaaattcttattaaagtttctcataatgtttattgccatcctattttaaaaaataaattatttaaggtgacttaaatayaaaaaacaagagggctcttatattccagatagtaaatagtcatgactattttttcattgtatacttgaggatttagatagatcgatgggtttaggtggcactggcttactgtctggtgagtcatttaatcctttcactgaagtgatatatctgggtgagtctccactgaagaaattacagtggtctttgatcataaaattccagattagtgcagatataaaactcttggcttggtatcctgagtttgtccttttgaaaagactaacattttctacctttgaaaagccaaccaaaaaataatcaaaccaaaccctattattctactattctactgagagttttagagaggtcagattgtgagctggttcaaa

SEQ ID NO: 892236 - DNA, 635 bp, Homo sapiens
gtttttattgagagttttctttgtagtcttttaaagtgatatcttggtggtagtaaattcccccacttaaaactttaaaatagccttttttaataggaaaggtattggtctagaggtcaagggttttgacccatttcaaaacctttgaccttcatttacaactctcatggtttacttgcctaacgaataaggataatgcaaaattaatgtttctttgcatcgatttatttgttttagtgcctatatgccaaatttatttagactgtgctgatggacatttcatgaatataaattaaagaatcatagaaggtgtgaaaaatcaatactatgcattgtcaataaggtgcrataagaacaattacttctagagattacacctaatggatttttgtaatgaacttgtgagaagtagttacttagtaggcttgtgattcttagatttactgagaatcatgttctataatttaatcatctcatttagaaaactccatttcttcaaaagctgactagataaaatttctcattaagccatttgattagaaataattgtttctttcttggatagaaattgccatatagcattcttatgtctacatgaaattgccctcactttaaaagagcattcttatggtttt

SEQ ID NO: 892237 - DNA, 576 bp, Homo sapiens
ccggggaccatggggccactgggacagcataactaaccctgatatgggataagcatggatcagcctaagaaggcttccaagaggaggtgtcatttgatctggatcaaaaaagaaaagcagaagctttcctgatgaagaatggagtacaggcacttcagaaagaagcrtataataggtgatgccatagttacttgaaagaggatgctattttgggggaagaatagaagttcagaatagctggagggtatgtggcacagagtgatgggagatgacacaagcaaaaatgtgaaggacctttgaaatttttgtattgggggcctgacacggtggcccacacctgtaaccacagcactttgggaggccaaggtgggcggatcacaaggtcaagagatcgagaccatcctggccaacatggtgaaaccccgtctctactaaaaatacaaaaaaattagctgggcgtggtggcgcatgcctgtagtcccagctattcgagaggtgaggcaggagaatcacttgaaccgggaggggaggttgcagtgagcaagatgggcatggactccagcctggtaacagagt

SEQ ID NO: 892238 - DNA, 576 bp, Homo sapiens
ccggggaccatggggccactgggacagcataactaaccctgatatgggataagcatggatcagcctaagaaggcttccaagaggaggtgtcatttgatctggatcaaaaaagaaaagcagaagctttcctgatgaagaatggagtacaggcacttcagaaagaagcatataataggtgatgccayagttacttgaaagaggatgctattttgggggaagaatagaagttcagaatagctggagggtatgtggcacagagtgatgggagatgacacaagcaaaaatgtgaaggacctttgaaatttttgtattgggggcctgacacggtggcccacacctgtaaccacagcactttgggaggccaaggtgggcggatcacaaggtcaagagatcgagaccatcctggccaacatggtgaaaccccgtctctactaaaaatacaaaaaaattagctgggcgtggtggcgcatgcctgtagtcccagctattcgagaggtgaggcaggagaatcacttgaaccgggaggggaggttgcagtgagcaagatgggcatggactccagcctggtaacagagt

SEQ ID NO: 892239 - DNA, 702 bp, Homo sapiens
ccaccagctttgttttgtcttagccacacaaaataatctagcgtctctaaccagtcaaacattttaccttgtgccttggctcactctgtgccttttctccagaatatctttctgtgtacttttctcccatccttttgcctttaaacctgctgctatggtttggatgttgtttggcccctccaaaactcacgttgtagttcaattgccaatgtaatagtgttggaagatgctacttttaagaggtaattaggttgctaagatggattaacatctttctcttgacactgagactgggttctcctgggaatggttagttcccaagagagtgagttgttataaaacaatgctgcctcttctattttgcrctttttgtttgcacaaactcggtccccttctgtttctctatgatgttttgatgcagcatgaggcagtcatgagaacccaccagatacagctgcctgatcctgaatttcccagccaacagaaccaagtgctaaataaaactctttttaataagttacccactctcaggtgttctattatcgcaacagaaaacagtttaagacacctgctaggctcctaaccttgaggggctagaaaacaaagccagaggtccagtaccagcctcctcagagttagaatacacagctcatgagtgctgagctcagccttggcccctacaatcttccagaaatgaggcca

SEQ ID NO: 892240 - DNA, 600 bp, Homo sapiens
ttaaagagtttaattactttttactactagaaaactaattttatgtttggcacaaatttctgaaatgatattccactgcaaagaataatacctatatatggccagaattactttttttctataacattaagataatacttgtcagcctgagcaacaaagtgagacctcatctttacaaaaaataaataaattagacgggtgttgtggtgatgagggtctgtagtcccagatactcaagaggctgaggtgggaggatcycttgagcctaggaggtcgcggttgcagtgaactatgattgcaccactgcactccagcctgggtaacagagcaagatcctgtctcaaaaaaaaaaagataatattggtataattcagggtttttgcctcaatccccatgcttcttcatttgaccttccctgactccctgatgaattttagtttgaatttttgctatagtccagaagttaatttaaaagatcttaaaatttccacctgcctagatattacttatttgttacactttagtccatgatttctattgtcatttacattaccccaaaaatatgacctgctgaatttctgctgtcatgaattgactaac

SEQ ID NO: 892241 - DNA, 625 bp, Homo sapiens
aataatttaaaatccctgtccagtgaagtgtatattcttgtaggctctgtaaaaagatgccctgtgcattgtcatggttatttctcagtccctgactcttcttccgtgactagatgtttttcttactcatgtgatcagttgctaattcagacgtggctgtcatgcctgtgttattaagtaacgccatgtttcccaatcaaaaccagtctctattaagcaactccaaatattccaaaagcattctttaaggaagaaacaaccggattgcaaaatagttttttctgaaatttcaagaagtgaaaagtttgatcagaatttattatgtcaaatggagagtttgtgtttattattaaaatatgccytatattttaatatggtctagcttgtgtctatctggctatttctctaagtgtttagttaactgttataagaagataacaacattacaaatgtccttgggggtgaaaaaacttgccagaaaatactaaaaagcttaatttacttgcgtttttttttgtagtacttattgtattttagttacaactttactatgtcttttgaaatataaatcctgatagctttaacttcatagtagtctctactatgtggagaatcttagaaatgt

SEQ ID NO: 892242 - DNA, 532 bp, Homo sapiens
atgacgaggtcaggagttcaagaccagcctgaccaatatgggtgaaagccctgtctcttattaaaaatacgaaaatggagccaggcatagtggcacgcactctataatcccagctactcgggaggctgagcagaagaatcgcttgaacccaggaggcggaggttgcagtgagccaagatcgcaccactggcactccagcctgagagacagagggagactctgtctaaaaaaacaaaaacaaaaagtttaatctgagatttgcttgatgctgacaaacgcaacctttaraagagcctaaatggtcaatcactactcttaactgcacttgtgtacataaccagtacaagtttaatgagattaaacttatttagcaaacaaatcaatctgactttgattatctttgacagaaatgagagtgaatatagagagaaaagttatgtttcgggagaaaactgcagtgcacccaatattagattctagctgttttttttttttctgaggttttattatctgcctgcaatctgcaatagat

SEQ ID NO: 892243 - DNA, 657 bp, Homo sapiens
cacctcagatattcagactcttcaagtcaaagcctgagctcatcaccatccttcccaaccctttttattctgctgtgttccatgtttcagtgatcagcaccactatcctctcattttctcaatccaggaaccctgagcatcctattcctctctctcttaacacccaacttgttcaattggtcttcatcccaggcagctccaactcttaaacagttctagaggccgtttggtttgcttctctatccccaccactactcaactggtctttctgcctccagcctcttttcctatctaattccttatccctgtctccatactgctaccrgaggaatcttcttttaaaaagcagatctggtcatactacctcctttataaagaaaattccctgatggatacccattaacgtaagaagaaagttcaaacaccttaacatattttataagacacttctgacctgaggtcctgtttatttccatcattcacatctacaaccttaactctacttccaaatccagacattatgaaattatgtgcaatttcctgaagttctgtcttttgtcccctaagcctttgcacatatagttacagaacagtttctatcctcttgcttgtggctaaactcaagcacactgtcagattacaacacactcaaggcct

SEQ ID NO: 892244 - DNA, 587 bp, Homo sapiens
ttttattgatatgttcggccctcctcctcaaccctgtctttgagggcatgcgcctgcttcccatcacaattctgaatgtaaggtattaattggagcaacagcagaaagatttgggaaagcgatggtaagacaagcctgtgtacccactgtgtggtgcagcaaagacacgtgaatttctcatgggttcaaaaaggggttatagaagttgaccaggttatgagccatcctgtargaactcttcactggagggtagcctgtgtggttagggtatatccatagcacaaagtcatgggtaagtcctgggaatagaacctgagggggttccaatatatcgggcaaagtgtgcattatacacatcaggcatgtgtgacctatgagaaatctacaagcgagcatgttagcccactctacacgaaggaccaaattatacatgatttttcactttttttccccattcctcctccttagcctcaacacattaaagaaggaaggggaaagaagaagagggagaggcacagtgaagaagaaaagtagagttaaatagagtccttagccacttgcccacgatgggtcttgtagccacgtgt

SEQ ID NO: 892245 - DNA, 681 bp, Homo sapiens
tagaagagaaacaaaatatacctatataaatataaacctatagtgtgtcaggttatgattaatgcaatggaacaaaaagcaagacccgagaccaaagtaggccctctttgaaaaaataacattagagaaaagacctgagggaagtaagaaagagtgctttgagggtgtctgtgaaaagttcattcaagatggaggaaacaaagtacaagggtacaaggtggaggaagcaaagtacagagtgaatgactggaccagagaagcaagaagatgagattgaggaagttgagaaaagaaatattaccatacagcctggtaggccatagaaagtactttggatgttaattggagtaaaggtaaaaaggaaagccactggagaatttgagcagagagtaagccttatattttaaataaacagtaagactcacgttttaaatgaatcatactgactttgatgtgaaaaatagaatataatgaggcaagtataggaatagtcagaarctattagaatattgtaaggatttggtggctagatgaagatagtcatagtaaaggcagttgagaagtggtgaaatcctggatatattttgaagataaggggacaggatactccaattgatttgtatggaggataagagagaagaatttaaaagttttggactgaacaatgggctaaacagagct

SEQ ID NO: 892246 - DNA, 663 bp, Homo sapiens
tgttctttggagtgaaacagagcagcctatcctatgtctgatagccaaaaacccgacttgagttaccacaatggagcatcatggcctctcagccagttgacatacttaagccagtttacaaattgtacagcccttgactgaatgggagccttctctcccttaaggagtgatccagcaacattaaattccatccagctgcaagaatacattataaaaccttctctaggccttatccaaagagaccttcgccatttgctagagtggctgtaagctaggaaaaaaaawaggaatatccagacctttaaggtattaacaggcactgtctctgaattgatgctaagtaattgggatccaaaatgacacaggtggctcacagtggggctatcggtgacaggtgatagatggaatcttagcctaagttaaagtaggactgctttgtccacagaaatatcctatggttgtttccctatctcctgaattggcataaacatgtttatgagcaccattgtggtagaatgggctaaacctgtctatcaaaatagcaaaccaaaagcaatactgcatccctacaggaattgcagatatcagtgccatcaaaggcttgaaacagctcagatgctgataactttcatgtccacattcaaaatacctgtttcagccaag

SEQ ID NO: 892247 - DNA, 608 bp, Homo sapiens
tgcccaaattattttactggagaatcctaccaaatgttcaaaaatgaatcaatgctgggcacagtggctcacacctgtaatcccagcacttagagaggcagaagcaggaggatagcttgagctcaggagttcaacacctacctggacaacatagtgagactctgttctccacaaaaaggaaaaaaaaaatraatttatatcaattctacataattgcttatagaaatgtaagagaagagaacactccccaaatcattttattagaaaaacaacaacaacttgttttaagagatggggtctcactctgtcaactatcctggagtgcagtagcacgatcacagctcactatggcctggaactcctgggctcaagcaatgctaccacctcgttctcccgagtagctgggattacaggcacaagacactgtgaccagctgccaaatcactttattaaactacctttaccctgataccaaaaccaaagacagtatcaagtaagaaaactaaggacaaatatccctcataaatatgagacaaaaatccttaacaaaacatgagcactcagaagtcaatgatatataaaaagaatagtacaccatgaccaagtag

SEQ ID NO: 892248 - DNA, 616 bp, Homo sapiens
agataagacagctcgggcatggaaggaggaataaagtctcttgggtaaccaccaaacttcattctcatacaatgggccccagtaaaacagtggacccaaataagcacattcttttccctttaggtgcactaagatggggaagctaaaagcagacttgggggttatgcctgcagctgtaggaagatgtgtggatatagacacaaaactctctctcccagataagaaagacaaagagacacagatacattctgagcctgtgataagccctcctgtcctgaamccttaaatactcttagtctgtaagagagagtgctcctgaactaacttggccagaagcccctctcaggtttattctttaaaataatcctgtctctgactgttaagctgctcttcatgtttctttcttccttcttcaactcttacagaaggaaaaatagaaggtgtgaacttgtttaaattttcttctagaggataatatttaaacaggtatctgaagagtgcataacacatcaatattgatttttgtactttactttgtaaattggctcttaagtggaatcttatttttagatataatagctttccaattgatttatctaaagtttaaaggtagact

SEQ ID NO: 892249 - DNA, 610 bp, Homo sapiens
agtctttaatccatcttgagttaatttttgtataaggtataaggaaggggtccggcttcagttttctgcatatggctagccagttttcccaatactatttattaaatagggactcctgtacccattgcttgtttttgtcaggtttgtcaaagatcagatggttgtagatgtgtggtgttatttctgaggcctctattctgttccatcggtctatatagctgttttggttgctatagccttgtagtatggtttgaagtcaggtagcataatgcctccagctttgttctttttggttaggattgtcttggctgtgcaggctcttttttggttccatatgaagtttaaagtagttttttctaattctttgaagaaagtsagtgcccaaagtaacttactgattcaatgctatccctatcaagctaccattgttatcactaactcttactgaaatcctataaggttgtcccatctacagatggaaaactgtggcttagtttagaaagattatcttgctgaagaccatagatctagaaaaagtttggagatttaaagccaggtgtgtttgatttaggttcttttcatgacaccacatgatctttggaggatgaag

SEQ ID NO: 892250 - DNA, 574 bp, Homo sapiens
tggtctgagagactgttatgatttcacgaacaagtaactttaacttcctatgtgtcatctctctcctctataaaaattaaaatagtagtataatatgtctcaattattgttaaaatagaagaacataacataatgcttcatatgaagcacggttatcattttgtattattacaacctttaccctaagccataattttctatttaatttttacttaagaatagtatttttcaaatccttttacatatttagaaaaagtatataaaaattatattaaatatattatgatatgtttgtgttgtatgttgacataaatatgttattttaaaatattttaaataattctagacaattaaacactcttctaatagtttgtggcataycttttgcacatgtgccttaacattgacctgattagagtgctggcaaaagtttcctttagttcattatcaattgtaattataatttatataatcagaattgtgtcctataatactggttcatatattcaattaaataattatattcagaacccattgacttctaaataacaatctaaataaaatatatggttta

SEQ ID NO: 892251 - DNA, 629 bp, Homo sapiens
aacctcgatctgcatgtgatctgttctaatttctatgaacctgttgctcctctattcacttatttttttccctttctttggctatctgaagttccaaatatttataaaagtatactcaataaatgatttcacagtgtctttttattaggctatttttccctcagactactttttatttgatattaaatggaaatggctcctataattatatgtattgttttatttgctgtttgcaattgtgataattttcattacctcctgcagtacttttaattaatagtgtttcatttcatttcttaacatcatttaaaaatcaaaaaaagcaaccacttctattttcagctgatattcagtgattttcctgaaaacacacataagaactgactgaaatgaaaattaaaaaactgttttcaaagccattactaagagcttcatttggtgtctgtagcttttttttttttttttgtcgtcacarggtttgtagtatttggtgttatttcatctttatgaagcatttatagaacatatgagatttttaaatatacgaaatacgtacacaagtgcttttgaactagatattcgtttttcatcagagttacaatctctttaaaagaacaatattttcaaaa

SEQ ID NO: 892252 - DNA, 633 bp, Homo sapiens
agatagccttttgagaagcctggttttatataggggactgagttccaattactacatacctatgcaccaaagattttttttttctattcctgaatggtgttagaatccaactaccttgctaagatccatttcttgatgtgacaacattactgtatttctttatggtcctgtttttccattccctcttttgcttctgtcacttggaaatttccctttcttttctttcaagcccaattttatattaatttttattgttactgttttatttcatgtatcattgatagtattttagctcctttttatcactgcctaccaatttgcccccayagaaattctaatcatttatacattttgaagttcatttctttttttcttgaaattatccctgttttctctgatggcattttccccactttctgtgctgaggtatctgaaattcctatttttttgtttatatttttgaataaaaaattggctcactgcagctacaaacatccaagcttagtcaatcctcccatttcagcctcctgagtagctgggactgcagatgtgtgacaccacacccagctaattttcttattttttgtagagatggagtctcactatgttgcccaggcaggtctcaaactcctg

SEQ ID NO: 892253 - DNA, 599 bp, Homo sapiens
cacaggtttgaggttcagagattgattgattgattaattgattggttgatttcttcttagggacaggtcttgccatgttgcccaggctggacccaatctcctgtgctcaagagatcatcccaccttagcatctgaagtagttgagactacaggtgcatgccatcgtaccctgcgaggctcaaagttttcactggggcctcattatataggcataattgataaatgtctacatggttgatttaatctctaggtttactagtaccccatgattcaatgtctgtaccttaaatcacaccattggtctttctgatatggtcagtccccatggtaaatcagtgttaatatctgtctagtccaaaccaccaagggaaataaatacctcccaggagcgatgagaaaaggctagacctcttcctggcccaagttaaattcttttttgtttgtttgttttaatagcttttgtttttatcattttttatttttttatttgttattatactttaagttttagggtacctgtgcgcaatgtgcaagtttgttacatatgtatacatgtgtcatattcrtttgctgcacccattaacttgtcatttacatta

SEQ ID NO: 892254 - DNA, 581 bp, Homo sapiens
aggagataaaagaaaaaaaatacaatgaatacacttataagaaaaaacctcaaaagagcaaactaagaggaggtagataatgaggtaggggtagatctttttattttgtttgagtcttgctctgtcgcacaggctagagtgtgttggcacaatcttggctcactgcaacctgtgcctcctgggttcgattctcctgcctcagccttctgagtagctgggattacaggcrcccacgaccatgcccagctaatgtttgtatttttagtagacacaaggtttcaccatgttggccaggctggtctcaaactcctgacctcaggtgatccacccgcctcaacatcccaaagtgctgagattacaggtgtgagccactgcacccagcagaagtttttttaaagggcttctcaaatctatagagagatatcaatattcaagtacaaaagggttgtggaacactaagcaaatttaacccgaagtagactacctcaagacatttaataatcaaacttccaaaggctagggacaaagaaaggatcctaaaagcatcaagtgaaaagtaagaaataacatacaatggagct

SEQ ID NO: 892255 - DNA, 631 bp, Homo sapiens
cctacatgatggacctagcaacaaggtccatcatgtaatgttctacagattatgcagtgcataactctaggggagcaccattcacactaatctagagttgagtaccccacatatgcacagcatctccattccacagaggggtcagtaacattacgcctattgcaaagcttttctatcttgagaaagtgctgagactggaaaagatactaggagagacttggaggtggtcactgggaagatggctgattgtatccaacccatcaacagacttttgttattatcttgtatttaaaaatgcccaattactatgaagaatgttcagtggattaaaacctaacattttctcttacrtttaatttttaaactaatttagaggccaactgaaatagctatatgcatgtattatctcactctcttcttttttgaaagattattatctccaaattttactgagaaaattctgtgaagaaaagtgttttttttttaaatggtacccagctcgtaagatctagagttgagaatttaactaagaatgcccatctccccgtcattgtttttttaagtactattcattttctgttttctaccaaagttatgcaggtgttgaactcatgcctggaatgaaattcaa

SEQ ID NO: 892256 - DNA, 607 bp, Homo sapiens
tgcccaaattattttactggagaatcctaccaaatgttcaaaaatgaatcaatgctgggcacagtggctcacacctgtaatcccagcacttagagaggcagaagcaggaggatagcttgagctcaggagttcaacacctacctggacaacatagtgagactctgttctccacaaaaaggaaaaaaaaaatraatttatatcaattctacataattgcttatagaaatgtaagagaagagaacactccccaaatcattttattagaaaaacaacaacaacttgttttaagagatggggtctcactctgtcaactatcctggagtgcagtagcacgatcacagctcactatggcctggaactcctgggctcaagcaatgctaccacctcgttctcccgagtagctgggattacaggcacaagacactgtgaccagctgccaaatcactttattaaactacctttaccctgataccaaaaccaaagacagtatcaagtaagaaaactaaggacaaatatccctcataaatatgagacaaaaatccttaacaaaacatgagcactcagaagtcaatgatatataaaaagaatagtacaccatgaccaagta

SEQ ID NO: 892257 - DNA, 603 bp, Homo sapiens
attgaatgttttattcacagaaaaataagctttaatctacaatgaatgccagattatacagcagagagcagttttcttagttttccacactgatagaaaggttcttactaagtgaaaaaagccataaaattatattcaccaatagagtactctgtctcaaaacattccacatgattgttcacaatactaatacaattaaatcagtcatttaygttaaagtataacagtgataaaaaatgcaaaatctaatataaattacattaaaacttttgttatatcaaatcagaaatgcaaatttcttactaaatacagaaaaatggtcaaatatatagtaatttaagatattacattaatgatacagaataggaaagtggtaaactccaaaaatctataggcatatctgcaaacttcagacttcaaagtagaatctgaccacccaaacattaatgtagcatttgtctaatttttgttttgttttgtttctgagacggagtctcactctatcacccagggtggagtgtggtggcgccatcctggcccactgcatcctccacctcccaggttcaagcgactctccagcctcagtcggtcgagtaggtggta

SEQ ID NO: 892258 - DNA, 661 bp, Homo sapiens
cttggctgaaacaggtattttgaatgtggacatgaaagttatcagcatctgagctgtttcaagcctttgatggcactgatatctgcaattcctgtagggatgcagtattgcttttggtttgctattttgatagacaggtttagcccattctaccacaatggtgctcataaacatgtttatgccaattcaggagatagggaaacaaccataggatatttctgtggacaaagcagtcctactttaacttaggctaagattccatctatcacctgtcaccgatagccccactgtgagccacctgtgtcattttggatcccaattacttagcatcaattcagagacagtgcctgttaataccttaaaggtctggatattcctwttttttttcctagcttacagccactctagcaaatggcgaaggtctctttggataaggcctagagaaggttttataatgtattcttgcagctggatggaatttaatgttgctggatcactccttaagggagagaaggctcccattcagtcaagggctgtacaatttgtaaactggcttaagtatgtcaactggctgagaggccatgatgctccattgtggtaactcaagtcgggtttttggctatcagacataggataggctgctctgtttcactccaaagaa

SEQ ID NO: 892259 - DNA, 583 bp, Homo sapiens
tgcaaggatgttctagacaaggaggccaagcacttggtgaaggggaaactgacagcagcaaggactgagaagagaagctttgagaaatgatcataaaatagtcaggttctgatgaggaagtgcaactaggattggcacgaactccatgcaaaggatgatgatggtgcaatgtttttgtgagttgagttctgagagttggcttggagcattgagaagggaaaggtgaagagaaaggaattggtcagaaacacagaaatcagaaaggaaaggggttcacaagcaggataaacagtatctgtctctcgatagtggagaatgggaacttattagctgaccatggcttggtaaaaatatttcttccaacagctggcttcttytattttaatttcatattcacagcacaactccaatccgaatgtatttttttttccaaggttattgacctgctaaaatgaagatgtgactgttttcactgtaaatgtgtgagtgagcatgttggttttgttgagtcttgcccatgggaaaggacttgaataagtctgaatggtgggatctctaacgctgcgaattctggaaactgagc

SEQ ID NO: 892260 - DNA, 554 bp, Homo sapiens
atggtgtggctgttgacccgtcattctgcacagcccattgtcctgtgtagtcacctgtccactaggactgttgctcccgtcactaccacacggtgtcgctgttgaaaagctagcctgcacagcccaccttccctgccccacacttgggctccycgtttcatccatgttctcctgcccagccattgtccccaaaagcagaacaatgggccaggtgacagagtccattggggttttctgcttcagtcacatctttgggtgcaattagcacttccccatgactctcccagctctagtgtggaagccagatcaccaacccagactgtctttggaattctggggagtttccttgggggctttgggccatttcctgccatgggacatcagagggggctatctcagcccatgagatggggttttatggattgtacttcagattgattgaggagtcctggaaggcctttctacactgctgacatgtgctctgagaccataaggatgagcaacaacacactggaggagttcgatgcagacggtggagtgggggaccacatgac

SEQ ID NO: 892261 - DNA, 597 bp, Homo sapiens
caacaatttaagggtggtcagtaagagtaagtagcaattcaaagatatttgcctcatgcgtgggcacatttgtatgtgagtgtgtgcatatacgtgccttgcagatccagagctaatgggataggttggtaaaatgattgatggtcttccccaggaggatgatcaatattaacgatatatagatggttttcctcagatttctcatgctttttttttttccaattcacyttaccgggcaagtaggagagacatggagttgatcctctcatttccctccaaacaggttgtggaattcaccttgcatacctcctgtttcctcatacagcccctcctcataatccctctgcatccccaccctatgggtcactgagttgcattgattcagctaactcagtatctcccacctaaccatgttctgtttccatccacaccctcctagttcaaggcttcatgtctggcagcctcctaacttacctccttgttgtagtccctccgattccactctgatctttgcaccactgccctagcatccttctaaaagcctgtagcttgtcatttatactctgcaaacctaacaagagggaccaggtcttctcg

SEQ ID NO: 892262 - DNA, 432 bp, Homo sapiens
tgttatttctataatctctttagcaattcagtctgctaacatggcacctaggaaatattcatggcctcgtacttgttctgggtccataatttagtggacctgagaggcttcacagagaactaaatatatacaaatcttggctgagagcagactcatgttcttctgaaatcrgaagccctgtagccatattcagtgcagtacacaattacaatgtgctacataaatgtggggactaacaaacaattgcagactggattttgaatctacatagaaaaactcccttcttttcaacttcagcttgctgcaaaagttttcttatacttaagcctcagaggtgttgaggttttgtttgttttgcagaagaaagaggcacaattagaggtgcctcacaggaagagtaagccagccttaactacagggaattcagagatg

SEQ ID NO: 892263 - DNA, 629 bp, Homo sapiens
tagagccattctcttacaatccctttattttaaagacaagcagagacccagcaaagttaagtgactgtctcaaatttacacagcttgttaacggcaaagccaggacttaatcccaaagaccttatctcataaagcataaatttcactccactccactgacactctttcataggaaactgatttatttgttttgaatgccactgggtgagggggtagaaaatagttcattaactattttatagcaagaacataaaaaaaaggaaaaaaaaaagttaaaagaaggctagagaaagaaaaaaaaaaawaagaaaccaaacaggctcatggaatttggcccaacagcatagggaactctgtagacaatgtagatccacccagttatcacaaatatgagcaaaggagctgaaatatttattcctccacactggctaaaggctagggatggaggtggaggacattaattctacacatttccagctgccctgtgcccaggcaaagcaaatcctgcagctggagctggtactctgagaatatgatgtgggtgctggcaggagggaatgaaagcacgcctggaaccagtgtgcacgaaactggaaaaggactggagggggtatggccaagcactggca

SEQ ID NO: 892264 - DNA, 607 bp, Homo sapiens
tcccctccttccctctatgggctccctgttttacccccatcacctctgctctgctcacagcatgagccttctgaggtttcacacccccagtctgccctcatccagtccatctgacctagagatgctgcattcattcatccgagggccagttttgactgcctttttaaaaacatttgcgagttctctggtattgaccaaataatacttgaattctaaaagtaggtgtataaacccttctgcagtctaatcccaggttatcattgactattccctgtgggataacgttgtcaacagccaaacttggtggttccaggcactgtagttgacactgaggctatagacatgagaatcggatgcagtgcttgcgctccagtagccccacctcctgttggagacacagtcagcagtggtgtaagtgctgtagagggatgacgaaggctctctaggagtctaggacagagagkgtcagaggcttctttaggctaaggcagagaaggaataggaattaaccagacaccttgagggtagaaatcgaggctaggagactggtagacattttaggagaggcaaccaagcagttgcatgaaattgcaagaatacatgccag

SEQ ID NO: 892265 - DNA, 579 bp, Homo sapiens
tccatttcagaacttgttattggtctattcagggatttgacttcttcctataatcttgggagggtatatgtgtccaggaatttatccatttcttctggattttctagtttatttgtgtataggtgtttatggtattctctgatgrtagtttgcatttctgtgggatcagtggtgatatcaactttttcattttttgttgtgtctatttgattcttctctctcttattctttaattgcctggctagtggtctattttaatcttttcaaaaagccagatcctggattcattgattttttgaagggtttttcatgtctctatctccttcagttctgctctgatcttagttatttcttgttttctgctagctttgaatttgtttgctcttgcttctctagttcttttaattgtgatgttagggtgctgattttagttctttcctgctttctcctgtgagcatttagtgctataaatttccctttaagcactgttttagctgtgtcacagtgattctggtacatcgtgtctttgttctcatttgttccaaagaacttatttatttctgccttaattttattatt

SEQ ID NO: 892266 - DNA, 579 bp, Homo sapiens
tccatttcagaacttgttattggtctattcagggatttgacttcttcctataatcttgggagggtatatgtgtccaggaatttatccatttcttctggattttctagtttatttgtgtataggtgtttatggtattctctgatgatagtttgcatttctgtgggatcagtggtgatatcaactttttcattttttgttgtgtctatttgattcttctctctyttattctttaattgcctggctagtggtctattttaatcttttcaaaaagccagatcctggattcattgattttttgaagggtttttcatgtctctatctccttcagttctgctctgatcttagttatttcttgttttctgctagctttgaatttgtttgctcttgcttctctagttcttttaattgtgatgttagggtgctgattttagttctttcctgctttctcctgtgagcatttagtgctataaatttccctttaagcactgttttagctgtgtcacagtgattctggtacatcgtgtctttgttctcatttgttccaaagaacttatttatttctgccttaattttattatt

SEQ ID NO: 892267 - DNA, 620 bp, Homo sapiens
attttccaggtgccgtctgtcacctctttccttgaccgggaaagggaactccctgaccccttgcgcttcctgagtgaggcaatgccttgccctgctttggctcgcgcacagcgcgctgcacccactgtcctgcacccactgtctggcactccctagtgagatgaacccagtacctcagatggaaatgcagaaatcacccgtctyctgcgtggctcacactgggagctgtagaccagagctgttcctattcggccaccttggctcctccccccatcatgtggtttttgtcattggttctgtttatgtgatagattatgtttattgatttgtgtatgttgaagcagccttgcatcctagagatgaagccgacttcatcgtggtggatgagctttttgatgtgctgctggattctttttgccagtattttattgaggatctttgcaccaatgttcatcagggatattggcctgaaattttctttttttgttttgtctatgccaggttttagtatcaggatgatgcgggcctcataaacgagttatggaggaatccctctttttctgttgtttagaataatttcagaaggaatggtaccagctcctctttgtacctctggtaga

SEQ ID NO: 892268 - DNA, 582 bp, Homo sapiens
tttcacaaatggataaatactgaaataaactttaataaaaacatttttactaggtagataagatttttaatattttcagaatgaattatataacataaaatttgagtgtatatgttaatcaaaaaagtgaggaagaaaatctaaaatgtcaagttagagaaatggaattgcttgaaactcaaaatgaaaaaaatatataaaaaataataatatattaaagagaatgccaggattcagtttggataaggaaccttttttaaaaaaatgtttgtagagatagggtctcactatgttgcccaggctggtctctgaaagtgctgagattacaggcatgagccaccaygcccacacctggataaggaatcttaaacattaaggaaaatgttggcaatatacagctacaaaattgaaaagtacacaaatacagttactaaatttataggaaaataagaggagcatttaaaggaaatataaagagatcacatgtgaaaatatctgtcacagtgctttcctgagtcagtgtattttaatttttttcttttctttctggaacttacagatttgaaaagaagaagaaaggga

SEQ ID NO: 892269 - DNA, 653 bp, Homo sapiens
cttaataaaaggattattttatgcaagtagctcttcatgtgtctcagaatattattttcaaagcattcacagatgactgcaagtggcctccagcctcttatgacacacattaagagacaagacctcaactctctatggaatactgaaaggataagctcagttccaccagtaccagaargaactcctgcttcccccacttttctcgcactatcagcaggacaatggggaaaggcattttttttttttttttaaggagaggagactttgcaaattgtgcagtacacagaatattttcctatctaaagagagattcaaatgcctctggtaatgacagaatttcagagacatttaaaggtctcaattcttgatgtaaacattgagtcaagattgaaatagctatcctgaaattatctaggttttggaaactttagcagctctccacagagcacagagtgtccttcttcactgtggcaacactcagggaatcccctttcctggacaagaggcacacatcacatgtttccaggaactttcgtcttttccatcaattaaaaaaaagtacaaggtgcagacaccagtctgggtcttatcttgtataggaaaagttcattttcatctcccagaagtcagggaagtaaataaaacaaaacaaa

SEQ ID NO: 892270 - DNA, 605 bp, Homo sapiens
aatttatccaactttaattactttaaaggcaaagtactttctgtccaagataagagacttgttcaactctcatttggtattctctgcataactttttgagaccgaaaaaaaaaaaaaaaaagatcaccctaatttacaaaggagaacgtcacaaggcatggtaaggttgaactgcttggccgggaggtaggtcagaggcaggtggsagaatagggcctgagtctcctattttctacctatttgtaccacatctttgtatctttactatttaccaaaattatacagactaccattggtgttcaattctctctgaaaaggacttgttgcagaaagcatttatttttctttttgaatacagtatcagttttagaaaaaaacaaaacaaaaacaggctgggtgtaatggctcatgcctgtaatcccagcacttttggaggctgagataggagggtcacttgagcccaggagtttgagaccagcctgggcaacatggtgagatgctgtcactataaagaaatttaaaaaatcaaccaggtgtggtggcatatgcctgtggtccccagttactcaggaggctgaggaaggagaattgctggagcccaggag

SEQ ID NO: 892271 - DNA, 658 bp, Homo sapiens
ttccttgtctgtaaaggattttatttcttcttcactgatgaggcttagtttggctggatatgaaattctgggttgaaaattcttttctttaaaaatgttgaatattggcccccactctcttatgccgagagatccgctgttagtctgatgggcttccctttgtgggtaacccgacctttctctctggctgcccttaataktttttccttcatttcaaccttagtgaatttgacaattatgtgttttggggttgctcttctcgaggagtatctttgtggtgttctctgtatttcctgaatttgaatgttggcctgccttgctaggttggggaagttctcctggataatatcccaaagagtgttttccaacttggttccattctccccgtcactttccagtacaccaatcatagatttggtctgttcacatagtcccataattcttggaggctttgttaatttctttccactcttttttctctaatcttgtcttctagctttatttcattaatttgatcttcagtcactgatatcttttcttccacttgattgaatcagctactgaagcttgtgcatgcatcacgaagttctcgtgctgtggttttcagctatttatcacgtttgtgataaattgaccttgttattttgagatatgttcc

SEQ ID NO: 892272 - DNA, 597 bp, Homo sapiens
acaaacatcaagtggggacatgatgtatttgaaatattttcattacagcaattggtcatacagtttaactaaatgagatccctttcagccatcatgatatgtgcttttcaacagacgcacaattctgttgagacagctgaaataagactaggtctgtgagcatccagatagtccctgttctgtttgatatatagaactggagtaaaaatattctttctaaatttcctataaggagtcccctaaaatgcagctgactggtttatggtcctctcatttcacttaccttgcaatctgatccagattgcctcaccaactgctagtagcacacctgaccaacccattgcytttccagttcttcctaagacataggcaacactccttccctgttgtttttactgtttatatctcttatcattagaaaacttgtaagtcctgtttaatatatcactaactatattattgctcagaaaatgactcctatttctatgcctctgaaatacacacacaaaataagacaaggtacgtaagcttgacaaatgttgactttgactagagagaatttatgtctactgcattggttgagataaattagaccta

SEQ ID NO: 892273 - DNA, 601 bp, Homo sapiens
cagtgctgagaacttgccccaggctacaagcctcccagctgagaaagcaagccaactcacagttcctcagctgtcccacagggcctgcagcggcaatccgcctccttcaaagggtctgtggtttctcttggctttcctggtatgttcctgcagtagttcttggagcaagttcatgatgtgagtctccacacatggctttgtctgagtgggagctgcaggttagtcctgcctcttatctgccattttttcccccgcattctccctaaatggattattttaaaagaactgccttcaagttcagaaactcttctgcctgatctagtctattattgaagttctcaattttatttttatttcactcactgagttattcagttctaacatttctgtttygttctttttaatgatatctatttttaaaaatttctcattcagattatgaattgtttttctgatttcattgaatctatttgtgttctctcgtatcttcccaggtttccttaagattgttattttgcattttttcaggtgattttagattggttttcctttggggtctgttacttagagaattgttgtgttcttttgaaggtatcacgtt

SEQ ID NO: 892274 - DNA, 610 bp, Homo sapiens
cctctctcaccactcctattcaacatagtactggaagtcttagccagaacagtcaagcaagagaaagaaataaaaggcatccacatagtaagccaggagaacaaactatttctgtttgaagatgatataattaaatacctagaaaattccatagtttatgccccaaagctacttgatctgataaacaacttccgcaaagttttggcatacaaaatcagtgtacaaaaatcagtaatgcatacaccaggcgcagcggctcacacctataatcccagcagtttgggaggctgaggtcagcggatcatttgaggtcaggatttcaagaccagcctggccagtctggtgaaamcctgtctctactaaaaatacaaaaaaagttagccaagtgtggtggcacacacctgtaatcccagctactcaggaggctgaggcaagagaatcacttgaacccaggaggtggaggttgtggtgaaccaagatcatgccactgcacaccagcctgggcaaaaaatcgagacttcatttagaaaaaaaaaattagtagtatttttatacaccaacaagatccaagctaagagccaaatcaagaatgcagtcccattcacaatag

SEQ ID NO: 892275 - DNA, 588 bp, Homo sapiens
tggtgaggaactgcattcctttggaggaggagaggcgctctgctttttagaggttccagtttttctgctctgttttttccccatctttgtggttttatctacttttggtctttgatgatggtgatgtacagatgggtttttgctgtggatattttttctctttgttttccttctaccagacaggaccctcagctgcaggtctgttggagtttgctagagktccacacgagaccctgtttgcctgggtatcagcagcggtggctgcacaacagcggattttcgtgaaccgtgaatgctgctgtctgatcgttcctctggaagttttgtctcagaggagtacccggccgtgtgaggtgtcagtctgcccctactgtggggtgcctcccagttaggctgctcgggggtcaggagtcagggacccacttgaggaggcagtctgcccgttctcagatctccagctgcgtgctgggagaaccactgctctcttcaaagctgtcagacagggacgtttaagtctgcagaggttactgctgtctttttgtttgtctgtgcactgcccccagcggtggagcctacagaggcaggcac

SEQ ID NO: 892276 - DNA, 571 bp, Homo sapiens
aaggaaactgtcactatgtccattttacagattgcaaagattatatctcaagacagtcaaatatcttgcctaagttcagcctgagaacagcaaatgtgggagtcagttctagctttcatcttacgttaccaaagcaggtgtgataagtggatgggctctaaattcagagagcagtggggcaatgaatgaatggttggtgaggaagtaagatagactgcccttttcagcaggggagaaggtttagtacattgcctacacacagtagatgctcaataaactttagttcagtgaacaagaaataaatgtcaacgtgtgctagctatcaggtttacaggttaggtgtggaagaggaggtagcagaggtgtckagtacacacagcccaaggttaaggagccagtagagagaataatgccaaagaagaaaagggaaaatttagcaaaccaggtccttcatagaagaggttgattgagcctggtatcaagtatagaagcaagaattttacctgagtagatggactccttctttgagattgaattaaaaaacagtgaggtatagaaataggtgtatagg

SEQ ID NO: 892277 - DNA, 571 bp, Homo sapiens
aaggaaactgtcactatgtccattttacagattgcaaagattatatctcaagacagtcaaatatcttgcctaagttcagcctgagaacagcaaatgtgggagtcagttctagctttcatcttacgttaccaaagcaggtgtgataagtggatgggctctaaattcagagagcagtggggcaatgaatgaatggttggtgaggaagtaagatagactgcccttttcagcaggggagaaggtttagtacattgcctacacacagtagatgctcaataaactttagttcagtgaacaagaaataaatgtcaacgtgtgctagctatcaggtttacaggttaggtgtggaagaggaggtagcagaggtgtcgagtacacacagcccaaggttaaggagccagtagagagaataatrccaaagaagaaaagggaaaatttagcaaaccaggtccttcatagaagaggttgattgagcctggtatcaagtatagaagcaagaattttacctgagtagatggactccttctttgagattgaattaaaaaacagtgaggtatagaaataggtgtatagg

SEQ ID NO: 892278 - DNA, 609 bp, Homo sapiens
gcatataaaaagtacacctgtattgggtgcatatgtatttaggatagttagctcttcttgttgcattgatccctttaccattatgtaatgtccttctttgtctcttttgatctttgttggtttaaagtatgttttatcagagactaggatggcaacccctgctttttttgctttccatttgcttgttaaatagtcctccatctctttattttgagcttatgtgtgtctttgcacgtgagatgggtctcctgaatacagcaccctgatgggtcttgactctttatccaatttgccagtctgtgtcttttaattggagcatttagcccattttcatttaaaattaatattgttatgtgtgtatttggtcctgtcattatgatgttagctggtkattttgctcgttagttgatgcagttttcttcctagccttgatggtctttacattttggcatgattttgcagcgactggtaccggttgttcctttccatgtttagtgcttccttcaggagctcttgtaaggcaggcctggtggtgacaaaaatccctcagcatttgcttgtctgtaaagggttttatttctccttcgcttgtgaagctagtttggctgg

SEQ ID NO: 892279 - DNA, 408 bp, Homo sapiens
aacggtgtccccaaggcactgttcaccccactccccacccagacaaatattgttctgctttctatcactatagatgagtctgacttttctggagttttatgtaaatgtaactatacagtatattctctttttctgcctggattctttcactgagcataattattctgggattgatccaygttgtaatgtttatcagtttttattgatgaataatattccattgtagaaatattccatggctgtttattctttcacctagtggtgaatatttgtgttgcttcctttcagatttgggcgattgcaaataggctgctatgaatatttatgtacaaggctttgtatgaatgttgaggaaaagaagccgcaaagataataaatgtcttcatttatataggatacaacgtgagg

SEQ ID NO: 892280 - DNA, 610 bp, Homo sapiens
gtgtatatgtgccacattttcttaatccagtctatcattgttggacatttgggttggttccaagtctttgctattgtgaatagtgctgcaataaacatacatgtgcatgtgtctttatagcagcatggtttatagtcctttgggtatatacccagtaatgggatggctgggtcaaatggtatttctaattctagatccctgaggaatcaccacactgacttccacaagggttgaactagtttacagtcccaccaacagtgtaaaagtgttcctatttctccacatcctctccagcacctgttgtttcctgactttttaatgatcaccatcctaactggtgtgagatggtatctcattgtggttttgatttgcatttctctgatggccagtgatggcgagcatttgttcatgtgttttttggctgcataaatgtcttcttttcagaagtgtctgttcatatcmttcacccactttttgatggggttgtttgtttttttcttgtaaatttgtgtgagttcattgtagattctggatattagcgctttgtcagatgagtaggttgcaaaattttttctcccattttgtgggttgcctgttcactctgatggta

SEQ ID NO: 892281 - DNA, 528 bp, Homo sapiens
tgattttcctcttgcataatataacaaatatttataataattataaaatacttccatttgctattaaaattttaagcgaggtataatacatacaagaagtcttcagtgtacaatgcaaataaatttgatacatttgcatatccatgtaaactgaatcaaaccacattagaaactgctaagcaacttaggaagttgttgaaactctattctcctaaattaattgccttagcctcaaattagtattttgaacatgttcaaaacaacgcaagaaccattcacattttaacttatttacactacacccaccttatttactattgtygtcatatattttgcttcaacatacctataaacattgcaatattatatcattatttcttctttcaaaagttgtcttcatgtttaccaaactattttcctttctgatactttcttcttacttttctctgtttccatctagggttgttttctttcagcttgttaagcttcctctattatttattatagctcaaccgataagacaaatta

SEQ ID NO: 892282 - DNA, 591 bp, Homo sapiens
tctgtgcaattttatcacacgtgcagatttatataaatataaccacaaacaagacacagaactgttccatactaatcataaggtttcctcatgctacctttttatatctacaaacccagtttgacccaccaatgcctaactccaggcaaccactaatctgttcaccatctctataattttatttaatgaaggttacatagatrgaaacatcctttggcaacactactcctcatcctctgcccctggtaaccaacattctactcagcctctatgagttcgactttttaagattctacatataagtaagatcatgtgttatttatctttctatgttgtcacaaacaacgggatttctttgtttttatggctgaaaagtattccattgtgtatttgtaccacatttcctttattcattcatccattgacgaacacttagatagattccacatcttggctattgtgaacaatgctacaatatacataggagtacagatatctcttccacatagtgatgtgatttcctttggctttatacccaatagtggattgctagattacatggtagctctatttttaacattttgtggagcc

SEQ ID NO: 892283 - DNA, 628 bp, Homo sapiens
tcaggtaatgtaatacaagaaagcagggctgtagacccaagaagaatctgtccatgactcttgaaactcaacaaactaaaaagaacacccccaaaaggagtgagtcgtgcctttgttctgtgttatttaaggggtttgaatcattagaaaccttctctagattttccttggtaccaaagatggcaaaggtggaaggaggaataaagtggaagaaaaggaaacagaagaacaagtttttaagacaagaagcaaacagaaaccaaatgcatgtctttgttgttgttgctgctgcggttgcagctgtgaggaattttagccarttcagaggtcttgttccctataattcgaaattctcactcggattagatcaagtcaggtagcgttggtcaaattcgatgagagaaagactggaacaacaacaacaacaaaaaaacacccaacaatatgattaatgagcactctaatgtaattagataaattaagaccagttggttggcaattttaacttttagtcattgaggacaatttctaagacaaaactccccaattcagctacttacctaggaatggggccccagctcaagactgcgctttaccatcttagaagcaagaagaaaaaaacctctca

SEQ ID NO: 892284 - DNA, 651 bp, Homo sapiens
ctcttcattgttttctagcttcttgtacttgtacactcaatgtgatcttttcatggatttaagtactgtgttgttagagtatttttaaaaactttattgtttcgattatttttcacttttattattcaagatgataaatgtcatcaagctggacaaaactttttttcaaagaaagtgagccaaaaattggaattaaaattacaattttatagaatatattggtttgccttaaaacatctctatgtaatacctcttcagtatgccttttaataaatttcttccaggtggctctagtggtaaaaatgtaatggggagtggtaaaaatcagattaattcattactctcagtgtcataaattttaaggaaggaatgtaaaaatatcttgttttggtggtcatagaaaaattgataaagatgaactgcttcttagagagaaaaaagtgagtaaattagctaagacattcattctttgacgttttacagcagatctgtaggatgcattmatcttgcataactgaaagtttatacagttaaacagcaactccccatcaagttacaacatgcatatagttaacaatattgtactgtacacttaaaaatgtattaaaatggtagagctcatgttagatgttcttattttaaaaaagaaag

SEQ ID NO: 892285 - DNA, 568 bp, Homo sapiens
tttcttcccagaaaatgtttttttttcctatcacatagtgaggctgcaaattttccaaacttttatgctctgctttctcttgaatgattttctgcttagaaatatcttctgcaagataccccaaattatctctctcaagttcaaagttccacagaactctagagcagggtcacaatgccaccagtctctttgcatagcaagagtcctttactccagttcccaacaaattcctcatctccatttgagacaagctcagctgggactttattgtccatatcactatcatgattttggtcaaagccattcaacaagcctataagaagttccaaactttcccacattttgctatcttcttctgaccccgccaaattgttccaagytctgcctgttaccctgttccaaagttgcttccacattttcatgtatctttacagtagtgccccattcccagtaccaatttactgtattagtctgttctcacactgataataagacatacccaagattgggtaatttataaaggaaaggtttaattgacttacagtttcacatggctgaggaagcctca

SEQ ID NO: 892286 - DNA, 568 bp, Homo sapiens
tttcttcccagaaaatgtttttttttcctatcacatagtgaggctgcaaattttccaaacttttatgctctgctttctcttgaatgattttctgcttagaaatatcttctgcaagataccccaaattatctctctcaagttcaaagttccacagaactctagagcagggtcacaatgccaccagtctctttgcatagcaagagtcctttactccagttcccaacaaattcctcatctccatttgagacaagctcagctgggactttattgtccatatcactatcatgattttggtcaaagccattcaacaagcctataagaagttccaaactttcccacattttgctatcttcttctgaccccgccaaattgttccaagttctgcctgttaccctgttccaaagttgcttccacattttcrtgtatctttacagtagtgccccattcccagtaccaatttactgtattagtctgttctcacactgataataagacatacccaagattgggtaatttataaaggaaaggtttaattgacttacagtttcacatggctgaggaagcctca

SEQ ID NO: 892287 - DNA, 603 bp, Homo sapiens
ccatagtggaaggtcatgtaaaatgtaaatgaagctttgaaatgatgtatttgtgtcccagtttcacaatttatctgttgaatgactatgggcaaagacatgcaccttattatctaaagttttgtaaaattaagatagtaccatctacttcctgagggtgtagaagcaatagaaatcctatacccaaaaaatttttaaaaagagcctagctcatgttattgtaaagatttagtagtataacaattgctctatttttcaccatgtaagttagcaaattttgaataatataaatttttcttttcatatatatttttcaaaattatatgttaattaacattctcttttttattaatatttggttttctatgagaatccttcatccatggaatctattctttcctataataaccaagatttattgtttccttgctattattaatagtacacagtccctactayatctctttatctaagaattatctctattattatgtgttttagtagctctatgactttattttagtcaaattttcttagatcttttcttttactacctaatatttttcttctaatttattttaaatgttccttgctttgaattta

SEQ ID NO: 892288 - DNA, 616 bp, Homo sapiens
tgtctaggaagttccaaactttccctcatcttcctgtcttcttctgagccccccattgttccaacctctgcccattacccagtcccataactgctttcacgttttcaggtatcttcatagcaatgccttatttactagcaccaatgttctgtattagtctgttctcacactgcttaaagaactacctgagactgggtaatttttttttttttttttttccagaaagaggcttagttggctcatgcttctgcaggctgtataggaagcatggctgaggcggcctcaggaaactttcaatcatggcagaagccaaaagggaagctggcatgtcttaaatatctggaacaggagtaagaaagagtgaaagaagtgctacacacttttgaacaatcagatctcgtgagatcttactcactatcacgagaacrgcaaaggggaaatccaccccatgatccaatcacctcctactaggtccctcctccaacattggggattacaacttgacatgagatttaggcagggacaaaaatccaaactgtatatgaggagactaagcatgaacctaacagcatgagttcattttcacgctgttaactgctgactttctctactactg

SEQ ID NO: 892289 - DNA, 620 bp, Homo sapiens
gaaaatggtctgtaattttcatatcttaaaatttccttgttgggctctagcatctaggttatgatgctctccaaaaatgagttataaactcttattttttcattctcttgaagagtagatgcaagattagtgctatttactacttactattttgaaaaaataaaacaccaataaagccttcttggcctaaagtgttctctgtggcaagtttgcaaataatggtttcattttttaatagatataggactactttgaggtattttttcatgtcatctatgttatcaaattattaatgtgctttttcaataatatcgttattatcttagtgaaatttcaaggatgtataacattgtcttgatttttattcctgataaagtgatttacgrtgtatcatcaatccctcttgctaagccttattggttttagttaactttcatccacctgttaatatatctgaagaaaacttgtaattatttccatccgtgctgcaaaagcttttgaataaaatcaacactcagtcatgaaaagaacactcaaggacataaaaatgaaggtatacttcttaacattataaaatatgccaattactaaatctaatgtcttagtaaaaaaaaaaaaaa

SEQ ID NO: 892290 - DNA, 620 bp, Homo sapiens
gaaaatggtctgtaattttcatatcttaaaatttccttgttgggctctagcatctaggttatgatgctctccaaaaatgagttataaactcttattttttcattctcttgaagagtagatgcaagattagtgctatttactacttactattttgaaaaaataaaacaccaataaagccttcttggcctaaagtgttctctgtggcaagtttgcaaataatggtttcattttttaatagatataggactactttgaggtattttttcatgtcatctatgttatcaaattattaatgtgctttttcaataatatcgttattatcttagtgaaatttcaaggatgtataacattgtcttgatttttattcctgataaagtgatttacgatgtatcrtcaatccctcttgctaagccttattggttttagttaactttcatccacctgttaatatatctgaagaaaacttgtaattatttccatccgtgctgcaaaagcttttgaataaaatcaacactcagtcatgaaaagaacactcaaggacataaaaatgaaggtatacttcttaacattataaaatatgccaattactaaatctaatgtcttagtaaaaaaaaaaaaaa

SEQ ID NO: 892291 - DNA, 623 bp, Homo sapiens
ttaattttgtttggggaatggcaaatgcaagtgcataaaaatacaatttatttttatgttgaccttatatcctgaaaccttgcagaacttgcttattagttacagtaatttttaagtggattattgaagattttctatatataagatcatgtcatctgccaatagagatggtttatttcttcatttccagtatggatgccatttacatcttttgcatgcctaattaccctgaatacaaccttcaggacaatgttgaacagaagtgaaaaaatccttgttttcttcgtcattttaggaaaaaaacattcagtgtttcrtcattaagatattagctgttagatttacaagctcctcattccactatgccaaaagtcccatgtccaacacaactggctattttcggccctttgcatcaccatatgaattttaggattagcttgtcaatttctacagagaaggtaattaaaagggattttgatagggattgtgttgaatttgtaggtcaattagatgagtattgttatcttaacaacattaagtcttttgattcaaaagcatgggacatattctaaggcagacatctatccattttttctcagctttggacctccggagagcctcta

SEQ ID NO: 892292 - DNA, 659 bp, Homo sapiens
ttaaagacatgtcagtttaagcccatagctcttcaatcactttcagttatcaaaatcatctcattttaggccataaagttcagttcctgtttataggcacctctcaatttcaaattcaaggcacagctccccatcctgctcacccttgccaagcccagactagactggagcattaygggacacagtcaactctccctgacacacccctcctgacttgctatgcaattcctgctgatgttggggtgggaggagagagcaggaagatagcactggctccatacaagccggtggacgtttgaccctttccttggttggttgtaactacttttctgttttctctcatctggatatggatggatgatggtctcaacaggcctcatggatgtgagactcactttcaaactgattctgaggtatgtggagtcccttaagaggagcgatcacatcttcaggatggccccactatgggtagtctaagctgccctccctgggaggccttggctccttgctccttggtgatggcccccagtgagcccacatcccctacctcatcaacccaaaaaggcccataatcctggaattggccagcatacgtaaaatctatctattttctgtacctctaggaataagatgtgtgaagggatggtttttgcctcctc

SEQ ID NO: 892293 - DNA, 618 bp, Homo sapiens
agttttggtgaagcgaaagcataatggacattaatttgccgattggtgctgaaagtataaattgattcaacattttgcagggatgttagtcaatatgtgtgaaaattatacactaatatctctttacacagtaattaaagtgctaggactttttgaaaagaaaacatgtctcaatgtgcccaaatttgtttctgtgaaaatgtttataaaaaatgttgttcattgaaagcaatacagtatttaacmatagagagagtaggcctgtaaatcatggaacttattcaatgggggatgtctgaagagggtctaaaaataatctatatgtttaaataaataaattaaaagaaatttattttaaaatcctacatttaattatattaaaaattatcaatttaggtgataggattattggtaaatttgaattttttagcatttttgtttatgtgccaatttttctattactgtcttttactccttttgtagataaaatatactgttttaacataaaataaatgtcattcataattcttatacagtaagaacatttttttgagacagactcttgctctgtcacccaggcgggagtgcaatcatagctcactgcagcctcaacctccc

SEQ ID NO: 892294 - DNA, 632 bp, Homo sapiens; identical to SEQ ID NO: 889378

SEQ ID NO: 892295 - DNA, 676 bp, Homo sapiens; identical to SEQ ID NO: 889379

SEQ ID NO: 892296 - DNA, 562 bp, Homo sapiens; identical to SEQ ID NO: 889380

SEQ ID NO: 892297 - DNA, 605 bp, Homo sapiens
ctggaaactctaaaaatcagagtgcctctcctcctgcaaaggaatgcagctcctcaccagcaatggaacaaagctggacggagtatgactttgacgagttgagagagaaaggcttcagaagatcaaagtactccgagctaaaggaggaagttcgaaccagtggcaaagaagttaaaaactttgaaaaaaaattagacgaatggataactagaataacaaatgcagagaagtccttaaaggacctgatggagctgaaaaccatggcacaagaactacatgacaratgcataagcctcagtaaccgatgtgatcaactggaagaaagagtatcagcgatggaaaacgaaatgaatgaaataaagcatgaagagaagtttagaggaaaaggaatagaagaaatgaacaaagcctccaagaaatatgggactatatgaaaagaccaaatgtatgtctaattggtgtacctgaaagtgacggggagaatggaaccaagttggaaaacactctgcaggatattatccaggagaacttccccaatctagtaaggcaggccaacatacaaattcaggaaatacagagaatgccacaaagatactcctcgagaa

SEQ ID NO: 892298 - DNA, 612 bp, Homo sapiens
gaggtcagacattgatagtgctgtggactgctccagggacgtaagcatgatctttagagaggtgactctaatcaattgagggcaaccactggacagaaagaggtccagaccaaccatacacagagacatcatacaactacactttagcaacctctccaaataacatgtctcttagtgaaacttgggaggttgmaagttaaaaacataaaatccagtggcatttatgtatcctaggcacttacatttgtctgattcttccaacttgcctttgcttggttagagttttgggtagataagaggtggatttacatgtgctagtgtgagaactttgatacactcatttagacattgacctactatcttgtttgaaagctaaaacccaaagaaatttgtcttcttacataaaacaaattcagcccttgccttccttgtagattacatcttccactagcagtaataaaaaagtaacaatatgcataagtcaaagtatcttcttagatcctctgtagtgttttattatttagttgtgttaattaaagtaactgtctcaaaatttcaaggaatgcctgagaagaaattcatgttcaaaggctgccctcttgtgacaatgtg

SEQ ID NO: 892299 - DNA, 595 bp, Homo sapiens
catatttttatttacaaggcacttcacaaatgttgaccacaaagatgtttctacctagcagaaataattatagttacatatagttgtctaggaatatcttaaacatggggtattaaaataactttcaagaacaagaagaaatgttacaccaggcatttttgcaactagtgctctatttcagtgcaatatttgtggcaattaaaaaacataaatggcttggatatatagctaagttatcaaaggaaaaatatgcaaaggcatgattattttataaatgtgccacatatgtgacttgaggtacaaatcctctaagtttaaaattgtctttttaaaaaagaaatcaaaacagacaagtgggcaatgagttatggatactattataggktaccctgataaactagtaagaagacgacttttggtactgaaaattccaattaaccacatgcccccattaaggccatgatcactgccaatttttactcacaaaggctggagctagagttatatggaattccatatgtatctaaaccatagatttatcaattatcacttaaatacaacttggaagacactatccagaatttgtagggcttgg

SEQ ID NO: 892300 - DNA, 526 bp, Homo sapiens
aggaatgtttcaaataaattgtttttttcttgtgccttttaaattttgtgatttgtcaatgagatgctgacatgtttttaatgaagcatgccttgtaaaataataagtgaatgaaaactacacagtaatatttacatcaacaaagctagaagaagactgtatgtctcaagaggctccatcatctacccagtggccacttsaccaaattaagatccaaataccaaaaagaaaagtaattaaaatttgtgttgtatgccttataagaccaaacctataaaatgaggggaaacttcacaattacttgtaatttgctctgtggaattgtaacagatggattataaagatgattccatgataaacatgtaaatgtggttactaccttctgtgctttcttggttcatatttttattgtttttttctttataaacagataattcattcttatctatggcaatgcaaacttttcagatgtattgaatatgtcatagtgtttttctattgtaggcatctctaaaaaagttataga

SEQ ID NO: 892301 - DNA, 670 bp, Homo sapiens
tccctttgcaatagttttaattgcaaggaacagaaacacattcatgttccttcaattcaaaaaaaaattgttattgttgtttttgtttcccttaaaataaaatgctaaaattaaactcactggaatcaggaaaagctatcctgccagacatgatgcaaggaacagaaacaagtatagtgagattggaggaaactggcatatagttcaaaaacaagatcactcaggaccaagatggttctggggactggtttctagccttgtctattagaagccactgcttgttaatccgtgtactagtaatctctccataatagtgactcagttccaaccaatgtgyggtattttcattattcctataaaccacacacctcctctgtattataaaagtctttcaaaaggcactcttcacagcttctgcttacttatgagcatttttactttttggcatctgcaaattggcactgttcattacgtttctgcctgtattagtgagtctctttgcatctcaagttcaaattactgagttgatccagttaatcacaatcatctttattgaaaaaatcctctcatactaggacattccatgggacattacctagcctataaattgggtactttggagtcagatatcctcatcttatccaatcagttctttccataattatggatc

SEQ ID NO: 892302 - DNA, 587 bp, Homo sapiens
gctgtgcactacctgagtccagttaacaacgaagtttttgttatacaagatgaattgagaacatgttctttcttctcaaaataagtgggtctttccaatgataatacaaaccaaatggtaaaaacacaattcaatgcagctttctatgctttcccaaggtargtgtagtagattgttccattggcgttctcccatcaatcacacttggtagtatttacactcctgtgtataccccttgcccagtgactctgaggttggccatgtggtttgcatgaccaaggggacattagtaatgtgatgcaagcagaggcttgataagtacttgcacatggtctttgtcttcttgaaatgctgccttttgaatctataaaaccactctctatgagaaaactcaagctagccacaggtgtaactcgatgggtaggaaacaaaagatcaaaacaatatccagatccaagatcccaagtgtatggtgctaggtgacctattttaatcagcccgagccattccagtcctagcagtttaggctgtagatattgtacagcaggtaccagctatctctactgttcccagtctaaaattctgac

SEQ ID NO: 892303 - DNA, 636 bp, Homo sapiens
atactgtaacaactaccagaagagcagacctttattataaataggaattatggaaagaaaatcataccttccaagatgtaaactcaagtttccttcttatagaaaaattccttcaatacacataaactctgactgtttcatgtgcaaaaaatcataccattgtgtgagctcacagatacatctgaccataccttcattattggtaacattttctgctactggggctgcattactggttcccgctgccatgtccaaaagaggttgaatratttcaattttgaacactccatttttttgccaaaggttcagcacacgaactattttactctgttacgcatgagaaacacaaatatacaataaatatttgcataaataaccgattatactcttacaaaaaaaagagaggaaaactccctaggctaatatttccatactatgtgtgtttcataaacaaggaaaaaaaaaaatcagaattacaacctggttaaactaattagtctttcttcagtggtatcatctagagtaaggaacagagatggactatagacccagacaataaaaagaaatttattatttgacattttcattttattttacttatggttacaaataaactatcactgaccccccaaaaaa

SEQ ID NO: 892304 - DNA, 709 bp, Homo sapiens
caatcaagttgacccaaaaattaaccatcacattcccttctcccagtcagccactgggaggaattgacagatctcagctcactcttcagaaagtgttatagacccctgctctaagatccaatgttcagaagagactgaactagtgcaaatgtgttattcactacccatcagcaggtcagargggagtagttcactggataggctcgtagggagaagctccttaagaattaaactctgataacaccatgtgttggcaaggatatggaggaccaggattccaccatatgctgtggttggtagtgcagttggtaaaccactatggtgaggtctttggtgatatctaggaaagtgaacaatgtgcacactctatgatcaaccaacttcactcattggcatttttcctggagaaactgacacatgtgcacaagaacgtgtattgcagctgtgatagtgaaaattagaaacaacaatgcattcacaagatcatggagaagagggctgtgagagagagggactgtggaggtttggtggggaagggaaaaggatggtcaactatagacggaaagcagggtgggttgcagagggaagccttgggaaatgaaagtggcataatggggtctggcagcagagaccttaggagctgggctgctgtcctgttttttggatgaagagagctttggcttcagtagaagcagagttccagcttggg

SEQ ID NO: 892305 - DNA, 709 bp, Homo sapiens
caatcaagttgacccaaaaattaaccatcacattcccttctcccagtcagccactgggaggaattgacagatctcagctcactcttcagaaagtgttatagacccctgctctaagatccaatgttcagaagagactgaactagtgcaaatgtgttattcactacccatcagcaggtcagaggggagtagttcactggataggctcgtagggagaagctccttaagaattaaactctgataacaccatgtgttggcaaggatatggaggaccaggattccaccataygctgtggttggtagtgcagttggtaaaccactatggtgaggtctttggtgatatctaggaaagtgaacaatgtgcacactctatgatcaaccaacttcactcattggcatttttcctggagaaactgacacatgtgcacaagaacgtgtattgcagctgtgatagtgaaaattagaaacaacaatgcattcacaagatcatggagaagagggctgtgagagagagggactgtggaggtttggtggggaagggaaaaggatggtcaactatagacggaaagcagggtgggttgcagagggaagccttgggaaatgaaagtggcataatggggtctggcagcagagaccttaggagctgggctgctgtcctgttttttggatgaagagagctttggcttcagtagaagcagagttccagcttggg

SEQ ID NO: 892306 - DNA, 589 bp, Homo sapiens
aaaataaacaaaattagcctagtatagtggcatgctcatgtgatctcagctagctactcaggatgctgaggagggaagctctcttgagccctggaggtcaaggctgtagtgagccatgactgtgccactctactccagcctgggtatctgaacragatactgtctcaaaaaaaaagaaaagaaaacaaaagaaaaaaaaagccaggatttttattgggattacattgaatctatagatcaatttggagataactgacatctgcataatattgactctttccattcatgaacatcatctctctctttacttactaataattactaattaataatataatattagcaatattagttttgtagtttctgtatagaaaaattttctttgggtttattcccacgattctgattttccgtgctattgtaaatgctgtttttaaaatttcattttctaattgttcattccttatatataaaatacaattgatttttaaattgaccttatatccaatgaccttgctaaaattactcaactgtctgcaagttcttcagagttttatacatacaattatgttgtgattatgttgtgtgg

SEQ ID NO: 892307 - DNA, 609 bp, Homo sapiens
gctcactgcagccttgatctctctggctcaggtgaccttcccacctcagccttccaagtaggtgagactacaggcatgcaccgtcacacctggatactttttttatttttttggtagagatggggttttgccatgttgcccaggctggtctcaaacccctgagctcaagcgatcctcctgcctcagcctcccaaagtgttgggattaagtgtgtaagccaccacacccaacccatgaaggcccttctaaggctgcaaaattgttcagcagragaatatacagcatacccacatgtgggcaaagaatggcagggatgacttcaaaatgcagacggtctgtcttgcttgagttgtgggactgtgatcttttcttatgctatagcccttattttacaaagtattgcggtaatgtttttgcaatatgaagaattcttttacgtagctttgtacttgatttccaacataccaaataatagatcccagaaaataataatgtgcttggtcccccgatttttctatccttctcttcaaagttattttttcagttttctaaagtaatcttctttgcaaggagaagccataaaatgtcctactttctcaaaagctttaa

SEQ ID NO: 892308 - DNA, 635 bp, Homo sapiens
tttttaatttttgactagataatatatgcacacgttttaaaactcaaaatgataggaaaatgctcacattaagaagtctggctcctaatctcctcccactaccctcccccacaggtaactactttcatcagttccttttatatcatttcatgcttttttttaatgcaactacaaacaataaactttctgctttgatttgagggctgccacactagaaggcagaacttgtcttcactctataagctcaaattaacagatacattcccagcctccccccgcagctagggcgaaggcataagatttaggctcaaccaatgccaaacaccctccccagactttgaattgaaaggtggtgacaaaccgaagcagacatagtgaagaatmttctctagggcagcagcagccatatctgatttccagagacagcagcgctagtgtttcaagctgcagcatcttgggttcagggtcgggggggtctgcagcatacactaaggcatttgcagagccagattaatggttaatctaatgacttaaatttggaggtgccttactataacaagcctcttccaaggcctaggagggtgttccagaaatgtgttcacatgtttttataaaagctgcaaaagcgagatatt

SEQ ID NO: 892309 - DNA, 657 bp, Homo sapiens
accatatcaataagccactccagccacctgggtattttgttatagcagcccaagcaggctaggtacatgatgaatatgtgtataaggtgcataagaaatgtgtatgttgcttcactatgcccaacatctacctatttattgaaatgtgtgcgttgggtcactgtgcctctgtatctacttgttgatagaaatgtgtgttgggtcactatgyctaactgagggggaactgaggttagaaattgatggggggaaactcaatctggttttcctctgctctcactccacaacaacaaacacagaagacttctgtgatcaaatgtgtgtgtggttttccccacacaccaaggacgcaatccattctgcaacaagacaccaactggtgtcctccagttcagttccgatgccatctacctggagctagcataagacagaccccatagggtgagggctcagtcccacaaggctgccctctgcttctggggcaatcacaagccccaggttattttgcctgtgctttttgattcactggctataaattggggttccatgaccccctccttgagtttgattaaattgctacgactgctcacagaactcagagaaacacttatattcaccagtgtattacaaaggatattttaaaatatataaataaac

SEQ ID NO: 892310 - DNA, 639 bp, Homo sapiens
ttttcctttattccaatgtcacaatctccaaagatatcaggaacctgcatttaagagcacctgtcaaagttctatagctgattatcaaccatcttttgaaaaggaacaatacaagacaacaattatctgtgaatgacaaaatgttcaggctagttacagttaaaaacttgattgacagagaaatttggctacttgtatggtttacaataacttaacataataaccttaattatgattgataacatatactcagacattagaattttagaaatcctawgcaattttggaacatacattaatattattcaccaaaatagaacctgaaaattaaatgttatttttattttggcaatcccatgtaactaaacatgtcaaataatcctgtttacctctcttttggatgttccaggggccctctgtagcatccaaaagttaggggctagaaaagacaaccttgaagctaaagtttgatttttggggaagcctacaaacatgttaaaggtttaaaacatttgatattatgcaatagaattccaggttaccacaagtcatttatttagccaaaataatgatttaaaacatttttaaaaaggcaaaaacctttacatactaagagggaagacttagctttccaaacaa

SEQ ID NO: 892311 - DNA, 649 bp, Homo sapiens
tttgtggcttttccacgtgcacggtgcaagctgttggtggatctactattctggggtctggagtatggcggccctcttctcacagcttcactaggcagtgccccagtagggactctgtgtggaagctctgacctgatatttcccttctgcactgccctagcagagattctccatgaatgccctgcccctgcagcaaacttctgcctgggcatccaggcatttccatgcatcctctgaaatctaggcggaggctctcaaacctcaattcttgacttctgtgtacctgcaggctcaataccacatggaagctgccaaggcttgggacttccaccctctgaagccacagcccatgctgttacattggcccctttcagccgcggctggagtggctgagacacagggcaccaagtccacagcatggggatcctgtgctgggcaacgaaaccactttttcttcctgggtctccgggtctgtgatgacctggtgatgtgatgttccgtgttgccatgaasgtctctgacatggcctggaaacattttccccatggtcttggggattaacattaggctccttgctactagtgcaaatttctgcagccagcttgaatttctccccagaaaatgggtttttcatttctgttgcatagtc

SEQ ID NO: 892312 - DNA, 644 bp, Homo sapiens
aggctgcaaattttcccaacttttatgctctgcttctcttataaaactgaatgcccttaacagcatccaaatcactcttgaatgctttgctgcttagacatttcttctgtcagataccctaaatcatctctctgaagttcaaagttccacaaatctctagggcaggggcaaaatgctaccagtttctttgcttaaacataacaagagtcacctttgctccagttcccaacaaatttctcatctccatttgagaccacctcagcctggattttattgtccatattgctatcagcattttgggcaaagcccttcaacaagtctctaggaagttccaaactttcccacattttcctrtcttcttctgagccctccaaactgttccaatctctccctgttacccaggtccaaactcacttccacatttttgggtatcttttcagcaatgccccactctacttgtaccaatttactgtattagtccatttccacactgcttataaagacatacccaagactgagaagaaaaagagatttaattggacttacagttccacatggctggggaggcctcagaatcatggaggaaggcaaaaggcacttcttacatggcggcagcaagagaaaattaggaagaagcaaaagcg

SEQ ID NO: 892313 - DNA, 644 bp, Homo sapiens
aggctgcaaattttcccaacttttatgctctgcttctcttataaaactgaatgcccttaacagcatccaaatcactcttgaatgctttgctgcttagacatttcttctgtcagataccctaaatcatctctctgaagttcaaagttccacaaatctctagggcaggggcaaaatgctaccagtttctttgcttaaacataacaagagtcacctttgctccagttcccaacaaatttctcatctccatttgagaccacctcagcctggattttattgtccatattgctatcagcattttgggcaaagcccttcaacaagtctctaggaagttccaaactttcccacattttcctgtcttcttctgagccctccaaactgttccaatctctccctgttacccaggtccaaactcacttccacatttttgggtatcttttcagcaatgcyccactctacttgtaccaatttactgtattagtccatttccacactgcttataaagacatacccaagactgagaagaaaaagagatttaattggacttacagttccacatggctggggaggcctcagaatcatggaggaaggcaaaaggcacttcttacatggcggcagcaagagaaaattaggaagaagcaaaagcg

SEQ ID NO: 892314 - DNA, 553 bp, Homo sapiens
tactatggcaatgatggaggaattctgcaagtgcgggaatagtggtactgatcaaagcattatgaataggcatgttagtccattttgtgttgctataaaggaatacttgaggctgggtaatttatttttaaaaagaggtttatttggcttatggttttgcagactgtacaagaggcatggcaccagcatctgcttctggtgaggcctcaggaagcttttactcrtggtagaaggtggaaagtgagccagtgtgtcacaggctgggaaagggtgggggggtgagagagagagagagagagggagagagagaatgatgctaggctcttttaaacaatcagatctcacgtgaactaaaagagcaagagtgcactccttacctcagggagggcaccaaaccattcatgaggatctgcctcgtgaccaaaacacgtcccactaggccccaccttcaacattgagatcacattttaacatgagatttggaggggacaaacatccaaactatatcaatagggaaggcaaatctgtatcagagatatatctatctctgtga

SEQ ID NO: 892315 - DNA, 610 bp, Homo sapiens
tcccccactgcttcagggcattcacagctaaaggtatacttggtcagagcagctaaaggtatacttccaaagtgaatcaatagcagtaggaaaacgtagttcctagcatttaagatagtggttcctcagtgtgacagagattgcygggtttttaccccaatattcattctcctctatttttaccattctatttcctaatgggctccaattggtggcacctggccatgcatctaaagactacacttcccagccttacttggctttaggtgtcgccatgtgactaagcactggccaatgggatgtgagtagaagtgatacacgcagcctctgggccctaccttaagagaaggtggtgtgccctctacttccccctcttcccactgttgactggaatgcatacatgatggtgggagtcacagcagccatcagcacaagagaggaaaggcaacacaggatggatgccaatgcaacaagataaaaagacactgtggagccactgtctgggctgagggatgctccatacaggctgttacatgacagagaaatgttggcacagctgttaagctgacatgagggttcgtggctaagtgatctatcaataaaaatactt

SEQ ID NO: 892316 - DNA, 608 bp, Homo sapiens
accctctgatccaggaattctacttctgggaccatatgctactgagctattccttcaaagtgtgcaagaacatatgtacaagggggttgattatattattcccaaaaatgaaacatgataacctaagtttccatcaatagagcactgtttgaataacttacagtgcatcggttaaaaagaatgatgggagccatatgtataacatgccctataactacatctatatctgtatgtttctatataaaattrtctagaagaggctgggcacagtggctcacacctataatcacagcactttgggaggccaaagtggtcagatcattggagcccaggagttccagaccagcctgggcaacgtggtaaaaccccatctctacaaaaaatacaaaaattagccaggcacggtggagcatgcctgtagtcccagctacttgggaggctgaggtgggaggatcacctgagcccaggaggtcgaggctgcagtgaaccatgattgtgccactgcagtctagcctggacaatggagtgagaacctgtgtcaaaaaagtaaaaataaaaatagaattatctagaagaatgcatgccatgccatccagaagatgaaaaga

SEQ ID NO: 892317 - DNA, 643 bp, Homo sapiens
tttcccaaagaaataatcatgttcaaaactcaatgaaatgttatctcaatgagattgtaatgttgctcagtctttcagaagtcataaaaatagtcatactttttaaactagtaaatgcaattctaggacccaagactaagaaaactgtccaaaatatgggaagacatttttatttatacttttttttttttttttttgagacagcctgttgcccaggctggtgtgcagaggcgtgatctcagctcactgcaacctctgcctcccaggttcaggcgattctcctgcctcagcctcttgagtagctggaattacaggtgcacgccaccacatccggctattttttgtatttctagtagagatggggttttgccatgttggccaggctggtctcgaactcctgacctcaaacaatccacttcagcctcccaaagtgctgggattacaggtgtgagccaccacgcccgatctrtttatgttttagactttagttttaggaactagacttaggttgtagacctgaagttacagttggcatccccttgtttatgggagaccagcaaagaattgacttatgaatgatctgtcagggtagcccttcgcagatggctgagtctttttatccttccttggggatttggctgaa

SEQ ID NO: 892318 - DNA, 506 bp, Homo sapiens
actctctctctactaagaatataaaaattagccaggcatggtggcaggcgcctgtgatcccagctactcgggaggctgaggctgtaaaatccctttaaccctagaggtgcaggctgcagtgagcagagatcgggccactgtacttgyagcctggtcaacgagggagactctgtctcaaaaaaaacagaaaaggaaaatgaggataaaatacgataaattctttaccttggcccccagaagtgaattcagaattcagaaaagactagccagtgtaaggctgctgtaaccctagttgacagagaggagggattggggtggtgagtgggaaggctgtgtctccggaagaagaaatatacgtccccacctcactctaattaaacctgcttttccagcgcgataaatattcaagataacttttggtttgcatttcaataacaaagtcttgcaccactatcttcagtttaaaaaaaaagtttaatgtttgctctacgtttgaaatgcatgca

SEQ ID NO: 892319 - DNA, 624 bp, Homo sapiens
cttgggcatctaataataagctgttcaaaattaacatagccaaagcagaattcttttttttttttttttaagacagagtctcacttatcacctaggctggagtgcagtggcatgatctcggctcactgcaagcctcgcctccctggttcaagggattttcttgcctcaacctcccgagtacctgggattacagttgtgtgccaccatgtccagctaatttttatatttttagtagagacagggtttcgccctgttggccaggctggtcccaaacatctggcatcaagtgatccacccgcctaggcctcccaaagtgctgggattacagacttgagccaccgcacccagcccaaaacggaattcttgatgctgtccccaccctaatgcgcacaccccagtcctttctcgtcttagtaaatagcgctgtcaaacacccatttaggcaggccagaaacttcaaaggtgtctttgattccgcycttccaccactttatatctactccatcatgaagtcttgtagactttctgtccagaatatatcctgagtctgaccactcctaatcatttccactgttaaaacattaggccaccactgtctctcatgtgggtgttattgtggtcttc

SEQ ID NO: 892320 - DNA, 572 bp, Homo sapiens
aaaactgacaaggtaaacctgatacatgttgctatgtgtggatatgtaaagttaatctgattccaaatgagatgtgtggtaatgtgcttgatagtgtgcacgtgaactgtaaaccagtcatctagatgactataattataaacttactcagtaaagcccaagttagaatttttttcttctctttgttggattttcagtgtctataaacattgtttttaaaaatgaaaataggccgggcgcagtgactcacgcctgtaatcccagcactttggggggcccaggtgggcggatcatgaggtcaggagatcgagaccatcctggctaacatgatgaaactccgtctctactaaaaatacaaaaaaaaattarccaagcatggtggcgggtgtctgtagtcccagctgctcgggaggctgaggcaggagaatggcgtgaaccctggaggcagagcttgcagtgagctgagatcgcgtcactgcactccatcctgggcgacagagcgagattccgtctcaaaaaaaaaaaaaaaaaaaaaggaaatagtctgattttcttactgtataagtaataga

SEQ ID NO: 892321 - DNA, 681 bp, Homo sapiens
tctgtctggaaaaaaaaaaaaaaggccgtttgtgctcctatcaaactactaatgacattcttcacagaataagaaaaaacaatttaaaaattcatatgaaacaaaaaagagaatagccaagaatcctaagcaaaaagaacaaagctggatgcatcatgttacccaacttcaaactatattaygaggctatagtaacctaaacagcatggcactggtacaaaaacagtcacatagaccaatggaacagaacagagagcccagaaataaggccacacatctacaaccatctgatctttgacaaagctgacagaaacaagcaatggaaatagtcttccctattcaataaatggtactgggagaactggctaatcatacgcagaaggttgaaactggaccccttccttacaccatatacaaaaatcaactcaagatggattaaagacttaattgttaaacctaaaactgtaaaagccctggaagataatctaggaaatgtcattctggacataagaactggtgaagatttcatgacaaagacaccaaaagtaattgcaacaaaatcaaaaattgacaaacaaggcccaattaaactaaagagcttctgcacagcaaaagaaactatcaacagagtaaacagacaacctacagaaagggagaaaatatttgcaaactatgcatctg

SEQ ID NO: 892322 - DNA, 617 bp, Homo sapiens
aaaagtaggtcactgagacgggattttaggtgagccgggggtggggcaggagaggaaacttcagggagaaaggttgggccagattatgaaaaggtctagctcctgtacaaagtgaaaaatgatgtggattcaccaagctstcagaaggataatggcatcctttctgtgactatatggaatacatacatctattctactataagggatttatttatatctatattccatatagtcacatatagtatatatttacatctatattccaaatagtcacatatatagtatatatgtgtaactatatagtatatatgtatacatgtaaataaactgtctgtgtgtgcactgtgtgcacatgtgcctgtgtgtgtacaatacatgttcactgagcatttcacacacggtaaataactagggaaattagttcccttgtcatagtatgtcaaggaatttatcctacagtgcttaaaggaccccatgaggtatttaacaagcggaggggataattttgaaaagcaccagagaaaatacggaggacggatcaggcaagaacctgtaacaggaaggccaggtcaggggtgggaagtcacaggtgctaatgcccaacttaaggcaatgcc

SEQ ID NO: 892323 - DNA, 596 bp, Homo sapiens
gggtaatggaagaaagtgattattaataccagctacaacaattaagtagttacagaaatggacttaacggtcacaaatatttcctcctcattctgctatgaatgtgtgtgtgtgtacgtgtgtgtgtgcatgtgtgtgtatctttgttttctttcctctcctgttcccttaccatgcaacataagatccactgayttttgtcatagtatgtaagtattaatttcacaccacagtgtttaaattaggggtatcaagggaaagagtaaatatcactcaaggactttacttcctcttctggggaaggggtcagtgtatttttggttgtatgcaggatgattgtatcatattagatggaattatgacctcattattacctttatttggagattaagtatggtttaaggagatgtgtatgggtgcccaagttgacaagggttggagttgtggtggaaaactttatgtgtaaatttgacaggcctcaggatacccagattaagaatcatttctttgtgtgtctgtgagggtgttttcagataagagcagcatttgaattgatggactccataaagtagatggcactccccaatgtgggtggg

SEQ ID NO: 892324 - DNA, 598 bp, Homo sapiens
gcggcaatgagtgaggtaggagaggaaggcttggggagacacttcaaactgttacacttcaaactgtttctttaccaatgaatgctgagattatagtagacctcaggcctctagtggatcatttagcagataacagctgttcacacagcagaggcagttcatagttcctaattgtcctatcatcttccattctctcccaggttgaatctgttcttcagaaaacctggaatgaactttccaaatcatcttattgtaatgcttccctgtgttcgtctttcttgggctccccactgtggggattttatccccacaggataaaatcgtactgctttagcatggcctagatgaggcccttcctgacctggcccttgagcttccttactgaaatgctcactcacaaatatccttcacctgaatcctatggccacacagaactatttgttctgacacttygataccttcatgcctctgcacatgctttttctcctctgcttggaatgtcctaccccgttttcttctttgaaaacctctttgtcctcaactaaaatctcatctactgtgagacaccttttccattgctttcagagaaattaaaata

SEQ ID NO: 892325 - DNA, 651 bp, Homo sapiens
cctaccatgttctccaccatcctgaagcagctaactcgatagaacagtggaatggccttttgtagatgcagttatcatgtcagctaggtggtaataccttgcagagttagggcaaggttctccagaaggctctctatgctttgtatcagcatctaatacatggtactacttctctgatagccaggattcttgggtccaaggaaattggagtgactcactattacccactagcaaaattttgcttcttattcttatgactttatgctctgctgggctagaggtcttatttctggaggaaggaatgcttccaccaagagacacagcgatgattccattgaatagaaagttaagacygccacctagccactttgggctcctcatgcctcaaaaaccacaggcaaggaagttgtgttattggctgggtgattggtcctgattaccaaggggaaattgtactatagctccacagtgaaggtaaggaagagtatgactggattataggagataccttctggtatctcttagtattactatgtcctgtgattaaggtcaatggaaaatgacaacagtccaatccaggctgggctagtaatggcccagacctttggggaatgaatgtttgggtcaccccactgggtaaagaaccataac

SEQ ID NO: 892326 - DNA, 638 bp, Homo sapiens
tgcatagcaaagactctgtgtatgtgaagccagattttaaaatatggtaacaagtgtctgaaaatatgtggctcaatttgtctcccggttacttttccctctccccctttaaaatgtagaggaaggagaagaagagataagaggtttgtgagtgaagacaagggccctttaaggcctgggaagactaacgccatagggatctccctctgccttaaaaggcacaggaatcttagtggggaaaaagaagtggtgataaatagccagtccgtgtgcctggaatatcaaagtcagtgcgtgccagggatcacactgcgggtcacgtgcactctgggtctctctctgcaaacctgccctgcctcagtctgggaatatgcaactgcctaagaagggtctggcttacacaggggccrtgagacgtggcaggcatagctgggctgctactggtcatgaatcctggacacggcaggcaaggtgtggtgtccatatgcattattcgggtggggcaaagatcacagctctcactagactttcagaggactttgtaacccaaagaaccactcatctcaaggactgtggtaactcaggggctgagccatgccagtgtttattatgtgaaacaaggactggaacctcacaag

SEQ ID NO: 892327 - DNA, 656 bp, Homo sapiens
cagggtatactgtaacaagggagtcgtcaccatcacttacattttggtagagactccaaggcaagagtgggaaagtttgacagtgatgttaaccaaaaactgacagaggcaggtgtctcaattgatagcggtttatttcgccaaggctgagaatgtgcctgggaaaaactcgagtcacaggaacatctatgacctgtgctttccaaagagggttttgggaattcagtgtcgaaaaggcaaagaacagacaggagggaaaaaagcgagggagggtgggcagtgaggcaaatggtaacattattgtgaggttctgattaacgctcagtaaattggcattttacataaaataaagcaaacacgtgaaaagaggaagtatggggaaaagtcaatgatgcatttatctcagggtggatgaagggatgatttctggtcttgtccttgtcctcttacctgtgaagataarcttgtaattgacattgttagggtgagattgaacagaactcagtttcggggctagcttataggggggatatgtatcctataagatttagggctcacacagaatttccttgtgagcaatttgtgaagaaggccatctggggagatatgtggcctcctatctttgtgggaacctggcttatgtatgacgttatgac

SEQ ID NO: 892328 - DNA, 556 bp, Homo sapiens
actgcactccagcttgggcaacaagagcaaaactccttttcaaaaaaaaaaaaaagtggaaagcataaccttgcttgatggtgaggttgaatccccaccttcgcctttctcagatttattcccatcttcctactcctccaacccctatgttrgctcaagcccagatggctctcacctgcattaacctaaccatctcgtaacccatctcctctctttgttcctttcctatgcaccctccacatggccagctgccagaggatctttcaaaatgactaatcttactattcttctcctctacaaagcttcagaggcttccagtctggactccttaacaacacataaaaaattcctcttctgttcttcctctggctggtggctctcaaccttggctgcacttgaggatcctggggagctttaaaaactgccctgctctggtttagtcagtctgggctgggtcccaggtgtctagagttttagttttgtttcccaggacctggtgactccttgaactatttgcagattcctgaacccctgtcggagagtaagctgtgttcta

SEQ ID NO: 892329 - DNA, 582 bp, Homo sapiens
tactggtttcacagaatgatttaaggatgagtccctctttctctatcttttggaatagtttcagtaagattggtaccaattctttgaatagctgatagaatttagctgtgaatccatctggtcctggacttttttttttgttgggaatttttgtattattgtttttatcttgctacttgttattggtctgttcaaagtttctgtttattcctgatttaatataggagggttgtatatttccaggaatttatccattcttctasattttctagtttgtgtgtgtaaaggtattcatagtagccttgcatgatcttttgtatttctgtggtgtcagttgtaatagcttctgttttgtttctaattgagcttatttggatcttctctctccttttcttggttaatctcgctaatggtctatcaattttgtttatcttttcaaagaatcatcttttttgtttcacttatctttttgttaatgttgttgtttacatttcatttagttctgctatgatctttgttatttcttttcttctgctgggtttgagtttagtttgttcttgtttctctagttccttgagggtg

SEQ ID NO: 892330 - DNA, 621 bp, Homo sapiens
aaataacaaaattaaatatacactaaccacccgtccttaatcgcttcatgtaaatctgtggcattagaaactgaaaacaaaaattatctgagggtcatgttttgctatgcatttaatggatattacttctgcctgctccaagggcaatgttcagtttccacaaacagtgtagtttattatgaaaaataatttataaatcattcttgtttaaaacaaaatttttttaggagaattagtaacagaatttcaaaraagttgaataatttctaaagattaagatttcaacttcactcttttaatgtatttaaggtaataatcacttactttggtgattatttataacattaacagctctaagaggcctttaagggccattttgttatacaaaaaagaaacacatttataagcattcttagaataatgctaatgtcattagctacagaagcagcacatgctaagatatcagctttaattttaaattcatattagaccttaataaaataagtcaaggatgcattttgtaatatctagaataaccactaaaagaacagtaatgtctaacaggcaagttagtagagggggaaaatgaaacaatttttaaaaatacataattcaggccag

SEQ ID NO: 892331 - DNA, 569 bp, Homo sapiens
tttctctcttcgagcaaaccaatttccttctgtgattactgcttggatagaaaggactctgttgtgtggtgtggggagttcaggaggatggtgggcactgagccattaccaagtttgcacttgttgccttctggccaaggacccagaatgtttattcaaaggagcaatttttaaataagacactgacaccagtatctggtctaagagaagagcaagagagaatagtgggagacctggaggaaaccaggtgttcctccagccagggaagctgtagaatccttgtcgtggactcctttctgtcacctccaccaactgagtgagtagctcagactggaggccsctcaccaagcctgtgggaccaagtgtcacctgaaggcaggggttctgcataacaggccaccaggctaccagctgagcaatcttggactagccacaaaatctctgattgtcaaggcctccgcctgcataatagatctattaacaaaaatatctgcgatggccagtgtttggatatattagcacacaggaagatagtgctccaaaagtgcttggtaacaagagcctggtgc

SEQ ID NO: 892332 - DNA, 607 bp, Homo sapiens
tgtggactcttacttcttcctgactttttgatgttctcttttgtcaatgtgaccaaccaattttgaatcagagctactggcatctttagaatgacatgtatggtggctcagaactgtaccctttaaaactcagctccagtaaagggagattctgagcattttaagatgttggaaattgagttgcatcctgcattaaaggcatttcttctttatataaactgtaggattctgttaagacagaaatggggagagctaatgggctattctgaaagaactacccattaaatkgtaaagtacggtatgttttaaagtgacaaacccaagagctgaaaatgactctttgatctttaaaaggctcataaacggtggcagcgtactcacagacctatatttatgtattcaaatattgggaggaaatccaagtagagtctcaagactgcgggactttgcaatttagacaaaaagaggccagggaggagggcaattaaatcaaactttttacagcataaagcaagctttcttccctccttgttaatcaatgaactagaatcttggtaagggcttgctttttaagtggggtttgagccaatctttacacagatgtgag

SEQ ID NO: 892333 - DNA, 621 bp, Homo sapiens
aatgtcatttcttgcatccctgaacttgtatgtgattgcattgaatctaatgatcataaccatagcagtgatatgaacaaggtatggcactgagatttattaatagcaaaacattcattctgaaatagaggcacatcctctaggtgtaacttggagtgggaatctcttttgtgctgtaaattccatcaaattccatcagtcggttgaagttaaaatgtgcatttataatcrttgcaagactaaagagctgcaataactgtgaaagtgagtgttgttacttttacgtacaggaattatgatgaactttcaaatagttacataaatacgggaagagtcagcacttaattagagtcataggggagtaatgctagctagacaactttagggaaaacatatccttgtatcctatttgggagccaaaactattataaaatcctaaaaaataacttttaataactttttattaaagttgattagctgatgtcattaaatctcatttttacagaattatttgttgtagcaacatgcatgacattaaataaaacaacctttcagagctgttttcatttttaaatatttaattccctcgaggccagaaatctttcaagaaaaagtctcatt

SEQ ID NO: 892334 - DNA, 601 bp, Homo sapiens
tttggttgcaaaacccaaaatgctgcctggaggcagtagaaagagatgggcctccattctcctttcaaactgaagttcctcctgccgggtgggtaatggaccccagataggaggcaatgggctatagcattgcaccagggagtgactgtgtccgggagcaaagcgtcctgcctccatttgttgcagaaggcagtgctatgagcctgcagctcctaggctgggcctcagtcctttgggcctgccctggggccctacctaggtcatgcagcgagctcctgccttccctaagacttgagtcacctcatccaatcaggagaagctcattatataagggaaatggtctccaatttgctggccaagaaactttggaggttagcaaacactaatccaataaaatataaagtgaaatgttgattttacagaaaaacctttaaacaatttttttttattagtcacatttggyataactgaacctttccctggagggaccatcttgttgaggggaaggaaaaaaaaaagcaactgtctcagaggaaaactcgacccagcagtttctaaatctgctggctggctgtgtgattgtacataaggcaccaaacct

SEQ ID NO: 892335 - DNA, 599 bp, Homo sapiens
ttttgagcagcaactaccatgatcttacagatttctttccaatatgtattactttctgtgagtgcatggtatgggaggttctaaagggtgctggacctagggggtagagttgcttagatcaatgatcacagttgtttcyttaaggcatttacaatctgcttggagagcctagcttaaaaccaaagtctcagatgtggtgattgtagtgttcactctcacagcaagacacagtgcttgcaggatatgacctacagctttgtgggatgcacgagtggttgggtatctggtcttctagtcccagtacctagcacagtgcctggtgtgtcgaagcacccagtgtatgtgtgttgaactgtattgagggacatgtggcagggggcaaagtccctgatagagttgccaatacaaagtagagtatgagagtgaattgaaaaacagccgaatgaaaacagcatcatcatccccaggccatagcagagtgtgtgccctgttctttagggttaactgggtgatctaggaatgaaatccttttctgggcatggataacctgtgctcctgtcctggccctgtggcgagctgcctgagcttgctcaaggtat

SEQ ID NO: 892336 - DNA, 599 bp, Homo sapiens
ttttgagcagcaactaccatgatcttacagatttctttccaatatgtattactttctgtgagtgcatggtatgggaggttctaaagggtgctggacctagggggtagagttgcttagatcaatgatcacagttgtttctttaaggcatttacaatctgcttggagagcctagcttaaaaccaaagtctcagatgtggtgattgtagtgttcactctcacagcaagacacagtgcttgcaggatatgacctacagctttgtgggatgcacgagtggttgggtwtctggtcttctagtcccagtacctagcacagtgcctggtgtgtcgaagcacccagtgtatgtgtgttgaactgtattgagggacatgtggcagggggcaaagtccctgatagagttgccaatacaaagtagagtatgagagtgaattgaaaaacagccgaatgaaaacagcatcatcatccccaggccatagcagagtgtgtgccctgttctttagggttaactgggtgatctaggaatgaaatccttttctgggcatggataacctgtgctcctgtcctggccctgtggcgagctgcctgagcttgctcaaggtat

SEQ ID NO: 892337 - DNA, 618 bp, Homo sapiens
gcttgacctggctggtttaaggtggggggctttggatcgagggagcactgtggaaagggaagtttttagcctgtgggcttctgtatgcatgtgtgcttgcagataatgagaagttgggctgttagttgaatagaagggaaatttcctagtcaaagctcctttggttctaaggaagagaaactccccaaattcaagtaaacaagatttattgaaaggacataacagtccatttcacagacatctaagaaaagaaagaccatctggggaaggggagtgggcagcccgcaccagagctgcattctctgcttttctggagctgtgtggcctcttactgctgctgggtttctgttctgttctctgcctagggctttcctcagggagattcttagcttttgcttcttygtggctttggctggctgcacatcacctgtgtcccagtgctgcgccatcccattcttgtttaactctgctcatgattctccaccttagtctcatcgcctccaccccaaattcctaagagaaaattcagttgtcttaatgtgagtcagttatgtgtctctgatgtaatcagctctggagcagcgctaggcaggtcagctacagaaaggaactgtatca

SEQ ID NO: 892338 - DNA, 592 bp, Homo sapiens
aacctaataatgcaccttaaagactagaaaagcaagagcaagccaaactcaaaattagtggaagaaaagaaataatatagactagagaataaataaattgaaaagaagaaaacaatgcaaaagattaatgaaacaaaaagttggtttttcgaaaagttaaacaagattgacaaacctttaggcagactaagaaaaaagagaaaagatccagataaataaaatcagagatgaaaaaggagacattacacctgatactgcagaaattcaaaggctcattagtggctgccatgaacaactgtatgccaataaattggaaaatmtagaagaaatggacaaattcctggacacatacaacttaccaagattgaccataaagaaatccaaaacgtgcacagaccaataacaagtaaaaagatgaaagccatgataaaagtctccctggagagaaaagcccaggacttgatggtagatacactgctgcattctaccaaacatttaaagaactaataccaatcctacccaaattattctgaaaaatagaggaagtgggaatattccaaacttattctatgaggccagcattaccttgaaa

SEQ ID NO: 892339 - DNA, 628 bp, Homo sapiens
  misc_feature 295: n = A,T,C or G
agttaccctgaattcagactcagagacaaatctcctagataccctgagaatgatggtttcgttgttaggaagcatgtgagggggtgagaaaatgtgacagctgtggaagagaagctgaggaagatacctgaaccaacaggtttctgctttgggattgattctcaaccctgctgggactctctgtggatccatctagaatgtgcctcagaattgtcttccttggggccgggcacggtggctcatacctgtaatcccaggactttgggaggccaaggtgggtggatcatgaagtcangarcttgagaaccacctggccaatatgatgaaacactgtccctactaaaaatacaaaaaaattagccgggcatggtggcacgtgcctgtagacccagctactcaggaggctgaggcaggagaattacttgaacccgggaggcagaggttgcagtgagctgagatcgcgccactgactccagcctgggtgacagagcgagactccatctcaaaaataaataaataaataaataaataaataaactaaaaaaaatttaaaaagtagaattgtcttcctaagggatggggaagtgtaatatgtatacatcagttcacatttcctactggtgaggga

SEQ ID NO: 892340 - DNA, 570 bp, Homo sapiens
gaggttctgcaaaccttgaagggcaaacacagtgagggtctctgacttgctgtgtggacagcccactctctgacagcccagatcatctgaagctatccctgggctgggagctggaagccattcttgtgaaccactccttataccttgagcgaagcctctttgggtcccagaagtctgaagctccagctgcctggcaagactgagtctagatgatttcttgggtaccagtagtttggcatttaaaaatactggattaactgcagtgtaaacttagattgcatttcagattgtaaacaataacccccgtgcttcatgtgatgttaaatcagaaatgarctattagccaagctagtcctcttatgaatgagcccctaaccctgatccagggatcgttgaatgaaaatcatcaaaatgatttatcttcactttacctattgtctcacaagaatctcatcactcagggaaaaggagggtgttcttcagggaacggagggcatgaggaagggggatttccttatatctcaactttcagagggagctgagttgtaaacagatggaacaaggtgtgta

SEQ ID NO: 892341 - DNA, 612 bp, Homo sapiens
aaggaaaaatgtcatattcacaaatgaaactagttgctagaaattaacaacataaaatatgggagattttcatatcataaaacattttaaagtgtattgaaagatctaagaaaataacagaaacatattatattattcctggaaacactcgttcttgtattttttttattccagatttatctgtaaatttatggcatatcattcaaaatcccagtaggatatttttaaactttacaaactgattctaaaattcatcttgaagagtgaatatataaaaatagttagcaaattttgggaaagaggagattagggcaggattttctttgctatctatcacaataataatcaaatgttattttactggcacaggaattgacaaattaacttatcaaagttaattacaaacagatttggatttaaaygctattataaaatatagaaaaactttctttaaaccttcagtgggagcagatctttctaaagatcttttgaagaattacattgaggccaaaatcctttaaaaagtcaacagatttgcttacacaataattgtatacttttatacatcagaagacatcattggcaaaatagacaaaaaacaaactgggaaaa

SEQ ID NO: 892342 - DNA, 570 bp, Homo sapiens
attgtagtcagaaacactttgggcacgagcttttttttattgtttactcctttacttgtcagttctctaagaattacagctttaaaaagctatattatttctacagtactttctatatgcttttatatccattacctcgtcaaacctacagcaacctgtgatttgagaggaggaaacgtcgccatctagatgttagggagccttcttaaggttttgcaactagactctgacacagtcacagtaggagccagccctgaggcttctgattcaggctcctgactctttccacaacatggctgtctttgttgagaaaggaataaaatgcaaatgcatcatcttatgccattaggagagctgctaaacatgtttggtgkggaagaagttgaaatggatgggttaagtgaggtttttcttcaccatctgtggtttccttagcttcgtgataagaaactctcctggatcatccactactcttggacacccctgctggctccttctctagtcaatgtttatgtgtgttgttcctcagcccgtagctccatccttttctgtcattaaccttctttccca

SEQ ID NO: 892343 - DNA, 619 bp, Homo sapiens
ttccttcctctcagtttaagaatatagaatcatttatttacgtgtttttttttttttgatggggggaaacctggcttagactaatctcagagtcttttcaatctttgcctcattgtttagaccttggcttttgaaacttcagccataaatttgactctttgattctgctrttccttccctgaagcgaaggaacttaaaaaaagccttggctgctgtctaccagaggtaagggtggcaaggtaacagaagcttctgggactgtaagccacatgaggtaaaatatgaagatgttattacacaccacactcaaaagttaagaccagatagactgtgctgcctgggtagcaaatgccccatccctgaagacctctgagcagtgcctggacaatctttgttgatgaggagatttagagaccagatgacataacctatctataggttctataattctgtgactttggggtgggaaaagcagataccacatgggagaatccaagggaagaaatcacaagaaagtccacctgactgcacctgagctcaagggcagccagtgctggaaaaatgatggtggagagccagggctgttttctgaccttctcttctccacggggaccatttc

SEQ ID NO: 892344 - DNA, 576 bp, Homo sapiens
tttcaatgagactctcattgcaaataacacccaaatggggcctgtgttattaatgggattttcaaaatagtgaacgtttttcccagttcattcctctcagggcgatggagagctataatgttgacatgggtaattggaggcttaagtatatccttcatataaatctacatgtaagtaaattaaaaaataaatacatgagataaattgacatatttgtatatggagaaattatcyccaggaatgtcaatatgcaatctatttcatctctgccattgatctgctcttatttggggtatagagagggaagagaatagagaaatggggctgttctgaccctgagtctattttctaaaagcagcatagtcaatattaaacttttaaactagtacattgacatgatggttgtctaagtctacagtgaaaaatatcggggaagcattgtgaatgtaagggtcacattcaatatgcaactgagatgtaatggtcaggctgtgagatacacagaagggagcctgggactgacattttttaatgctcttgctcccacatttaatcactggtgcatgcttccctcac

SEQ ID NO: 892345 - DNA, 617 bp, Homo sapiens
agattacccatttctcagataaaatattcatacatgaagatctatatttcatattgaatgaaatatttaaaattatcattatgattatatttccattttatcctttttatgtggaatgtccaatgggtgcaagttttcaaggttgcctgtccctaaataatgaaaattcaaatcctgtacccagagcattagacatatctcagttctttctgcctgaagagattcacatctatatatatatagagagagagatatatatgtatatatatagttatatatgttttgtatgtgcatatatgttataaatatatatgtaaaaatataccaatgaatcagttttagaccatgtgttgcaaaagagaaagygggaggaaatatgattcctgaggacagtgaattatagaatcatggactcctagctctatgagaggtttacctttagcctccggtagtgtaatctttccttctttgagtgaaactcttactgaactacagagtggcgtttcgcaatagcttcagagttggattctgggctctcagggggaagtaacaagaatatagaagctagcagatcacagagtgcctgggccctgcttcctaggcagaggcctgaggaa

SEQ ID NO: 892346 - DNA, 634 bp, Homo sapiens
gtgtcttatcaataaaataaggataattataattacacctttgaattgtgaagttaaaatatgataacatatgtaagttatattacaaaaatgatggaacatctcatactcaaagcatccacgaatttcaaaggaactcagtttcctttcaggagtttcaacaatgtttttagtttcctatgtctaactgggaaatcattactttgaaagaataccttgagctttcatttatcatgataaaatgtcatatactgtagtattatggactatatctcaattggaaactagaagttcaaggattggaagagcggaggatcaagtgatgtgctggtaagtataaaaaccaaaaaacacaatagagactttctaaatatgacattttctctgccagaacacatctgatcatgttatgcktgaggtcatggagagcagggctgacacatccctcagtgaccctgccggggcttggaagtcttgcttctcccaggagaaagcttaccctcaggattctgtgcagaagctgtggctaaccattccaggcacactagcatgcctctgcctctctggtataaacagttgtttcataaacaaaatgaaaagaagtgagctcatctccaactaagtaactttaagt

SEQ ID NO: 892347 - DNA, 615 bp, Homo sapiens
catgtgctgttccaggaaagctcccctccctcccaattgatttttgtccaagccctatccaacatttacttctcagctacccatgaagccactcctgatagcccaatgtaaaccttgcctctgctcattgttctggattatatagaaaagctttatctgtaatgtttatcagaatatggggttactatatgttcctttgcatgattacttgtttaatatttgtttcttaaactggccyataagctcctcgagggaagagaccatgcttgattttttttctcttctgtaaatacaatgtctagcctagcagcatcacccctggtttcaagacatgctagtccttgaaagcaagaaggctgtggtccaggtgcatcttgtgcttcttctttagctactcacaagaggtgagctgaggttgaagagtgaacgaaggtaggtgttgatcaacagtctggagagacagaatgttacaagaggtgaaattaatgtgtcagatgatgacctagaagggagttgactagaaattaggagttgtagtgtagtcacaatgcagggagactgtgttggggccagcttgctatgatatctgctcaatttgctgcgtttatcagtgaa

SEQ ID NO: 892348 - DNA, 645 bp, Homo sapiens
  misc_feature 524: n = A,T,C or G
taccgtggcactgggattcagagaatcataaaatcatagaattttgttttagttgaaaggggccataaagatattttcaacctgctaattttacataataagaaatggggaagggggagatggaaaaaggagaatactacagaaatgtccagtacaggtggtgatgttaagttttagatcattagtgggtgaccagggtgggaaaaataagaggaaacatgttaagtcttacttagagttttctagtgaaagtctgastgtttaattctctctgaaagtgctgtgactttgaaaaggctaaacatttttagaaatataatctaagtcacgtcatttccttgcccatcacataccattttcctccaaataaagtgagatggccaaatgctttcattctttagatgtgggcagaaaagaaaaatgtcccttatgtccctgaatatcatagcatatcaagtttggctcgtttatttgtgtttttaagcaaagctgataaagtaagaaaaatgccccgaggggctctnctttctgatgtctccaaagatgataataataataaaaaaaatctgaggaatctgagaatcaaattttttctcccctagaataaaggactcaagtacctttcaggggaataagagttgaagt

SEQ ID NO: 892349 - DNA, 496 bp, Homo sapiens
  misc_feature 113: n = A,T,C or G
catttccaccgctagcttcagggatctattaattggctcaccagtaaaattacagaagcagcctgcctgataatgattgtaaatgacagagacgatcaggtttaccttggggnacgcccaggggacttgcagctagtttagtctgaacttagcatcagctgcttcaggttcctttcttctcagcatgccgtggctggcctcatccctgtagtctttcaaacctaattagtgttaggcctttcctcgctggctccctcccatccccagcagcccttcattyttctcactgcctcctttccttctcactgttcagagcgccctgtgcatgcaaatcaaggaactgacttgagatgactttcagagctctgtctcttgtgtttctttggcctggaagaaacaacgcctaagttttgagctgtaagttgtttttcctccaggaaaatatacatcaacctcattgaagtttaaccttccttaactcctttatggtttgaag

SEQ ID NO: 892350 - DNA, 656 bp, Homo sapiens
atattgccaaagaacttggtgtttatgatttgtattattaaaatgttgtcacttacaggtgaagagttgggttctggagctatagaatcacttggcacataaatttagggatactctgccaacttcatttatcaatactgacaatatgaatgctcatacactggctgtagttgcaacagatatttccttagccagatttccagtactcatttccttaaaatactggattttgaatatccatagagccaatccataatttctttctcggggaacattttgtctctactaaacctgctatgtgtacasactggccagggggaatggggaaaagggactaatactgtctttgcaataggttttggtgtcacttcatcccaggccatggaccctcctccctcccctgagcacagtccttcattcagaggcaccctgatcctcagccgttaatagttggaatggagtggccaaagctgagcccatcaaatacttttaaaaattaggattgggatttagagacagtcagttaaagctttgatatgcctagaactctacctataaatttggaattgcagaaagatatatcttgccatatatatggaaaagcaaagtctacctgaaaaggaggaaggatgaaaatgactttgggagacttcaaa

SEQ ID NO: 892351 - DNA, 626 bp, Homo sapiens
ttactttcatgtataaatcccaaatcctttactatgtttagacaaaaaattgttatgtgggtctcctcagcatctcctttagataaatgtggggaggggagtgtgtatgtgtgtgtgtgtggtgggggggtctttcttcttttcttytttctaatttccttttttgaaacagggtcttgctccatcaccgagattggagtacagtggtgccatcagagctcactgcaggctccaactcctgagctcaagtgatcctgctgcctcagcctcctgagtagctaggacttctggcacatgcctccatacccagctaatttattttttttcttatttttatctttgcagagatggggtcttgctatgttgcccaggctgcttgcaaactcccagcctcaagtaatcctcctttctttgcttcctgaagtgctgggattacagctatgagccatcgtgcctggctatgtctattctttctcaatggcacttcaaatgacttacaaaaaaggcaaagctctcccagtagttgcttattgatgtcacaattaagatatgcttactctccactgagtggctgtgctaggtaacaattcagtcaggcagtagctcaaaccacatcaatttgcctg

SEQ ID NO: 892352 - DNA, 626 bp, Homo sapiens
ttactttcatgtataaatcccaaatcctttactatgtttagacaaaaaattgttatgtgggtctcctcagcatctcctttagataaatgtggggaggggagtgtgtatgtgtgtgtgtgtggtgggggggtctttcttcttttcttctttctwatttccttttttgaaacagggtcttgctccatcaccgagattggagtacagtggtgccatcagagctcactgcaggctccaactcctgagctcaagtgatcctgctgcctcagcctcctgagtagctaggacttctggcacatgcctccatacccagctaatttattttttttcttatttttatctttgcagagatggggtcttgctatgttgcccaggctgcttgcaaactcccagcctcaagtaatcctcctttctttgcttcctgaagtgctgggattacagctatgagccatcgtgcctggctatgtctattctttctcaatggcacttcaaatgacttacaaaaaaggcaaagctctcccagtagttgcttattgatgtcacaattaagatatgcttactctccactgagtggctgtgctaggtaacaattcagtcaggcagtagctcaaaccacatcaatttgcctg

SEQ ID NO: 892353 - DNA, 626 bp, Homo sapiens
ttactttcatgtataaatcccaaatcctttactatgtttagacaaaaaattgttatgtgggtctcctcagcatctcctttagataaatgtggggaggggagtgtgtatgtgtgtgtgtgtggtgggggggtctttcttcttttcttctttctawtttccttttttgaaacagggtcttgctccatcaccgagattggagtacagtggtgccatcagagctcactgcaggctccaactcctgagctcaagtgatcctgctgcctcagcctcctgagtagctaggacttctggcacatgcctccatacccagctaatttattttttttcttatttttatctttgcagagatggggtcttgctatgttgcccaggctgcttgcaaactcccagcctcaagtaatcctcctttctttgcttcctgaagtgctgggattacagctatgagccatcgtgcctggctatgtctattctttctcaatggcacttcaaatgacttacaaaaaaggcaaagctctcccagtagttgcttattgatgtcacaattaagatatgcttactctccactgagtggctgtgctaggtaacaattcagtcaggcagtagctcaaaccacatcaatttgcctg

SEQ ID NO: 892354 - DNA, 626 bp, Homo sapiens
ttactttcatgtataaatcccaaatcctttactatgtttagacaaaaaattgttatgtgggtctcctcagcatctcctttagataaatgtggggaggggagtgtgtatgtgtgtgtgtgtggtgggggggtctttcttcttttcttctttctaatttccttttttgaaacagggtcttgctccatcaccgagattggagtacagtggtgccatcagagctcactgcaggctccaactcctgagctcaagtgatcctgctgcctcagcctcctgagtagctaggacttctggcacatgcctccatacccagctaatttattttttttyttatttttatctttgcagagatggggtcttgctatgttgcccaggctgcttgcaaactcccagcctcaagtaatcctcctttctttgcttcctgaagtgctgggattacagctatgagccatcgtgcctggctatgtctattctttctcaatggcacttcaaatgacttacaaaaaaggcaaagctctcccagtagttgcttattgatgtcacaattaagatatgcttactctccactgagtggctgtgctaggtaacaattcagtcaggcagtagctcaaaccacatcaatttgcctg

SEQ ID NO: 892355 - DNA, 587 bp, Homo sapiens
gggggaacgggatactagaaacaggtttggaaagtcagagagggtaattcctaataagagtggccaaggtcttgatgcaatccttaatctcctcttgcacttaagaactacctataaacttagtgggtttagtgaattctaatcatttgcctagctagacaatgtaacatataagcttcaaggtcagcttgaccaaaatgggttaccctgttcattcaaattaacatgtcttttggcamcttaaatatctatctataagccatgtgctccaacaccaagttccaaaagccccaccggctctcttaatcataccagacaggaccctgatggcagccttatgccaagcttgttaatgggactcaccagcaagcacagctaatacctgagtctggtcttgattttcatcaggatttggagcattgatgaatgatataattcatccgtagaacctctttctatctaagagtcgcttcctagacactctccctaggatcctcagaacatgtgtttacatatcatgaccaagttggtagtgactgtctttcagggactctttgagaacaatttggaaatagctatgttacctt

SEQ ID NO: 892356 - DNA, 587 bp, Homo sapiens
gggggaacgggatactagaaacaggtttggaaagtcagagagggtaattcctaataagagtggccaaggtcttgatgcaatccttaatctcctcttgcacttaagaactacctataaacttagtgggtttagtgaattctaatcatttgcctagctagacaatgtaacatataagcttcaaggtcagcttgaccaaaatgggttaccctgttcattcaaattaacatgtcttttggcaccttaaatatctatctataagccatgtgctccaacaccaagttccaaaagccccaccggctctcttaatcataccagacaggaccctgatggcagccttatgccaagcttgttaatgggactcaccagcaagcacagctaatacytgagtctggtcttgattttcatcaggatttggagcattgatgaatgatataattcatccgtagaacctctttctatctaagagtcgcttcctagacactctccctaggatcctcagaacatgtgtttacatatcatgaccaagttggtagtgactgtctttcagggactctttgagaacaatttggaaatagctatgttacctt

SEQ ID NO: 892357 - DNA, 641 bp, Homo sapiens
actttgttctttttatttaggattgctttgctattcaagctctttttgggtttcatattaattttagaatagtcttttctaaatctgtgaaaaaaatgatgttggtagttgaataaaaatagcattgagtctgtaaattgcccttggcagtatagccattttaagaatattgattattcttatccgtaagcatggaatgatttyctatttgttagtgtcatctatgatttctttcagcagtgttttgtaattctccctgtaaagatcttttacctccctgcttagctgcattcctaggtatttaatctttttgtggcagttgtgaatggaattgcattcttgatttggctctcagcctaaatattattgatgtatagaaatgctactgatttttgtaagttgatgttgtatcctgaaactttaatgaagttgtttttcagttctaggagcctttgggcaaatactatgggtatttctagttgtagtatgatatcatcagtgaagaaagatagtttgacttcccctcttcctatttgcatgccttttattcctttctcttacctgattgctctggctaggacttccagtattatgttgaataggagtggtgagacagggcatccttgtctcatttcagttct

SEQ ID NO: 892358 - DNA, 641 bp, Homo sapiens
actttgttctttttatttaggattgctttgctattcaagctctttttgggtttcatattaattttagaatagtcttttctaaatctgtgaaaaaaatgatgttggtagttgaataaaaatagcattgagtctgtaaattgcccttggcagtatagccattttaagaatattgattattcttatccgtaagcatggaatgatttcctatttgttagtgtcatctatgatttctttcagcagtgttttgtaattctccctgtaragatcttttacctccctgcttagctgcattcctaggtatttaatctttttgtggcagttgtgaatggaattgcattcttgatttggctctcagcctaaatattattgatgtatagaaatgctactgatttttgtaagttgatgttgtatcctgaaactttaatgaagttgtttttcagttctaggagcctttgggcaaatactatgggtatttctagttgtagtatgatatcatcagtgaagaaagatagtttgacttcccctcttcctatttgcatgccttttattcctttctcttacctgattgctctggctaggacttccagtattatgttgaataggagtggtgagacagggcatccttgtctcatttcagttct

SEQ ID NO: 892359 - DNA, 640 bp, Homo sapiens
gttcttcattcctgttataaaaagtttcactctttctggtctctgttcttcaagtttttcgttgattgatttcatgtaatctttgatatacttcttgtaggcttcttttgtgaagatgctttcctgcaagtgatggtttgtaacaatatcaacactagtgattatcgtgctttcagtaacttcatcctcagtactttcagaggaggaatttctgccaatgagtgagtcatcagtgttccctgttgtcttactgagcatcttctgctccacttccaggcacagcccatttgtgatctcccagatcttgtaaatgtcagagaacatctcattgtggctgatgaggtcctggaagataatcgtgatggggctgaagggagatgaaggtggcactagcttagcagaagcctggagttcagagcacrgtgcagccagagtggtgttgtgggggagggaggagtggcaggaaaagctactctccttttcacactgtccagtctactggtgagccaatcaaggcattttctatttctgttactgtggttttgatttctagtatttcctttgattatttcttaggatttctacctctctgcttacattgtccattcgttgttccatgttgtctatgttttctatcaga

SEQ ID NO: 892360 - DNA, 653 bp, Homo sapiens
tgtgatataaaaatggagaagaagggacaagtgtagatatggaaagaccacaccagagtatatttcagtgtttgtctaggaagagaagacagtagcttgatttgggattagaattaaaaatggaaaaactaggccaggtgtggtggctcatgcctgtaatcccagcactttgggaggccgaggcaggaggatcacctgagatcagaagtttgagaccagcctggccaacatggtgaaactccatctctactaaaaatacaaaaatcagctgggtgtggtggtgggygcctgtaatctcagctacttgggaggctgaggcacgagaattgcttgaacccaggaggcagaggttgcagtgagccaagaccatgccattgcactctagcctgggcgacaagagtgaaactccatctcaaaaaaaaaaaaaacagaggaaaaactagagatttaagaaatccttaggaataaaatagagaaagcaagaggcttgactgaattgaggagagaaacccttctcacatcttcctcacttgattctatgaatccttaccccaactgctagcccagatgtgaggaatctgcagcccctgctgggttcactggatcgtctgctttgcccttcatttttgcttattttagagtgtgcttctaag

SEQ ID NO: 892361 - DNA, 657 bp, Homo sapiens
ttctcatcatttctatgagattgtattatttattttactggatgggggatctgagccacaggacagtaagtgacttgcttatggtcacagagcatgaacatcacagagctgtgatctgacaatctacagtttactgctggagcccccaccatagttacagggcggggcggcgtccccctttatctctctttctgaagccaaaaagctaacatagcatagcatgcgataggcttcgagatgtggtattggatgtacatagaagactcttattggatgttgcctaaaattatacctcccctatacgttgacacctgaaatttgttagttagggctttgttccttagctgaagtccctgatccatgatgaaagggaagctgccccagaagggttaataytttattcttctgtttttgcaaatgaagttttaaataatagatgttgatgaggacatttaaatacctggggactgtgagcccctgagaaagatgatgataaggtgttactcagagggcaaatgacacaaagtgaaaatcagtgcgatttgcctacttcacatttttttttcttggaaactatgcaagtcatgtctcaaggccttgaagagagttttacttagaaacagtgactaagcttcgcataaccttcactttgtctta

SEQ ID NO: 892362 - DNA, 657 bp, Homo sapiens
ttctcatcatttctatgagattgtattatttattttactggatgggggatctgagccacaggacagtaagtgacttgcttatggtcacagagcatgaacatcacagagctgtgatctgacaatctacagtttactgctggagcccccaccatagttacagggcggggcggcgtccccctttatctctctttctgaagccaaaaagctaacatagcatagcatgcgataggcttcgagatgtggtattggatgtacatagaagactcttattggatgttgcctaaaattatacctcccctatacgttgacacctgaaatttgttagttagggctttgttccttagctgaagtccctgatccatgatgaaagggaagctgccccagaagggttaatactttattcttctgtttttgcaaatgaagttttaaataatagatgttgatgaggacatttaaatacctggggactgtgagcccctgagaaagatgatgataaggtgttactcagagggcaaatracacaaagtgaaaatcagtgcgatttgcctacttcacatttttttttcttggaaactatgcaagtcatgtctcaaggccttgaagagagttttacttagaaacagtgactaagcttcgcataaccttcactttgtctta

SEQ ID NO: 892363 - DNA, 629 bp, Homo sapiens
tgtctctactaaaaatacaaaaaattagctgggcatggtggcgggtacctgtagtcccagctactcaggaggctgaggcaggagaatcacttgaacctcgaaggcggagactgcagtgagctgagatcgcaccactgcactccagcctgggcaacagagagagactccatctcaaatttaaaaaaaaatcaggtaatgggttaaaataagtataatctactaggaattctctttcaattattattttatctgtatttcattgatcaaaaaaaataaaaagattccttttgagtttgtgctcccatgggtggcataataattatcatatatgcagaacttactattggccagccactaggcttaatgctttttatattaatataaccaatttatatattctttatgtactgatattctcatttaaccttctgagatatgcaatgttattrtcaacatttcaaaaaactctgaagcaccttgaaaatttcaataatttgcctaaagtcacacagttagtaaatggccaatccagaattcatgttcttaaccagcactctatgtttcctctgtaaaatatttgattatgaatttaattggagaacctctagtgtggttctagtttggaaaaa

SEQ ID NO: 892364 - DNA, 665 bp, Homo sapiens
ctcgccttctctagttccttatctgtaagatgggaatgtaaaatgtaaaatggtactattataatagtaccaacctcacagagttgtagcatccatatcaagcatgtagaagcatgcctcacatattatggggactattcattttactctatttaactcttctttagaacggagagcaaaatttcccttaactacttaaactcctgactatacaatctctatgatatgcttcacaatgtttgtatgatgttttactttaggtggtatgataataacattagcaaggaatggaattcatatttattttatagataataaatcatacaataaaattacacgaaactgataaaagctacataatgtccatgcactgtcaacacattcaccttaaagacaaaacaactaattaaataattmtctaaaatgccatagcacatatggagatgatgattagcttttaatgacaaagggaggtttttcatctcccccagctcctgtgggatcccagcataaaggtgctaccaggggaatgagatattggagtcttgcctctcacattacaaatgcagtcaattctatcaacaactattgaacacctactgtgtgcctgctgcattgctaagtgttaaagtcaaaaggtttctgcaagtgtatgacaaaaccat

SEQ ID NO: 892365 - DNA, 575 bp, Homo sapiens
attcactcatcaaacatctattaagtgcttaataggctttatgcaatttatcacatgctagaaaagaaggggttattggaaatagaccctggatttgaattgttggttatattatagaaaaaattccagacatgtgttccctaaaggatagccagaattttcacagtaggggaaatgctacaagtgagaagaaggtgattttttttaccatgccagtgcctctgtaaaatagggtatctcggggaatgcaattrgaaactgtccattaaaagccctgggggtgtttggataaaatctttggcagctttcatgatatttgaggttaattttaggtaatttaacattcctccagttatttctagtttccaaccatccagcttttgaacatgttcagtccagtgtaattctaataatgaaactctggatttcatttaggattaaatcttctctttattttagctcagatattccttgagtgggctacgtatattgtgaaaggactcagtttcatctctattaaccatttctaggtttttattcctaaattctgctgactaggctacctctgacctctg

SEQ ID NO: 892366 - DNA, 575 bp, Homo sapiens
attcactcatcaaacatctattaagtgcttaataggctttatgcaatttatcacatgctagaaaagaaggggttattggaaatagaccctggatttgaattgttggttatattatagaaaaaattccagacatgtgttccctaaaggatagccagaattttcacagtaggggaaatgctacaagtgagaagaaggtgattttttttaccatgccagtgcctctgtaaaatagggtatctcggggaatgcaattggaaactgtccattaaaagccctgggggtgtttggataaaatctttggcagctttcatgatatttgaggttaattttaggtaatttaacattcctccagttatttctagtttccaaccatccagcttttgaacatgttcagtccagtgtaattctaataatgaaactctggatttcatttaggattaaatcttctctttattttagctcagatattccttgagtgggctacgtatattgtgaaaggactcagtttcatctctattaaccatttctaggtttttattcctarattctgctgactaggctacctctgacctctg

SEQ ID NO: 892367 - DNA, 567 bp, Homo sapiens
tgacagacaacaaatcacagatcaaagacactccaagaacaccaagcggtataaatgccaaaaaatccacacccaggcacatcatatttaaagggaggaaaaatgatgggaaaaaaattatataagaagccagagaataaaacaccttgyctattgtagaatgataatttcactgaacttcttgtcagaaaccatgtaaataagaagagagtgtactgaaatatttaaagggttgaaaaaaaacagccaatgtggaattgtatttccagaaaattatccttgaacagtggaaaagaaataaagactttcttagacaaataaagagtgacagaattcattactggcagaaaatcatataagaaatgtttaaattcttcagggtgagggaaaatggcaaagattagaaacttgaatccatataaagaaagaaaaagcatcagagaagaattaaataaatacaaataaatcttttatttttcttatttttaattgatctaaaacataactgtttacaataataacagtaaaatgtattaggtgattatagcatattttataagtgaaatg

SEQ ID NO: 892368 - DNA, 596 bp, Homo sapiens
aaaatcttaggtatggacatcctctgaggctgaagacattactcagtaagggggctgtgagcagctggagctgatatttccttgcagatgctgaaaggtgtcctgccaaagacacctgcgtggagacaacggtagctatcccaataactaattcctatagttttattgagaattargttatgtaagatatataagaaccagaaagcagtcttaaaattttatttatttatttaatttaattttttttgagacagggtttcactttttcacccaggctagagtgcaatagtgcaattgaactcaaataatcttcctgtctcagcttcctgagtagctgggactacatgtgcacactatcatattcagttatttatttatttatttattattattttgtagagatggggtttcactatatttcccaggctgacgttgaactcctggcctcaagcaatcttcccacctctgcctcccaaagtgctgggactgcaggtgtgagctactgcgcccgaccctaagattttaatattattatatttggctactggggtggaaggaactctaaatttattaagtaattttttgaacgttctggt

SEQ ID NO: 892369 - DNA, 596 bp, Homo sapiens
aaaatcttaggtatggacatcctctgaggctgaagacattactcagtaagggggctgtgagcagctggagctgatatttccttgcagatgctgaaaggtgtcctgccaaagacacctgcgtggagacaacggtagctatcccaataactaattcctatagttttattgagaattaggttatgtaagatatataagaaccagaaagcagtcttaaaattttatttatttatttaatttaattttttttgagacagggtttcactttttcacccaggctagagtgcaatagtgcaattgaactcaaataatcttcctgtctcarcttcctgagtagctgggactacatgtgcacactatcatattcagttatttatttatttatttattattattttgtagagatggggtttcactatatttcccaggctgacgttgaactcctggcctcaagcaatcttcccacctctgcctcccaaagtgctgggactgcaggtgtgagctactgcgcccgaccctaagattttaatattattatatttggctactggggtggaaggaactctaaatttattaagtaattttttgaacgttctggt

SEQ ID NO: 892370 - DNA, 636 bp, Homo sapiens
atttataggaagttcaaaagcaagaaaaactattttctaatattagttgttcaaatagtggttaatttgtggaaaaatatgtactgggatggggcgtgaggaagacttctggagtgcaggtgattttctatgttttgagctgggtagtagttacacagatgtattcaatttgtgaaaattcatttagctagatatttaggatacgtggacatttctgtgtatttttatatttcaataataggtttcyttataaaaatattggttctgcaaattacttgctttctcttctttggaagattacttatactctgtttcttattttccccatctcagaagtagaggtgaataaatagcggtttcactgtgtataaaatgggatgttttgttattgttgtctctctatttctcttttacatacactggtttcttggtctgacatgttctaggtactggaaataaaatggtgagcaagatactttccctggcttcagtgaggttgcattttgtttatttttaaatagaaagacaaggatcatgttcaatgcatcctgaattcaaccttccctttcaattttcatataggaaattgctaaaagggggcaaaaatcagcaaaattaataattgatggtgaagat

SEQ ID NO: 892371 - DNA, 605 bp, Homo sapiens
cctatttctccaaaaaaaaaaacataaaataaaaatattaggtatgatagtgcatgcctgtggttctagctacttggggggctgaggcaggaggatcacttgggttaaggagtttgaggctgcagtgagttgtgattgcaccactgcactctagcctgggtgagagagggagagagagaccccatctctaaataaatttaataaaaaawactttttgtgatataattgacagatagtaaattttttcttacttcaagggtacaatttaataagcttaacatatatagatacccatgcaaccatcactacaatcaagatgataaacattaatcacctgcaaaagtttcgtcttgcccttttgtagttcctccaccttatgtgtcttcacctcccatccctgtctaatcactgagctgctttctattactacagatcagtttacattgtttagaattttataaaattgaaagaatataattttttgggtggtctgggggcacaattattttgggattcctttattatgtatatctatagttacacatattatgtgactctacagttcatttgctgagcagtactccactgaatggattgtccacact

SEQ ID NO: 892372 - DNA, 605 bp, Homo sapiens
cctatttctccaaaaaaaaaaacataaaataaaaatattaggtatgatagtgcatgcctgtggttctagctacttggggggctgaggcaggaggatcacttgggttaaggagtttgaggctgcagtgagttgtgattgcaccactgcactctagcctgggtgagagagggagagagagaccccatctctaaataaatttaataaaaaaaactttttgtgatataattgacagatagtaaattttttcttacttcaagggtacaatttaataagcttaacatayatagatacccatgcaaccatcactacaatcaagatgataaacattaatcacctgcaaaagtttcgtcttgcccttttgtagttcctccaccttatgtgtcttcacctcccatccctgtctaatcactgagctgctttctattactacagatcagtttacattgtttagaattttataaaattgaaagaatataattttttgggtggtctgggggcacaattattttgggattcctttattatgtatatctatagttacacatattatgtgactctacagttcatttgctgagcagtactccactgaatggattgtccacact

SEQ ID NO: 892373 - DNA, 605 bp, Homo sapiens
cctatttctccaaaaaaaaaaacataaaataaaaatattaggtatgatagtgcatgcctgtggttctagctacttggggggctgaggcaggaggatcacttgggttaaggagtttgaggctgcagtgagttgtgattgcaccactgcactctagcctgggtgagagagggagagagagaccccatctctaaataaatttaataaaaaaaactttttgtgatataattgacagatagtaaattttttcttacttcaagggtacaatttaataagcttaacatatatagatacccatgcaaccatcactacaatcaagatgataaacattaatcacctgcaaaagtttcgtcttgcccttttgtagttcctccaccwtatgtgtcttcacctcccatccctgtctaatcactgagctgctttctattactacagatcagtttacattgtttagaattttataaaattgaaagaatataattttttgggtggtctgggggcacaattattttgggattcctttattatgtatatctatagttacacatattatgtgactctacagttcatttgctgagcagtactccactgaatggattgtccacact

SEQ ID NO: 892374 - DNA, 637 bp, Homo sapiens
gaataatgtgtatatatggtggtgagatgttgggggctgtagtggtgggggtgttcagaaatattgaaatagaggtgaggttaattcatcttgtgaattaatgtggtcatggtgtaactgatgcaaaaagagactaggtcataaatcgcttaaagggaatcaaaaggcacgarggggcctgaacagactctctgaaaaatagttttagagcatctgctgtgcaatatggtttgaacctttcgaagccccactgtataactcacttgtcacttgatttgaggaagagatgacagatctgccaggaacattcagaaagctttttttttttcaaggaagggtacaagccagctgttcttgttgtattgatattttaacaaatgcattgatcttagcattctcaatttaccttggattttagtatttcatgtaaaatacgttggggaaaaacactgccctggcatctaggaaaagacgctgtagagacaaggtgaagcctggcagatggatctacttagctagcacaaagtcattctgcagattaggaaacaccttgttttatttctcatgatatgcttcattatcttttctgtgacttgcccttcaccttatgaaatgaatttgggaatttgaccttttc

SEQ ID NO: 892375 - DNA, 646 bp, Homo sapiens
aaggccccaaaggcatcgtttcagatgcactcaaatgtctttttagtaatacaactgttttttaaatatctcataaataattctaccatattaaaaatagattaatttcgagctgctctgatttaaataagtatgggaggcctgaagccccaaactcagggcctctacttgattttctaaagtatcccttagcaggcatttctaaaaacccccatggatccagggaactcaggtttaaagtcaccctctcattcacaggttatttggacagaaagatactgactgtcaactcctgattctgagggttttttttttttttctctccaagggcttctcctggacattactgagaaatgccacttgtcaacaaatatcctgggctagaaccaaaataacagatttttaagataacagagatccttgtgaaggtcaaattcagccaagcmccatttaaatgtcaccctgctctccaaaatatcatcgtggcaagaaattccatttcatactagatttctctgctctgttctattttggccatcactctatggaaccttggaatgccagggcaggaaatgggaggaggatgcatgtgagggagctgcagtgcttgtagactgcacagtgcactgcctcactgcttccccag

SEQ ID NO: 892376 - DNA, 615 bp, Homo sapiens
caagatagatgcaattgaaggactagaaaaaataaagttcaaaattatttgtccttgttagtcacaaatattacttgatagtctcctaagcagcaacaatattttctttgtttgtttgtgtgtgtgtgtgtttattgacacataatagctgtatagttgttatgaggtacatgtgatttttgtaacacaattacacattgcatacaatgtgtaataatcaaattaggataattagcatagccatcacctcaaatatttatcatttctttgtgttgggaatattacagatattttcttctagctattttkaaatataccataaattattgttaactaatgtcatcccactgtgctttcaaacactagaaatgatttcttctatctaactgtatgtttgtacccattaaccaacctctcttcacctttccttgcccccacccttcccagactctggtaactatcattctgctcttcacttccataggatcaacttctttagcttccgtatatgagtgagaacatgtgatatttgccttatatttgcctttgtatgtctggcatattatacttaacataatgtaagtttcacccatgttgttgtaaatgacatgattt

SEQ ID NO: 892377 - DNA, 694 bp, Homo sapiens
taaatgagataatatatgtaaaagcatttagcataatgcccgatgtcataactgttcaataaatgagtgcaattgttacaattattgctagatttattatcaatttatttatttatttttttaatttatttttttgagagggagtctcgctctgtcaccctggctggagtgcagtggcgtgatctcagttcactgcaacctctgctcctgggttcaagtaattcccctgccttascctcctgagtagctgggattacaggcatctgccaccctgcctggctaatttttgtatttttagtagagatggtgtttccccatgttggccaggctggtcttaaactcctgtgctcacatgatccacccacctcggcctcccaaaataccgggattacaggcatgagccatcacacctggcttatgtattgtcattttatgtgtccatttatgtaaacatttatgactacagtcatttccctatattttctgattagtttttagaggtaaagaggattttttgtatatttactggattcatgattttctagattctgaatatttctaatatcttagttgattaccttggtttttcatgcaggcattagaaaatactattataataataaaaaggttggatcttatttctaatacctaaactttattttaatcactattacattgcctgaaacttccagaa

SEQ ID NO: 892378 - DNA, 667 bp, Homo sapiens
agtaagtgttatgcatatataatgtatgtatatatgcatataaatgtgtatgtatttatgtgtgtgtgtgtacacacacacacgtctcttctgttaagaagaacgattttgccattttctcccatatttctggatgtggactcactcactcggggcaggtaggtaattgacatctttcttccmgttgtataaagcaggggtgggcaaactatagcctctgagccaaatctggaccactatttctgtaaaaacaaacaaacaaaaaacaaaataaagcaaaacaaaaccaaaccttttattggaacaaaccagtcctatttcttatatattgtctatggctgctttcccattacaacggcagagttgagtagttgcaagagtgaccacatggcccgcaaagcctaaaatatttactatctgcccctttacggaaaaatgttgctcatccctggtataaggccctacattaagttattttgacaggtgcaatcctgaaccttcctcagacagctcacagcttcctattctgatgaccagaagtaggtgacaaaacaaagccctcttcttccaaatatatcccccattaatccagttgttttagtacacttcagaaaataccatactgagattaaggcaaacttccagaaagcatctaataaaacagcca

SEQ ID NO: 892379 - DNA, 603 bp, Homo sapiens
attaatatttttacatcaacagccagatagaggaaatacgtaatattttcttaacagatgtgagaaaactgtctatggcacgttgtagttacaattgatgaatataattatgtgaacgtccacttgacatatcctttgtcattaatgaaaggtgtacagagcacatattatatcacatagcttacagactttttgagaaagtacataattcatgtctaaatttttttgctaaaaacaacatttttaagatagaagagaaagacagataattatgaatcacattgtgatcaggaattacatttgrtaaatattaaaagtaaaaaggtatggaagaaattagccatatcatcttagaatctgtaatgataaagataaggaaaaacatataagcttgtttatgctagtgtttacgaagacacattttgagaacaggaaacacaagggtataataaaatacttatcttgtataaatattgatacaatattgataagtatataaatattgataaatttacttaaaatgaacagagaatagatctttaaaaaagatctaatacaataagatatgactttcaaatgaaaatggtatattcaattgaaaga

SEQ ID NO: 892380 - DNA, 580 bp, Homo sapiens
gggccaattgttagtactttctgctctctgaaggaaggtacttttctatcctatcatagatttatcttttggcttcagagcctttactgttgctgatattaggtcaaatattctttctaaaatctgtaggtaagttaaatatttgaaacaagtatagataaatggttaatatattaatgtataaaaatgttatgcaaatagatgagaacaagaccaaaaagagaaaagagaaaatataaatgcataaaatataawagataatggaaatgtgaaatattaatgactctagtaaccacagaaatgtaaataaaaatattgagattagcctttttctcataaacgaacaacaaataaataaattttattaatgttaggtactttgaaattgttcttcttataaattctatgaatataaattacacaaaacttcttaggaagctagttagtagtaagacttgataacattaaaaatatttatcccttttaagtagtttctcccctactaagagttcactctaagaaagtaatcagaaatgttgcaaaagactaattcataagcatattcatttataaaaaaaat

SEQ ID NO: 892381 - DNA, 580 bp, Homo sapiens
gggccaattgttagtactttctgctctctgaaggaaggtacttttctatcctatcatagatttatcttttggcttcagagcctttactgttgctgatattaggtcaaatattctttctaaaatctgtaggtaagttaaatatttgaaacaagtatagataaatggttaatatattaatgtataaaaatgttatgcaaatagatgagaacaagaccaaaaagagaaaagagaaaatataaatgcataaaatataatagataatggaaatgtgaaatattaatgactctagtaaccacagaaatgtaaataaaaatattgagattagcctttttctcataaaygaacaacaaataaataaattttattaatgttaggtactttgaaattgttcttcttataaattctatgaatataaattacacaaaacttcttaggaagctagttagtagtaagacttgataacattaaaaatatttatcccttttaagtagtttctcccctactaagagttcactctaagaaagtaatcagaaatgttgcaaaagactaattcataagcatattcatttataaaaaaaat

SEQ ID NO: 892382 - DNA, 612 bp, Homo sapiens
gagttgtggggcttgatggcagattctgaattccagagtgtgcaatggaagagcttgggaaggcaatgaaagatgaaagattaggagtagtacagagaatcacttcagtgtaaaaatgagaaatcatatgatgaggcttggaatccataggtgcctaaggagcccagggatgtgaggctgatgccattggccctagatgctagagcactccacaactgaatgtcagcttgctctatttgcaaacacaatactttaaatacatccaagtataatatgaataatgtttagtaggaagtgattttcctgcaatagtattgcacttccactggcatggtkggagggaattaaagggacctggccagggtgtcaggaatgctgaggcaagtcatcatgaaagaagcaagtgacagtcagggtgggtgattccacatggttctgaagcattgaggttgaggtggttaaaagaccaaagaaacaggaaccggaaaaccaaagtgaggactttagtaataataatgtatcgtatttacaggtatattgtatcttattgtgcttctctttactgtgttttcacagatattgtgtttcttactaattgaaggtttgtggcaa

SEQ ID NO: 892383 - DNA, 701 bp, Homo sapiens
tgcactgtacttccatccaacatgcatctttatttctcatttttcaccaaactccggatgccaaggcatgcattgatcaagaccacccatttccacctcctctgttcatctttgcatatgtttgtgagggttgctccctgcaacaatatctggtgtctggcagttaggtggcttgcgtcctccagggtcagataaggacatatctttcccacagttgttgataatggggccaaggaaaggctaattgttgaaagttctgtgagtgttcttcctgatgtggaggagttggagtgaattattgcgtggaccctgcactccgcaggggagccccgggtcctcaaggcggggagtttgataagccgtctgttctgaggagtttggattagtccatctgtttctggttttcagaaacytgaggtgaagaaaataaataacagagaaaacaaaaatgaaaaatgcccccagttcctgaattgcatgcagtaagtctgcttgttttcttaaatcacttgattcttccagatgaactagctcctgctggatttcctggagagagagagaaaagcagcatccagattttactttccaggatttttaaatctctcagaaatatggcccattattacataaaaagtgacatttcccattattttgtcaaagaaataaggatgtaagggttattatataagattaatatataa

SEQ ID NO: 892384 - DNA, 701 bp, Homo sapiens
tgcactgtacttccatccaacatgcatctttatttctcatttttcaccaaactccggatgccaaggcatgcattgatcaagaccacccatttccacctcctctgttcatctttgcatatgtttgtgagggttgctccctgcaacaatatctggtgtctggcagttaggtggcttgcgtcctccagggtcagataaggacatatctttcccacagttgttgataatggggccaaggaaaggctaattgttgaaagttctgtgagtgttcttcctgatgtggaggagttggagtgaattattgcgtggaccctgcactccgcaggggagccccgggtcctcaaggcggggagtttgataagccgtctgttctgaggagtttggattagtccatctgtttctggttttcagaaacctgaggtgaagaaaataaataacagagaaaacaaaaatgaaaaatgcccccagttcytgaattgcatgcagtaagtctgcttgttttcttaaatcacttgattcttccagatgaactagctcctgctggatttcctggagagagagagaaaagcagcatccagattttactttccaggatttttaaatctctcagaaatatggcccattattacataaaaagtgacatttcccattattttgtcaaagaaataaggatgtaagggttattatataagattaatatataa

SEQ ID NO: 892385 - DNA, 619 bp, Homo sapiens
aatgttttgtctattttcttcttaactacctcatatgcatcttccaaatgctaatccttgcatttgaacatggatttttatttaaatcagttcttccttgtatcaaaattgtacatgcatgtcgttcaaaaagtgatgtagttctttctatgaagcttgttacaaaaaaaaacaacattctgggccgggtgcagtggctcatgactgtaatgccagcactttggaaggctgaggtggatggatcatgaggtcaggaattcgagaccagactggtcaagatggtgaawccccatctctactaaaaatacaaaaattagttgggtgcagtggcgggcacctgagtagtaatcccagctactcagggggctgaggcaggagaatcgctgaatctgggagacagaggttgcattgagctgagatcgtgccactgcactctagcctgggtgacagagcaagactctgtctaaaaaaaaaaaaaaaaaaaagcattgtggtgattctggtattctcttttctcattccccagaggcagcaaatttcaacacttgtagctgatgttcttttgaggtaggttaggtagggtggttacagcctcccttaaaggagaacaaacttggta

SEQ ID NO: 892386 - DNA, 608 bp, Homo sapiens
attatttggaaccgtttgattttggcaatgatcactgccatttcaatgtatgacttatgaatcaaaaagaccaatttagcatttaagaggaaaatagtggatctgtattagcaaaagtagaaatgtctaaagacagactttatgttttacagatttctgatttttgtaatttgtagagttctgcaaaacagtgaggcagattcaattgagatgtttgctgctccctatcaaaagtaattctgaagtgttaattattttgtcccttctgttttgagatttttgtgttgtttgctacatgcctctaaaaaaaactatttactctcagcttcagttggacttacttcttttttgataaaataacattactggtgggaaaagcagagctttttatttgtgttccttcatgaatgtgttcctattgcacatgtctcaaagrccatttacatcaattaagacacaataaacgtattgctaacagtcctcatcattctacgatgtgctccgcattgttatgtatggagcactctctgttcatccccgcctgtgatgtcatcctggcacagcaatccatctgaaatattgtgttttattgagccattcacccagta

SEQ ID NO: 892387 - DNA, 584 bp, Homo sapiens
aaggccctcctcagaggtagctcccttgactttgggtttctcagactctagaatcatgagccaaataaatttctattcacttaaagttactcagtttgtgatattctgttatagcaacacaacaaagactaagacacctaccaacttgtccgtgatccaaaatttcaatttttggccattcttttctgttaaagcatttaatgcctctgctgaactacaaaaactcattgtcacagaaaacctcctacaggaagtcctccttaactctttttagaatcattacatgtgcctaatgtgtgcccctccttctagcccacagggtttactcccctgcagaacmtgattctcatactattgaggtgtccttggctccccttagagagcaattattattgttgacagagaattcattttattaatgaattttagctggtctagcacatactgcttacttcagaaaagttgaatcactcagaatccagatatccaggtagcatatccttgaatatattaattaaaacaacaccaaggccccacttaaccagccgtttcctgtgacttttcattcctgatagttctaagga

SEQ ID NO: 892388 - DNA, 584 bp, Homo sapiens
aaggccctcctcagaggtagctcccttgactttgggtttctcagactctagaatcatgagccaaataaatttctattcacttaaagttactcagtttgtgatattctgttatagcaacacaacaaagactaagacacctaccaacttgtccgtgatccaaaatttcaatttttggccattcttttctgttaaagcatttaatgcctctgctgaactacaaaaactcattgtcacagaaaacctcctacaggaagtcctccttaactctttttagaatcattacatgtgcctaatgtgtgcccctccttctagcccacagggtttactcccctgcagaacctgattmtcatactattgaggtgtccttggctccccttagagagcaattattattgttgacagagaattcattttattaatgaattttagctggtctagcacatactgcttacttcagaaaagttgaatcactcagaatccagatatccaggtagcatatccttgaatatattaattaaaacaacaccaaggccccacttaaccagccgtttcctgtgacttttcattcctgatagttctaagga

SEQ ID NO: 892389 - DNA, 610 bp, Homo sapiens
aaggaaaacagcatgcaatttagccagagatggcttgttcttatcttcttcaatcagagttttctatcagtcagttgtaatgtgatggccttccaaacaggatgctgtccatccaccttggaaatgcaattcataaaccaaacaacttcttgttggtcaatgaagagttataaataggataccatccatgtgatcataaaatctggaagctcctcaagtggttacaaagtcagtccagaaggaaaaggggctaccttatcatgcatactatgagtattatcttgcattcttccagtactatcttcctgtatagaccgttttcactttattacggaaactctcttgggcactgttctccttgktagagtgtttctctgacattacgagtatttaaggtttcaagaatgttatatggccttcagtcatatgggaagtttaaattaaggcccagtaataagccaataattatttttcaaatggtatgcaccataccaccatgtgtgaaaatattgctccaaaatcccggtggtcactgttggacagcactcatgggcttttgtcataaactttaattgacataagtaggagttacagatacttctaaaataat

SEQ ID NO: 892390 - DNA, 629 bp, Homo sapiens
tcatgcctgtaatctcaggatctggggaagctgaggaagggaagatcgcttgagtccaggagttcaagaccagcttggacagcacagtgaaaccttgtctcattaaaaaaaaaaaaaaaaaaaaaaaaaaaaaaaaaaaaaaaaaaaaaacagagagacagcgagaaagagaaagaattactgaattacaaaggaatattacttcttggaggatgaraataaagtttctgaggttctgtgtttgtggttcacaaataagaatttttagtctttcttcctggccctattcattgattagatagtcaaatcaacatatttttccccaaatatggttgtgtggtataatgagagttttatattaaaaatccttagaggtcaacaatctctagaggagatttttctcctatgtacataaagacaggactgacccccaaggagaacagttgttcttgttcccctccctcttatgtcattatccattagcaaaaatataaccacacctgaacagatccctttccaagataatgactgtccccaaggagcatttaaattccagatagaactattaacatgttaatttgttcacagatccaatccttcttactaatcatttattgcctctcaataga

SEQ ID NO: 892391 - DNA, 603 bp, Homo sapiens
taactgaaggtatccatgatttaactagattatttttctgagaccttggactctttacttttgagggactgaatttaaatctcaatatttatctaaatatctattttatttttcttttctagctattttcttttctttctcctttcttccctaccttttccctgtctttcttctyatgttttctattattttctttgaagacacatttctattatcttttgaacactcaataatttattgagttcaaattattcattaaactggctaattattagtgatacaaggatgaaaaggcatcattaaaatcttcaaagagctcagatactggtggaaaaacactgtgctgaaaaatgaatatttactggacattctaggggctatgctaagaagaaagtggaaaggaggtaacagagcagggagattgaagtttgttgaaagagtcaaggagttattcacagaggaagaaatttcagccaagaacgagcaagcatttgaaaagtagacaaaggaagcaaggaaattccgggaacagtaagaatatgtggccagaggtgaagggaaatctagcgtctttaaggagctctaagtagttgaaactgactg

SEQ ID NO: 892392 - DNA, 603 bp, Homo sapiens
taactgaaggtatccatgatttaactagattatttttctgagaccttggactctttacttttgagggactgaatttaaatctcaatatttatctaaatatctattttatttttcttttctagctattttcttttctttctcctttcttccctaccttttccctgtctttcttctcwtgttttctattattttctttgaagacacatttctattatcttttgaacactcaataatttattgagttcaaattattcattaaactggctaattattagtgatacaaggatgaaaaggcatcattaaaatcttcaaagagctcagatactggtggaaaaacactgtgctgaaaaatgaatatttactggacattctaggggctatgctaagaagaaagtggaaaggaggtaacagagcagggagattgaagtttgttgaaagagtcaaggagttattcacagaggaagaaatttcagccaagaacgagcaagcatttgaaaagtagacaaaggaagcaaggaaattccgggaacagtaagaatatgtggccagaggtgaagggaaatctagcgtctttaaggagctctaagtagttgaaactgactg

SEQ ID NO: 892393 - DNA, 603 bp, Homo sapiens
taactgaaggtatccatgatttaactagattatttttctgagaccttggactctttacttttgagggactgaatttaaatctcaatatttatctaaatatctattttatttttcttttctagctattttcttttctttctcctttcttccctaccttttccctgtctttcttctcatgttttctattattttctttgaagacacatttctattatyttttgaacactcaataatttattgagttcaaattattcattaaactggctaattattagtgatacaaggatgaaaaggcatcattaaaatcttcaaagagctcagatactggtggaaaaacactgtgctgaaaaatgaatatttactggacattctaggggctatgctaagaagaaagtggaaaggaggtaacagagcagggagattgaagtttgttgaaagagtcaaggagttattcacagaggaagaaatttcagccaagaacgagcaagcatttgaaaagtagacaaaggaagcaaggaaattccgggaacagtaagaatatgtggccagaggtgaagggaaatctagcgtctttaaggagctctaagtagttgaaactgactg

SEQ ID NO: 892394 - DNA, 594 bp, Homo sapiens
gatgcttcatatccgctaatgaacaccttcacagctgctgagtggcatctaccattttcctcttctcttactgcagttattgaaaattatcttttatcaccacaaactcagtggagatgatgctgactgtgaagccaccacagtatgacatctttttggtgtttcccaccatgcatggtcctccctcactaatcaagctgttatgtttttttttcctgcaccacatcctgctccagtagaaaaccaaaaggaaggaaataccgttycctggcacaaacacaacacatagcttcaacaaagcaggtcttatactcccaagtattcatctagtgaaaattgctcttatagactttcctttgctgattatagaccatgttctaagactcagaaataaggtccatgtgggctctgacatgctatgtgtggtcctgaaatcacatctccactacaacacttctatcttgtccttaaacaaaatttgtctcctaagcttctccattgccttatgatgggttaccctcacatacacaccccacccaggctctccatgacttcctcaccagtcatatctgaacatgaatcttaatttagaga

SEQ ID NO: 892395 - DNA, 683 bp, Homo sapiens
ttatggttatcacttttgatatcttacttaagaaaaaatttcctacttgtacattatctatattatctaccaaaacgctaaaattttacttttgatatttgaatcctcaatgcatgtgaagttgtttgttttgcatggtgtcaaattgatttcaattttttagccagtgaaataagataagaaattaagtaataaggcttggaaatgaagaaataaaactgtcattatttgcagatgttataattattaacatagagaatgccaaaaaatcaacagagaattgttatataaaaatattacaggttatttaataaaatgtaattataaataataggagaattgagcasagtctcactctgtcacccaacatggaattcagtggctcaattatgactcactacagctttgaccttctgggctcaaggaattttcccacctcagacccctgaatagctggggctataggcacgcacgaccacacccagctaattttgtgtgtgtgtgtgtgagagactgagtctcactatgttgccctggctggtctcaaagtcctggccacaagcaatcctcccaccgcagcctctccaagtgctgggatacaggcgtgagcccccatgcatggtcatctattgtatttctacacatcagtaacacataagaaaatgtaaatatgtgaataaaga

SEQ ID NO: 892396 - DNA, 615 bp, Homo sapiens
accagataattctttgttggggttgcgggtgggagcctgtcctgtgtgatatcagatgtctagtgtcatccctggcttctacccgttagattcttgtaacacttctttcccaggcagtgacagccaaaatgtctctagacattgtcacatggccccgggagataaatttgccccaaatgagaaccagagacagggtcacactctggtgcccaggatgtagtagaagggcatgatcatagctcactgcagcctctctcaaattgctgggctcaagcaatcctcccacctcagcctcctgagtagctgtaactacagatgcayaccactgcacctggctaattttttattttattttttgtagagacagtctcgcttggttgcctaggctggtctgacacctctggcttcaagcgatcctcctgccacagcctcccaaattgctgggattacagatgtgagtcactgtgcctggccaagtctaatctttaactcaacattgcaagataacttaatatccctgctttgtagaggaagacactgagattaagagaggttgaatgactggccaaggtcacatacagattgagtggcagggccaggatttgaacccttgtg

SEQ ID NO: 892397 - DNA, 630 bp, Homo sapiens
tttccccaccgtggaaaaattgtctttccctaaccagcccctggtgccaaaaaggttgaggactgctactctacatcactagaacattttcctcctatctagctgtaattttgtagcctttaacaaatctctgtctctcccttcaccctacccttcccagcctctagcattctctgtcctactttttacttctgagatcaacttttttttttctttttagcttgcttccacatataactgagaacatatggtggttaactttctgttcctggattatttcmcttaacataatgtcttccagttccatacatgttgccttgaatgacaagattttattctttatcatggctgaatagtattctattatttatatctaccacattttccttatgcattcatttgctgttggacactaaagctgcatctgtatcttagctactgtgaagagtgccatagtaaacatggggatggagaaactactcccttcacaataaacagcttgtctgtgacatcttcaaataatttttattttattttcactatgaagttattcctactttctttgctgatggggacagttcaaatctctgagatgacttagtatattgcagagcatgaaatatggagtca

SEQ ID NO: 892398 - DNA, 630 bp, Homo sapiens
tttccccaccgtggaaaaattgtctttccctaaccagcccctggtgccaaaaaggttgaggactgctactctacatcactagaacattttcctcctatctagctgtaattttgtagcctttaacaaatctctgtctctcccttcaccctacccttcccagcctctagcattctctgtcctactttttacttctgagatcaacttttttttttctttttagcttgcttccacatataactgagaacatatggtggttaactttctgttcctggattatttcccttaacataatgtcttccagttccatacatgttgccttgaatgacaagattttattctttwtcatggctgaatagtattctattatttatatctaccacattttccttatgcattcatttgctgttggacactaaagctgcatctgtatcttagctactgtgaagagtgccatagtaaacatggggatggagaaactactcccttcacaataaacagcttgtctgtgacatcttcaaataatttttattttattttcactatgaagttattcctactttctttgctgatggggacagttcaaatctctgagatgacttagtatattgcagagcatgaaatatggagtca

SEQ ID NO: 892399 - DNA, 630 bp, Homo sapiens
tttccccaccgtggaaaaattgtctttccctaaccagcccctggtgccaaaaaggttgaggactgctactctacatcactagaacattttcctcctatctagctgtaattttgtagcctttaacaaatctctgtctctcccttcaccctacccttcccagcctctagcattctctgtcctactttttacttctgagatcaacttttttttttctttttagcttgcttccacatataactgagaacatatggtggttaactttctgttcctggattatttcccttaacataatgtcttccagttccatacatgttgccttgaatgacaagattttattctttatcatggctgaatagtattctattatttatatmtaccacattttccttatgcattcatttgctgttggacactaaagctgcatctgtatcttagctactgtgaagagtgccatagtaaacatggggatggagaaactactcccttcacaataaacagcttgtctgtgacatcttcaaataatttttattttattttcactatgaagttattcctactttctttgctgatggggacagttcaaatctctgagatgacttagtatattgcagagcatgaaatatggagtca

SEQ ID NO: 892400 - DNA, 623 bp, Homo sapiens
gaaaataatacactggaaacactttggggccttttgtttttttttttgagaccgagtcttgctctgttacccaggctagagtgcaatggcgcaatcttggctcactgcaacctccacctcctgggttcaagcagttctcctgcctcagcctcccaagtagcagtgattacagctcacgccaccatgcctggctaattttttttttattattatttgttggctaggctggtctcgaactcctgatctcaggtgatccacctgcctcggcctcccaaagtaggggacattgtttttaaaaagttaaaggatacaaaattaaaaagctagataggaggaataggttctagtgctctacactactgtaggatgattatattgaataataatwaacagtagagtttcaaataactaaaagaaggatattgaatgttcccaatatgaagcaatgataaatgcttgatgacagatatgctaattaccctgatctaagcaccatatattatatgtatcaaaatatcaatatgtaccccacaaacatgtacagttattgtgtgtcgatgttaaaaagaaaaaagaaaaatagtttggatggatcctcaaaatgttctatctcattcagcttc

SEQ ID NO: 892401 - DNA, 502 bp, Homo sapiens
agatatttgtggggcaaaaatgatatgctaatccaaaacaaaaaacctcaaggaaacagataaaacacaaaaaaacaaaaaagaacttagaaaaatgctaattagtcctgtcagagaaattaaaataaaatgacaayttacattttgtatggttcaaggcttagtcagtactggggccctttgaaaaatataaaattagaaatatacaattaggtgcaaaaataatatataaaaaagtcacaatttaatttactggaatcttagagattccagtcccttttttctgagatttatttagctagaaaagctttcatagaaatgcttcttgattttaagctattatttacctttctacttagaagttctacaatttccagcaacttttggtactagagtatggggccacctgcctcatggtaaatctactatgccaaaaaaaaaaaaaaaaaaaagaaaggatttagaaaacaagaatgagatctttaaaaatgtaactgccaaa

SEQ ID NO: 892402 - DNA, 618 bp, Homo sapiens
tttctttaatcttttttctccacatttttcagattgaattatttctgctgctctttcttcaagttctcttaatttttcctctgctatcttaaattggctgttgaagctgtcaagtaaatttttatttcagttattttatttttcaactctggaatttacatttttttatatgttctggttccctttctatatttcctatatgttaattcatcatcatcatattttcctttcattatttgaacataattyccttttaagtctttggacatatatacaaaacttccaagttttgtatataacttgctcggaagtccttgtctataacccaaatcatctgggttcactcaaagcagtttctattgttgactgcttgctttttaagtaactgagtatagaatatattttcctgtttctttgcatatcttgaaaattttgttttaaaaggtaaacatttttaaatattatattgtagcaactctggattctgttttatttttcttaggattgtatttttaataactctttttaattacttacctaaacaaactgtgaaatcactaatgtctctgctgttttttaattatttttgttttttaggctattttcctaaaggtttcc

SEQ ID NO: 892403 - DNA, 606 bp, Homo sapiens
caataacgtcctcatttccatctgagactttgtctgcctagacttcactgtccatatatccatcagcattttggtcacaaccatttaatcagtctctaagaagttccaaactttccctcatctttctatcttctgaatctgcctgaatctgtcttcctcaatcttctgcctgttatccagttccaaaggtgcttccacatcttcaggtatctttagagcaatgccgcactctttggtaccaattttatcaaaaatttttgtgttgctataaagaaatacctgaagctgagtaatttatttttataaaaaatgtttaattgattcaaggttctgcaggctgtacaagcgtggctccagcatctgctcctgktgagggcctcagggagcttataatcatggcagaaagtgtagggagagcaatgtcacatggcaagacagtgagcaagaggtgggggcggggaggtgcaacactctttcaaacaaccagatctcacataaactaccagagtaagaactcactcatcaccaaggggatggtactaagcaattcatgagggatctgcccccatgatacatacacttctaacattggggattacattccaa

SEQ ID NO: 892404 - DNA, 530 bp, Homo sapiens
tctacgaaaacagattacaactcagttacttgaggcaatcaatactgtccaatactgtcaagatttggactcagtatcctattgctactgtaaaacaaattaccacaaattttatggcttagaacaagacaaatttattttcttacagtctgaaagtcagaattctaaaatgggtcaacagggctgtgctccttctggaggctctagtggagaatctgtctcttgccttttccagcttctagaggctgcccgccttccttggcttgtggcccccttccatccttaaagcaataaccaggcaagtctttctcacatcacattactctgacataaactcttgctttcctcttccacatttaatgacccttgtgatcacamtgggtcacccaaataatccaagataatctcttaatgttaaggtcagctgattagcaaacataattttatctagcaccttaattctcacttgccatgtaacatgacctattcccaggttccaggaagtaggagttagacatctttgaagagtc

SEQ ID NO: 892405 - DNA, 633 bp, Homo sapiens
atgttaaacttacattatgtttacattacatatttcaccacaataaaaaatttttgaaggaaaaccagaactttaatgacaaacttaggacatattatgctctgaatatatagttttgataacgtctttcctggcaaatcaacaaggtaagaataaaaggatattctgaaatctttttttttctttggagacagagtcttgctctgttgcccaggctggagtgcagtggcacaatctcggctcactactaccttctgcctcccaggttcaagtgatcctcctgcctcagcctcctgagtagctgggattataggcgtgcgccaccacgcctagctaatttttttgtatttttagtagagacggggttttaccatgttggtcacgctggtctcaaactcctgacctcatgatccgcccacctcggcctcccaaaatgctaggattacaggcatgagacaccrcacccagccagatattcttaaatcttatgctcacactccaccccccccaaaaaaattgtccttcaggaaagcataatttaaggaaaaatttcccaaagtgccaccttcagcttcattcttagcaccagaggaagaattgcctgtcatataatgaaagatccttggtgttatc

SEQ ID NO: 892406 - DNA, 633 bp, Homo sapiens
taatttcactcccttcttttaataggtagagaagatgaatcacagaaaggctagtatttgtctcaaggtcatataaatgctagtatagcatctggggtcactggaaacgccagagaatgcagaaaatgccaggtctcctgaaattggcatgtggtccttaaaatgctctgaatcggccgggagcggtggcttaacgcctgtaatcccagcactttgggaggccgagacgggcggatcatgaggtcaggagatcgagaccatcctggctaacacggtgaaatcctrtctctactaaaaatacaaaaaaaaaaaaatagccgggcgtggtggcgggcgcctgtagtcccagttactccgggaggctgaggcaggagaatggtgtgaacccgggaggcggagcttgcagtgagccgagatcgcgccactgcactccagcctgggcgacagagtgagactctgtctcaaaaaaaaaaaaaaaacaaaaacaaaaaacaaacaaacaaaaaaaaacaaagaaaaaaagaaaaaagaaaagaaaaagaaaaaagaacactctaaatcatcccaccctgcagcagtcacaccaaatccttcatttcatagctttgtgaacactgcaagaattcggctcct

SEQ ID NO: 892407 - DNA, 666 bp, Homo sapiens
agcatgaacctcaggttcttagcaatgtttctgtgcaagatttcaaacaccataatggttatcaaccccgacagatagttttattacctgaaagtatttatttttaacccacgataaagttaacttgttaacaaacttgtgctaaagtaaaataaatatattaattatgtaactttgtatcatttataaatatggagaaaaactcaacttttatgaattattagtgactcttatcctctacctaacaccctaacacatcgttcagattactcatatttatagcagagcagcaggaactgggctttcatcttaccagcacattttgattcatggacatgcctgakatggtatcagagcaatgacctgatcagtcacaaggagaaacctgcaccatacctgtccattgtgttcccctcctgctgacactactctgtgcacttttcagaagctcttcttaacatctgaggactacaaaagtgggatcacttctccattataaattcaatgcaaccatattacactaaaaataagtacagacccaggccttgaaggcaagtagcaacatgtacttcttcatctatcctacctaaatgtctctaaatgtctgttgaactccagtcagaatgcctaggttcaaatctgggctccactatttcctaaatcagt

SEQ ID NO: 892408 - DNA, 613 bp, Homo sapiens
cgacagtaaacacccagactcaggctcctacagagggcccccagttctgctctaatatacctatttttctttaaataaaaaacatctgatttttgcaccccaggtatttaaagacacactttgatttctgaaaggcttttgaccacacatgargaactccttgggccttgaccatttttagcactttcacagtttctgattttgatcaagccacttaatcacccaggattctgaatctgaaaaccaggagggtttaattccactttcatgttcccttgaggagctgttggcagcaggatgaaggcaggtccatacagaacatgggaaggaagccaggaagccagcttttcctttcacatcaaagagatctagaaagcaaaacctgtctcacatttgcatacaatattagacttacatatggatgccatgtctgtcaaaagacaggctaattagggcattagtttctttaatggttgcgatttagtaattcacaaatagtcccacttaatttttcatcctatacctaaaggatctacttcacacttgaagtttaagaaggcttctcccttaagatagaaagaaggcattcaagtatcaaaatactggtttcctg

SEQ ID NO: 892409 - DNA, 613 bp, Homo sapiens
tcagtttcctggttttgataatggactatagttacgtaagatgtcactggtgaggcatgtgggtgatggatgcatgagacctctctgtactatttttccaagttcttgtgagagtacaattatttcagaatataagtttaatagcccactatcttttaagtttaaacaatgatgtggttcagagaacactcatggcttccctgctcagccatcaaagagaattgtgacttactgaatataacaataacctcaaagtcacaagtcacagttatgtgttttggctgtgctacttataatgcatgtgacacaggccagtaagttactcaaattttaagtttgagctttttcayttgtaagatggaacaatcgtgacactcaaaagatgaagaatgagtttttttccccattaattgtaaagtaccaaagcatcataatttgagagccataacaagattgggcaaattagaaaaaatgctgccacgtataattcaataacaagtgtccaattattacaaaactataccctaagtcaggcgacattcctccagtcttacaagtatggagaggtaagaactgattcaattgctaaggctagtaagctagttccagcctg

SEQ ID NO: 892410 - DNA, 571 bp, Homo sapiens
tcctgtgagaggtagaaaggggtgggctgagtaaacaacgcacccctgtcttgaattccacaaaggagtcaagaaaatatcctgcttcaataccaggggggctatgcagcgatgttatgaatgaccatcagattagagagaagtggtgctgcagaagtcccgagaggagaaattgtccaggggaaggtgactcaatgccacagagaagacaggtgagatcaggactaaacytgcccttttggtttggtaagcagggaatgtaagccaaaaataaaattctaagcccttccagctgagtgacggacccctccctgccccccatctctgccaagggcattccaaagaattatgaaaaactagtacaggccgtgatgggaaggaagggtctgacacgcctcattataccctcctccctttggaattcaggtatgactaaccagcactaaccttaaaacagcaatcttaggactgacaaaataaactccttgtagcaataagataccaacatgacagataacaggccctgaaagaaatcaaagtattttacctgaaaacatatttctttgacata

SEQ ID NO: 892411 - DNA, 571 bp, Homo sapiens
tcctgtgagaggtagaaaggggtgggctgagtaaacaacgcacccctgtcttgaattccacaaaggagtcaagaaaatatcctgcttcaataccaggggggctatgcagcgatgttatgaatgaccatcagattagagagaagtggtgctgcagaagtcccgagaggagaaattgtccaggggaaggtgactcaatgccacagagaagacaggtgagatcaggactaaacttgcccttttggtttggtaascagggaatgtaagccaaaaataaaattctaagcccttccagctgagtgacggacccctccctgccccccatctctgccaagggcattccaaagaattatgaaaaactagtacaggccgtgatgggaaggaagggtctgacacgcctcattataccctcctccctttggaattcaggtatgactaaccagcactaaccttaaaacagcaatcttaggactgacaaaataaactccttgtagcaataagataccaacatgacagataacaggccctgaaagaaatcaaagtattttacctgaaaacatatttctttgacata

SEQ ID NO: 892412 - DNA, 571 bp, Homo sapiens
tcctgtgagaggtagaaaggggtgggctgagtaaacaacgcacccctgtcttgaattccacaaaggagtcaagaaaatatcctgcttcaataccaggggggctatgcagcgatgttatgaatgaccatcagattagagagaagtggtgctgcagaagtcccgagaggagaaattgtccaggggaaggtgactcaatgccacagagaagacaggtgagatcaggactaaacttgcccttttggtttggtaagcagggaatgtaagccaaaaataaaattctaagcccttccagctgagtgacggacccctccctgccccccatctytgccaagggcattccaaagaattatgaaaaactagtacaggccgtgatgggaaggaagggtctgacacgcctcattataccctcctccctttggaattcaggtatgactaaccagcactaaccttaaaacagcaatcttaggactgacaaaataaactccttgtagcaataagataccaacatgacagataacaggccctgaaagaaatcaaagtattttacctgaaaacatatttctttgacata

SEQ ID NO: 892413 - DNA, 598 bp, Homo sapiens
agcaggtacaccaggatgccatggccccaggctggccttggcattactacttcaagctaaatttcaatttagagaagatgcaggtcatttctgatgaccaacatctggatctccccttttcttctcctatcacaacaaacagcatatattcccactaattattattattattattctttgagatggaatctcgccctgtctcccaggctggagtgcagtggcgtgatcttggctcactgcaacctccgcctcctgggttcaagtgattctcctgcctcagtctcctgagtagctgggactacaggcacgtgccaccatgctcagctaatttttttgtatttttagtagagrcggggtttcgccatgttagccaggatggtctccatctcctgacctcgtgatctgcccgccttggcctcccaaagtgctaggattacaggcgtgcgaccagtgcacggccaattaattattcatgttaacatacatttaaaaataagcacaaaagccttgacttttcccacctatgcaattcagatggcagtatctttcagatagtatttgcagattaaatgtgttcagtgatagttacccagaatga

SEQ ID NO: 892414 - DNA, 611 bp, Homo sapiens
gacagtaacagatcagtggcttggaaaggttaaaggcaagagagggtcgaacaggaggaacacagaggatttgggggatagtaaaagtactcagtatgacactacaatggtgggtacatgtcattagacagttttccaaactcacagaataaacaatgctgagagaatgctaatgtaaactatggactttgggtgataataatggtgtcagtgtaggttcactgattgtaacaaatcgctctaagggggacgctgataatgggagaggctgtgcaagtgtatgaacagggagtatatgggagaatctcagtaccttctgcctaattttgctgtgaacctaaaactgctctaaaacaataaagtctatatttattctttcacagtctctgttaagacggacttttttcttcttgctacagataaasagggaggaaatgacagagagaaagctctgattctcatggttatgtgaatatggactatcatgagatccaacctacttgcactgatgagggaagagggaagacaaccaatgtcagttcctgaaatgcaaccaaccaggggaaagctcagcaggaagaggttcagactcttcctctgtggatatgaaa

SEQ ID NO: 892415 - DNA, 605 bp, Homo sapiens
tcagtggcttggaaaggttaaaggcaagagagggtcgaacaggaggaacacagaggatttgggggatagtaaaagtactcagtatgacactacaatggtgggtacatgtcattagacagttttccaaactcacagaataaacaatgctgagagaatgctaatgtaaactatggactttgggtgataataatggtgtcagtgtaggttcactgattgtaacaaatcgctctaagggggacgctgataatgggagaggctgtgcaagtgtatgaacagggagtatatgggagaatctcagtaccttctgcctaattttgctgtgaacctaaaactgctctaaaacaataaagtctatatttattctttcacagtctctgttaagacggacttttttcttcttgctacagataaacagggaggaaatgacagagagaaagctctgattctcatggttaygtgaatatggactatcatgagatccaacctacttgcactgatgagggaagagggaagacaaccaatgtcagttcctgaaatgcaaccaaccaggggaaagctcagcaggaagaggttcagactcttcctctgtggatatgaaaatggga

SEQ ID NO: 892416 - DNA, 647 bp, Homo sapiens
cctcttttcataattctgattataaagtaaggctctgtcttctactcttcttgctttctcactcagacatatcatccatgcctaagggtcaacagcctcctccactctttcaattctgacctttcacttagcattcccagtckcttgctgcatgcttccaattgcagggtattaattacttttagcaaatgtactagaatcaagtgcccaactgattatcaaattccggaagtgtacccaaaggacaatgactaattcctcattgggtcaaagtctttcctatgtggaagcaagagaaaggaacagaactaacactgaacattgtgaggagcccaaaacatgactcctgctgaacacattctatttggttgtagaacccaaccaatataggccccgttgatcgatttccccacaacaagaggaggtcataaaaatcatgcttccactttctcaatagatacttatcgctcatgaatgtctgtgaatcagaagaccatgggactataactctactccactcaaactctccatactcccaaagctggacctcatggtcctcagatcatgtaatactcagacacagcactccagtaaaccactttctggccagaaactcatccttcccatagttcctctcccttccatcc

SEQ ID NO: 892417 - DNA, 599 bp, Homo sapiens
aggaagggagctcaggtgagggcttgcagatctaagatgaggacagagctggtgagagaggcagatgagttccctatttgtcaaaatttctgtcttctggactctacttcctccctgcaggtgggcattcttccttgcccttgtcttgagccaaaagacagagaggcatccaattatgctgtcactcccccaggttggcagtaacagcagcaggctgtaactctgcccagggctcacaagctgcagctaggaggtttccagcagtcaaaaggcttagagtagatagcctcttattttctctggagtccccaagaggatcagttagacaccaggcatcttactcrtatgctattggtctcttaacaaaccctggcctagagtgaaagttaaaagtctttgattcttattctttcctccatgatgtgtctttatgaaacatcaagtgaggtccctttatgccctgcactttcttcctttgtaaatgaagagcaatatataataatcactggtatttattgaataaacacagtgtgccaagatgagtcctgagtactatagatggtttctcatttacttctgcctataaaccatgagttacg

SEQ ID NO: 892418 - DNA, 599 bp, Homo sapiens
aggaagggagctcaggtgagggcttgcagatctaagatgaggacagagctggtgagagaggcagatgagttccctatttgtcaaaatttctgtcttctggactctacttcctccctgcaggtgggcattcttccttgcccttgtcttgagccaaaagacagagaggcatccaattatgctgtcactcccccaggttggcagtaacagcagcaggctgtaactctgcccagggctcacaagctgcagctaggaggtttccagcagtcaaaaggcttagagtagatagcctcttattttctctggagtccccaagaggatcagttagacaccaggcatcttactcgtatgctattggtctcttaacaaaccctggcctagagtgaaagttaaaagtctttgattcttattctttcctccaygatgtgtctttatgaaacatcaagtgaggtccctttatgccctgcactttcttcctttgtaaatgaagagcaatatataataatcactggtatttattgaataaacacagtgtgccaagatgagtcctgagtactatagatggtttctcatttacttctgcctataaaccatgagttacg

SEQ ID NO: 892419 - DNA, 548 bp, Homo sapiens
ctccatgttttggctccatgtttatgtttttttcccagctgttgtgtgtattttgtaaaattgtgtctatcaggtaggtgggtttggttgctattttctatagtgtattatttttggattcagccttaagctttcttgttctgyattgagagttatgttgatatttcagcaagagactaccagaaaaagtcattaattgttcagacacagtgtaaaaaaatattatgagccaaaacaattattgaatttattttgcaggaaaccattgtctcaccacttttagcccttagtcaaacttgatccaccctctgaaaggctgttttaaaataattgtttctataggttaagtattgatttctcaagcctgcaataggcaccctcttagaaagggtatttcagggattccagtgggataaatagctacagttgtgcctcatcctccccttgatttcaaagattctcaaaaattatgtgtaaaaaaaaatatgaaagacaaagctatttatagactatgaaacttaaattgtcccttctgatgcattgctaga

SEQ ID NO: 892420 - DNA, 669 bp, Homo sapiens
gatcaaattattgttctaaaaaaatactaaaactgcaaaaatacttggtcctcaaaatttaggataatactatctgatttccctaatgtatctctctttcaattcattcacttctttcttcaataaacctaccttaagagtttactatgtgataggtttgcaataaaccctttgtaatgcaaaagactaatacatttgtatacaattatataaagcactttacttgaaattaattttatacataaaattgtatttatgtgtatgttatgtatatgttcaaatcagggctgccataaatgccatggagaagttcatggtgctgtgaaagcatggagattctccatattcayggcagttaagaaatggtttccaaggggagtggtgtgtgctgtgaaatctgaaggatgcctgggagccaccttgttgagagagtgtgtgtgtggtgtgtgtatgggtagggggtgatatggtttggatttgtgttcctgctcaaatctcatgttgaaggaagggcctggtggcaggtgattggatcatggaggtagacttcccctttgctgttctgatgacagtgagtgagttctcatgagatatgcttgtttataaatgtgtagcacctaccctccatctcttttcctccttctccagccatgtaagatgagctgcttc

SEQ ID NO: 892421 - DNA, 618 bp, Homo sapiens
taacttgtttttcactttacaggctcataggtgaaagggacttaccttgtcccagatgagattttggactgtagatttttgaggtaatgttgaaatgagttaagactttggggaactgttgggatgggatgattgtattttgcagtgtgagaaggacatgagatgttggaggggctgggggcagaatggtatgtttttatttgtgtccctgcccaaatctcatgttgaatttttatccytggtgttggaggaggggtctggtgggtggtgttttgatcatgggggctgatttccaaacccttgatgttcctatcatagtaagttctcatgagatctggttgtttaaaagtgtgtagcacctcccccttcactctcctccttctcttctggccatgtaagatgttcctgcttcccctttgccttccgccatgattgaaagtttcctgaggcttccccagccatgctttctgttgaaccatgagtcaattaagccttttttctttataaattacccagtctcaggtagttctttatagcaatgtgagaatggacgaatacagggggtagatagaatatttctgccagaaggcatagcgtatgcaaaagttctttagtggg

SEQ ID NO: 892422 - DNA, 618 bp, Homo sapiens
taacttgtttttcactttacaggctcataggtgaaagggacttaccttgtcccagatgagattttggactgtagatttttgaggtaatgttgaaatgagttaagactttggggaactgttgggatgggatgattgtattttgcagtgtgagaaggacatgagatgttggaggggctgggggcagaatggtatgtttttatttgtgtccctgcccaaatctcatgttgaatttttatccttrgtgttggaggaggggtctggtgggtggtgttttgatcatgggggctgatttccaaacccttgatgttcctatcatagtaagttctcatgagatctggttgtttaaaagtgtgtagcacctcccccttcactctcctccttctcttctggccatgtaagatgttcctgcttcccctttgccttccgccatgattgaaagtttcctgaggcttccccagccatgctttctgttgaaccatgagtcaattaagccttttttctttataaattacccagtctcaggtagttctttatagcaatgtgagaatggacgaatacagggggtagatagaatatttctgccagaaggcatagcgtatgcaaaagttctttagtggg

SEQ ID NO: 892423 - DNA, 633 bp, Homo sapiens
cacacccacacacacacacacacacacacagagagagacagagagagagagagagagagagagagatcctaactatattatagaaagacatgagctcaaaaaactcagtggcccagccaattcaagcctctaactgacccatcagctaaataaagccacacaagtaaccactggcaagaccagcagaagaaccatccagcagaacctagcccaaattgagaatagtaagcaaacaaaatagttttttgtttgtttgtttaaagacgctaagttttggggtgtttacttgaacagcaatgggtaacggaatcagggttatttccctttctttcattccccctttctaccagacacattttttagattttttctcatatgtcctcytttcactaatcaccatttggtagatccattaaagtctttttacgttgatctaaaatgtaactcttgagtcatttacgacagttatgacatgtgttaatcaaaataggatttggggaaacctgagatgtccaccctacttgctgcaatggctgaacattatatcaaatctggacttatgagtgccatacagcttcataaacattgaagcacctaacatttttcatgcttttgcaacttactatgacttgc

SEQ ID NO: 892424 - DNA, 610 bp, Homo sapiens
catctgactttttttatatgtttaacttttcattggtatttttgtctcccctagtgaaatgtaagcttcatgaaaagaggttgcttgtctatttgtatactatgataacccctgaatgtgaaacagtgccggaggtgtgggagacactcacaaaaatgttttcartgaatgaatggtaaacagaaaatgtcttagaggccccatcttactttggaataaaagtatataaataaataatgatgagatggtaaaacaaatatgtttatcgtgtatggaggatatatttatatatttatagtgtataattagatatattaatttccagttgtctttaaaatatatccagcatcagaccacgtctcaccatcaccatcacccaagtcaccaccacccctcaccagagaaattgcaattcccctgattctgtgcttttgaccttgccccattatatctgttctccacagagaagttagtgggatcctgttagactccttgttctttgtcttcttatgaccctccatggtattcccattaaactaaaaatactactttattccaaagtaagatgcagccactaagactatataaatatatattcaagaagaaatgt

SEQ ID NO: 892425 - DNA, 610 bp, Homo sapiens
catctgactttttttatatgtttaacttttcattggtatttttgtctcccctagtgaaatgtaagcttcatgaaaagaggttgcttgtctatttgtatactatgataacccctgaatgtgaaacagtgccggaggtgtgggagacactcacaaaaatgttttcagtgaatgaatggtaaacagaaaatgtcttagaggccccatcttactttggaataaaagtatataaataaataatgatgagatggtaaaacaaatatgtttatcgtgtatggaggatatatttatatatttatagtgtataattagatatattaatttccagttgtctttaaaatatatccagcatcagaccacrtctcaccatcaccatcacccaagtcaccaccacccctcaccagagaaattgcaattcccctgattctgtgcttttgaccttgccccattatatctgttctccacagagaagttagtgggatcctgttagactccttgttctttgtcttcttatgaccctccatggtattcccattaaactaaaaatactactttattccaaagtaagatgcagccactaagactatataaatatatattcaagaagaaatgt

SEQ ID NO: 892426 - DNA, 612 bp, Homo sapiens
cagtggtctgaaccgaccccacaatatttccaaggtatacatgtcttaagtaattatgtctgattacagtcttaacctggagcagcatcattgcttttaaatattagataaaattacaatgcttttcattataattgcttcttcccacttttcatgatgcttctgtaaagtgcattgaaagggaaatacttaaaggaaaaacaacacatatttgataaactaggataattaagaaaagtttgacttgagggaaaaaattgtcaaggatggagagaaaagccaattattaaatagaaacacaactgagaatgcaatccttagccaatcatctgagattcaaaaagtgtatcagcctccttgagcctggaaaagccttgattttctttgtgtgtttcaagtatatttctytgccatatttttgttccctcacaaacatggggggctaaggaaaattataaactacattttgaactgcagggggcattggaagggctggccaactctctgaaagctgagaatcagaaagacagattttcaaaaggaattatgcataagtggtatgtattacaagcacacaattccctttagtgcttctggaaagagccaaagcat

SEQ ID NO: 892427 - DNA, 640 bp, Homo sapiens
ctcaattagaaagcttaattcaaactgatccccttgggaaacagtgagtctcattgcttaatatgcataatgggatttttatattgtacagaagctgttgtcaaagaggatagagacatgctgcagagcttttaaagctgagatgcctggcaggggatgatgaccatgctggctggagaaaaaaaaaatcatctctgtgagcccatgtttctttcttctttctttgaagcttagttgaatatttgaaacctatatgttttaaattcttctcaaggaatttagccctaattttacagagttatattttttacaaagaaatgtagaaactgatgaagataaaggaacaagctctgctctgtaaggctgaaaagttactttattgatggaaaatcccagaagttttaggatcttgccttatcaattgcttttacaattgactcagagaatgattcctcaagtcttgggtgggtgatagctgaagatagaaaaatttgtaaagtayactatcactaaggaaaaaaatttcatctagataaaagtattttttctagataaaaataccagataaaaatactagataaatattttttctagataaaattatatataaagtagtacatatatataaaaaagcttttat

SEQ ID NO: 892428 - DNA, 609 bp, Homo sapiens
aaaaattgaggaacaaagagattgattgatttataaagaatctcaagggaaattagaatcaaagctataaaaaagtatttacagctagaggtaattttacagctgggttttggaatcctttccccagcccttgcaatgacattgcctgaggtgctctctgatttgcatcttagaaagaataaaacttatcgcagtgcattcaggyggcactacccagtcctgcctgggtaggcagactactgggtaggtagatatccacctactcttggtgaagccaaagatgttcatactggtcaggttacagggtgacctactgtcctggtttcagcaccaaatgtcctgcatccctggaaagccacccagtcccaggtcagtaaccctcattgctaaccagaactgtcctccacattgaaaatacacattgtatttcttttcttgttgcttttcctggttaatatcttttttgggtgattcacacaaattacacttttttagttttattatagcatttgatattaagatccatcattacccttagttaatcctttggacttaagagacacaaccttagatataccaaagacaatcatgggaagagtgtgtaaagag

SEQ ID NO: 892429 - DNA, 652 bp, Homo sapiens
tgaagcaataataaatattttctataatacattgacctaaaatcatacagattctgagggaggttgcaattcagttgggcatttctacatggtggatggatgcacatataaattgctcagccttcacttctgcaggtccctgtagcattacataataaaagcctaaactgtttataccttatgtttcgtaattacaagacattttactctctccaagtaaaaacacgaaaagtgcttaatgtcaatcataatagaatgtataacagtgaagaactgacaacaacttacccaaaaaagtggggtggattaagaaaactgtgacatatccagacaatgaaatattaaatagccattgaaaaggtggattatgttcaggaagaggtacctatgtgaaaatgacaggagaaaataggatagagtcaggccaggcgcggtggtttaygcctgtaatcccagcactttgggaggccgaggcagctcaggagctaagagaccagcctggccaacatggtgaaaccctgtctctactaaaaatacaaaattagctgggtgtggtggcgaacgcctgtaggcccaactactcgggaggctgaggcaggagaatcactggaacccaggaggcagaggttgcagtgagctgaggtagtgccat

SEQ ID NO: 892430 - DNA, 583 bp, Homo sapiens
taggtcaatacaattataatttttcaggttatcttttctattagatggaaatcatttacatctctgccacatacaaatcctataaattaacatgtaatttcacagaatctgcatcttaaacaacagtaaatttaaaaataaagagacacctctttagagaatcaaatcacccttggatgaggctattgtactatggccaccatgacaaagaaggtcacacaatcttttttttttttttttgcttcattttcaagtttttataagttttattaaaaaatagaatagtcacttaaaaacaatttttttyttcaccttgatctagcaaggaaagttaaccttgagtttgccatgagccttccatacacaatgttctcagaagaaaacatagtttccaatatataagtgaagaataagaagtctctctcaataggaaacaatttattcagtatggcaaaggacaatggctatgtcaaggaaaattctaggaagggaggatttacattcttttacatatttaaattccttttcaacagatgctggcgaggttgccgagaaaaagggatgctttcacactgttggtggg

SEQ ID NO: 892431 - DNA, 636 bp, Homo sapiens
acattaggaatccacaaaaatattttaattttatttaagtcagaagaaaaatattaataacaataaatatatgataataaatccagcctgaattgtgttcatctttatatcaacataatcataaaatataatattagcttagttatttttatgaaaaaagggcgaaagtgcccactcgaggcccagaaaagtcagaatttggcagataccatcttcttgacagaggaatagaaacttcacrctctccctttctaaggcccttcactggagctaatttttcctcttcaatataataaaataacaataaccaacacttctatagcttctacaatgtgccaggaatgtatatatgagctttatatgcattcttcacaaacccctgtgaagaagctgctactattgttagcagcagaaagcatctgagttgcacggtaccaaagcaggttagcagtggcagatccacgagggcctgaagcaacctgttgcctcctcagaagaaagaatttgaatgaggggcagaaggcagaaggagagatagaggtaagtttagagcaggggagaaagtttattaaaaagtttggatcaggaacaaaagaaagtaaagtacacttggaagagggccaagcaggcaacttg

SEQ ID NO: 892432 - DNA, 633 bp, Homo sapiens
ctaggctcaagcaattctcctgcctcagcctcctaaagttcttggattataggtatgagccaccgtgcccagcctatttccaaatatcattatttggcaaggattgttctattgatatactgtcccagtggcctctccttggtcccataatgaactgaaaacagcctgcaggtgatgaagtacttgggagaaacagctgggatgtggctggaacaaagttaagactgaaatttaggggccctttaggattctgctgctgaagactttagaaatratgttacatctttgtaactaggggcatatgttgatccaacttttgatatttgcagcaggaaattgggttaagagctgaatggtctcccttgcctaagcatttataacatctatacagtagtgttcccccttgctatgaattaatacgaacaatgggggcaatgttattatacttatgacaagtttcaatttacaaataggcagtacaccagaagtatgcttttaggtaggctgaactcaaaagaacgtattagtttagaaataaagatatgcatagtagattaagttttcagggtagaccacaaacctctagttaaaagccatacagtggtagaaatagtttaggtttttaatgccaac

SEQ ID NO: 892433 - DNA, 638 bp, Homo sapiens
cacttttctcctgtcctatctatttattttttaaattttttataaagacaggggtctcactgtgttgctcaggctggtctccaactcctggcctcaagtgatcctcccaccttggcctcccaaagtgctacaattacagatgtgagccactgcacctggcccatccttttataaaggatccattccacattaggmggggaatgaagtcattaatactgtagtgagaagtactcccagcccacgtggagcgaaaggattcagggcagcttgtcttgggaaatcagtccatgaaaaagctgaaagagggcatagggaaacagaagttgagagggcaccccaagtttggcctgcttcatagctgcattctcaaactgtgagaattagttttgggtgatttgtgctaaaatctagggcattgctagttgaaggcatttggtatgggggtgtgtgtgtgtgtgtagcgtgttgtgtttcgacttggttacacttccaaaaagctttgggtgaaatccttcatggtttgctgggaatcactgtctgagtccagatgacaaagggagccagtttttcccaactttccttttaggtttcaatttgatctcatcaagaggctgcttttgccaccactgcctgtagga

SEQ ID NO: 892434 - DNA, 638 bp, Homo sapiens
cacttttctcctgtcctatctatttattttttaaattttttataaagacaggggtctcactgtgttgctcaggctggtctccaactcctggcctcaagtgatcctcccaccttggcctcccaaagtgctacaattacagatgtgagccactgcacctggcccatccttttataaaggatccattccacattaggaggggaatgaagtcattaatactgtagtgagaagtactcccagcccacgtggagcgaaaggattcagggcagcttgtcttgggaaatcagtccatgaaaaagctgaaagagggcatagggaaacagaagttgrgagggcaccccaagtttggcctgcttcatagctgcattctcaaactgtgagaattagttttgggtgatttgtgctaaaatctagggcattgctagttgaaggcatttggtatgggggtgtgtgtgtgtgtgtagcgtgttgtgtttcgacttggttacacttccaaaaagctttgggtgaaatccttcatggtttgctgggaatcactgtctgagtccagatgacaaagggagccagtttttcccaactttccttttaggtttcaatttgatctcatcaagaggctgcttttgccaccactgcctgtagga

SEQ ID NO: 892435 - DNA, 638 bp, Homo sapiens
cacttttctcctgtcctatctatttattttttaaattttttataaagacaggggtctcactgtgttgctcaggctggtctccaactcctggcctcaagtgatcctcccaccttggcctcccaaagtgctacaattacagatgtgagccactgcacctggcccatccttttataaaggatccattccacattaggaggggaatgaagtcattaatactgtagtgagaagtactcccagcccacgtggagcgaaaggattcagggcagcttgtcttgggaaatcagtccatgaaaaagctgaaagagggcatagggaaacagaagttgagagggcaccccaagtttggcctgcttcatagctgcattctcaaactgtgagaattagttttgggtgatttgtgctaaaatctagggcattgctrgttgaaggcatttggtatgggggtgtgtgtgtgtgtgtagcgtgttgtgtttcgacttggttacacttccaaaaagctttgggtgaaatccttcatggtttgctgggaatcactgtctgagtccagatgacaaagggagccagtttttcccaactttccttttaggtttcaatttgatctcatcaagaggctgcttttgccaccactgcctgtagga

SEQ ID NO: 892436 - DNA, 638 bp, Homo sapiens
cacttttctcctgtcctatctatttattttttaaattttttataaagacaggggtctcactgtgttgctcaggctggtctccaactcctggcctcaagtgatcctcccaccttggcctcccaaagtgctacaattacagatgtgagccactgcacctggcccatccttttataaaggatccattccacattaggaggggaatgaagtcattaatactgtagtgagaagtactcccagcccacgtggagcgaaaggattcagggcagcttgtcttgggaaatcagtccatgaaaaagctgaaagagggcatagggaaacagaagttgagagggcaccccaagtttggcctgcttcatagctgcattctcaaactgtgagaattagttttgggtgatttgtgctaaaatctagggcattgctagttgaaggcatttggtatgggggkgtgtgtgtgtgtgtagcgtgttgtgtttcgacttggttacacttccaaaaagctttgggtgaaatccttcatggtttgctgggaatcactgtctgagtccagatgacaaagggagccagtttttcccaactttccttttaggtttcaatttgatctcatcaagaggctgcttttgccaccactgcctgtagga

SEQ ID NO: 892437 - DNA, 639 bp, Homo sapiens
gatatcactgtatatttggagtcaccctatatttggacacgtgatatctttaaaaggcagacacagttttgaagtattctgtgtattgtttcatttggagtgaagggaaagtatgtaattcttcttcccattggtgggcacattggattggggaatgtctgtttatatccccagtttgaacatggatcttccttctcagccagtgcccagccttaaggctattggcaactytgaatctgttggacaccttttagagttcacctttttttctgcatttgactccttaattcttaccatcttgtagtcctgcccttcctgtgacaacagcctggctgacataacccctgcccaccccgcaactgttctttcccagtttgctgtgaatgccagtgttccccaccagcctgttgggtctttcccccgcaccacttctctgccctcaccttcacaatctcacgtcctttcaaggcttcagcatctgcccatattgaggttgaaaactggtagcctgcaaggttggggttatggttgttttaaatatgagtttgttgccaacatttaaaaattgagatcaaatccagacctctggcttcttctgtagaatgaggtgagctggcagtgttgggaccgagccgtgag

SEQ ID NO: 892438 - DNA, 639 bp, Homo sapiens
gatatcactgtatatttggagtcaccctatatttggacacgtgatatctttaaaaggcagacacagttttgaagtattctgtgtattgtttcatttggagtgaagggaaagtatgtaattcttcttcccattggtgggcacattggattggggaatgtctgtttatatccccagtttgaacatggatcttccttctcagccagtgcccagccttaaggctattggcaactctgaatctgttggacaccttttagagttcacctttttttctgcatttgactccttaattcttaccatcttgtagtcctgcccttcctgtgacaacagcctggctgacataacccctgcccaccccgcaactgttctttcccagtttgctgtgaatgccagtgttccccaccagcctgttgggtctttcccccgcaccasttctctgccctcaccttcacaatctcacgtcctttcaaggcttcagcatctgcccatattgaggttgaaaactggtagcctgcaaggttggggttatggttgttttaaatatgagtttgttgccaacatttaaaaattgagatcaaatccagacctctggcttcttctgtagaatgaggtgagctggcagtgttgggaccgagccgtgag

SEQ ID NO: 892439 - DNA, 615 bp, Homo sapiens
aacttaaagcttttgagaaagtaggacattttatggcttctccttgcaaagaagattactttagaaaactgaaaaaataactttgaagagaaggatagaaaaatcgggggaccaagcacattattattttctgggatctattatttggtatgttggaaatcaagtacaaagctacgtaaaagaattcttcatattgcaaaaacattaccgcaatactttgtaaaataagggctatagcataagaaaagatcacagtcccacaactcaagcaagacagaccgtctgcattttgaagtcatccctgccattctttgcccacatgtgggtatgctgtatattctyctgctgaacaattttgcagccttagaagggccttcatgggttgggtgtggtggcttacacacttaatcccaacactttgggaggctgaggcaggaggatcgcttgagctcaggggtttgagaccagcctgggcaacatggcaaaaccccatctctaccaaaaaaataaaaaaagtatccaggtgtgacggtgcatgcctgtagtctcacctacttggaaggctgaggtgggaaggtcacctgagccagagagatcaaggctgcagtgagccat

SEQ ID NO: 892440 - DNA, 651 bp, Homo sapiens
tgagagagtctctttctgttgcctaggctggagggcaggggcacaatctcggctcactgcaacctccactttctgggttccagagattctcgggcctcagcctcctgagtaactaggactacaggtgtgtaccactgcgcccagcttatttttgtatttttagtaaagatggagatttgccatgtttcccaggctggtatcaaactcctgacctcaagcaatccacccacgttggcctcccaaagtgctgagattacaggcatgagccatcatgcccagcaaaatattgtattttaatttaaatggagggtccgctgttacttaaactatcattgaataacaatgtttagaacaacaaagaccatttctgtacrctagggacagctattagacatttgttcaagtaatttcatatttactacaatacactttttttttttgaggcagagtcttgctctgttgtccaggctggagtgcagtggcgcgatctctgctcactgcaagctccgcctcccgggttcatgccattctcctgcctcagcctcccaagtagctgcgactacaggcgcccgccaccatgcctggctaattttttgtatttttttagtagagacggggtttcaccatgttagccaggatggtctcaatctc

SEQ ID NO: 892441 - DNA, 623 bp, Homo sapiens
acactggtgaatataagtgtttctctgagttctgtgagcagtcgtagcaatttaatcaaactcaaggagggggtcatggaaccccaatttatagccagtgaatcaaaaagcacaggcaaaataacctggggcttgtgattgccccagaagcagagggcagccttgtgggactgagccctcaccctatggggtctgtcttatgctagctccaggtagatggcatcggaactgaactggaggacaccagttggtgtcttgttgcagaatggattgcgtccttggtgtgtggggaaaaccacacacacatttgatcacagaagtcttctgtgtttgttgttgtggagtgagagcagaggaaaaccagattgagtttccccccatcaatttctaacctcagttccccctcagttagrcatagtgacccaacacacatttctatcaacaagtagatacagaggcacagtgacccaacgcacacatttcaataaataggtagatgttgggcatagtgaagcaacatacacatttcttatgcaccttatacacatattcatcatgtacctagcctgcttgggctgctataacaaaatacccaggtggctggagtggcttattgatatggt

SEQ ID NO: 892442 - DNA, 637 bp, Homo sapiens
aaatatctcgcttttgcagcttttataaaaacatgtgaacacatttctggaacaccctcctaggccttggaagaggcttgttatagtaaggcacctccaaatttaagtcattagattaaccattaatctggctctgcaaatgccttagtgtatgctgcagacccccccgaccctgaacccaagatgctgcagcttgaaacactagcgctgctgtctctggaaatcagatatggctgctgctgccctagagaakattcttcactatgtctgcttcggtttgtcaccacctttcaattcaaagtctggggagggtgtttggcattggttgagcctaaatcttatgccttcgccctagctgcggggggaggctgggaatgtatctgttaatttgagcttatagagtgaagacaagttctgccttctagtgtggcagccctcaaatcaaagcagaaagtttattgtttgtagttgcattaaaaaaaagcatgaaatgatataaaaggaactgatgaaagtagttacctgtgggggagggtagtgggaggagattaggagccagacttcttaatgtgagcattttcctatcattttgagttttaaaacgtgtgcatatattatctagtcaaaaattaaaaat

SEQ ID NO: 892443 - DNA, 598 bp, Homo sapiens
aaacgtcattattcccacacaacataatcacaacataattgtatgtataaaactctgaagaacttgcagacagttgagtaattttagcaaggtcattggatataaggtcaatttaaaaatcaattgtattttatatataaggaatgaacaattagaaaatgaaattttaaaaacagcatttacaatagcacggaaaatcagaatcgtgggaataaacccaaagaaaatttttctatacagaaactacaaaactaatattgctaatattatattattaattagtaattattagtaagtaaagagagagatgatgttcatgaatggaaagagtcaatattatgcagatgtcagttatctccaaattgatctatagattcaatgtaatcccaataaaaatcctggctttttttttcttttgttttcttttctttttttttgagacagtatctygttcagatacccaggctggagtagagtggcacagtcatggctcactacagccttgacctccagggctcaagagagcttccctcctcagcatcctgagtagctagctgagatcacatgagcatgccactatactaggctaattttgttt

SEQ ID NO: 892444 - DNA, 622 bp, Homo sapiens
aaaagaaggtgcaggaattgctttaaaagaaaacaaagagacagaaagtaagacgtgtaatttacaatgtcctgtaaaggttgcctcttgcacacatggactgaatgctgtgactacagaggcacttttcaaactagtacaagaaggaacaagattgcccaatggtgccatcacttagaaaagaaccctttattttacctccacctaattgctgtgcctttgcagtataagagggcttcaagtcttggttcggacggtcagtatgactctgtgccctcagtctccccatctgagaaatgaagattcctgttgtacctgggccagcttcatatgacctgagcaatcactcagggccctgtgttcaaagcattaawctatgcttggtttaatgctctgctattatcatcctggaattcttaataatccttgaacgaggggccccacattttcgttttgcactgggcaagtaaatgacgtagttagcctagttagtacctatctcaaagggttgttgtgagtattaatattttggaaacactttattatttggcacaccagtcatcattcactttaattccagctcccataactgtgttgaaataccaagtggctatgactgttt

SEQ ID NO: 892445 - DNA, 627 bp, Homo sapiens
caatcacatcacttttgtacttacagttctttgctggcttaagataaaagacggaaattctcaccaaagtctccagggccctgagctctggcctgcctacctccaagtcccctggctcttccctttgctctgctccagctgtctagacttttcyccatccttcaagacagccatgctccttttggatttcaacatgctggtccctttttctaaaatgttcatcctcccgcaacacccgggttttgctagtttttgcttggccaattcatcctctagctttctcatccatcttgccttaaaatgctcctgaatatctcccttcctccctcgggctcagctccttcattcctcgcttctgctcccatggttcctgtctttcgtgactgtccgttcacggggcattattttccaatgtctgtcttccctgctgtaatagtaactgtatgcattcatccactggagttgcttccatcttttggccatcataaataatgctgcaatgaatattggtgtgtaagtatgtttgagtttctgctttaccaggtaagaaagcctggggatgctgtcacagtgagtaacagtgcccacttagacatttggaagccagtgcagacccacagggcagtg

SEQ ID NO: 892446 - DNA, 627 bp, Homo sapiens
caatcacatcacttttgtacttacagttctttgctggcttaagataaaagacggaaattctcaccaaagtctccagggccctgagctctggcctgcctacctccaagtcccctggctcttccctttgctctgctccagctgtctagacttttccccatccttcaagacagccatgctccttttggatttcaacatgctggtccctttttctaaaatgttcatcctcccgcaacacccgggttttgctagtttttgcttggccaattcatcctctagctttctcatccatcttgccttaaaatgctcctgaatatctcccttcctccctcgggctcagctccttcattcctcgcttctgctcccatggttcctgwctttcgtgactgtccgttcacggggcattattttccaatgtctgtcttccctgctgtaatagtaactgtatgcattcatccactggagttgcttccatcttttggccatcataaataatgctgcaatgaatattggtgtgtaagtatgtttgagtttctgctttaccaggtaagaaagcctggggatgctgtcacagtgagtaacagtgcccacttagacatttggaagccagtgcagacccacagggcagtg

SEQ ID NO: 892447 - DNA, 639 bp, Homo sapiens; identical to SEQ ID NO: 892310

SEQ ID NO: 892448 - DNA, 553 bp, Homo sapiens; identical to SEQ ID NO: 892314

SEQ ID NO: 892449 - DNA, 640 bp, Homo sapiens
tgcaaattttcccaacttttatgctctgcttctcttataaaactgaatgcccttaacagcatccaaatcactcttgaatgctttgctgcttagacatttcttctgtcagataccctaaatcatctctctgaagttcaaagttccacaaatctctagggcaggggcaaaatgctaccagtttctttgcttaaacataacaagagtcacctttgctccagttcccaacaaatttctcatctccatttgagaccacctcagcctggattttattgtccatattgctatcagcattttgggcaaagcccttcaacaagtctctaggaagttccaaactttcccacattttcctrtcttcttctgagccctccaaactgttccaatctctccctgttacccaggtccaaactcacttccacatttttgggtatcttttcagcaatgccccactctacttgtaccaatttactgtattagtccatttccacactgcttataaagacatacccaagactgagaagaaaaagagatttaattggacttacagttccacatggctggggaggcctcagaatcatggaggaaggcaaaaggcacttcttacatggcggcagcaagagaaaattaggaagaagcaaaagcg

SEQ ID NO: 892450 - DNA, 640 bp, Homo sapiens
tgcaaattttcccaacttttatgctctgcttctcttataaaactgaatgcccttaacagcatccaaatcactcttgaatgctttgctgcttagacatttcttctgtcagataccctaaatcatctctctgaagttcaaagttccacaaatctctagggcaggggcaaaatgctaccagtttctttgcttaaacataacaagagtcacctttgctccagttcccaacaaatttctcatctccatttgagaccacctcagcctggattttattgtccatattgctatcagcattttgggcaaagcccttcaacaagtctctaggaagttccaaactttcccacattttcctgtcttcttctgagccctccaaactgttccaatctctccctgttacccaggtccaaactcacttccacatttttgggtatcttttcagcaatgcyccactctacttgtaccaatttactgtattagtccatttccacactgcttataaagacatacccaagactgagaagaaaaagagatttaattggacttacagttccacatggctggggaggcctcagaatcatggaggaaggcaaaaggcacttcttacatggcggcagcaagagaaaattaggaagaagcaaaagcg

SEQ ID NO: 892451 - DNA, 610 bp, Homo sapiens; identical to SEQ ID NO: 892315

SEQ ID NO: 892452 - DNA, 608 bp, Homo sapiens; identical to SEQ ID NO: 892316

SEQ ID NO: 892453 - DNA, 504 bp, Homo sapiens
agtggataaagaaaatgtggtgtatacatatttatacatatatatgtataaatatatataccacattatatattttttatatataatatttatgtttatatttatatttatattccatggtgtatacacacacacacactgtggaatactactcagccacaaaaaggaacaaaatagtggcattcacagcaacctggatggaatttgagactattattctaaacgaagtaactcaggaatggaaaaccaaacaytgtatgttctcactcataagtgggagctaagctatgaggatgcgaaggcataagaatgatacagtggactttggggactcaggggaaatggtagcacggggttgaggaagaaaagactatacattgggtacagtgtacactgctctggtaatgggtgcaccaaaatctcagaaatcaaaaaaaaatctcagaaatttaaaaaaaataataataagcaaaagttttgaatttttaaaaaaatttttaaaaa

SEQ ID NO: 892454 - DNA, 643 bp, Homo sapiens; identical to SEQ ID NO: 892317

SEQ ID NO: 892455 - DNA, 506 bp, Homo sapiens; identical to SEQ ID NO: 892318

SEQ ID NO: 892456 - DNA, 629 bp, Homo sapiens
atcttcttgggcatctaataataagctgttcaaaattaacatagccaaagcagaattcttttttttttttttttaagacagagtctcacttatcacctaggctggagtgcagtggcatgatctcggctcactgcaagcctcgcctccctggttcaagggattttcttgcctcaacctcccgagtacctgggattacagttgtgtgccaccatgtccagctaatttttatatttttagtagagacagggtttcgccctgttggccaggctggtcccaaacatctggcatcaagtgatccacccgcctaggcctcccaaagtgctgggattacagacttgagccaccgcacccagcccaaaacggaattcttgatgctgtccccaccctaatgcgcacaccccagtcctttctcgtcttagtaaatagcgctgtcaaacacccatttaggcaggccagaaacttcaaaggtgtctttgattccgcycttccaccactttatatctactccatcatgaagtcttgtagactttctgtccagaatatatcctgagtctgaccactcctaatcatttccactgttaaaacattaggccaccactgtctctcatgtgggtgttattgtggtcttc

SEQ ID NO: 892457 - DNA, 573 bp, Homo sapiens
aaaactgacaaggtaaacctgatacatgttgctatgtgtggatatgtaaagttaatctgattccaaatgagatgtgtggtaatgtgcttgatagtgtgcacgtgaactgtaaaccagtcatctagatgactataattataaacttactcagtaaagcccaagttagaatttttttcttctctttgttggattttcagtgtctataaacattgtttttaaaaatgaaaataggccgggcgcagtgactcacgcctgtaatcccagcactttggggggcccaggtgggcggatcatgaggtcaggagatcgagaccatcctggctaacatgatgaaactccgtctctactaaaaatacaaaaaaaaattarccaagcatggtggcgggtgtctgtagtcccagctgctcgggaggctgaggcaggagaatggcgtgaaccctggaggcagagcttgcagtgagctgagatcgcgtcactgcactccatcctgggcgacagagcgagattccgtctcaaaaaaaaaaaaaaaaaaaaaggaaatagtctgattttcttactgtataagtaatagat

SEQ ID NO: 892458 - DNA, 660 bp, Homo sapiens
atagtgtcttcccatgatcaggaggctttctgaaggactgagtctgtaaatgaaaaaataatttatgtatgaatagcatgtatttctgaagagcttagagtgccttgtagaatttttttctcaattttattcttgaggtttataatttgggggccaaatagatagagctcatcattttcttgtttggaagttgaggctgcgacatgtccaaggttatgaagtctcttttgggaagaacagaaaccaggtctccaaatctggactcatggtttgttcagatgtgtctggacaaatggttgtcaatgttttgtcctgttttttcaaaggaactgttcttcctttgggacaaccttttggtgtttgggaaagtaataagatcttggatttttcaaattaacattaagttgtaagaactaaaattttctttgaaccacaytactgtgtaattcactgataattgacatattggctgggcagcctatctcttccatatccagcgtaaatgaataggaggtgtttgtgattttttttttctccctttatttaacattgagtcctagtagtttggagaattagggtccctctaccttctttctgctcttgtcttagtaagatacataaggtacatcatcttgtgtctgtgtgtatatagcagtaggt

SEQ ID NO: 892459 - DNA, 660 bp, Homo sapiens
atagtgtcttcccatgatcaggaggctttctgaaggactgagtctgtaaatgaaaaaataatttatgtatgaatagcatgtatttctgaagagcttagagtgccttgtagaatttttttctcaattttattcttgaggtttataatttgggggccaaatagatagagctcatcattttcttgtttggaagttgaggctgcgacatgtccaaggttatgaagtctcttttgggaagaacagaaaccaggtctccaaatctggactcatggtttgttcagatgtgtctggacaaatggttgtcaatgttttgtcctgttttttcaaaggaactgttcttcctttgggacaaccttttggtgtttgggaaagtaataagatcttggatttttcaaattaacattaagttgtaagaactaaaattttctttgaaccacattactgtgtaattcactgataattgacatattggctgggcagcctatctcttccatatccagcrtaaatgaataggaggtgtttgtgattttttttttctccctttatttaacattgagtcctagtagtttggagaattagggtccctctaccttctttctgctcttgtcttagtaagatacataaggtacatcatcttgtgtctgtgtgtatatagcagtaggt

SEQ ID NO: 892460 - DNA, 584 bp, Homo sapiens
tttttttttttttttttttttttttttttagacaaggtcttgctctgttgcttagggtggagtgcagtggcacaatcatggcttactgcagccttgacctcctggactcaggtgatccttccacctcagcctcctgagtagctaggactacagacaccggctaccatgcctgactaatttgtttttattttttggtagagacgagttctcactatgttgcccaggctggtctcaaactcctggactcaggtgatcctctgcctcctgaagtgctgggattacagtcatgagccatcgcacctggcctgtaacacaattcttgtgtttcattctctttctctggkggctggattttgggaatttcaccagattatgcccaagtgggattctcttttttgcttttcaaattattattattatacttgcttggtacttatagtttacattctggtccccaaattggtttttattcagttaaggagcattttcttctatttgtttgttaagtttgtttcttcttatctttccctgcctttttttcaggaatgcctgatattcaatactcaatagtcaatattctcaca

SEQ ID NO: 892461 - DNA, 679 bp, Homo sapiens
tctgtctggaaaaaaaaaaaaaaggccgtttgtgctcctatcaaactactaatgacattcttcacagaataagaaaaaacaatttaaaaattcatatgaaacaaaaaagagaatagccaagaatcctaagcaaaaagaacaaagctggatgcatcatgttacccaacttcaaactatattaygaggctatagtaacctaaacagcatggcactggtacaaaaacagtcacatagaccaatggaacagaacagagagcccagaaataaggccacacatctacaaccatctgatctttgacaaagctgacagaaacaagcaatggaaatagtcttccctattcaataaatggtactgggagaactggctaatcatacgcagaaggttgaaactggaccccttccttacaccatatacaaaaatcaactcaagatggattaaagacttaattgttaaacctaaaactgtaaaagccctggaagataatctaggaaatgtcattctggacataagaactggtgaagatttcatgacaaagacaccaaaagtaattgcaacaaaatcaaaaattgacaaacaaggcccaattaaactaaagagcttctgcacagcaaaagaaactatcaacagagtaaacagacaacctacagaaagggagaaaatatttgcaaactatgcatc

SEQ ID NO: 892462 - DNA, 653 bp, Homo sapiens
ttcctaccatgttctccaccatcctgaagcagctaactcgatagaacagtggaatggccttttgtagatgcagttatcatgtcagctaggtggtaataccttgcagagttagggcaaggttctccagaaggctctctatgctttgtatcagcatctaatacatggtactacttctctgatagccaggattcttgggtccaaggaaattggagtgactcactattacccactagcaaaattttgcttcttattcttatgactttatgctctgctgggctagaggtcttatttctggaggaaggaatgcttccaccaagagacacagcgatgattccattgaatagaaagttaagacygccacctagccactttgggctcctcatgcctcaaaaaccacaggcaaggaagttgtgttattggctgggtgattggtcctgattaccaaggggaaattgtactatagctccacagtgaaggtaaggaagagtatgactggattataggagataccttctggtatctcttagtattactatgtcctgtgattaaggtcaatggaaaatgacaacagtccaatccaggctgggctagtaatggcccagacctttggggaatgaatgtttgggtcaccccactgggtaaagaaccataac

SEQ ID NO: 892463 - DNA, 594 bp, Homo sapiens
gggtaatggaagaaagtgattattaataccagctacaacaattaagtagttacagaaatggacttaacggtcacaaatatttcctcctcattctgctatgaatgtgtgtgtgtgtacgtgtgtgtgtgcatgtgtgtgtatctttgttttctttcctctcctgttcccttaccatgcaacataagatccactgayttttgtcatagtatgtaagtattaatttcacaccacagtgtttaaattaggggtatcaagggaaagagtaaatatcactcaaggactttacttcctcttctggggaaggggtcagtgtatttttggttgtatgcaggatgattgtatcatattagatggaattatgacctcattattacctttatttggagattaagtatggtttaaggagatgtgtatgggtgcccaagttgacaagggttggagttgtggtggaaaactttatgtgtaaatttgacaggcctcaggatacccagattaagaatcatttctttgtgtgtctgtgagggtgttttcagataagagcagcatttgaattgatggactccataaagtagatggcactccccaatgtgggtg

SEQ ID NO: 892464 - DNA, 596 bp, Homo sapiens
gcggcaatgagtgaggtaggagaggaaggcttggggagacacttcaaactgttacacttcaaactgtttctttaccaatgaatgctgagattatagtagacctcaggcctctagtggatcatttagcagataacagctgttcacacagcagaggcagttcatagttcctaattgtcctatcatcttccattctctcccaggttgaatctgttcttcagaaaacctggaatgaactttccaaatcatcttattgtaatgcttccctgtgttcgtctttcttgggctccccactgtggggattttatccccacaggataaaatcgtactgctttagcatggcctagatgaggcccttcctgacctggcccttgagcttccttactgaaatgctcactcacaaatatccttcacctgaatcctatggccacacagaactatttgttctgacacttygataccttcatgcctctgcacatgctttttctcctctgcttggaatgtcctaccccgttttcttctttgaaaacctctttgtcctcaactaaaatctcatctactgtgagacaccttttccattgctttcagagaaattaaaa

SEQ ID NO: 892465 - DNA, 638 bp, Homo sapiens
gcacagggctttaaaattttggagcaaggccctgccattatctgaaggtaattactctccttttgagagacagctcttggcctgctactgggtcttaatagagactgaccatgtaaccacaggccaccaagttatcatgaaaccagagctgcccatcatggtttggatattgtctgacccatcaagccatagaattgggcatgtaaagaaacactccatgatcaaatgaagtggtatatatgattggtcccaagtgggccctgaaaacacaagtaagttacatgaaaaagtgacccaaatgcctgtggttccacccctgttatgccttttctccttctcccagcttcatgggagtttccctatggctacatrtagggaatcagttgagaggggaagagagaacccagtcctggtttacagatggttctgcacaatatccaggcaccacctgaaagcggatggctgcagctctacagcccctctctgggccacccctgaaggacagtggtgaagggaaatcctcccattgggcagaaatctgagccacacttctgatggttcactttacttggaaggcgaaatggccagacatgcaattatatactgattcataggctggggtcatcctgactgggtgg

SEQ ID NO: 892466 - DNA, 636 bp, Homo sapiens
tgcatagcaaagactctgtgtatgtgaagccagattttaaaatatggtaacaagtgtctgaaaatatgtggctcaatttgtctcccggttacttttccctctccccctttaaaatgtagaggaaggagaagaagagataagaggtttgtgagtgaagacaagggccctttaaggcctgggaagactaacgccatagggatctccctctgccttaaaaggcacaggaatcttagtggggaaaaagaagtggtgataaatagccagtccgtgtgcctggaatatcaaagtcagtgcgtgccagggatcacactgcgggtcacgtgcactctgggtctctctctgcaaacctgccctgcctcagtctgggaatatgcaactgcctaagaagggtctggcttacacaggggccrtgagacgtggcaggcatagctgggctgctactggtcatgaatcctggacacggcaggcaaggtgtggtgtccatatgcattattcgggtggggcaaagatcacagctctcactagactttcagaggactttgtaacccaaagaaccactcatctcaaggactgtggtaactcaggggctgagccatgccagtgtttattatgtgaaacaaggactggaacctcaca

SEQ ID NO: 892467 - DNA, 580 bp, Homo sapiens
tactggtttcacagaatgatttaaggatgagtccctctttctctatcttttggaatagtttcagtaagattggtaccaattctttgaatagctgatagaatttagctgtgaatccatctggtcctggacttttttttttgttgggaatttttgtattattgtttttatcttgctacttgttattggtctgttcaaagtttctgtttattcctgatttaatataggagggttgtatatttccaggaatttatccattcttctasattttctagtttgtgtgtgtaaaggtattcatagtagccttgcatgatcttttgtatttctgtggtgtcagttgtaatagcttctgttttgtttctaattgagcttatttggatcttctctctccttttcttggttaatctcgctaatggtctatcaattttgtttatcttttcaaagaatcatcttttttgtttcacttatctttttgttaatgttgttgtttacatttcatttagttctgctatgatctttgttatttcttttcttctgctgggtttgagtttagtttgttcttgtttctctagttccttgaggg

SEQ ID NO: 892468 - DNA, 658 bp, Homo sapiens
cagggtatactgtaacaagggagtcgtcaccatcacttacattttggtagagactccaaggcaagagtgggaaagtttgacagtgatgttaaccaaaaactgacagaggcaggtgtctcaattgatagcggtttatttcgccaaggctgagaatgtgcctgggaaaaactcgagtcacaggaacatctatgacctgtgctttccaaagagggttttgggaattcagtgtcgaaaaggcaaagaacagacaggagggaaaaaagcgagggagggtgggcagtgaggcaaatggtaacattattgtgaggttctgattaacgctcagtaaattggcattttacataaaataaagcaaacacgtgaaaagaggaagtatggggaaaagtcaatgatgcatttatctcagggtggatgaagggatgatttctggtcttgtccttgtcctcttacctgtgaagataarcttgtaattgacattgttagggtgagattgaacagaactcagtttcggggctagcttataggggggatatgtatcctataagatttagggctcacacagaatttccttgtgagcaatttgtgaagaaggccatctggggagatatgtggcctcctatctttgtgggaacctggcttatgtatgacgttatgacac

SEQ ID NO: 892469 - DNA, 558 bp, Homo sapiens
actgcactccagcttgggcaacaagagcaaaactccttttcaaaaaaaaaaaaaagtggaaagcataaccttgcttgatggtgaggttgaatccccaccttcgcctttctcagatttattcccatcttcctactcctccaacccctatgttrgctcaagcccagatggctctcacctgcattaacctaaccatctcgtaacccatctcctctctttgttcctttcctatgcaccctccacatggccagctgccagaggatctttcaaaatgactaatcttactattcttctcctctacaaagcttcagaggcttccagtctggactccttaacaacacataaaaaattcctcttctgttcttcctctggctggtggctctcaaccttggctgcacttgaggatcctggggagctttaaaaactgccctgctctggtttagtcagtctgggctgggtcccaggtgtctagagttttagttttgtttcccaggacctggtgactccttgaactatttgcagattcctgaacccctgtcggagagtaagctgtgttctaat

SEQ ID NO: 892470 - DNA, 619 bp, Homo sapiens
ataacaaaattaaatatacactaaccacccgtccttaatcgcttcatgtaaatctgtggcattagaaactgaaaacaaaaattatctgagggtcatgttttgctatgcatttaatggatattacttctgcctgctccaagggcaatgttcagtttccacaaacagtgtagtttattatgaaaaataatttataaatcattcttgtttaaaacaaaatttttttaggagaattagtaacagaatttcaaaraagttgaataatttctaaagattaagatttcaacttcactcttttaatgtatttaaggtaataatcacttactttggtgattatttataacattaacagctctaagaggcctttaagggccattttgttatacaaaaaagaaacacatttataagcattcttagaataatgctaatgtcattagctacagaagcagcacatgctaagatatcagctttaattttaaattcatattagaccttaataaaataagtcaaggatgcattttgtaatatctagaataaccactaaaagaacagtaatgtctaacaggcaagttagtagagggggaaaatgaaacaatttttaaaaatacataattcaggccag

SEQ ID NO: 892471 - DNA, 571 bp, Homo sapiens
cttttctctcttcgagcaaaccaatttccttctgtgattactgcttggatagaaaggactctgttgtgtggtgtggggagttcaggaggatggtgggcactgagccattaccaagtttgcacttgttgccttctggccaaggacccagaatgtttattcaaaggagcaatttttaaataagacactgacaccagtatctggtctaagagaagagcaagagagaatagtgggagacctggaggaaaccaggtgttcctccagccagggaagctgtagaatccttgtcgtggactcctttctgtcacctccaccaactgagtgagtagctcagactggaggccsctcaccaagcctgtgggaccaagtgtcacctgaaggcaggggttctgcataacaggccaccaggctaccagctgagcaatcttggactagccacaaaatctctgattgtcaaggcctccgcctgcataatagatctattaacaaaaatatctgcgatggccagtgtttggatatattagcacacaggaagatagtgctccaaaagtgcttggtaacaagagcctggtgc

SEQ ID NO: 892472 - DNA, 629 bp, Homo sapiens
tgtggactcttacttcttcctgactttttgatgttctcttttgtcaatgtgaccaaccaattttgaatcagagctactggcatctttagaatgacatgtatggtggctcagaactgtaccctttaaaactcagctccagtaaagggagattctgagcattttaagatgttggaaattgagttgcatcctgcattaaaggcatttcttctttatataaactgtaggattctgttaagacagaaatggggagagctaatgggctattctgaaagaactacccattaaatkgtaaagtacggtatgttttaaagtgacaaacccaagagctgaaaatgactctttgatctttaaaaggctcataaacggtggcagcgtactcacagacctatatttatgtattcaaatattgggaggaaatccaagtagagtctcaagactgcgggactttgcaatttagacaaaaagaggccagggaggagggcaattaaatcaaactttttacagcataaagcaagctttcttccctccttgttaatcaatgaactagaatcttggtaagggcttgctttttaagtggggtttgagccaatctttacacagatgtgaggtatttgtgaagaaagaaagag

SEQ ID NO: 892473 - DNA, 587 bp, Homo sapiens
atttgaaaatcactttttgttcatagaatcccagaggttagagtaaaaagaaacttcagagggcagttagctctgcccagctcccggatgccaggactgcattcacaaagtatccatgaattggtgactgagaccacgcattagtatctttagagacagggtaggccataaaattatcaatccgcttttcagatgcaactaattattaaaggaattactttttatttattattttattttattttattttattttattttgagacagagtcttgctctgtcacccaggctggagtgcagtggcacaatytcagctcactgcacctccacctcccaggttcaagtgattctcctgcctcagcctcctgagtagctgggactacaggcgcccgccaccatgcctggccaattttttgtatttttagtagaaacattgtttttcaccatgttagccaggatggtctcgatctcttgacctcataatccgcccgcctcggcctcccaaagcgctgggaatacaggcctgagccattgcacccggctagaggaatttcttatgtcaagaagtctgacccattgaatcttcta

SEQ ID NO: 892474 - DNA, 652 bp, Homo sapiens
ggcctagcattgaagaataacatgtgttccgaaccttaaaaatacttctgacatttgatttagtatcctggctctaactggagtctaaaataagcaaataatcaaagatggggttactgattacttagtaaatgttcattaaaatattactttaaatgataaagaattgaaagcatcctaaatatataaaaattgagttaatattaataaaacatgctgcatttatacagaataatatggtgcagtcattttgaaataatatataattacataggggagtattcaaaataatcacattacaaagaatacaaaaattagtttttctatattttataattattattttactaaagaaataatactagttactcctaagtagtgaataatgtgtatgttttttckaactttgttttccatactgtttgcaatgagcaattatggatagaaaaaaacaatgaatgtttttatttttctaccaaagtaactcagagtccaaattcctgtaatcttttcttatggagctaaatttctttttttaaatagtttctaatgtttttctctagaatattccttaattttctatattcttaataaaattcagatgataaaatagaatcaatattctcataagagtttgaatgatgctatacag

SEQ ID NO: 892475 - DNA, 585 bp, Homo sapiens
accttctagtttcgatctgatgctctaatttctgaaaaatcccacttttctttttctgttctattttaacctgcatgtttaattaattcacaattctcagcatgaattaacatatggctgctagaaagttgcaaactggarattttgttggctgtaaccttgtctactatcgctaaaaaggaaaacaatcaattatttcccgattttttaaaaaagatatacattagataaagtatggtggagaaaatactctcttctgaaatgacctcgccaaatagtctttatgtttttaactacgaagtgaaccatatgcaatataatcacttgcacatattcaataaaaaagcagggttaagccaaattttgttaccaccaagaatatttgtactatacataagatgttttcaatagaaggattgagactttttttatctggcttataaaaggaaattgctcccttccctaaaggaacacagagaaaagctgatacatcttcagaaatattcattacagctcatatcttttaagtgaaactcgctatctggtgttgattctataaagattaagaaacttgtcatggttgtg

SEQ ID NO: 892476 - DNA, 585 bp, Homo sapiens
accttctagtttcgatctgatgctctaatttctgaaaaatcccacttttctttttctgttctattttaacctgcatgtttaattaattcacaattctcagcatgaattaacatatggctgctagaaagttgcaaactggagattttgttggctgtaaccttgtctactatcgctaaaaaggaaaacaatcaattattkcccgattttttaaaaaagatatacattagataaagtatggtggagaaaatactctcttctgaaatgacctcgccaaatagtctttatgtttttaactacgaagtgaaccatatgcaatataatcacttgcacatattcaataaaaaagcagggttaagccaaattttgttaccaccaagaatatttgtactatacataagatgttttcaatagaaggattgagactttttttatctggcttataaaaggaaattgctcccttccctaaaggaacacagagaaaagctgatacatcttcagaaatattcattacagctcatatcttttaagtgaaactcgctatctggtgttgattctataaagattaagaaacttgtcatggttgtg

SEQ ID NO: 892477 - DNA, 585 bp, Homo sapiens
accttctagtttcgatctgatgctctaatttctgaaaaatcccacttttctttttctgttctattttaacctgcatgtttaattaattcacaattctcagcatgaattaacatatggctgctagaaagttgcaaactggagattttgttggctgtaaccttgtctactatcgctaaaaaggaaaacaatcaattatttcccgattttttaaaaaagatatacattagataaagtatggtggagaaaatactctcttctgaaatgacctcgccaaatagtctttatgtttttaactacgaagtgaaccatatgcaatataatcacttgcacatattcaataaaaaagcagggttaagccaaattttgttaccaccaagaatatttgtactatacrtaagatgttttcaatagaaggattgagactttttttatctggcttataaaaggaaattgctcccttccctaaaggaacacagagaaaagctgatacatcttcagaaatattcattacagctcatatcttttaagtgaaactcgctatctggtgttgattctataaagattaagaaacttgtcatggttgtg

SEQ ID NO: 892478 - DNA, 697 bp, Homo sapiens
gctttagaaattactcagtctcgggtagttctttatagcaatatgagaatggacaaatacaattaattaagtcaaattggaagactcatgatcaatgttctgcatttgttatcagtggcaggacaatgggcatgggaggaatcagagatgtcagcttgatgctctggaactaatacagtatgcaacctagaagagaccyggcttcctacagtcttctccaaaattacctaatgcaagcccaaatcctgtaacaaaccctcctcactccatcttattgagatatcttgctgtttctcctattgtaaggtctctgttgtggcaacaagttaataaacccaactttgtttatctgtaggagtattcctggtggtcctggttggcaggcttcaacagtgcagtgtgagaatatgatataagagtaaacagagatgggacttctaaactggaacaaagaaaacttcttattcaagcttcacctttctcacctattgaacatttgcccacttaggcaaattacttagtctccatcaatttcctcatgatattgatttcccaagatagttgtcagaattaaataaaattctagggaagtattttttaactcactatgtaaacataggaggtataattattaatggcataagaggtattctgcagggatatttctagggaacagctctataatttggaaagtgat

SEQ ID NO: 892479 - DNA, 610 bp, Homo sapiens
gagatatcttgctgtttctcctattgtaaggtctctgttgtggcaacaagttaataaacccaactttgtttatctgtaggagtattcctggtggtcctggttggcaggcttcaacagtgcagtgtgagaatatgatataagagtaaacagagatgggacttctaaactggaacaaagaaaacttcttattcaagcttcacctttctcacctattgaacatttgcccacttaggcaaattacttagtctccatcaatttcctcatgatattgatttcccaagatagttgtcagaattaaataaaattctagggaagtattttttaactcactatgtaaacataggaggtataattattaatggcataagaggtattctgcagggatatttytagggaacagctctataatttggaaagtgatgtacagtttgttttaaagtggaggaatggattgggagtcagaccctccttacttatatattagtgttttacttcacagatgaatgatacagcctgaaacaaattatttaacttctgaattttggcttcttcaataataggtggataataaaatctacctctaaaaattattatgcaagtagtgaaattg

SEQ ID NO: 892480 - DNA, 610 bp, Homo sapiens
gagatatcttgctgtttctcctattgtaaggtctctgttgtggcaacaagttaataaacccaactttgtttatctgtaggagtattcctggtggtcctggttggcaggcttcaacagtgcagtgtgagaatatgatataagagtaaacagagatgggacttctaaactggaacaaagaaaacttcttattcaagcttcacctttctcacctattgaacatttgcccacttaggcaaattacttagtctccatcaatttcctcatgatattgatttcccaagatagttgtcagaattaaataaaattctagggaagtattttttaactcactatgtaaacataggaggtataattattaatggcataagaggtattctgcagggatatttctagggaacagctctataatttggaaagtgatgtacagtttgttttaaagtggaggaatggattgggagtcagaccytccttacttatatattagtgttttacttcacagatgaatgatacagcctgaaacaaattatttaacttctgaattttggcttcttcaataataggtggataataaaatctacctctaaaaattattatgcaagtagtgaaattg

SEQ ID NO: 892481 - DNA, 659 bp, Homo sapiens
gcagactctacaaaagctaaatattagaaaattttatataaagttttgattcactcattctctactattaatttctttatctttgcaatatttctttataaaaggacactcatcaggtattattcaagaagcacagtaccttaactgcaggaacaaatgaacacttgcagacaatgttgtatctaatattcagaattctgagaagcatgatccctttgcagmattgagcctggacaaagtctatttccactccagtgggctgcagtttacactaacaaagagcattactttttgactagctgaggaatgaataaaaaatgaataaattaaatttctctgtctctagtcagaattacaattgagattaacagacttttaagtcagcgagttatttccattactatattaataaatttgtgttttgtctgccaagaatatttcaaggccctgtgagtctcccacagaaaactctttttaaaacttaccactagactctataattgcttctcctcttttctcataaaaatgccattctctcagagccaaacagtcccagttaggtatggacagcaggatgtaggggttggggagtgggtggaagacgctgaatacaccaattttgtgaaattaacttatatgaccattgatctttaattggt

SEQ ID NO: 892482 - DNA, 635 bp, Homo sapiens
gcaatgtagagttcccctagtgatttctattttaaaataaatcagagcatttccaaaagccagagtgcttattttaaaaagagagggcatgaaactaatatagactaaaaaccatgtcttgctttgttgagatattaccatgagccatgcatactaacataatccaattaggggaatcctaagagtagagccatcaatgggaaaaattaaaaatattgcatctatatggaaatmatctatatatttcacctctgaaaaaccatcagagaaataagaaatccattttgcactgacaacacagagtgagatcaaattctccacaagacaccagcatttctgttatgaaaaaagacacccattgttgatggcatgtgtacctcatatgtctccattttgtgtaaaaatcatctgcttttgtatctccttgagcaactctgaaaagaaaatcaagatgtttttctggacagaacaaatgagaagggcaaaagcaaaccagttggtagccagtcttcacttccttaaaaaaaaaaaaaatggcaaaaggacttagcatgtcaacctccacctatccagatggtttgatttatttagtacacgagttccagggaagaacgagcaagaagtatgactaagta

SEQ ID NO: 892483 - DNA, 649 bp, Homo sapiens
agcccatccagataccaaggggaggtaaaatggactctacttcttgatgggaagtgggaaagttctggaagaggacaagaggctgaaaatattgttttggccatgaaaataaactactatcattctccaaattgccagcacaccaggactgggaatccctgagatgggcttaggtgatgytcataaaaattgaaattttatgtctcacatcattggaaatgttcagagtagagagacagctctttatcaaggaacactgtgatgcggattcttacaggaattagagagaccaatggatgccttcaacatcctaaggcccatgtgcttgatgcagtgaatcaggctaatgaccagcaccctcggtgctttcaaggagcttcagccactccagagtcttcatttattctggcttgatttcttaattaaacacttggcagctccacagcctgtggagaacatgtgtattcagggttttccatatcagatgaagaggtcaggcacatggaagctcttggggactctactgcagactatgggaacttcaccagtcttgacgggtcagctttttgaagatgacacagtcttatagtcttatatcataaatgaaattgttttgcagttagtggtggattgaagaccatgaagatgg

SEQ ID NO: 892484 - DNA, 652 bp, Homo sapiens
acttttcaatttgtcttttaataacatgatagaatctagaaacgttatatttccttccctctcaagcatagcattccaccctacaacatggtttactcaatgaaagcattttatatgaaattccaaaaatatagaaataagatttataatttcacacttagtttgttttgatcagattttttaaatgtttacaatgttttgatamggaaaatcagaagcaaaaccaaaaactatttctgatttaaaaacctgaaatattaagatgtgtcatgtgataaaatttaatgcatgtatgaagaggttttctgaaagaggttttattttcccaattcaatcaatgtttgtccaagataaggacagaaacagcatttcaaggatgttctcaaagatatactaaaaaagatgcaaagactccaacttacaggctgccactgacagagttagctcaattgaaaaagtaatctacttcaagaatatcaatattttataaatccaagacaatagcaaaagacacaaatgtaccttcagtagaagtagtgtgaccatgaaccaactaataactcaaggttaccctttctgccaaggatatgtgtccaatccgtaataatttgccagtccccaaattgtctcatcagtcatctccaattataaa

SEQ ID NO: 892485 - DNA, 669 bp, Homo sapiens
catgatttttacatagagaaaacttaaggattccacaaaaatcttttagaactgatatgtcaacttagtaaacttgcaggatacaaaatcacctacaaaaatcagtagcatttctctacactaacaatgatccaccttaaaaagcaatcaagaaagcaattcttttttacaatagctacccccaacaaaaaaatccctagggataaatgtaaacaaagaggtgaaagatctctacagaaaaaaaaaaaaaaaaaaaaagtwaaaaaaaaaaattgttgaaagaatttgaagaggggccaggcacggtggtttatgcctgtaatcccagaaccctgggaggccaagatgggcagatggcttgcactcaggagtttgagactagcctgggcaacatagtgaaaccccgtctttactaaaaatacaaaaataaactggtgtggtggtgtgcacctgtaatcccagctactcaggagactcgggtacaagaatctcaacagaagcatatctcatgttcaagaatttgaagaattaatgtcattaaaatgtccatactacccaaagtgatctacagattcaatgtaatccctatgaaaataccaatgacattcttcacagaaataaaaagaataattctaaaacttatataaaaccacaaaagaccctaaagca

SEQ ID NO: 892486 - DNA, 669 bp, Homo sapiens
catgatttttacatagagaaaacttaaggattccacaaaaatcttttagaactgatatgtcaacttagtaaacttgcaggatacaaaatcacctacaaaaatcagtagcatttctctacactaacaatgatccaccttaaaaagcaatcaagaaagcaattcttttttacaatagctacccccaacaaaaaaatccctagggataaatgtaaacaaagaggtgaaagatctctacagaaaaaaaaaaaaaaaaaaaaagttaaaaaaaaaaattgttgaaagaatttgaagaggggccaggcacggtggttyatgcctgtaatcccagaaccctgggaggccaagatgggcagatggcttgcactcaggagtttgagactagcctgggcaacatagtgaaaccccgtctttactaaaaatacaaaaataaactggtgtggtggtgtgcacctgtaatcccagctactcaggagactcgggtacaagaatctcaacagaagcatatctcatgttcaagaatttgaagaattaatgtcattaaaatgtccatactacccaaagtgatctacagattcaatgtaatccctatgaaaataccaatgacattcttcacagaaataaaaagaataattctaaaacttatataaaaccacaaaagaccctaaagca

SEQ ID NO: 892487 - DNA, 669 bp, Homo sapiens
catgatttttacatagagaaaacttaaggattccacaaaaatcttttagaactgatatgtcaacttagtaaacttgcaggatacaaaatcacctacaaaaatcagtagcatttctctacactaacaatgatccaccttaaaaagcaatcaagaaagcaattcttttttacaatagctacccccaacaaaaaaatccctagggataaatgtaaacaaagaggtgaaagatctctacagaaaaaaaaaaaaaaaaaaaaagttaaaaaaaaaaattgttgaaagaatttgaagaggggccaggcacggtggtttatgcctgtaatcccagaaccctgggaggccaagatgggcagatggcttgcactcaggagtttgagactagcctgggyaacatagtgaaaccccgtctttactaaaaatacaaaaataaactggtgtggtggtgtgcacctgtaatcccagctactcaggagactcgggtacaagaatctcaacagaagcatatctcatgttcaagaatttgaagaattaatgtcattaaaatgtccatactacccaaagtgatctacagattcaatgtaatccctatgaaaataccaatgacattcttcacagaaataaaaagaataattctaaaacttatataaaaccacaaaagaccctaaagca

SEQ ID NO: 892488 - DNA, 627 bp, Homo sapiens
aacaatgtagtaagtcttcaacttaccacttgtaactggaatatattgagacactgccttatctcacaccccttttgtatctaaatattaagaatgactgtaaggatttctttttccttttcttttttttttttttttttttttgagacagagtctcactctgtcgcccaggctggagtgcagtggcatgatttcagctcactgcaacctctgcctcctgggttcaggcaatcttcctgcctcagcctcccaagtagctgggattacaggcacccacaaccacacccggctaatttttgtatttttagtagagatggggtttcaccatgttggccaggctgctctcaaactcctgaacccaagtgatccaygcaccttggcctcccaaagtgctgggattacaggcgtgaaccaccacatctagtcaggatttcttcttaaaatgtatttactattcctttcctttcagaaattgttttttatttttttatttgaagaggacaggggagagaactgatgaagattaagatgctcaggtacaattaaaattaaccaatccccaatcacatttacaggaaacgtgaggtgcctgattttttttccattcatcatgattatttaatttag

SEQ ID NO: 892489 - DNA, 657 bp, Homo sapiens
tgggagatgaataaaattatttccataaaagataaagatagaagcatcagaaataatcaaagaagcagcagcaactttttactgaatcaaaaattgatcacaatgagaaatatatcacttgctcctacttacaaakagttgttcctattctcttcggcaacactgaactatgttttcacgctaatacatccagtaaaattgcttcctatttttatttgtgattttcattactgattccacttgggacagaaataaatagaatatgtgcatcaggatctccctagcaattttgcaccaacctcatgtggttctgtcaatgaaggcaattataattctgaatgaatatgcttgatgttcacttagcaggaaactgaactcagagaagatttttgccctttcattttaatgtacacaccaggtggcacccaaagtagtcaaatacaaatgtctcccaccctgtattcaaaagaaataatcatagtaccaggagctatcaaatcagaacattttctcgggcacggagtgacataaagggataacaatatctaagggccacatacctgttgttgcccaaagacacaaggcaggaaccataaaccaaaaagaaacacctgtccaggctgaaggcagcaggacttatttaccagataattgtat

SEQ ID NO: 892490 - DNA, 658 bp, Homo sapiens
caagcaaattacattaaatctaatttaatgccgtgaactatttagcaactattaggaatatggaatatgctgggcattgtgaaggcgatcaagtcacacaaaacaaagtcctggctctcaggatacagccatgatcctagttgagaaaagatttaagcctttccatccattcaaagcaatgtgaactcttataatggcacctcaccatcgaaatccagacacctggcaactttgtctgtttaggttgccaccaagaagcaatcctttkgtaagaaagatgccacaaaatgcatgcagtatgcatagggattcccttggtccttacagcctattaatacttttagtgcccacagttttattaagctaacatctggtttataaggctaccacaagtcaggactagcaagtaaaaggcggcaagcaagagcaaggacaagtgacagcaaacttgtgacagctagggagaagaccaaagagcataaaatgcagataagcacactgacacatcaagtgaggcatacaaggacgagctgcccttcacgaatcaataagtcctgaggcattctgcatttcagcagagcctagaaaacagctgtgcctactaatggccttggtgtatcaggaaaagatgatgcaggcccagtctattctatgtaag

SEQ ID NO: 892491 - DNA, 637 bp, Homo sapiens
aaagtagtcttcttgaagtacaaagcagatatttaaaaagtaatatgaatggaagaattctggataatgtaaatgtaaatggtgaacaggaatttattacaaatatggattgtaaatttgtgtatactaagataacagtgaatatgattatataagagcaagaaagaaaagcatgaatataatatctgttcattgagtcttgttgaactggcaatctgtcaccctagcgagtagtctactgtgaaattttgtcaaatagtatcctaaagaaatcaaaacttttttataatttttggtttgtttttttgaaacaatgtcttgatctgttagcccaggctggagtgcagtggtacagtcatggctcactgtargcttgacctctcagctcaagcaatcctcccacctcagcctcccaagtagctgggactacaggtgtgtgccactatgaccagctaatttttatttattttactttttatagagacagggtctcattatattgcccaggctggcattttcataatttttaaagcaagtccaataacatctttttgttatagcaacttcacctacacacagcttctaatctatcagaactaaactgctatagattgtccatcccaactgacctcataga

SEQ ID NO: 892492 - DNA, 625 bp, Homo sapiens
ggtgacatcagtgggaagaggcagtctggctccaattcactccctagaacaatggtggatgtctcccaagtagcactggtatttctgccttctactaaaaaagaaaaaattttttttgagacggagtctcactctgttgccccaggctggagtgcactggtgcagtcttggctcactgcaacctctgcctcccaggttcaagcgattctcctgcctcagcctcctgagtagctgggattacaggcgtatgccaccatgcctggctaatttttgtatttttagtacagacaaggtttcaccatattggtcaggctggtctcaaactgctgaactcgtgattcacccgcctcrgcctcccaaagtgctgggattacaggcgtgagccaccacgcctggcctaaaaaatttaaaaatccaaaaccactgaggcccagaacaggtatcttttgggattctagaagagtaaaatggggtgggaggggaagtagaaagggaaaaaaaaaaaaaaaaaaaaagaccatgggagtcaagtcagtgatttctcacatacaaatgatctaaaaagtttctgggctcctggtaaagccaaatgatctgggctgcattccaggtccaagatgtcctg

SEQ ID NO: 892493 - DNA, 694 bp, Homo sapiens
gacaatacttcctttattgattctacgcaattgcctataaagctctcggctgcctttttttgcaaaaactgacaaggtgattctaaaattcatatagaaatgcatgggacccagaatagccaaaataatcttgaaaaagaaaagaaaagctgcataacacacacttcttaatttcaaaacttactacaaagctactatgatcaagactgtatggtacctacataaggatagacatacagattaatttgataaaatgagagtacaggaataaattcttacatttatagtcaactgacttttgacaaagatatcaaaaaattcaattagagaaacaacagccttaacactgatgctgtgacaaatgagtatctacatgcaaaaaagagtaaagtcaaattcytacctcacaccatacacagagattaactcaaaattgatcaaagacctaactgtaagaactaaaactataacattcttagaagaaaatataagcataacatttttattttgattttaggcttctttatatataggcctgagtggaaaagcacaaactgtctttcctttgctctcacaccataacaatcaacatagacaatttctgtgacccagagtgtgggagctccaccttaccagcaagcaagcaatgaatttgccatgggacacaagcggggtgtcctgcaatccgactcaa

SEQ ID NO: 892494 - DNA, 694 bp, Homo sapiens
gacaatacttcctttattgattctacgcaattgcctataaagctctcggctgcctttttttgcaaaaactgacaaggtgattctaaaattcatatagaaatgcatgggacccagaatagccaaaataatcttgaaaaagaaaagaaaagctgcataacacacacttcttaatttcaaaacttactacaaagctactatgatcaagactgtatggtacctacataaggatagacatacagattaatttgataaaatgagagtacaggaataaattcttacatttatagtcaactgacttttgacaaagatatcaaaaaattcaattagagaaacaacagccttaacactgatgctgtgacaaatgagtatctacatgcaaaaaagagtaaagtcaaattcctacmtcacaccatacacagagattaactcaaaattgatcaaagacctaactgtaagaactaaaactataacattcttagaagaaaatataagcataacatttttattttgattttaggcttctttatatataggcctgagtggaaaagcacaaactgtctttcctttgctctcacaccataacaatcaacatagacaatttctgtgacccagagtgtgggagctccaccttaccagcaagcaagcaatgaatttgccatgggacacaagcggggtgtcctgcaatccgactcaa

SEQ ID NO: 892495 - DNA, 579 bp, Homo sapiens
ccagtaagaaaaaataaagactatccaattaaagtgggagggaagacaggaaaatagacctgatctagacttcacaaatgagaatattaatgatttatcatagcatggaatgaaaatgatgaagtgtgctgagaatatgcaaatacaattcaagtgcacacaattaaaatcccatatcatgattaatcatagcaaatgtgtgtgtattcctagcaataaattgagcaaaatatgcataagactatgatagacatattaattattaaaagacttcaaatacaagatataccatgtttgtggattagaagcagcaatataaaacaagtcagttctctgcaaattcatgataaaggcatttacagtctacgttgcaatgaatttgtgtgtatgtgtgtatatttaacttgtcaaaagaaatttccaamatatatatggaaaaacatagagccaggacaaccaacacattttaagacaacaagttagtgaagcttgctttaccagatatcaagaattcttacaaaatgtttacattcatgacactgtagaattatcacagggaaaagcaacagatcaatgaaa

SEQ ID NO: 892496 - DNA, 634 bp, Homo sapiens
ttcattttttcccttctgaaatttgaactgtatcatttactaaattattgtatagacttagatctatttctggactttctattcaagtgccaataaccactacacctttatgatgttttaacatcaatccagtagtactgtgtccttgttttgcttgyaattttcagactattttttcatagctgttcttgttgcttattattccataatttaatttataaattccaacacaattcccaataaaataccaatattctatttttaattggcaaaactaattctaaagttcattgagctttctttgtaatgagaatacatttctttagtgttggaattggaaattttacttgattcttctttaaatctcttttttcctatattgcattatccaccaccactcccaatcctagtccttgggtttcagttccatcatgtcttaataattttaaacatatttagtgtatattctctttatatcctcattgtaggtatattatctcaaagtctaatattctagaatccagcatcctgatctcactgtttatgattccctgtctcactaattttggctcatatcatcatttggtcattttgattagtaattattaagggtttatttttctgtgaaaaatcc

SEQ ID NO: 892497 - DNA, 634 bp, Homo sapiens
ttcattttttcccttctgaaatttgaactgtatcatttactaaattattgtatagacttagatctatttctggactttctattcaagtgccaataaccactacacctttatgatgttttaacatcaatccagtagtactgtgtccttgttttgcttgcaattttcagactattttttcatagctgttcttgttgcttattattccataatttaatttataaattccaacacaattcccaataaaataccaatattctatttttaattggcaaaactaattctaaagttcattgagctttctttgtaatgagaatacatttctttagtgttggaaktggaaattttacttgattcttctttaaatctcttttttcctatattgcattatccaccaccactcccaatcctagtccttgggtttcagttccatcatgtcttaataattttaaacatatttagtgtatattctctttatatcctcattgtaggtatattatctcaaagtctaatattctagaatccagcatcctgatctcactgtttatgattccctgtctcactaattttggctcatatcatcatttggtcattttgattagtaattattaagggtttatttttctgtgaaaaatcc

SEQ ID NO: 892498 - DNA, 542 bp, Homo sapiens
tattttagtgttacctttccaaggagaagagacctcttaaaatcccttggttcctgttgagctgccagatcccgaggtgatcaaacaggacaacaagccaaactgaaagaaacaaccaggcctttattcatttaccackagagtgaaggcaagagacaaacagaaaaaggaaggagggggaagaactagggttaaaaagtactgggtcagagtacccaatggagagaagagtcttagtcaaggtccccctataaggaacatcttggtggatgtacctgaaaagtgcccccgcctctagcagggctatagataaggaggaccccaaatagagatgtcttggctatgaatgcaaatatctgtaagtatgagcagtaagtgtggagggacttgaatccttgactgcacctccctcctccagacactacgatgtggggaggacaactctctcccatgagacctgccaggaaaagccttgcaattgcctttggtcagacctgagagatcatacctaggacttcaacctggagctggactcttcacta

SEQ ID NO: 892499 - DNA, 662 bp, Homo sapiens
tcacaatggaagttaaggcttcaacatacaaattttggagggacacagttcagttcatcgtcatatttaaaccagttcttccttctcgacctcaaaaggatttctcccactaaattgaaagtctctttgcactactggagytgagccaaccatgaaacaatgacaagttacttccagagatacccaatatccttggattatgttgaacatttagcatagaacctacctattcttaataatgcttctttctgcaaaggaaaaataaaattttttcaaaaattttacagatttttctgctgggctatatatattgatggggagtaaccacaaattcacaccccactgtgagattagattatattcccactctatttcagcaaggttacaaaccctactgaaagcatagtggccatgcagggcagaaacagatgtaatatatacttcaccctcaaaatgtttcatggagggcatgtagtcaccattgacttttttggctcaaggtaagatcttggtggaaaactgccaagccactgcccttttaatacacatggcttatatatatcatcatttcagaagcatttatattaaaataaatgagatgcattaaaatctgtgtgctaccctttaacaaaatttttacaaatatcaagctctcctacttc

SEQ ID NO: 892500 - DNA, 662 bp, Homo sapiens
tcacaatggaagttaaggcttcaacatacaaattttggagggacacagttcagttcatcgtcatatttaaaccagttcttccttctcgacctcaaaaggatttctcccactaaattgaaagtctctttgcactactggagttgagccaaccatgaaacaatgacaagttacttccagagatacccaatatccttggattatgttgaacatttagcatagaacctacctattcttaataatgcttctttctgcaaaggaaaaataaaatttttycaaaaattttacagatttttctgctgggctatatatattgatggggagtaaccacaaattcacaccccactgtgagattagattatattcccactctatttcagcaaggttacaaaccctactgaaagcatagtggccatgcagggcagaaacagatgtaatatatacttcaccctcaaaatgtttcatggagggcatgtagtcaccattgacttttttggctcaaggtaagatcttggtggaaaactgccaagccactgcccttttaatacacatggcttatatatatcatcatttcagaagcatttatattaaaataaatgagatgcattaaaatctgtgtgctaccctttaacaaaatttttacaaatatcaagctctcctacttc

SEQ ID NO: 892501 - DNA, 662 bp, Homo sapiens
tcacaatggaagttaaggcttcaacatacaaattttggagggacacagttcagttcatcgtcatatttaaaccagttcttccttctcgacctcaaaaggatttctcccactaaattgaaagtctctttgcactactggagttgagccaaccatgaaacaatgacaagttacttccagagatacccaatatccttggattatgttgaacatttagcatagaacctacctattcttaataatgcttctttctgcaaaggaaaaataaaattttttcaaaaattttacagatttttctgctgggctatatatattgatggggagtaaccacaaattcacaccccactgtgagattagattatattcccactctayttcagcaaggttacaaaccctactgaaagcatagtggccatgcagggcagaaacagatgtaatatatacttcaccctcaaaatgtttcatggagggcatgtagtcaccattgacttttttggctcaaggtaagatcttggtggaaaactgccaagccactgcccttttaatacacatggcttatatatatcatcatttcagaagcatttatattaaaataaatgagatgcattaaaatctgtgtgctaccctttaacaaaatttttacaaatatcaagctctcctacttc

SEQ ID NO: 892502 - DNA, 662 bp, Homo sapiens
tcacaatggaagttaaggcttcaacatacaaattttggagggacacagttcagttcatcgtcatatttaaaccagttcttccttctcgacctcaaaaggatttctcccactaaattgaaagtctctttgcactactggagttgagccaaccatgaaacaatgacaagttacttccagagatacccaatatccttggattatgttgaacatttagcatagaacctacctattcttaataatgcttctttctgcaaaggaaaaataaaattttttcaaaaattttacagatttttctgctgggctatatatattgatggggagtaaccacaaattcacaccccactgtgagattagattatattcccactctatttcagcaaggttacaaaccctactgaaagcatagtggccatgcagggcagaaacagatgtaatatatacttcaccctcraaatgtttcatggagggcatgtagtcaccattgacttttttggctcaaggtaagatcttggtggaaaactgccaagccactgcccttttaatacacatggcttatatatatcatcatttcagaagcatttatattaaaataaatgagatgcattaaaatctgtgtgctaccctttaacaaaatttttacaaatatcaagctctcctacttc

SEQ ID NO: 892503 - DNA, 644 bp, Homo sapiens
tttgactttaaactatagctgatttgctgtaggagatgcttaagacaaccagagatataaattgcctcatctaccgccaagggaaaaatgattgtatcttgtaatatgaacctcaggatagggacgagcttgttggctatatactcctgttaccaacatcagctacaaagaagaaaaatagaattgaggagaagatcatttgttttcagctcattacagggaaaggaaaactacgttagtatatatgattcatayataaagaggaacatatacataaacacacagtgggagagaagcaagctagcatttattaagtcttaatatataccaagagcttcaggtatcttaaacaaccctaagagatttggttatttccatattatgaaggaaagaattgcaaaaacaaaaaaatctgagtttataaacccctcctaaagtccagattttctgtaccatattctattgactttatgtacaatcttacataaattcctcttagaaattctgagatcgttgtatatcacttacctttaatatttcagaatgaaaataaagtcatgaatctctaaacgggacttcagattcatctgcagcctctaccaattgttccctcttctttagtttttcttaccctgtttacaagt

SEQ ID NO: 892504 - DNA, 644 bp, Homo sapiens
tttgactttaaactatagctgatttgctgtaggagatgcttaagacaaccagagatataaattgcctcatctaccgccaagggaaaaatgattgtatcttgtaatatgaacctcaggatagggacgagcttgttggctatatactcctgttaccaacatcagctacaaagaagaaaaatagaattgaggagaagatcatttgttttcagctcattacagggaaaggaaaactacgttagtatatatgattcatacataaagaggaacatatacataaacacacagtgggagagaagcaagctagcatttattaagtcttaatatataccaagagcttcaggtatcttaaacaaccctaagagatttggttatttccrtattatgaaggaaagaattgcaaaaacaaaaaaatctgagtttataaacccctcctaaagtccagattttctgtaccatattctattgactttatgtacaatcttacataaattcctcttagaaattctgagatcgttgtatatcacttacctttaatatttcagaatgaaaataaagtcatgaatctctaaacgggacttcagattcatctgcagcctctaccaattgttccctcttctttagtttttcttaccctgtttacaagt

SEQ ID NO: 892505 - DNA, 424 bp, Homo sapiens
gaactatatgacttaacaagaggtaggttttcatacaaagaaaagtgagacgaatgaaaggctagaagcaatggaccaagtgcttttgggaagagcggggtagcccggaacacagggtggaagtggaacacaagatggtggagacccagactctggaatacaaagttccaactgtagcatgtctctgagacattcccttatttttcaaagtggcaaaataataactacctccttaggctgytgggatgtttgaaaaagataatacaagcataagtacaaggtctggcatagagtgaaggtgcagtgatgctgacaatggtacagataatgaggaatggttgaaatctccctttttgcttcaacaaaatatatatcactgtacacacatgttcatagcagcactgtttgcaaaaggtggaaacag

SEQ ID NO: 892506 - DNA, 570 bp, Homo sapiens
caagaggtaggttttcatacaaagaaaagtgagacgaatgaaaggctagaagcaatggaccaagtgcttttgggaagagcggggtagcccggaacacagggtggaagtggaacacaagatggtggagacccagactctggaatacaaagttccaactgtagcatgtctctgagacattcccttatttttcaaagtggcaaaataataactacctccttaggctgttgggatgtttgaaaaagataatacaagcataagtacaaggtctggcatagagtgaaggtgcagtgatgctgacaatggtacagataatgaggaatggttgaaatctccctttttgcttcaacaaaatatatrtcactgtacacacatgttcatagcagcactgtttgcaaaaggtggaaacagcttgaatgtccatcaagaaatggccaataaacaaaccatggtgtatacgtacaaccagaacccaggagtaaagtgctgatgtatgctaccatgtgtatccacctccaaaacatgaagctcagggaaggagccggacacaaaaggccacgtactgtgcaattc

SEQ ID NO: 892507 - DNA, 603 bp, Homo sapiens
ttttggaggtggggggcacagttgagacagggtctcgctcgtgtcgtccaggctggagtgcagtggtgccatctcaattcactgcaacctctgcctcccaggttcaaccaattctcctgactcagcctcccgagtagctgggattataggcacccactaccacacccggctaatttttatatcatggggtttcgccatgttgaccaggctggtctcgaactcctgacctgaaatgatcygcccaccttggcctcccaaagtgctgggattacaggcatgagccaccgagcctggcctgtcttttttcaaggagaggctgtatatggatggtgtgcagggacactgtcttctgacgatgttgggaaggggaaaagaggaatcagtccttgtcccacggaggtagccagcaaggatgaaggggaagaccaaggacttctctctacggctgcggacgctggtccaaggcacagggtgccagccccagtggtgggcggctctgtaagttggtgccaggtggccgtgcatagtggcccgtggtgagcgtcacttggggaggaggtgggcctggagggaagccggcagcagcagtgtgtgggtctctcc

SEQ ID NO: 892508 - DNA, 636 bp, Homo sapiens; identical to SEQ ID NO: 892303

SEQ ID NO: 892509 - DNA, 623 bp, Homo sapiens; identical to SEQ ID NO: 892400

SEQ ID NO: 892510 - DNA, 502 bp, Homo sapiens; identical to SEQ ID NO: 892401

SEQ ID NO: 892511 - DNA, 618 bp, Homo sapiens; identical to SEQ ID NO: 892402

SEQ ID NO: 892512 - DNA, 606 bp, Homo sapiens; identical to SEQ ID NO: 892403

SEQ ID NO: 892513 - DNA, 530 bp, Homo sapiens; identical to SEQ ID NO: 892404

SEQ ID NO: 892514 - DNA, 633 bp, Homo sapiens; identical to SEQ ID NO: 892405

SEQ ID NO: 892515 - DNA, 633 bp, Homo sapiens; identical to SEQ ID NO: 892406

SEQ ID NO: 892516 - DNA, 666 bp, Homo sapiens; identical to SEQ ID NO: 892407

SEQ ID NO: 892517 - DNA, 617 bp, Homo sapiens
tcagtttcctggttttgataatggactatagttacgtaagatgtcactggtgaggcatgtgggtgatggatgcatgagacctctctgtactatttttccaagttcttgtgagagtacaattatttcagaatataagtttaatagcccactatcttttaagtttaaacaatgatgtggttcagagaacactcatggcttccctgctcagccatcaaagagaattgtgacttactgaatataacaataacctcaaagtcacaagtcacagttatgtgttttggctgtgctacttataatgcatgtgacacaggccagtaagttactcaaattttaagtttgagctttttcayttgtaagatggaacaatcgtgacactcaaaagatgaagaatgagtttttttccccattaattgtaaagtaccaaagcatcataatttgagagccataacaagattgggcaaattagaaaaaatgctgccacgtataattcaataacaagtgtccaattattacaaaactataccctaagtcaggcgacattcctccagtcttacaagtatggagaggtaagaactgattcaattgctaaggctagtaagctagttccagcctgacag

SEQ ID NO: 892518 - DNA, 617 bp, Homo sapiens
tcagtttcctggttttgataatggactatagttacgtaagatgtcactggtgaggcatgtgggtgatggatgcatgagacctctctgtactatttttccaagttcttgtgagagtacaattatttcagaatataagtttaatagcccactatcttttaagtttaaacaatgatgtggttcagagaacactcatggcttccctgctcagccatcaaagagaattgtgacttactgaatataacaataacctcaaagtcacaagtcacagttatgtgttttggctgtgctacttataatgcatgtgacacaggccagtaagttactcaaattttaagtttgagctttttcatttgtaagatggaacaatcgtgacactcaaaagatgaagaatgagtttttttccccattaattgtaaagtaccaaagcatcataatttgagagccataacaagattgggcaaattagaaaaaatgctgccaygtataattcaataacaagtgtccaattattacaaaactataccctaagtcaggcgacattcctccagtcttacaagtatggagaggtaagaactgattcaattgctaaggctagtaagctagttccagcctgacag

SEQ ID NO: 892519 - DNA, 592 bp, Homo sapiens
tacaccaggatgccatggccccaggctggccttggcattactacttcaagctaaatttcaatttagagaagatgcaggtcatttctgatgaccaacatctggatctccccttttcttctcctatcacaacaaacagcatatattcccactaattattattattattattctttgagatggaatctcgccctgtctcccaggctggagtgcagtggcgtgatcttggctcactgcaacctccgcctcctgggttcaagtgattctcctgcctcagtctcctgagtagctgggactacaggcacgtgccaccatgctcagctaatttttttgtatttttagtagagrcggggtttcgccatgttagccaggatggtctccatctcctgacctcgtgatctgcccgccttggcctcccaaagtgctaggattacaggcgtgcgaccagtgcacggccaattaattattcatgttaacatacatttaaaaataagcacaaaagccttgacttttcccacctatgcaattcagatggcagtatctttcagatagtatttgcagattaaatgtgttcagtgatagttacccagaatga

SEQ ID NO: 892520 - DNA, 613 bp, Homo sapiens
tagacagtaacagatcagtggcttggaaaggttaaaggcaagagagggtcgaacaggaggaacacagaggatttgggggatagtaaaagtactcagtatgacactacaatggtgggtacatgtcattagacagttttccaaactcacagaataaacaatgctgagagaatgctaatgtaaactatggactttgggtgataataatggtgtcagtgtaggttcactgattgtaacaaatcgctctaagggggacgctgataatgggagaggctgtgcaagtgtatgaacagggagtatatgggagaatctcagtaccttctgcctaattttgctgtgaacctaaaactgctctaaaacaataaagtctatatttattctttcacagtctctgttaagacggacttttttcttcttgctacagataaasagggaggaaatgacagagagaaagctctgattctcatggttatgtgaatatggactatcatgagatccaacctacttgcactgatgagggaagagggaagacaaccaatgtcagttcctgaaatgcaaccaaccaggggaaagctcagcaggaagaggttcagactcttcctctgtggatatgaaa

SEQ ID NO: 892521 - DNA, 607 bp, Homo sapiens
gatcagtggcttggaaaggttaaaggcaagagagggtcgaacaggaggaacacagaggatttgggggatagtaaaagtactcagtatgacactacaatggtgggtacatgtcattagacagttttccaaactcacagaataaacaatgctgagagaatgctaatgtaaactatggactttgggtgataataatggtgtcagtgtaggttcactgattgtaacaaatcgctctaagggggacgctgataatgggagaggctgtgcaagtgtatgaacagggagtatatgggagaatctcagtaccttctgcctaattttgctgtgaacctaaaactgctctaaaacaataaagtctatatttattctttcacagtctctgttaagacggacttttttcttcttgctacagataaacagggaggaaatgacagagagaaagctctgattctcatggttaygtgaatatggactatcatgagatccaacctacttgcactgatgagggaagagggaagacaaccaatgtcagttcctgaaatgcaaccaaccaggggaaagctcagcaggaagaggttcagactcttcctctgtggatatgaaaatggga

SEQ ID NO: 892522 - DNA, 641 bp, Homo sapiens
cctcttttcataattctgattataaagtaaggctctgtcttctactcttcttgctttctcactcagacatatcatccatgcctaagggtcaacagcctcctccactctttcaattctgacctttcacttagcattcccagtckcttgctgcatgcttccaattgcagggtattaattacttttagcaaatgtactagaatcaagtgcccaactgattatcaaattccggaagtgtacccaaaggacaatgactaattcctcattgggtcaaagtctttcctatgtggaagcaagagaaaggaacagaactaacactgaacattgtgaggagcccaaaacatgactcctgctgaacacattctatttggttgtagaacccaaccaatataggccccgttgatcgatttccccacaacaagaggaggtcataaaaatcatgcttccactttctcaatagatacttatcgctcatgaatgtctgtgaatcagaagaccatgggactataactctactccactcaaactctccatactcccaaagctggacctcatggtcctcagatcatgtaatactcagacacagcactccagtaaaccactttctggccagaaactcatccttcccatagttcctctccctt

SEQ ID NO: 892523 - DNA, 608 bp, Homo sapiens
cagcttcactcattctctcaccctcctcaatatccagttagttatttggcctggcaattcaacttccaaaaatccctctcaattcagtatctcctttccatcctgagctaccgctgctcatgttctagctcatgaatttaatcccaacactaatgaggctccctgcttactggatcttcctttcttaataactcatcactctaaatccattaggtcattgttcttaagaatcttaatggagaaaatattcacaagaggttaacgtaatgcaaaagatggtgaaacgctctggaataaggatggaagcttaatgggaaacaaataccccatcctatttttgcatgtcctctgatctcctgctggggccacccactgccaraaacaaccaaaagttagagggcaagcaaaagagcatgggtgataccatctatctacaacagttagcttcttagggtacagactaggtggagagataccatggtggggaaaacgacatgtggacgccattcagcacagttactttttctgactctcccaagaagaacgcattttcccctcattgatattccaagagaaatatcattttattggtacctcaactgaggcac

SEQ ID NO: 892524 - DNA, 617 bp, Homo sapiens
tttactaccattggtcagctaagccagaagacagatgacagagggctggtctatttttgaatattgacagagaagaatgagactctgggctgggcgcggtggcccatgcttgtaatcccagcactttgggagcccaaggtgggcagatcacctgaggccaggagttcgagagcagcctggccaacatggtgaaatcccatctctactaaaaatacaaaaattagctgggtgtggtgatgtgcacctgtagtcccagctactcaggaggctgaggcaggaaaatcgcttgaaccctggaggcagaggttgtagtgagctgagatcatgccrctgcactccagcctgggcaacagagtgagactcggtctcaaaaaaaaaaaaaaaaaatgagactgatcaatgttgctttgacttcaatttactactaaaacagctagcaagaaagggaaagggtactcgctagaccagtgggtctcaacacctggagcagcagcagtagcaccacctgaaacttactagaaatgcaagttctcaagtcccatcttaaatctgaatcagaaactctggtggcagggcccaggaatctgggtttaacaagatcttgagctgattttgat

SEQ ID NO: 892525 - DNA, 670 bp, Homo sapiens
agaatacaataatggggctcaaaaatttaatagagggtttcaataccaatctatataaagcagaagaaagaattagcaaacttgatgacaagtcattagaagtcatccaatctaagaagtcaaaagaaaaaagaatgaaaaagggtgaagacagtgtaggggatttgtgggacaccattaagtggaataatatatacattatcagtgtaccagaaggagaaaagaaacagaaagggacagaaaacattcaaggaaataatggcagaaaatttcctaagtctggaaaagaaaatagaaatccatatccatgaagctcaatggtctgttataggataaattcaaaggracacacaccaagacacattacaatcaaattgtcaaaagttaaagacaaagagaatattgaaagcagtaagggaggagtgacttgttacatacatgggacctctagaagactgtcaatggattttccacagaaatcctgaagggtagaagggaaagggatgatatattcaaaactgaaataaaaaaaagaaccctgccaaccaagaatactatacccagcaatcctgtcccttaaaggtgaagaagagataaaaactttctgagacaaacaaaaggtgagggaatttatcaccattagacctaccttacaagaatgctaacaata

SEQ ID NO: 892526 - DNA, 468 bp, Homo sapiens
ttaaagacaaagagaatattgaaagcagtaagggaggagtgacttgttacatacatgggacctctagaagactgtcaatggattttccacagaaatcctgaagggtagaagggaaagggatgatatattcaaaactgaaataaaaaaaagaaccctgccaaccaagaatactatacccagcaatcctgtcccttaaaggtgaagaagagataaaaactttctgagacaaacaaaaggtgagggaatttatcaccattagacctaccttacaagaatgctaacaatagtccctcaagcttaaggaaaaattgttaagtagcaacatcaaagtrtattaaaacataaaacttactggtaaaagtaagtatgtagttaaactcagaacactcttagattggaacagtggtgtgaaaataaattttgtttctagcatgaaaattaaaagacaaaactataaaaacaactgta

SEQ ID NO: 892527 - DNA, 572 bp, Homo sapiens
gtgattatcactagaactgctataagattcatgtgcagattttattgtgaacacaagttttgatttctctggtttaaattcccaggaatgcaattgcttaatcatatggtaagtatgtgtaattttataaaaaaatgttaagttgttttcaagagtgactttaccattttgcattcctgccagcaatatacaagagttacagatggtctgtctccttgtcaaataaaattgtttatttttagccattctaatagaygtgtggtgatatctgctagtgattttaatttgcatatccctaacaactaatgatcaatgttaaatatcttttcatgttcttttgaatcatctgtataccttctttggtgaagtttctgttcaagtctttgagttttaaaattggattattttcatactggtgagtttacaaggttctttatatgttctggatacaagtacttgttggatatgattttcaatattttctcttagtctgtagcttatctttttagcctcttagtggcgtttttcacagagtgaaagtgtttaattttgatgaaatatggtttatgagt

SEQ ID NO: 892528 - DNA, 572 bp, Homo sapiens
ccaaataactgaataagtgagtgaattagcatacacttaacatagaaaatgagttttctgtgcatcaaaacgtattcacagaaaaactttcatttgtgatacttcttataactagtttctggaaaaagaaaataactgaattgtgactttttgacatagttaataaaaatgttgtctaccttttaaattctaataatactttagaacaggaattaaagtatggcttttattacaacaatatcaattagcatgtatgtgttgtttattttcatattttaattgctacttctaaacaactatataaaattaattccttcttaatatgagaaaactgaaaaatggagaagttaagtaatttcccaagatcatacatcttgagtaaaagaggcagratgaaaattgagtagtatggcttcagaactcacaccgtgaagcaccatattatctgatccttagaggagagggcagtagtattttggtattctcaacttaagaatctttaaagttatttttaaaaagaagggcaatatgttgtatgtgtgtctttgtgtgagtgtcagtgtgtgtgttat

SEQ ID NO: 892529 - DNA, 560 bp, Homo sapiens
atacccattttactgggactgtcactaacaagattttcaacactttgctgcttattcagaaactttactgcccatattatcccaatcttcagaaatgatagaaggaacaattaattcttaagctaaaacatcaacaaagctttcagacattatrggaatccaaagagtattggcattgtttttaatgacaaagaaattgcctatttttaggatcttatttgttcttccattctgaattgaaatcagactgcctcttacacctagaaatttactctgattctacattctggtcaaattcaagcagacatcctctgatactgcaaataactcataaaatgcacctaatcatcatcaatacatacagtatttcttcaacatcctcctaaataatgcttacatggtctgaaatgttaagatcttgtcttctggaagagataccagatagggttattgaactctaatgaaaacatctcatcaagtactgtaactagttagcataactctaaaagtacacttgtttcttggatatactttactaggagaagagaattcatcctcaa

SEQ ID NO: 892530 - DNA, 531 bp, Homo sapiens
attctgggaattccaacctatctctgcagtaacagagatacccattttactgggactgtcactaacaagattttcaacactttgctgcttattcagaaactttactgcccatattatcccaatcttcagaaatgatagaaggaacaattaattcttaagctaaaacatcaacaaagctttcagacattatgggaatccaaagagtattggcattgtttttaatgacaaagaaattgcctatttttaggatcttatttgttcttccattctgaattgaaatcagactgcctcttacacctagaaatttactctgattctacattctggkcaaattcaagcagacatcctctgatactgcaaataactcataaaatgcacctaatcatcatcaatacatacagtatttcttcaacatcctcctaaataatgcttacatggtctgaaatgttaagatcttgtcttctggaagagataccagatagggttattgaactctaatgaaaacatctcatcaagtactgtaactagtta

SEQ ID NO: 892531 - DNA, 560 bp, Homo sapiens
atacccattttactgggactgtcactaacaagattttcaacactttgctgcttattcagaaactttactgcccatattatcccaatcttcagaaatgatagaaggaacaattaattcttaagctaaaacatcaacaaagctttcagacattatgggaatccaaagagtattggcattgtttttaatgacaaagaaattgcctatttttaggatcttatttgttcttccattctgaattgaaatcagactgcctcttacacctagaaatttactctgattctacattctggtcaaattcaagcagacatcctctgatactgcaaakaactcataaaatgcacctaatcatcatcaatacatacagtatttcttcaacatcctcctaaataatgcttacatggtctgaaatgttaagatcttgtcttctggaagagataccagatagggttattgaactctaatgaaaacatctcatcaagtactgtaactagttagcataactctaaaagtacacttgtttcttggatatactttactaggagaagagaattcatcctcaa

SEQ ID NO: 892532 - DNA, 585 bp, Homo sapiens
tggagtatgtaggatgactgtagtgttgctttattgcttcagattacctttgcttggtgaactgagtggggaaaggagaacagagtagggaactgataaaagtggttgaggtatcatatatgacccttttattttaaatagaatttaactacataattgtggtcaacctgccaattttcatgaattaaagcccttccaatgtatgataatatatatttaacatcattaaaattaccacatgttatgattttgaggacataagacattttcagtttttttctttatcctatgctaatgttccagactgaaagaaattacttttttaaagatgaatcttattgaagttgaaaaccaagggaaaactggtaarttaaatgctgatgggatcctataggaaaattaagtcaaattacaaaatcagagttaagacaaagaagcctggttaccaaaaaagctgcagagtaagacaaactgtgatagaagttcagaatctcaacacagacataaataaacagccactaaatctgcattgggaattattgctttatgtgaagttttgtagattagtcccctacattgaataat

SEQ ID NO: 892533 - DNA, 666 bp, Homo sapiens
gttaattttttgggactacgaggccaataagtgaccaagacaaaattacacttactcttcaggccttttttactacaccatgttgcccctgctatagtaaaactgcaaaggccagttagccccagactgatttggacttaagcttctyattgagtaatggatcccacatgcattcaatcatctctttaagagctcatttgtttttgtgcaaagacttgctggcattagtctcacagctagccttgacgacaatgggagcagtagtttcttaaggcttgtattgcaggtcatccatcctctaaaatattgcccctcaaaaggtgagaagaaatttgacaatcttcctctaggcgtttctttttaaaatgcaaacacttctgcaaggcaaaattggttagcattaataattaatttgaattaatatcagatatttttaaaacaatagtggaaactttggtgataagggaacacttaaaaaagcagaaatcaagggaaaggacaatggagaaaaacgtcttcaatttgctatacatctctgaaattgctagaaattaaaagtaaatatctcaaccattaaatatatatgccaacatgtaatttttatactattgtctttcaaattatgttaacgtttgctaccaataaaaaaagccagaagtgttctaa

SEQ ID NO: 892534 - DNA, 664 bp, Homo sapiens
ccccttcttgtctggggactagattgcctttgcaggactaataaattagccaaaatttgttagaatttggattagaaattatggtttaggagtcacgcagccggaggcgacaagagtctgaccctccccaaattgctccagaggatgacatcactattgtaaaacttaagatcagtgcttgagatattttcaagaccctgcacttgatggataasctggcatcgcccagatggatcaactcgcttatctgatcttgtgaccccctacccaggaactgactcagcacaagatgacagcttagacttcctatgtcttcatctctgactcaaccaattagcactgctgactcactggcttcccacccactaaactagccttaaaaactctgatccctgaatgctccagcagactgatttgagtaataataaagctctggtctctagcacagctggttctgcatgaattactctttctctattgcaattctccagtcttgataaattgactctgtctaggatgtgggtaaactgaacgcattgagtggttacagtaacttcattgacttttccttgagaaaagaaattgttaagtgaccttaatataatttattttgtatcatcgaaagtgccacaaagtgaaatgatagagctaattcatggatttc

SEQ ID NO: 892535 - DNA, 672 bp, Homo sapiens
agttcctgtatccagagtcaaacctaaactcaacagtgggtattccaggcatatgtcaccgtttgagccctttgcccatcacagggtctcacttgttccacacaaggctcctcatggctccccacttgcaccccctgttttcctgccactctgattttttttttttttttttgagacggagtgtygctctgtcgtccaggctggagtgcagtggcaggatcttggctcactgtaacctccacctcccaggttcaagtgattcttgtgcctcagcctcccaagtagctgggattacaggcatgcgccaccacgcccatgcctagctaaattttcagattccacccgcctcaatctcccaaaatgctggtattacaggcatgagctaccactcccggtactgccactctgaatttgatgctctcctctgccaaaatagtcttagaattgcaaacccacatgccacagatgtctctgcgaggcccttcatgaacccgttcctgaccttccttcatgcttagaatcatgggtatcttaccgtgtgatgctttgtagctggttattagcatacatgtgcgtctctgtccattagattgtaaaatgctggactgaggcactgtgtccaactccttccatctgaattcttcacagtgcctgggacattttgggccgcgg

SEQ ID NO: 892536 - DNA, 575 bp, Homo sapiens
ttggaggattttccctggtatagcagtggtgtttatggtagctgtccaaatttatttatacttcaaaccatgccagaaagttaaggatttctgtcaatgtctacacctagttctcttgttaagactagtaaaaagttctcttgtaaaaagttcatttttacctcgagaggcataagctcagagattattgcaggaggaagggtcaccccttgtgtttgcsccatgaaggcacactcctttttacctggtgggtgttgaaaaaatatttgaaggaatagacctgaatgaatggtaattattggtaggggtgggaaatggactaaatgacctagtgagatctttgttttgagatctaagtataagatcatctcttaaaccttttaacaatattttggtggaacctattagaaacttaacacattattgtgtgcaagatatctaaaaataagtccagttttttagaggcagtaacatttaagataatttaaaacattccatattagtgtaatgtcttgttagggaatgtggacagtaaaaacgaccatttgttaaattttttttcccctccaaaatat

SEQ ID NO: 892537 - DNA, 588 bp, Homo sapiens
agatatctaaaaataagtccagttttttagaggcagtaacatttaagataatttaaaacattccatattagtgtaatgtcttgttagggaatgtggacagtaaaaacgaccatttgttaaattttttttcccctccaaaatattgtctgatgtttgctccttcgtgttacttatggagagttactgtttatgacttaaagatatgggggtggagaggcctaggtaactgcaacaatgtatttaggtaatttacattaggtttttagagggctatgactrtctgcaaaaggaaaattcaagataccttgttataaacatggtatacagtgacctttggcatgcattttgttttgtaactacacgaagtgttaatttggattgaatctttgttttcacttgaaaaccttttttttttttttaagaaatagcttggaaatttaggctgccctgaggtgttttcgtgtgtctgtttatggttgacaagtatctagttatgagaagaaaatgtggatagaattaactgtattataggcgagaagggaattgccttataatcttgtgccactgaacacaagattagtagaagag

SEQ ID NO: 892538 - DNA, 570 bp, Homo sapiens
gtgaactgaagatgatggttgatcgccttaattcacctccacacagctatggagtcataacttttaatatcagatgattttcttttagaatatttaaaagcacatacgtagttgtatctttcaaaactgatttgtaagttcttgtgttctgccatattcactaaagctataggcagtgcagtttccagctgctaaattatgcctattccccataaggaaaggatggaaaatgccaycgagacctcctgggctcttgttttttctttacccacatagctcattaatcgtggcccattttccatgtaaccaaaaacttagtctgggaatccttactagcttcaccagcatttaaaggcgttcctaccagtttgaattagcatggagaggaaattaaatcttttttatgttgtctctctctgtgatacaggctgctgctttctccatttcagattgatttatttatattttgcttctgctattttttttcctcaataaaacatcccattccatctcctaaatctctgccttacaaaaaccacagtgacctatcatttctttcaaattgatcta

SEQ ID NO: 892539 - DNA, 631 bp, Homo sapiens
acataggtaaatgtgtgccatggtggtttgctgcatctatcaacccatcacctaggtactaagcccagcaagcattaactgtttttcttgatgctctccctccccatccccatccctgacaggcctgagtgtgtgttgttcccctcgctctgtccatgtgttctcattgttcagcttccacttataagtgagaacatgtggtgcttggttttctgttcctgtgttggtttgctaaggataatggcttccattattccagcttcatccatgtccctgcaaaggacatgatctcattcctttttatggctgtatagtattccatggtgtatatgtaccacatttgctttatccagtctatcattgtgggcatttgggttgattctatgtctttgttatgtgaatagtgctgcaatgaacatatgcatgcatgtatctttgtaatagaatgatttatattcctttaggtatatacccagtaatgcgatwgctgggtcatatgatatttctggttctaggtctttgaggaatcgtcagactgtcttccacaatgattaactaatttacattcccaccaacagtgtaaaaacattcctatttctccacatcctcgccagcatctgttatttcttga

SEQ ID NO: 892540 - DNA, 566 bp, Homo sapiens
atgtgtgcccacatgttgcctctgttgtctcccaggctcttcctcagcccccatagactagcgaaatcctcaggagtcagctcagacttgcccttccctggaagcctgccagagagctcccaatatgtttagtttctgtcctcaccacccagtgcctgcctctgggacagcacttagcccacaggatgacagtggctggctttcatgtctcttccctgacagaccctcaatcttcaaggtaagcaactatgctttactcattttgtccccagcccagtgtctgtgatggtacctgagacatagtggaggctcaggagacattgcctgaataaatgaggtgctgggtggatgcaatcatatgtatgtatrtgtgtgcatgtgtatgcgtgtgtatatgtgtgtgtgtgatacatatatatctgtagatgccctgattgtatgtcagcttgctgtttgggtacctgccatggtttgaatgtttgtcttctccacaactcatgtgaaatttaattgccactgtgatggtactaagaggtggaacatttaagaggtgattaggccacgag

SEQ ID NO: 892541 - DNA, 558 bp, Homo sapiens
atggggataggaacccctgctctcagacctttctamcctttaccctgtgcatctcctcatctgtatcttttataatatcctttataacaagctggtaaatataagtagtgttttcctgaggactgtgagccattccagcaaattattgaactggagagaatcagaagaaccccaggtttatagccagtcagaggtatgggaggatgtccaggacttgtgattggcatcaaaagtgggggcagtcttgaggggctgatgccttaacttgtgggagctgacattaactccaggtagatatgtcagaattgcattaaattgcaggatgctgagctggtgtcagagaattggtggatgtgggaaagagcctgcacatctggtgtcagaagtgttctgtttgagaatggagataaacagtgcttttccagagggagtttgtcttgttcatactaattagctagagcttgtcctccccacttcaaatttgtgaatttttttttttaccagtggaatatgccataaaactgacataactaccaagctctagaatttaaatgatct

SEQ ID NO: 892542 - DNA, 702 bp, Homo sapiens
ttgtcctccccacttcaaatttgtgaatttttttttttaccagtggaatatgccataaaactgacataactaccaagctctagaatttaaatgatcttggagggcttaagggagcttcttttcaacctcagacataccagaaagcaacgaattctgcagcagttttctggttaatatggcaatgcagacctagggaatatggagaggtggttatgcaatgaaagggkagacatgggaaacacaccagaagacataacattggaaaaacatttggcaaacataaagccatcccaaaaagataagttgcaacactgccagttgggcaagatgattaaatggcagaaatatttatattgtttaggtagaaagaagggaatagtctcagacatggaatagctaaactactgaaagaatttagaccatttggggtccttctgacccccgtgaaattggaaaccatgtaaattagattattaattataaataaaaatgctctggttataccacactttctgaggaaatcataagtcctgttaccctagtgtttggggactcctcttggctaaaatcactcccttggccccatcaccagctgcagtgattcaggggagtcccacctggttgttcctcttagagctgaaagtgctgaggaaggcaaggaattcttgaatcctagagagtccctattttctagaaaatggt

SEQ ID NO: 892543 - DNA, 571 bp, Homo sapiens
agggagcttcttttcaacctcagacataccagaaagcaacgaattctgcagcagttttctggttaatatggcaatgcagacctagggaatatggagaggtggttatgcaatgaaaggggagacatgggaaacacaccagaagacataacattggaaaaacatttggcaaacataaagccatcccaaaaagataagttgcaacactgccagttgggcaagatgattaaatggcagaaatatttatattgtttaggtagaaagaagggaatagtctcagacatggaatagctaaactactgaaagaatttagaccatttggggtccttctgacccccgtgaaattggaaaccatgtaaattagattattaattayaaataaaaatgctctggttataccacactttctgaggaaatcataagtcctgttaccctagtgtttggggactcctcttggctaaaatcactcccttggccccatcaccagctgcagtgattcaggggagtcccacctggttgttcctcttagagctgaaagtgctgaggaaggcaaggaattcttgaatcctagaga

SEQ ID NO: 892544 - DNA, 571 bp, Homo sapiens
agggagcttcttttcaacctcagacataccagaaagcaacgaattctgcagcagttttctggttaatatggcaatgcagacctagggaatatggagaggtggttatgcaatgaaaggggagacatgggaaacacaccagaagacataacattggaaaaacatttggcaaacataaagccatcccaaaaagataagttgcaacactgccagttgggcaagatgattaaatggcagaaatatttatattgtttaggtagaaagaagggaatagtctcagacatggaatagctaaactactgaaagaatttagaccatttggggtccttctgacccccgtgaaattggaaaccatgtaaattagattattaattataaataaaaatgctctggttataccacactttctgaggaaatcataagtcctgttaccctagygtttggggactcctcttggctaaaatcactcccttggccccatcaccagctgcagtgattcaggggagtcccacctggttgttcctcttagagctgaaagtgctgaggaaggcaaggaattcttgaatcctagaga

SEQ ID NO: 892545 - DNA, 639 bp, Homo sapiens
tcatgacaacaacccctagggacgctctggctgccaaggaaaagtggggagtgggcatgcctgagagagactggcaggatagagacagaaagcaagaggaagccaactccttctgccaagatgcagagacagccacaggtagctcaggcggcccccacttactgatgcagtaatgcatggcagacacacaactgatgcagagaaggggacagaagtgtgatttcagcttgccagcagaaccctgaggttggaggtggggggtcctagggaagggatcctgcagccaggagaagacatcagggccaagtccactgcctgttcaactcttgcaactccaacaccatgcacaagaccagatatctgattacaatttaaatatcaatgaaaccatgtggcaagacttcctgcrctgtatttgatgcattcccaggacctccaaggttggagggcagtgatgtgtcagcagacaatgaccatgaagaaaattacctttggaaatttatgtaagaacagcctgcaaagtattccatgcagaccatgattcagagctttcgggctatttgcctgcctctggacatctccaatttgtcatcatctgagaggccaggacagagtctactaggctgtgtcacctctgat

SEQ ID NO: 892546 - DNA, 616 bp, Homo sapiens
ccctggagtggctctctatgtcatatcatccaggtcatggttacaatgtcacctcttccaaggccttccctgacaccatatctagcatagttcccatcttcactccctcatcacttcccaatgttttccctgcttaatttattgtagctttcrtcttcattgtgtatgtgggtagacagtataatctggggttagactctcagagtttaaatctcagctccactacttgagctgcatgacattgggaaagtccttaacctccttgtgcctcattttcctcatctgtacaatagggataatgttatacatagtttatgaaactacagtgagaataaaaggagagattaatgatatgaaaaccacttagaaggctgacaggcaggaggtgaggactacatcaatctttgtttctttatttactcattattgcccgactccctaccctagactgtcaactctggtgtattagtcaactcagcctactgtaacaaagtaccacaaactggagggcttaaacaacaggcatttattttctcaaagttctggaggctggaagtccaagaccaaggtttcagtggggctggttccttggaggcctctgtccttggcttgggga

SEQ ID NO: 892547 - DNA, 632 bp, Homo sapiens
tctgctgcctgaggaaaccctgtgagtacgggcatggagtgctgggtttaaggaaaaaccagcctgaagggcactgtctgggaaggatgggaaataatacctaagggtggctggggaactctaatcttggaagttatatcaaaagaggacaacaaccatctgccttggaagttttaggtgcaggttttcttccagttggggaagggattggggtgtgggggcactttccctctggtggttttgtagtaaacctttccaaatggacccaactacttagatgtatggacctattaacaagaaggcrtagatactcttcggctcataaccagtggaaaggcatggttcctgtattggaagcatctactactggagtgaaattaactcctagtctgttagttttccagagctgctgtaacaagtctccacaactggatggtacaaaataatggaaatttattctcttacagctctggaggttagaagtccaaaattaaggtgtcagcagggtgggtcccgttttggaggtgctgagggagaatccattccctgcctctctcccagcctctgatggttgcttcaatccttggcattccctggtttgtcagtgctgatgcattcaatctctacctctg

SEQ ID NO: 892548 - DNA, 630 bp, Homo sapiens
ataaaataccattttcccagaatgcctgggatctgacctgccccagattaattgacatttccagattttggtaactataaccaaaataatgaatttatttgatgctgttacccacaaaatcatattacctaaggggcattgtctgtcaagatcatgagatgagcccatcttgacatccccaattgaaggtggcttcgtcatatgccatacattgtagaaaaatgttttkcatttgtgatcaagccatgcttttcccgaatgcatgattataaaaatatcttatgaagtatttctagtggttcaatgcatttgtgttggctcccagggagagaagagcttctgtataaacagccatcacaacttcaccatcagtgagcagatttacagaagaggaaacataaatgactaattcacataaagtgttcagcctcactcaaattgagatataattttatgcatgattttaatgccatcttacataatatattcttgtccatttttcattgggttgtaaccattttatatattcagagtcttaacattttaatggtaatatttctgatatacatcttttctcattttgttatttaatattttgttagctttttgacatatggatatttcacattt

SEQ ID NO: 892549 - DNA, 675 bp, Homo sapiens
tgaaaggggccaatgtagagctcaggctgtggcttccgtggatgcaagccccaagccttggcagtgtggtgttgagcctgcaggtgcacagaagtcaagaactgaggtttggacacctctgcctagatttcacaggatgtakggaaatgcctggatgtccaggcagaattttgctgcaggggcaggaccctcatggaaaacctctactagggcagtgcagaagggaaatgtggggttgaagcccccacacagagtccctactggggcaccaccttgtgcagctgtgagaagagggccaccatcttccagaccccagaatggtagatccactgacaggttgcactgtgcacctggaaaaactacagacattcaacaccagcatgaaagcagctgggagggaggctgtaccctgcagagccacaggggcagagctgtccaagaccatgggaacccaccttttgcatcagcatgacccagatgtgagacgtggagtcaaaggagatcattttggagctttaagatttgactgccctgctggatttcagatttgcatggggcctgtagcccctttgtttttgccaatttctcccatttggaatggctgtatttacccaatggctgtacccccattgcatctaggaagtgactaagttgcttttgattttacaggctcat

SEQ ID NO: 892550 - DNA, 675 bp, Homo sapiens
tgaaaggggccaatgtagagctcaggctgtggcttccgtggatgcaagccccaagccttggcagtgtggtgttgagcctgcaggtgcacagaagtcaagaactgaggtttggacacctctgcctagatttcacaggatgtatggaaatgcctggatgtccaggcagaattttgctgcaggggcaggaccctcatggaaaacctctactagggyagtgcagaagggaaatgtggggttgaagcccccacacagagtccctactggggcaccaccttgtgcagctgtgagaagagggccaccatcttccagaccccagaatggtagatccactgacaggttgcactgtgcacctggaaaaactacagacattcaacaccagcatgaaagcagctgggagggaggctgtaccctgcagagccacaggggcagagctgtccaagaccatgggaacccaccttttgcatcagcatgacccagatgtgagacgtggagtcaaaggagatcattttggagctttaagatttgactgccctgctggatttcagatttgcatggggcctgtagcccctttgtttttgccaatttctcccatttggaatggctgtatttacccaatggctgtacccccattgcatctaggaagtgactaagttgcttttgattttacaggctcat

SEQ ID NO: 892551 - DNA, 620 bp, Homo sapiens
catgttaatggttctgctctcccaataaatctagttacatatagatccttagccaatttactttttcattatagagaggagaaatcataacatagcatgaactagaactaatttaacattgtacacagtttaaaacttcagtggagttgaaattaagatcattgaaaccccacgagaaaatttacttcctgttccaagatacttgggcttcccagggctaaatggacagtatttattcagcatcctaggtgagtctcactcttaggtctracattgggtcacatctatggggatttcagcatggcttcacacaatctgtccctgccttcacctctgaggcaccaactccaagaaaaaactgtggatataccggtcaaattgggtcttcaaatatgatttactggggtaccagtatgtgtgtatgtatgtgtgtttgtcttgatatgggtctctcttcagggaaaaagacagagacacgcagagatacagagataaagagagagagagtgggagaaagagagagaaagaaataaagcactcacttccctcaaaaactcatacttgaaagctaaattaaaaattaaatatatttaaacttaacaaatggattcaaaagtcac

SEQ ID NO: 892552 - DNA, 626 bp, Homo sapiens
tgaatcaggctgtcattgtttttatcttgtcatgtggttagacatattagttgttgttttaccctggttctcttgcgattgtatttttttggttattttcttcagtccacagggtttgttttttggaggattgccttttaaaacagctgctcattgtgtgagaattggctcagcttaaatgagataatgtagtttctaaattcacctaactgggtgtgcataagtcagtatgttttattatatggaaatcaaaccaatgacaggaagacttgatatggaccccttattgccaatggacagccagcctccctcgaaacacctcsctcactgcgggtgacacatgaaggtctgatatttacttacagcacaaggtgcattagtcatgggaggttaggctatgctgtggtaataagtaacccccaaataccagtgtctaaacacaattcaagttcatttatcactctaagagagacagcatggaccagacagcttctctgcatgatctctttgcttctagggtcagtgcaatgtgaaaggaaggctgtgatcaggccaggaggccaatcccattggccagatcctggccacatgaattgatcatagctgcaaaggggtctgggaaatat

SEQ ID NO: 892553 - DNA, 670 bp, Homo sapiens
caagggtggaagatcccacttattcaatgccaagctcacccataggtacttccattttctcttagctttccagggtcacagcctttgttatcatctctgtacatggcctcttaaaatgtgtctatggcttaaaatgtgcctcggccttccgggtcctgagcactgacaccaygcctcctcatggggtccatatccccaggcttggacggattctctttctcagacattccaacacaaaagtcccctttagctccatttccctgtgataagctttggctgcttccaaggctcagcacaactccttttgagaaggcagggagtcgcctctgcacctgagtgttgaaggtgactttcccgagtgtcttcaaaagggcatttttctacttaagcttctggaagtgtgcttcctagagctgggttgcaatatctctgttctcaagatgtatgatgaggtcagtagaacgatctatgatcccatgagccaaacatgtttctgcctttactgcattagggacatgctggtactgtattagtctgttctcatgctgcaaataaagacatacctaaaactgggtaatttgtaaaggaaagaggtttaatgggctcgcagttccacatggctgggaaggactcacaatcatggtggaagatgaaggaagagcaaagggaa

SEQ ID NO: 892554 - DNA, 639 bp, Homo sapiens
ttccctcaacctttgccccttatacctggattcagcacccagtataattcatacgtggactgacctggggctgctcaccctgtgttcatccatccagtgtaaggctctcatgctgggaggtcctttctaataggtgggatgcccctttggaaagtgcctctcaaggctcctcagtggacataagtggaaccccctttccttggctggaggccccaagagaaattgtggtttgtgtccccagtagacattmttttccaatccccccatgggacaaagcccttccattctctcagactcaccgatgggctgcattctaaaacattgggataaacttgactcccagactctcaaaaggaaacatcgaattttcttgtgtaatacagcatggccactttataaacttccagatcaggaatcctactggcttccaaatgggacctctgcccccagtagtattttataggttgacctctttggtcataattcttctaaacggcttgagattccttatatctgaggttgtgtaactctttctaagtttgctctcctctcccttacatggttccttcctttactaggacagctgcatttatacttctacttctcctcttcagtcctttgtctctttaatttactggt

SEQ ID NO: 892555 - DNA, 680 bp, Homo sapiens
atttggctgccaacagggaattctaaacaactaaaaactccagatgatgaatgcacaacataatgatggttaaattaaaaaaaaaaaagagcacggtaataaaatttccatgaaatattttgtgtaagcgcagataatcagtcattttctttrtagaattcttattcgtaaataatttagaatactttgttctttataatatatgatgggcaactatagtatgattcttctgagtgactcagttcttttttttttttcacatttaatgactttgtttctcctaagtgaatgcacagatagtatattaatcagggttctctggaaaaaccagaaccaatttattatcaggtactggttcatgtgattgtggaggctgagaagccccatgatctgctctctgcaagctggagacccaggaaagctgatgaaagtcaaaggcctaagagctggagggccgatggtatagattgcagcccaggtctaaaggcctgagaaccagaagcacagagggcagaagatcaatattccagctcaatcaggcaaagagaaaaagtcctcccttcctctccgtttttcttctattctgaccctggatggactggatgaggcccagccacattgaggagagccatctgctttaatcagtccaccaactcagatcctgatctcttccagaaaca

SEQ ID NO: 892556 - DNA, 605 bp, Homo sapiens
gaggaagatgaatggaccagttcaaaaagagagagacagagaagtcctcctccctccacttttttggtctattcagaccctcaatcaattagatgatgcctgtccacactggtgatggtggatcttctgattcaaatgtgaatctctytaaccatcatagcttctaagttcccacctttcttccatccttgccccatcccttcttctctaacctcaccttgtcctcccttacctctatcctttcctctctctcctgcatacattttgtggaaagcctatgtattaagggtagacacaaggcaaaattgtttctctgttcatggaacttagatactactgcaccagctactggagaaagtattatgcacttgccaagtaatacacaggatttttgtcacttataaacacaacaaagctcaaaatctaccatcatcatattctccttcttgtcactcaaagtcacatcaagaggatgaattgattttgtcctcaggacaccttgtcatgtctcccaactttcctatataactgatggttgttactccagacttttattagattatcttcagtgttgtgggttgaaatgcatcttccaaaagatatgt

SEQ ID NO: 892557 - DNA, 605 bp, Homo sapiens
gaggaagatgaatggaccagttcaaaaagagagagacagagaagtcctcctccctccacttttttggtctattcagaccctcaatcaattagatgatgcctgtccacactggtgatggtggatcttctgattcaaatgtgaatctctttaaccatcatagcttctaagttcccacctttcttccatccttgccccatcccttcttctctaacctcaccttgtcytcccttacctctatcctttcctctctctcctgcatacattttgtggaaagcctatgtattaagggtagacacaaggcaaaattgtttctctgttcatggaacttagatactactgcaccagctactggagaaagtattatgcacttgccaagtaatacacaggatttttgtcacttataaacacaacaaagctcaaaatctaccatcatcatattctccttcttgtcactcaaagtcacatcaagaggatgaattgattttgtcctcaggacaccttgtcatgtctcccaactttcctatataactgatggttgttactccagacttttattagattatcttcagtgttgtgggttgaaatgcatcttccaaaagatatgt

SEQ ID NO: 892558 - DNA, 610 bp, Homo sapiens
tgtgatgattgaagcagagttggagtgtctacaagtcaagcaatgccagcaatcaccagaagctaggcgggaggcacccaacagactctccctcacaccccccagaaggaaccaaccctgcaaatgctttcatatagaaggcctctccagaactgtgaaggactttctcctgtttcaagccacccagttagtggtgatttgttaaggcagccctaggaaactggtacacccagtcagtgcaataactttcaaatagttctgcttgcctccaacactcacactccatstgttcccatccttgattactgtggcattctgcacatggcactcaaagctgggtcaatgtgagccaagagaactcaggaaaggagagacataagagagaagaagaccctggagagagaggttttgagactggaaagtaatcatataagccattggatacttgcagaaatcttggggtggtcgctgaacttcccccagagcatgggatgggggaattcaaaggacagagaggcttctgttgccttctgcatgatgtataagaaatctcattgaatcctctctgccactgcatgggctggaactactacctgcacatacagttagg

SEQ ID NO: 892559 - DNA, 652 bp, Homo sapiens
gtactggtggccatttcaatagctgttagctgcaaattcaacaagtataggatacctgtctccttcttgggactttcatggcataccccttttcccaataatgctgtgtggtaaaaaataatagtaataataatgctgtgaggttcagagagactgaataactctcaaaagtcatgtaaaaaagatatatgacagagttactatttgaacaaaggttttcagactcccaggtattccctgcaaagagaaggtatgaggaacaacccctttgtctctgtgaccccacagaagcctctgggaccccactttctgattcttcctcctattcctttttgtctttgatctgcttctatttctcctctcccttttcctcttgtcttttatctgatccwtgccaatcgtgctctccaaaatgaagaacctatgatccctcgattgttgacaacctgagaacatttcttgccctacccaggacagaaggaaatgacataaaaacattttattcattgggtgaaatgggattatttttgagctgctctgttcaacatcagtgaggctgctcaataaagagaagaggaaacctggcataaaagaagaaactgggcttcagctttgcatgcatatacatgtttattgcagcactattcacaat

SEQ ID NO: 892560 - DNA, 596 bp, Homo sapiens
taccctggaggcagtgtaacagaaggtcagaaattaagagggtcacctgatgaggctactgcaatagtccaaggggatgatggtttgggcctggactaaactatggcaagtagggatggggagtagataccaagaggagagtagcaggtagcagggccagatgacggcctaaatcgaggggtacaagagagcttgcaygaaataaacaatcagccctggcaggactgactgggactgcccttgcaggacgaagagaggaagggttaaaactacatgtcttgaggctatttgccaatgtccttaggaagcagggagtatggctaatggagcttttagtcctaattagccaaaactgggatcctgccaattttagaggctttcaaggggcatgcttcaaggaagagtccccctgagcttaagtaatgagtgatggcctgccatccagcccaggggcaatgtctctaaccctgggtcatgccagaattatactcccttgactaaacacatcagtttatccaggacccaacatatttcattttatttaatattcccccaaaccccaagtagatgtacttactactcatttcacagataag

SEQ ID NO: 892561 - DNA, 618 bp, Homo sapiens
gcaattctgtatcttataagtggagcatttaggccatttacatttaacgttagtattgagatgtgtggtaccattccattcatcaggttgtttgtgcatgcataacttggttttctgtgtatgtgttttttttaattgtatttttgtttcataggtcctttgagatttacgctttaagaaagttctgttttgatgtgtttccaagatttgtttcaagatttagagctcctttgaacagttcttgtagtgctagcttgatagtggcaaattctctcagcatttgttkgtctgaaaaagactgtatctttccttcatttatgaagcttagtttcactagatacaaaattcctggctgataattgttttgtttgaggaggctgaagatagggccccaatcccttctagcttgtagggtttctgctgagaaatctgctgttaatgtgatcgttaatacagagtgacaacttgattgggttgaaggatgcaaagttttgatcctgggtgtgtctgtgagggtgttgccaaaggagattaacatttgagttagtgggctgggaaaggtagacccacccttaatctggatgagtaccatctaatcagctgccagtgcagctagaa

SEQ ID NO: 892562 - DNA, 611 bp, Homo sapiens
agcacatgttagacattgcctgcacacagcttgggtgagggcattgagccgtggcacatagaggtggcatcccagtagcgtttgtagtgccgttttccccatgtgagtctcttggtggaattgttttacaaacttaggggccaccatttcagggatggctagtctcccatcagagaatttccaccatcctccttcagtgcattttccagtttcttgggcaaaccaggccttctcatttggagagtaacttgggatctyggggagggaaggttctgggaggagaagcatagctaaggattccttttcaaagtgtggagtaatcattgctgtccgttttgcctccctgtctgcctttctgtttcctttggcctctagtgttcttgctttttggtgccctctgcagtgcataacagctaccttctttggggcctatacagtacctaagagctgtaaaatctcctctttgtattttatttctttttttcccagcagttaagagtcctctctccttgtatatagcttcatgaacatgcaatgtggcaaagacacacttttgtctttgtgatttggaatcagtgtaaatattgacctttttgtctctcatcagcaaa

SEQ ID NO: 892563 - DNA, 629 bp, Homo sapiens
atattattttgtcaggattaacagtttgtcctatttcccttagttagtttcagaaatttccagaaatacttagatcattcagttgttaaagcatgcttaacaaagcctggcctctatgacagaagtcacatagacgcgcattttagaatttccccactcacctctcaaccctgcagtcatacatttataatgtctcatctcctttggtaaactgtcagatctgcagcctcaaaatctaattgttgacatatcaccaaatgaaaagtaacaaaaacaggtaaacatcaccaaaatgaagaacattgtcttagcatttaaactttaaaatgtatttctactactctggactcattttttccttccatcatctttaaaattgttataaatgagtatctgctcyactgtgtatggtcctgcaagaactaaaacttcccagagtattaaactgtggttaaaattcatgcagtatgtaactcgatgctgagaagaagctacatatgcatatgtatgctcaaaatataagaatttaagaaaaatgtacgataatgaaaaatgcatggattgaaagtgaaaagagctgttttgagcttcaattcatcgctctgtagctgtgtgactttgcacaaatc

SEQ ID NO: 892564 - DNA, 629 bp, Homo sapiens
atattattttgtcaggattaacagtttgtcctatttcccttagttagtttcagaaatttccagaaatacttagatcattcagttgttaaagcatgcttaacaaagcctggcctctatgacagaagtcacatagacgcgcattttagaatttccccactcacctctcaaccctgcagtcatacatttataatgtctcatctcctttggtaaactgtcagatctgcagcctcaaaatctaattgttgacatatcaccaaatgaaaagtaacaaaaacaggtaaacatcaccaaaatgaagaacattgtcttagcatttaaactttaaaatgtatttctactactctggactcattttttccttccatcatctttaaaattgttataaatgagtatctgctccactgtgtatggtcctgcaagaactaaaacttcccagagtattaaactgtggtwaaaattcatgcagtatgtaactcgatgctgagaagaagctacatatgcatatgtatgctcaaaatataagaatttaagaaaaatgtacgataatgaaaaatgcatggattgaaagtgaaaagagctgttttgagcttcaattcatcgctctgtagctgtgtgactttgcacaaatc

SEQ ID NO: 892565 - DNA, 608 bp, Homo sapiens
gtgttttcacccgtcctaagggctgctttctgcatctttcttagtttgcctctattgagtctgccagaaactcttactctttttaagattttgttcacgtttttattttatttttttattttttgagacgaagtatccctcttgttgcccaggctggagtgcagtggcgcaatcccagctcacygcaacctccgcctcttgggttcaagcaattctccagccacagcctcctaagtagctggtatcagaggctcccaccaccacacccagttaatttttgtatttttagtagagacggggtttcgccatgttggtgaggctggtctcgaacacctgacctcaggtgatatgcccacctcagcctcccaaagtgctgggattacaggtgtgagccaccatgcccagcccacacatatttttaattaacaaataataactatatatagttagggattacaatgtgatattttaatacacattttagaataattatatcaagctaatgatatatccatctcctcacgtattttcttttttgtagtgagagcatttaaaacccactctattagcagttgtactttctcttgacagtgtacctctctgtaaac

SEQ ID NO: 892566 - DNA, 618 bp, Homo sapiens
ctggggtgatcctgatgttggaattattacataaaggttgtaaaatagctgttaaaactatgctcagtgatttaaagaaaatatgcaataaatgaaaacttaagaaatctcactaaatacatagaaacatgaaaagaaccaaattaaaattttagaactggaaaataaaatacttgaaataaaacttttactggatgaactgaacagcataatggaggtgaaagaggaaaggataggtaagttttaatataaatcaatagaattatccaaactaaagacaagaaagaaaaaaagactaaaaaaagtttgtcaaacaccaggaatctgcggtataatgttaaatgtactggcaaaaaaatcccagaaagagaatggggcagaaaaaaatatttgcaaaataatgacagaaaataaccctcatttggtgaargagaaagatgcacagattccagaaactcagaggaccccaaacaggagatgttgtattatatcaatatatatagattatatatgcagaagaccattttaaaaataatcaaatcaaactgctacaaaccaacaataaagagaaacctttgaagagagcaagaaaaaaattctacattacatgcaggagaa

SEQ ID NO: 892567 - DNA, 606 bp, Homo sapiens
cagggtcactgtagctgagaagtattaatatttagggtctgttgtctaaggcggatttccagaaatgcctctcaggctctatccaatgcatacatttttttcatattccttggaatctgggaaccttcgctttctctagattttagatttctatcccagtgtttctggttgtgggatccacgccaatgaagcctcatttatctcctccacttcttgttagttggagttctgcagagaacttggacaatcaaaaaactatgggcttggcatggatgtgaacttcaagtctaaggaggtcaaaaccatctgaggcaggagcgcactttctgagtggggtgagatggagaaggtcattccacacctgaaagccatagctgggatgtggacagkaagggaaagtgtttgttcagcatgtgggaacttgaaaatataggtttgttctcagcatcacttacaaatgtgtctgaagcctatggagggatcttaggtgttggcagtgaagagggtacactgccatctgcggatggaggttacagtcagggtcacgcaggactcaggccctaacatgggcctggaatgcacagccctgcctgatggcatcctcac

SEQ ID NO: 892568 - DNA, 622 bp, Homo sapiens
attcatgttttcttggatatacatttaaaaaactctaaaaagatacacaaagaatggtctagtagtcattatagggggtctgggaaggcaagagataatatatcatattttcaaatttttgaattatgagaacatgtcattcattcaaaaattgaatgtaaaaagggttaagaaagagaataaagcaagggccgggacacatctccactgtcttcccatggccctctcagaagtggatcacacctggtgctrggcagggggacagaaattgctgtggcctgagcagagcctgggtccagccagcatctacacagcccacgtcctcccaggggaatttctctgtgctctgttttgaggggatggtcctggtactggagtagcagagccaggtccctgcttcttgcataaccctgaggctgccctgtttgctcttcttgtgtggagggcattggcagaggcctctggcctgtagaacctttgtgagctgagccacaactcacttcgagctgttctctgccctggctttgctaccctgaggtctccagtgccatccacaccttccgtctgccactgccaacagccacaggtgatggatggggaccataatgtgagaggagaattg

SEQ ID NO: 892569 - DNA, 622 bp, Homo sapiens
attcatgttttcttggatatacatttaaaaaactctaaaaagatacacaaagaatggtctagtagtcattatagggggtctgggaaggcaagagataatatatcatattttcaaatttttgaattatgagaacatgtcattcattcaaaaattgaatgtaaaaagggttaagaaagagaataaagcaagggccgggacacatctccactgtcttcccatggccctctcagaagtggatcacacctggtgctaggcagggggacagaaattgctgtggcctgagcagagcctgggtccagccagcatctacacagcccacgtcctcccaggggaatttctctgtgctctgttttgaggggatggtcctggtactggagtagcagagccaggtccctgcttcttgcatamccctgaggctgccctgtttgctcttcttgtgtggagggcattggcagaggcctctggcctgtagaacctttgtgagctgagccacaactcacttcgagctgttctctgccctggctttgctaccctgaggtctccagtgccatccacaccttccgtctgccactgccaacagccacaggtgatggatggggaccataatgtgagaggagaattg

SEQ ID NO: 892570 - DNA, 616 bp, Homo sapiens
catcacatgacaaatggcatgttttttaaataacatctataaaacatcctgctatctgacccgaggctggagttattcatggcatgcaatgaatctatcccagagagaggcaaggcccagatagcattgtctctcgctgcacaggcccagctgggcaaagcgccaatgtggcgggagggaaggaggtatttctcaactcaggcaaggacttctggggaacaaccccacctccgcgtagatcctcccagatcattcgctgggtgggtcacctttacccagctgctgggctttctcatttttcrtctccttggatcgtgcaacagagcagtggttctcagactaccaggcatcggaatcccgcagagggctccttcaaacacagcgtgctgggctgccacccaggtctcttccgattctagggcagggcctaagaagccgcatctcaaacaagctcccaggtggaggtgatgctgctggtcccggagcccacgctgagaatcaccacaccgggggaaccctcactcaacagaatcaaacatggcaatggctccaggtggcctgcagactgggctgaggggggactcacagcatggcacataaattgactgagttccac

SEQ ID NO: 892571 - DNA, 597 bp, Homo sapiens
ctgcactccagccgaggtgacagagtgagactccatctcaaaaaaataaaataaaataagaaataaaaaataaaaaaatcttaaagaagtccttgctgctatcacaacacagtgtggagatcattcacttaggaagccagcatcatcttcaatcaatagcctactttttctgtcagttttaatcccattacaatccaatacaaaacccttccttaaatttccctcacatataaccacgcagaatttggtacatcacttaactccctatattgccatcttttaaccactttcataaatagcttatccaccaaataaaccaggttaccttaagcactttcatgcaatatcctcttaaattctattttgttgattacaagatacaccacttktcacattttatcagctctgaaatatgaaaatgaaaggcttatcctaggtatcaggcagcatttcttcttctctgatggcagataaaataatgggacattttatatccaatgacatcttacattttatgaaaaatgatcatttaatccttacaattgtcctataaggtcagctgtgattcttgcccacccatcagaaagtgcgattaga

SEQ ID NO: 892572 - DNA, 637 bp, Homo sapiens
actatctcgtaaagatacccgcagtgccatattcattgcagcattactcacaatagccaagatatgaaaggaaccaaagtgtccatcaatggatgaatacataaaataaattgtggtggatatatacaacggaatatcatttagccttttttttttttgagatggaatctcagtctgttgcccaggctggagtgcagtggcatgatctcgactgactgcaacctctgcctcccaggttcaagtgattctcctgtcttagcctcccacatagctaggattacaggcacccacgaccacaccccactaattattaaatttttagtagagacgggstttcaccatgttggccaggctggtctcgaactcctggcctcaagtgatccacctaccgtggcctcacaaagtgttgggattacaagcgtagccaccatgcccggcccatttagctttcaaaaagagattctgccaattgccacattatggatgaatctggaggacgttatgctaagtgaaataagccacacacagaaagacaaatactgcatgatctcacttatatgtaaaatctataacaaacaaacaaacaaagactcaatggggaaatggggagatgtaggtcaaagaatataaagtagca

SEQ ID NO: 892573 - DNA, 666 bp, Homo sapiens
atagtgtcttcccatgatcaggaggctttctgaaggactgagtctgtaaatgaaaaaataatttatgtatgaatagcatgtatttctgaagagcttagagtgccttgtagaatttttttctcaattttattcttgaggtttataatttgggggccaaatagatagagctcatcattttcttgtttggaagttgaggctgcgacatgtccaaggttatgaagtctcttttgggaagaacagaaaccaggtctccaaatctggactcatggtttgttcagatgtgtctggacaaatggttgtcaatgttttgtcctgttttttcaaaggaactgttcttcctttgggacaaccttttggtgtttgggaaagtaataagatcttggatttttcaaattaacattaagttgtaagaactaaaattttctttgaaccacaytactgtgtaattcactgataattgacatattggctgggcagcctatctcttccatatccagcgtaaatgaataggaggtgtttgtgattttttttttctccctttatttaacattgagtcctagtagtttggagaattagggtccctctaccttctttctgctcttgtcttagtaagatacataaggtacatcatcttgtgtctgtgtgtatatagcagtaggtcaagtt

SEQ ID NO: 892574 - DNA, 666 bp, Homo sapiens
atagtgtcttcccatgatcaggaggctttctgaaggactgagtctgtaaatgaaaaaataatttatgtatgaatagcatgtatttctgaagagcttagagtgccttgtagaatttttttctcaattttattcttgaggtttataatttgggggccaaatagatagagctcatcattttcttgtttggaagttgaggctgcgacatgtccaaggttatgaagtctcttttgggaagaacagaaaccaggtctccaaatctggactcatggtttgttcagatgtgtctggacaaatggttgtcaatgttttgtcctgttttttcaaaggaactgttcttcctttgggacaaccttttggtgtttgggaaagtaataagatcttggatttttcaaattaacattaagttgtaagaactaaaattttctttgaaccacattactgtgtaattcactgataattgacatattggctgggcagcctatctcttccatatccagcrtaaatgaataggaggtgtttgtgattttttttttctccctttatttaacattgagtcctagtagtttggagaattagggtccctctaccttctttctgctcttgtcttagtaagatacataaggtacatcatcttgtgtctgtgtgtatatagcagtaggtcaagtt

SEQ ID NO: 892575 - DNA, 673 bp, Homo sapiens
tctgtctggaaaaaaaaaaaaaaggccgtttgtgctcctatcaaactactaatgacattcttcacagaataagaaaaaacaatttaaaaattcatatgaaacaaaaaagagaatagccaagaatcctaagcaaaaagaacaaagctggatgcatcatgttacccaacttcaaactatattaygaggctatagtaacctaaacagcatggcactggtacaaaaacagtcacatagaccaatggaacagaacagagagcccagaaataaggccacacatctacaaccatctgatctttgacaaagctgacagaaacaagcaatggaaatagtcttccctattcaataaatggtactgggagaactggctaatcatacgcagaaggttgaaactggaccccttccttacaccatatacaaaaatcaactcaagatggattaaagacttaattgttaaacctaaaactgtaaaagccctggaagataatctaggaaatgtcattctggacataagaactggtgaagatttcatgacaaagacaccaaaagtaattgcaacaaaatcaaaaattgacaaacaaggcccaattaaactaaagagcttctgcacagcaaaagaaactatcaacagagtaaacagacaacctacagaaagggagaaaatatttgcaaacta

SEQ ID NO: 892576 - DNA, 621 bp, Homo sapiens
aaaagtaggtcactgagacgggattttaggtgagccgggggtggggcaggagaggaaacttcagggagaaaggttgggccagattatgaaaaggtctagctcctgtacaaagtgaaaaatgatgtggattcaccaagctstcagaaggataatggcatcctttctgtgactatatggaatacatacatctattctactataagggatttatttatatctatattccatatagtcacatatagtatatatttacatctatattccaaatagtcacatatatagtatatatgtgtaactatatagtatatatgtatacatgtaaataaactgtctgtgtgtgcactgtgtgcacatgtgcctgtgtgtgtacaatacatgttcactgagcatttcacacacggtaaataactagggaaattagttcccttgtcatagtatgtcaaggaatttatcctacagtgcttaaaggaccccatgaggtatttaacaagcggaggggataattttgaaaagcaccagagaaaatacggaggacggatcaggcaagaacctgtaacaggaaggccaggtcaggggtgggaagtcacaggtgctaatgcccaacttaaggcaatgccaatt

SEQ ID NO: 892577 - DNA, 640 bp, Homo sapiens
gcacagggctttaaaattttggagcaaggccctgccattatctgaaggtaattactctccttttgagagacagctcttggcctgctactgggtcttaatagagactgaccatgtaaccacaggccaccaagttatcatgaaaccagagctgcccatcatggtttggatattgtctgacccatcaagccatagaattgggcatgtaaagaaacactccatgatcaaatgaagtggtatatatgattggtcccaagtgggccctgaaaacacaagtaagttacatgaaaaagtgacccaaatgcctgtggttccacccctgttatgccttttctccttctcccagcttcatgggagtttccctatggctacatrtagggaatcagttgagaggggaagagagaacccagtcctggtttacagatggttctgcacaatatccaggcaccacctgaaagcggatggctgcagctctacagcccctctctgggccacccctgaaggacagtggtgaagggaaatcctcccattgggcagaaatctgagccacacttctgatggttcactttacttggaaggcgaaatggccagacatgcaattatatactgattcataggctggggtcatcctgactgggtggtc

SEQ ID NO: 892578 - DNA, 651 bp, Homo sapiens; identical to SEQ ID NO: 892325

SEQ ID NO: 892579 - DNA, 596 bp, Homo sapiens; identical to SEQ ID NO: 892323

SEQ ID NO: 892580 - DNA, 598 bp, Homo sapiens; identical to SEQ ID NO: 892324

SEQ ID NO: 892581 - DNA, 642 bp, Homo sapiens
tgcatagcaaagactctgtgtatgtgaagccagattttaaaatatggtaacaagtgtctgaaaatatgtggctcaatttgtctcccggttacttttccctctccccctttaaaatgtagaggaaggagaagaagagataagaggtttgtgagtgaagacaagggccctttaaggcctgggaagactaacgccatagggatctccctctgccttaaaaggcacaggaatcttagtggggaaaaagaagtggtgataaatagccagtccgtgtgcctggaatatcaaagtcagtgcgtgccagggatcacactgcgggtcacgtgcactctgggtctctctctgcaaacctgccctgcctcagtctgggaatatgcaactgcctaagaagggtctggcttacacaggggccrtgagacgtggcaggcatagctgggctgctactggtcatgaatcctggacacggcaggcaaggtgtggtgtccatatgcattattcgggtggggcaaagatcacagctctcactagactttcagaggactttgtaacccaaagaaccactcatctcaaggactgtggtaactcaggggctgagccatgccagtgtttattatgtgaaacaaggactggaacctcacaagacca

SEQ ID NO: 892582 - DNA, 648 bp, Homo sapiens
cagggtatactgtaacaagggagtcgtcaccatcacttacattttggtagagactccaaggcaagagtgggaaagtttgacagtgatgttaaccaaaaactgacagaggcaggtgtctcaattgatagcggtttatttcgccaaggctgagaatgtgcctgggaaaaactcgagtcacaggaacatctatgacctgtgctttccaaagagggttttgggaattcagtgtcgaaaaggcaaagaacagacaggagggaaaaaagcgagggagggtgggcagtgaggcaaatggtaacattattgtgaggttctgattaacgctcagtaaattggcattttacataaaataaagcaaacacgtgaaaagaggaagtatggggaaaagtcaatgatgcatttatctcagggtggatgaagggatgatttctggtcttgtccttgtcctcttacctgtgaagataarcttgtaattgacattgttagggtgagattgaacagaactcagtttcggggctagcttataggggggatatgtatcctataagatttagggctcacacagaatttccttgtgagcaatttgtgaagaaggccatctggggagatatgtggcctcctatctttgtgggaacctggcttatgtatgac

SEQ ID NO: 892583 - DNA, 548 bp, Homo sapiens
actgcactccagcttgggcaacaagagcaaaactccttttcaaaaaaaaaaaaaagtggaaagcataaccttgcttgatggtgaggttgaatccccaccttcgcctttctcagatttattcccatcttcctactcctccaacccctatgttrgctcaagcccagatggctctcacctgcattaacctaaccatctcgtaacccatctcctctctttgttcctttcctatgcaccctccacatggccagctgccagaggatctttcaaaatgactaatcttactattcttctcctctacaaagcttcagaggcttccagtctggactccttaacaacacataaaaaattcctcttctgttcttcctctggctggtggctctcaaccttggctgcacttgaggatcctggggagctttaaaaactgccctgctctggtttagtcagtctgggctgggtcccaggtgtctagagttttagttttgtttcccaggacctggtgactccttgaactatttgcagattcctgaacccctgtcggagagtaagct

SEQ ID NO: 892584 - DNA, 582 bp, Homo sapiens; identical to SEQ ID NO: 892329

SEQ ID NO: 892585 - DNA, 617 bp, Homo sapiens
aacaaaattaaatatacactaaccacccgtccttaatcgcttcatgtaaatctgtggcattagaaactgaaaacaaaaattatctgagggtcatgttttgctatgcatttaatggatattacttctgcctgctccaagggcaatgttcagtttccacaaacagtgtagtttattatgaaaaataatttataaatcattcttgtttaaaacaaaatttttttaggagaattagtaacagaatttcaaaraagttgaataatttctaaagattaagatttcaacttcactcttttaatgtatttaaggtaataatcacttactttggtgattatttataacattaacagctctaagaggcctttaagggccattttgttatacaaaaaagaaacacatttataagcattcttagaataatgctaatgtcattagctacagaagcagcacatgctaagatatcagctttaattttaaattcatattagaccttaataaaataagtcaaggatgcattttgtaatatctagaataaccactaaaagaacagtaatgtctaacaggcaagttagtagagggggaaaatgaaacaatttttaaaaatacataattcaggccag

SEQ ID NO: 892586 - DNA, 571 bp, Homo sapiens; identical to SEQ ID NO: 892471

SEQ ID NO: 892587 - DNA, 629 bp, Homo sapiens; identical to SEQ ID NO: 892472

SEQ ID NO: 892588 - DNA, 639 bp, Homo sapiens; identical to SEQ ID NO: 892437

SEQ ID NO: 892589 - DNA, 639 bp, Homo sapiens; identical to SEQ ID NO: 892438

SEQ ID NO: 892590 - DNA, 615 bp, Homo sapiens; identical to SEQ ID NO: 892439

SEQ ID NO: 892591 - DNA, 637 bp, Homo sapiens; identical to SEQ ID NO: 892442

SEQ ID NO: 892592 - DNA, 622 bp, Homo sapiens; identical to SEQ ID NO: 892444

SEQ ID NO: 892593 - DNA, 639 bp, Homo sapiens; identical to SEQ ID NO: 892310

SEQ ID NO: 892594 - DNA, 553 bp, Homo sapiens; identical to SEQ ID NO: 892314

SEQ ID NO: 892595 - DNA, 610 bp, Homo sapiens; identical to SEQ ID NO: 892315

SEQ ID NO: 892596 - DNA, 608 bp, Homo sapiens; identical to SEQ ID NO: 892316

SEQ ID NO: 892597 - DNA, 504 bp, Homo sapiens; identical to SEQ ID NO: 892453

SEQ ID NO: 892598 - DNA, 635 bp, Homo sapiens
cccctgcctgggatcccacagctggcctgatcttgggctgcttttctttccacataaaggtgatgatcagacccacggcccaaagctctgcccgtggggacactttctccctggttggggctgaagtgcagcagcgggccactttcggtgtgtgcccacataccatgctaaccttgccatgaaaccaggccggcctttcctcctacttctgctaggcataattacccatccccctttatggtcatcatgtgagcagacacagacacggtgcgacaggggtagaggggacaggagtccgagccacctgcatgtggccaacatgcaccctctgaccccatctcaggacctactgggtctcaggcctcatgatggtcacttctgggcagcaccatcacctcgcgtccctcgtcagaagctctgtctctgccgggaccccatagcgtcccaggagctgctttttcaaacagagtayaattatctgctgcagatggccccgcctgaccccagaactctcgtatctatgttgtgactttcctcttgggatttgccataaactccacccagcatcttttcccaccccagacacttcaaggatatgcgaagtcacacattccccaggttggattcacaggccg

SEQ ID NO: 892599 - DNA, 643 bp, Homo sapiens; identical to SEQ ID NO: 892317

SEQ ID NO: 892600 - DNA, 506 bp, Homo sapiens; identical to SEQ ID NO: 892318

SEQ ID NO: 892601 - DNA, 629 bp, Homo sapiens; identical to SEQ ID NO: 892456

SEQ ID NO: 892602 - DNA, 573 bp, Homo sapiens; identical to SEQ ID NO: 892457

SEQ ID NO: 892603 - DNA, 629 bp, Homo sapiens
tttttcccagttttttcttgtaggatacacctcattaggaatgcacaaacaaccaaaggaaaaaatatacaaacaggaacttcatatgtaatgaataggaaagctacttactgctactctcaacaactccttttctacttgctccagcttattctgttttgatgcagcagaataaagagctgtggcatagcgaccttcaataccgtatacctgaacaggaggctttaaaaaaaaggtgaaataggagaggaargaaaaaggaaaatcagttaatagtatactctcaagagcagaatttaaaatttatattttaaaaaatgtatctctttaacacaaaacagtttaaatatgtcattcaagagctgtcctaaatggcaatttgcaaataaattagcgatgtttccttggtcaggtcactcaatctttgagcctccaattcctcatctgtaaaatgaggggcttagtaggcattgtctaaagtcccttccaggtttacatacctttatcaattacttgtactttaattttgagataagcttatgtttcctttgaactcagtaactatttagtttcaagtatgggaggttgtgaacactgatagacagtttcgagtatgttagagctaggaa

SEQ ID NO: 892604 - DNA, 638 bp, Homo sapiens
cacacacaacacaggttagtgcaactaagtgttaatgttttaaaaattccctgtgaacaggtactaaatttcaaacatgttctcagaaggtgcaatatcacatggggataaacaccatcaggaaacttttcagtagtttttgccccttctttgttgctaggatatcacaaaktttgttcaatttcttatgagtgcccactttttaaacttgaggatgtcattgtgaggataacagactggatatcccacaggactgtgattgcaagtcttcattcaattagtatattttaagcaattggcattagcaaaaagtaaaatgtaaaaacaggacatgtaataaacgaatacaaactaagaaaaaaaaggtccctgctgtcaagcaaaatcaaactgggttagtataagatgaacaatcagaaacagacgtgttttatagagagcaagaaaatatagagagaaacaacagttcgcaaacacaaacctaaacacgagaacagacattcattcattgataccttcacagctttacttacaaaaaatactttttcggcacctgacctagtcaaaccatagggtgggtattgggaatacaaagactaataaactttgattagcagaataaggatataatatgtatg

SEQ ID NO: 892605 - DNA, 668 bp, Homo sapiens
ggcacaacagttcaacaaaaaagatttgtctggagggatacaaaggcatagaacaaagacatctcattatatccttgtttctttttctttttttttctttttttttttttttttttgagacagagtatcgctctgtcatccaggctgaagtgcagkggcgcgatcttggctcactgcaatctctgcctccaggactcaagcgattctcctgcttgagtatcacatttcatgatgtcagatggagaagaaacactgtagggagatcctcccagacagaaagaaattcagaaaaagagtcaaggtgcaaagaagaatgtgatttcccaaaaggcaaaaggagctttgtaaactttgttttgaaaaatctctcagaggactttgagtcaatgtcttattttatccaaattggctttcacttctgtcactattattagagctgttgagttttgcctggaagtgttgtagatcctgtggttcccacgttttctcaaaaacagaatcacctgaaaatatttctgtggttgagaagtgcagtgaatttagctggctgtttgaacacttctctaatgtcattggctttttgttctaccttcctgctggttctcatcactcttctaattccaaatgtggttaagagaaagaaaggcaaaataaaagtctatttttga

SEQ ID NO: 892606 - DNA, 668 bp, Homo sapiens
ggcacaacagttcaacaaaaaagatttgtctggagggatacaaaggcatagaacaaagacatctcattatatccttgtttctttttctttttttttctttttttttttttttttttgagacagagtatcgctctgtcatccaggctgaagtgcagtggcgcgatcttggctcactgcaatctctgcctccaggactcaagcgattctcctgcttgagtatcacatttcatgatgtcagatggagaagaaacactgtagggagatcctcccagacagaaagaaattcagaaaaagagtcaaggtgcaaagaagaatgtgatttcccaaaaggcaaaaggagctttgtaaactttgttttgaaaaatctctcagaggactttgagtcaatgtcttattttatccaaattggctttcacttctgtcactattattaragctgttgagttttgcctggaagtgttgtagatcctgtggttcccacgttttctcaaaaacagaatcacctgaaaatatttctgtggttgagaagtgcagtgaatttagctggctgtttgaacacttctctaatgtcattggctttttgttctaccttcctgctggttctcatcactcttctaattccaaatgtggttaagagaaagaaaggcaaaataaaagtctatttttga

SEQ ID NO: 892607 - DNA, 628 bp, Homo sapiens
tagaagactcctttttcctttcacttccctgagcccagaggactctataaactctgtctagccaacaacatagttccatttctttcagcctcagcttcctctcagaggtaacttaggcctctctacaacctgacttcaggccatggttttgtttctggtctccgtcttgcatgaaatacttgcaagggaacactaactacaggagcataggtctcaaccacaactacctgccttggattttggagcccaccatgcccataggttcagcccaatccctattctgtgcatcttattgaagatgccaaattggttctttaaatcktctttggtttcatggaagagaacactttcaaaaatgtgtccttcctctgaaatccagcatttttatttattctactgtactgtttcttaggcttcagattacggttacatatattggatcaattgaacaatttgtcgctgcaggtcaaattcttccattgattctttaattggacagtttgttcctgtagattcttatccttttgtattttgctttgatttttttatatggtcactcattatcaagcaaaagggagatttatctatatgaatgtttgccaataatcagaatgtgtgtgggttacca

SEQ ID NO: 892608 - DNA, 548 bp, Homo sapiens; identical to SEQ ID NO: 892419

SEQ ID NO: 892609 - DNA, 669 bp, Homo sapiens; identical to SEQ ID NO: 892420

SEQ ID NO: 892610 - DNA, 608 bp, Homo sapiens
agggcaagagttgagacttgagagcctctgcctagatttcagagggtgtatggaaatgcctggatgtctaggcagaagcctgctacagtgacggagccctcatggagaacttctactagggcaatgtagaggaaaaatgtgggattgcagcccatacacagagtccccaccagggcaatacctagtggagctatgagaagagggccactgtcctccagacctcggaatggtrgatccactgacagcttgcattatacacctggaaaagccacaggcactcaacaccagtccaggaaagcagctgagggggatgcaccctgcagatccataggggtggagatgcccaaggccatgaaagcccaccccatgcatcagtgtggcctggatgtgagacatggagtcaaagaagattattttggagctttaagatttaaccactcccttgctgggttttggacttgaatgaggcctgtagcccttttgtttcagctgatttctcacatttggaatgtgtgtgtatacccaatgcctgtacccaccattgtatcttggaagtaactaacttgtttttcactttacaggctcataggtgaaagggacttaccttg

SEQ ID NO: 892611 - DNA, 618 bp, Homo sapiens; identical to SEQ ID NO: 892421

SEQ ID NO: 892612 - DNA, 618 bp, Homo sapiens; identical to SEQ ID NO: 892422

SEQ ID NO: 892613 - DNA, 633 bp, Homo sapiens; identical to SEQ ID NO: 892423

SEQ ID NO: 892614 - DNA, 612 bp, Homo sapiens; identical to SEQ ID NO: 892426

SEQ ID NO: 892615 - DNA, 640 bp, Homo sapiens; identical to SEQ ID NO: 892427

SEQ ID NO: 892616 - DNA, 609 bp, Homo sapiens; identical to SEQ ID NO: 892428

SEQ ID NO: 892617 - DNA, 652 bp, Homo sapiens; identical to SEQ ID NO: 892429

SEQ ID NO: 892618 - DNA, 583 bp, Homo sapiens; identical to SEQ ID NO: 892430

SEQ ID NO: 892619 - DNA, 636 bp, Homo sapiens; identical to SEQ ID NO: 892431

SEQ ID NO: 892620 - DNA, 633 bp, Homo sapiens; identical to SEQ ID NO: 892432

SEQ ID NO: 892621 - DNA, 635 bp, Homo sapiens
agtttccagatgtcattgattcacaggatttctatagctctttacatggtgattattattatcttggattgcatgactttaagcaacgctgaaatgtaaaggtgatgattcggctcagaaaagtttttcaaaattgcctactgcatctgcctaggaaaagctttctccccacctagtgctgtgaccaccaagactttccaaagatcaggatgggtttttccccggcggggaagctacttycacgtggaattcattctcagaaatacttccctatcactcaatttttcccgtaagttccttgcaacaacagccaccagtcttgttattactttccttgtcacgtacttgaatattctccacccagaggaattttttaatccatgtatctatgcaccacgtaagcaatgataaaatatccacataaactctggcagagcctgtcatcttgtagactcatgggtacttatcattttccacggcccaatgttgttggcaaactcagtattttgcagaggacttaacaaaataaatgcatatgaatctgtcttcaatgtgcccttatcttagagtatttctaatgggtctcaggctaactcacttttttaagtttctgcttcttacagagaatatttatt

SEQ ID NO: 892622 - DNA, 612 bp, Homo sapiens
agtttgagaccagtctggccaacatggcaaaaccccgtctttcctaaaatagaaaagttagctaggcatggtggagcatgcctgtagtgtcagttattcaggaagctcaggcaggagaatccctagaacccaagaggtggaggttgcagtgagctaatatcacgccactgcactccagcctgggtgacagagtgagacactgtctcaaaaacaagcaaayaaaaaaatgaaataaaagagagaccccaaaaataaacccatgtttatacagacaactgatattggcaattaactttgaataaattctgtataccttgtcctttcacaatttttgatttagcaatttatcaggaattattttaataactgcttcacgtggtagtttttaggagaagaaataaaaaactcattgtaaattataaggcttcatacaaatataagatgttatgactcattataactttccaaagttatcttttattttacattaggttgaagacattaatactcagaaaattcggcttggaaacttagttgaatttggccaaaaaattttttaaatcagctttttaaaaatgaccctgttaaacatttacacaaaaagcaactttt

SEQ ID NO: 892623 - DNA, 612 bp, Homo sapiens
agtttgagaccagtctggccaacatggcaaaaccccgtctttcctaaaatagaaaagttagctaggcatggtggagcatgcctgtagtgtcagttattcaggaagctcaggcaggagaatccctagaacccaagaggtggaggttgcagtgagctaatatcacgccactgcactccagcctgggtgacagagtgagacactgtctcaaaaacaagcaaataaaaaaatgaartaaaagagagaccccaaaaataaacccatgtttatacagacaactgatattggcaattaactttgaataaattctgtataccttgtcctttcacaatttttgatttagcaatttatcaggaattattttaataactgcttcacgtggtagtttttaggagaagaaataaaaaactcattgtaaattataaggcttcatacaaatataagatgttatgactcattataactttccaaagttatcttttattttacattaggttgaagacattaatactcagaaaattcggcttggaaacttagttgaatttggccaaaaaattttttaaatcagctttttaaaaatgaccctgttaaacatttacacaaaaagcaactttt

SEQ ID NO: 892624 - DNA, 612 bp, Homo sapiens
agtttgagaccagtctggccaacatggcaaaaccccgtctttcctaaaatagaaaagttagctaggcatggtggagcatgcctgtagtgtcagttattcaggaagctcaggcaggagaatccctagaacccaagaggtggaggttgcagtgagctaatatcacgccactgcactccagcctgggtgacagagtgagacactgtctcaaaaacaagcaaataaaaaaatgaaataaaagagagaccccaaaaataaacccatgtttatacagacaactgatattggcaattaactttgaataaattctgtataccttgtcctttcacaatttttgatttagcaatttatcaggaattattttaataactgcttcacrtggtagtttttaggagaagaaataaaaaactcattgtaaattataaggcttcatacaaatataagatgttatgactcattataactttccaaagttatcttttattttacattaggttgaagacattaatactcagaaaattcggcttggaaacttagttgaatttggccaaaaaattttttaaatcagctttttaaaaatgaccctgttaaacatttacacaaaaagcaactttt

SEQ ID NO: 892625 - DNA, 617 bp, Homo sapiens
actttcctaaaaaacagaacatgacagtaggcactgctgaaaataacataaaaataaaaatgaaaaacataaataagaccaagaacagaccttcaatgaactcccagcttagtaaggaagagaaacatttacacaaaaaaagtctcagattgatgcggttagagaaaaaggaaagagaaatcctatgaaatagacctcaaaacaatccagaccaggtccacttagggccttcatccatgctgggctttcacctgcagtttttacaatttaacacccatatctatgactcattccctcaytgccatcagagtgtgttcaaatgtcactcaaggaggccctccctgaacagtattatttatagctagcaccctcccacagatatatctttattctctacttagcatttatcaagccatttatcaccatatgatagacttgcattttactaattttgttgactgtttttctcactggaatataggatatctgtgaaggcaggaatttctttttttctttagggaataaaatagattttaaaaaagtataataaactggggccaaataataaagagctttgaatattaaggtaaaaagtgtggaattcattctaaaggtaa

SEQ ID NO: 892626 - DNA, 636 bp, Homo sapiens
gttgaatccctgaatagaccaataacaagttctgaaattgaggcagtaattgatagcctactaacgaaaaagaagcccagaaccagacggattaacagctgaattctgccagaggtacaaagaggacctggtaccattccttctaaaattaatcctaactatagaaaaagagggaytcctccctaactcatttatgaggccagaatcatcctgataccaaaacctggcagagatacaacaaaaaaagaaaacttcaggccaatatccctcatgaagattgatgcaaaaatcctcaataaaatactggcaaaccaaatccagcgacacatcaaaaagcttatcctccacgatcaagtcagcttcatccctcagatgcaaggctggttcaacatacgcaaatcaataaacgtaatccttcacataaacagaaccaatgacaaaaaccacatgattatctcaatagatacagaaaaagccttggataaaattcaacacacttcatgctaaaagcactcaataaactaggtattgatggaatgtatctcaaaataataagagctctttatgacaaaccagcagccgatatcatactgaatgggcaaaagctggaagcattccctttgaaaactggcaaaa

SEQ ID NO: 892627 - DNA, 636 bp, Homo sapiens
gttgaatccctgaatagaccaataacaagttctgaaattgaggcagtaattgatagcctactaacgaaaaagaagcccagaaccagacggattaacagctgaattctgccagaggtacaaagaggacctggtaccattccttctaaaattaatcctaactatagaaaaagagggactcctccctaactcatttatgaggccagaatcatcctgataccaaaacctggcagagatacaacaaaaaaagaaaacttcaggccaatatccctcatgaagattgatgcaaaaatcctcaataaaatactggcaaaccaaatccagcgacacatcaaaaagcttatcctccacgatcaagtcagcttcatccctcagatgcaaggctggttcaacatacgcaaatcaataaacgtaatccttcacataaacagaaccaatgacaaaaaccacatgattatctcaatagatacakaaaaagccttggataaaattcaacacacttcatgctaaaagcactcaataaactaggtattgatggaatgtatctcaaaataataagagctctttatgacaaaccagcagccgatatcatactgaatgggcaaaagctggaagcattccctttgaaaactggcaaaa

SEQ ID NO: 892628 - DNA, 703 bp, Homo sapiens
caaacatatgaaaaatagctcatcatcactggtcattagagaaatgcaaatcaaaaccacagtgagataccacctcatgccagttagaacggcaatcattaaaaaatcaggaaacaacagatgctggagagaatgtggggaaataggaacgcttttacaccgttggtgggagtgtaaattagttcaaccattgtggaagatagtgtggcaattcctcaaggatctagaactagaaataccatttgatccagcaatcccattactgggtatatacccaaaggattataaatcattctactataaagacacatgcgcaagtatgtgtattacagcactattcacaatagcaaagacttgaaaccaactcaaatgcccatcartgatagactggataaagaaaatgtgtcacatatacaccatggaatactatgcagccataaaaaagaatgagttcatgtcctttgcaggaacatggatgaagctggaaaccatcattctcagcaaactaacacaggacagaaaaacacaccacatgttctgactcacaagtgggagctgaacaatgagaacacatggacgcagggaggggaacgtcacataccagggcctgtcggggcttggggactaggggaggaatagcattaggagaaatacctattgtacatgataggttgatgggtgcagctaacaaccatggcacatg

SEQ ID NO: 892629 - DNA, 582 bp, Homo sapiens
aaaatcactttttgttcatagaatcccagaggttagagtaaaaagaaacttcagagggcagttagctctgcccagctcccggatgccaggactgcattcacaaagtatccatgaattggtgactgagaccacgcattagtatctttagagacagggtaggccataaaattatcaatccgcttttcagatgcaactaattattaaaggaattactttttatttattattttattttattttattttattttattttgagacagagtcttgctctgtcacccaggctggagtgcagtggcacaatytcagctcactgcacctccacctcccaggttcaagtgattctcctgcctcagcctcctgagtagctgggactacaggcgcccgccaccatgcctggccaattttttgtatttttagtagaaacattgtttttcaccatgttagccaggatggtctcgatctcttgacctcataatccgcccgcctcggcctcccaaagcgctgggaatacaggcctgagccattgcacccggctagaggaatttcttatgtcaagaagtctgacccattgaatcttcta

SEQ ID NO: 892630 - DNA, 586 bp, Homo sapiens
cagctccagagttctactttcctagttgctttaatattatgtcaagaaccaccaagtgctgatatatttatgaagaaccaccaaagtgctagtacaatcaatgatattctccagaattcccgtgcaaacataagataaactattgggctatcataaataaaagttcaaaaagtgaatagaaatcattaaaaatgtattaataaattcaataaaaagaaaagccatgttgttttcaaggcaaagttagagccaatggtaatttttagcattatattcactaacaaaacatatgtaatatgtaatatgaaaacccaggtacattacagaagtggctgtcaaaattagggttagaactgcattaaagcttgttagtattcaaagagccattaaaaacaagatttgagtcaaaaaataactcarggtggattaaagatgtaaatctaagacctgaaatcatacaaattctagaaaaaaaacttaggaaaaacttttctggacattggcctagacaaagaatttaggactaagatcccaaaagcaaatgcaacaaaaatgaagataaataaatgggaccaaattaaacaaa

SEQ ID NO: 892631 - DNA, 657 bp, Homo sapiens
ggcctagcattgaagaataacatgtgttccgaaccttaaaaatacttctgacatttgatttagtatcctggctctaactggagtctaaaataagcaaataatcaaagatggggttactgattacttagtaaatgttcattaaaatattactttaaatgataaagaattgaaagcatcctaaatatataaaaattgagttaatattaataaaacatgctgcatttatacagaataatatggtgcagtcattttgaaataatatataattacataggggagtattcaaaataatcacattacaaagaatacaaaaattagtttttctatattttataattattattttactaaagaaataatactagttactcctaagtagtgaataatgtgtatgttttttckaactttgttttccatactgtttgcaatgagcaattatggatagaaaaaaacaatgaatgtttttatttttctaccaaagtaactcagagtccaaattcctgtaatcttttcttatggagctaaatttctttttttaaatagtttctaatgtttttctctagaatattccttaattttctatattcttaataaaattcagatgataaaatagaatcaatattctcataagagtttgaatgatgctatacagtggaa

SEQ ID NO: 892632 - DNA, 572 bp, Homo sapiens
ctgataaccttctagtttcgatctgatgctctaatttctgaaaaatcccacttttctttttctgttctattttaacctgcatgtttaattaattcacaattctcagcatgaattaacatatggctgctagaaagttgcaaactggarattttgttggctgtaaccttgtctactatcgctaaaaaggaaaacaatcaattatttcccgattttttaaaaaagatatacattagataaagtatggtggagaaaatactctcttctgaaatgacctcgccaaatagtctttatgtttttaactacgaagtgaaccatatgcaatataatcacttgcacatattcaataaaaaagcagggttaagccaaattttgttaccaccaagaatatttgtactatacataagatgttttcaatagaaggattgagactttttttatctggcttataaaaggaaattgctcccttccctaaaggaacacagagaaaagctgatacatcttcagaaatattcattacagctcatatcttttaagtgaaactcgctatctggtgttgattctataaagattaa

SEQ ID NO: 892633 - DNA, 572 bp, Homo sapiens
ctgataaccttctagtttcgatctgatgctctaatttctgaaaaatcccacttttctttttctgttctattttaacctgcatgtttaattaattcacaattctcagcatgaattaacatatggctgctagaaagttgcaaactggagattttgttggctgtaaccttgtctactatcgctaaaaaggaaaacaatcaattattkcccgattttttaaaaaagatatacattagataaagtatggtggagaaaatactctcttctgaaatgacctcgccaaatagtctttatgtttttaactacgaagtgaaccatatgcaatataatcacttgcacatattcaataaaaaagcagggttaagccaaattttgttaccaccaagaatatttgtactatacataagatgttttcaatagaaggattgagactttttttatctggcttataaaaggaaattgctcccttccctaaaggaacacagagaaaagctgatacatcttcagaaatattcattacagctcatatcttttaagtgaaactcgctatctggtgttgattctataaagattaa

SEQ ID NO: 892634 - DNA, 572 bp, Homo sapiens
ctgataaccttctagtttcgatctgatgctctaatttctgaaaaatcccacttttctttttctgttctattttaacctgcatgtttaattaattcacaattctcagcatgaattaacatatggctgctagaaagttgcaaactggagattttgttggctgtaaccttgtctactatcgctaaaaaggaaaacaatcaattatttcccgattttttaaaaaagatatacattagataaagtatggtggagaaaatactctcttctgaaatgacctcgccaaatagtctttatgtttttaactacgaagtgaaccatatgcaatataatcacttgcacatattcaataaaaaagcagggttaagccaaattttgttaccaccaagaatatttgtactatacrtaagatgttttcaatagaaggattgagactttttttatctggcttataaaaggaaattgctcccttccctaaaggaacacagagaaaagctgatacatcttcagaaatattcattacagctcatatcttttaagtgaaactcgctatctggtgttgattctataaagattaa

SEQ ID NO: 892635 - DNA, 704 bp, Homo sapiens
cctctttgctttagaaattactcagtctcgggtagttctttatagcaatatgagaatggacaaatacaattaattaagtcaaattggaagactcatgatcaatgttctgcatttgttatcagtggcaggacaatgggcatgggaggaatcagagatgtcagcttgatgctctggaactaatacagtatgcaacctagaagagaccyggcttcctacagtcttctccaaaattacctaatgcaagcccaaatcctgtaacaaaccctcctcactccatcttattgagatatcttgctgtttctcctattgtaaggtctctgttgtggcaacaagttaataaacccaactttgtttatctgtaggagtattcctggtggtcctggttggcaggcttcaacagtgcagtgtgagaatatgatataagagtaaacagagatgggacttctaaactggaacaaagaaaacttcttattcaagcttcacctttctcacctattgaacatttgcccacttaggcaaattacttagtctccatcaatttcctcatgatattgatttcccaagatagttgtcagaattaaataaaattctagggaagtattttttaactcactatgtaaacataggaggtataattattaatggcataagaggtattctgcagggatatttctagggaacagctctataatttggaaagtgat

SEQ ID NO: 892636 - DNA, 666 bp, Homo sapiens
tacacacgcagactctacaaaagctaaatattagaaaattttatataaagttttgattcactcattctctactattaatttctttatctttgcaatatttctttataaaaggacactcatcaggtattattcaagaagcacagtaccttaactgcaggaacaaatgaacacttgcagacaatgttgtatctaatattcagaattctgagaagcatgatccctttgcagmattgagcctggacaaagtctatttccactccagtgggctgcagtttacactaacaaagagcattactttttgactagctgaggaatgaataaaaaatgaataaattaaatttctctgtctctagtcagaattacaattgagattaacagacttttaagtcagcgagttatttccattactatattaataaatttgtgttttgtctgccaagaatatttcaaggccctgtgagtctcccacagaaaactctttttaaaacttaccactagactctataattgcttctcctcttttctcataaaaatgccattctctcagagccaaacagtcccagttaggtatggacagcaggatgtaggggttggggagtgggtggaagacgctgaatacaccaattttgtgaaattaacttatatgaccattgatctttaattggt

SEQ ID NO: 892637 - DNA, 628 bp, Homo sapiens
gcaatgtagagttcccctagtgatttctattttaaaataaatcagagcatttccaaaagccagagtgcttattttaaaaagagagggcatgaaactaatatagactaaaaaccatgtcttgctttgttgagatattaccatgagccatgcatactaacataatccaattaggggaatcctaagagtagagccatcaatgggaaaaattaaaaatattgcatctatatggaaatmatctatatatttcacctctgaaaaaccatcagagaaataagaaatccattttgcactgacaacacagagtgagatcaaattctccacaagacaccagcatttctgttatgaaaaaagacacccattgttgatggcatgtgtacctcatatgtctccattttgtgtaaaaatcatctgcttttgtatctccttgagcaactctgaaaagaaaatcaagatgtttttctggacagaacaaatgagaagggcaaaagcaaaccagttggtagccagtcttcacttccttaaaaaaaaaaaaaatggcaaaaggacttagcatgtcaacctccacctatccagatggtttgatttatttagtacacgagttccagggaagaacgagcaagaagtatga

SEQ ID NO: 892638 - DNA, 654 bp, Homo sapiens
agcccatccagataccaaggggaggtaaaatggactctacttcttgatgggaagtgggaaagttctggaagaggacaagaggctgaaaatattgttttggccatgaaaataaactactatcattctccaaattgccagcacaccaggactgggaatccctgagatgggcttaggtgatgytcataaaaattgaaattttatgtctcacatcattggaaatgttcagagtagagagacagctctttatcaaggaacactgtgatgcggattcttacaggaattagagagaccaatggatgccttcaacatcctaaggcccatgtgcttgatgcagtgaatcaggctaatgaccagcaccctcggtgctttcaaggagcttcagccactccagagtcttcatttattctggcttgatttcttaattaaacacttggcagctccacagcctgtggagaacatgtgtattcagggttttccatatcagatgaagaggtcaggcacatggaagctcttggggactctactgcagactatgggaacttcaccagtcttgacgggtcagctttttgaagatgacacagtcttatagtcttatatcataaatgaaattgttttgcagttagtggtggattgaagaccatgaagatggaatta

SEQ ID NO: 892639 - DNA, 679 bp, Homo sapiens
acttttcaatttgtcttttaataacatgatagaatctagaaacgttatatttccttccctctcaagcatagcattccaccctacaacatggtttactcaatgaaagcattttatatgaaattccaaaaatatagaaataagatttataatttcacacttagtttgttttgatcagattttttaaatgtttacaatgttttgatamggaaaatcagaagcaaaaccaaaaactatttctgatttaaaaacctgaaatattaagatgtgtcatgtgataaaatttaatgcatgtatgaagaggttttctgaaagaggttttattttcccaattcaatcaatgtttgtccaagataaggacagaaacagcatttcaaggatgttctcaaagatatactaaaaaagatgcaaagactccaacttacaggctgccactgacagagttagctcaattgaaaaagtaatctacttcaagaatatcaatattttataaatccaagacaatagcaaaagacacaaatgtaccttcagtagaagtagtgtgaccatgaaccaactaataactcaaggttaccctttctgccaaggatatgtgtccaatccgtaataatttgccagtccccaaattgtctcatcagtcatctccaattataaatgtatccagggaactagtctgaaaaat

SEQ ID NO: 892640 - DNA, 632 bp, Homo sapiens
aacaatgtagtaagtcttcaacttaccacttgtaactggaatatattgagacactgccttatctcacaccccttttgtatctaaatattaagaatgactgtaaggatttctttttycttttcttttttttttttttttttttttgagacagagtctcactctgtcgcccaggctggagtgcagtggcatgatttcagctcactgcaacctctgcctcctgggttcaggcaatcttcctgcctcagcctcccaagtagctgggattacaggcacccacaaccacacccggctaatttttgtatttttagtagagatggggtttcaccatgttggccaggctgctctcaaactcctgaacccaagtgatccacgcaccttggcctcccaaagtgctgggattacaggcgtgaaccaccacatctagtcaggatttcttcttaaaatgtatttactattcctttcctttcagaaattgttttttatttttttatttgaagaggacaggggagagaactgatgaagattaagatgctcaggtacaattaaaattaaccaatccccaatcacatttacaggaaacgtgaggtgcctgattttttttccattcatcatgattatttaatttagccaca

SEQ ID NO: 892641 - DNA, 632 bp, Homo sapiens
aacaatgtagtaagtcttcaacttaccacttgtaactggaatatattgagacactgccttatctcacaccccttttgtatctaaatattaagaatgactgtaaggatttctttttccttttcttttttttttttttttttttttgagacagagtctcactctgtcgcccaggctggagtgcagtggcatgatttcagctcactgcaacctctgcctcctgggttcaggcaatcttcctgcctcagcctcccaagtagctgggattacaggcacccacaaccacacccggctaatttttgtatttttagtagagatggggtttcaccatgttggccaggctgctctcaaactcctgaacccaagtgatccaygcaccttggcctcccaaagtgctgggattacaggcgtgaaccaccacatctagtcaggatttcttcttaaaatgtatttactattcctttcctttcagaaattgttttttatttttttatttgaagaggacaggggagagaactgatgaagattaagatgctcaggtacaattaaaattaaccaatccccaatcacatttacaggaaacgtgaggtgcctgattttttttccattcatcatgattatttaatttagccaca

SEQ ID NO: 892642 - DNA, 650 bp, Homo sapiens
tgggagatgaataaaattatttccataaaagataaagatagaagcatcagaaataatcaaagaagcagcagcaactttttactgaatcaaaaattgatcacaatgagaaatatatcacttgctcctacttacaaakagttgttcctattctcttcggcaacactgaactatgttttcacgctaatacatccagtaaaattgcttcctatttttatttgtgattttcattactgattccacttgggacagaaataaatagaatatgtgcatcaggatctccctagcaattttgcaccaacctcatgtggttctgtcaatgaaggcaattataattctgaatgaatatgcttgatgttcacttagcaggaaactgaactcagagaagatttttgccctttcattttaatgtacacaccaggtggcacccaaagtagtcaaatacaaatgtctcccaccctgtattcaaaagaaataatcatagtaccaggagctatcaaatcagaacattttctcgggcacggagtgacataaagggataacaatatctaagggccacatacctgttgttgcccaaagacacaaggcaggaaccataaaccaaaaagaaacacctgtccaggctgaaggcagcaggacttatttaccagata

SEQ ID NO: 892643 - DNA, 653 bp, Homo sapiens
aaattacattaaatctaatttaatgccgtgaactatttagcaactattaggaatatggaatatgctgggcattgtgaaggcgatcaagtcacacaaaacaaagtcctggctctcaggatacagccatgatcctagttgagaaaagatttaagcctttccatccattcaaagcaatgtgaactcttataatggcacctcaccatcgaaatccagacacctggcaactttgtctgtttaggttgccaccaagaagcaatcctttkgtaagaaagatgccacaaaatgcatgcagtatgcatagggattcccttggtccttacagcctattaatacttttagtgcccacagttttattaagctaacatctggtttataaggctaccacaagtcaggactagcaagtaaaaggcggcaagcaagagcaaggacaagtgacagcaaacttgtgacagctagggagaagaccaaagagcataaaatgcagataagcacactgacacatcaagtgaggcatacaaggacgagctgcccttcacgaatcaataagtcctgaggcattctgcatttcagcagagcctagaaaacagctgtgcctactaatggccttggtgtatcaggaaaagatgatgcaggcccagtctattctatgtaag

SEQ ID NO: 892644 - DNA, 655 bp, Homo sapiens
caaagtagtcttcttgaagtacaaagcagatatttaaaaagtaatatgaatggaagaattctggataatgtaaatgtaaatggtgaacaggaatttattacaaatatggattgtaaatttgtgtatactaagataacagtgaatatgattatataagagcaagaaagaaaagcatgaatataatatctgttcattgagtcttgttgaactggcaatctgtcaccctagcgagtagtctactgtgaaattttgtcaaatagtatcctaaagaaatcaaaacttttttataatttttggtttgtttttttgaaacaatgtcttgatctgttagcccaggctggagtgcagtggtacagtcatggctcactgtargcttgacctctcagctcaagcaatcctcccacctcagcctcccaagtagctgggactacaggtgtgtgccactatgaccagctaatttttatttattttactttttatagagacagggtctcattatattgcccaggctggcattttcataatttttaaagcaagtccaataacatctttttgttatagcaacttcacctacacacagcttctaatctatcagaactaaactgctatagattgtccatcccaactgacctcatagatgaagtacagaaaagtt

SEQ ID NO: 892645 - DNA, 632 bp, Homo sapiens
aaaaggaggtgacatcagtgggaagaggcagtctggctccaattcactccctagaacaatggtggatgtctcccaagtagcactggtatttctgccttctactaaaaaagaaaaaattttttttgagacggagtctcactctgttgccccaggctggagtgcactggtgcagtcttggctcactgcaacctctgcctcccaggttcaagcgattctcctgcctcagcctcctgagtagctgggattacaggcgtatgccaccatgcctggctaatttttgtatttttagtacagacaaggtttcaccatattggtcaggctggtctcaaactgctgaactcgtgattcacccgcctcrgcctcccaaagtgctgggattacaggcgtgagccaccacgcctggcctaaaaaatttaaaaatccaaaaccactgaggcccagaacaggtatcttttgggattctagaagagtaaaatggggtgggaggggaagtagaaagggaaaaaaaaaaaaaaaaaaaaagaccatgggagtcaagtcagtgatttctcacatacaaatgatctaaaaagtttctgggctcctggtaaagccaaatgatctgggctgcattccaggtccaagatgtcctg

SEQ ID NO: 892646 - DNA, 586 bp, Homo sapiens
ctattaaccagtaagaaaaaataaagactatccaattaaagtgggagggaagacaggaaaatagacctgatctagacttcacaaatgagaatattaatgatttatcatagcatggaatgaaaatgatgaagtgtgctgagaatatgcaaatacaattcaagtgcacacaattaaaatcccatatcatgattaatcatagcaaatgtgtgtgtattcctagcaataaattgagcaaaatatgcataagactatgatagacatattaattattaaaagacttcaaatacaagatataccatgtttgtggattagaagcagcaatataaaacaagtcagttctctgcaaattcatgataaaggcatttacagtctacgttgcaatgaatttgtgtgtatgtgtgtatatttaacttgtcaaaagaaatttccaamatatatatggaaaaacatagagccaggacaaccaacacattttaagacaacaagttagtgaagcttgctttaccagatatcaagaattcttacaaaatgtttacattcatgacactgtagaattatcacagggaaaagcaacagatcaatgaaa

SEQ ID NO: 892647 - DNA, 643 bp, Homo sapiens
tttgactttaaactatagctgatttgctgtaggagatgcttaagacaaccagagatataaattgcctcatctaccgccaagggaaaaatgattgtatcttgtaatatgaacctcaggatagggacgagcttgttggctatatactcctgttaccaacatcagctacaaagaagaaaaatagaattgaggagaagatcatttgttttcagctcattacagggaaaggaaaactacgttagtatatatgattcatayataaagaggaacatatacataaacacacagtgggagagaagcaagctagcatttattaagtcttaatatataccaagagcttcaggtatcttaaacaaccctaagagatttggttatttccatattatgaaggaaagaattgcaaaaacaaaaaaatctgagtttataaacccctcctaaagtccagattttctgtaccatattctattgactttatgtacaatcttacataaattcctcttagaaattctgagatcgttgtatatcacttacctttaatatttcagaatgaaaataaagtcatgaatctctaaacgggacttcagattcatctgcagcctctaccaattgttccctcttctttagtttttcttaccctgtttacaag

SEQ ID NO: 892648 - DNA, 643 bp, Homo sapiens
tttgactttaaactatagctgatttgctgtaggagatgcttaagacaaccagagatataaattgcctcatctaccgccaagggaaaaatgattgtatcttgtaatatgaacctcaggatagggacgagcttgttggctatatactcctgttaccaacatcagctacaaagaagaaaaatagaattgaggagaagatcatttgttttcagctcattacagggaaaggaaaactacgttagtatatatgattcatacataaagaggaacatatacataaacacacagtgggagagaagcaagctagcatttattaagtcttaatatataccaagagcttcaggtatcttaaacaaccctaagagatttggttatttccrtattatgaaggaaagaattgcaaaaacaaaaaaatctgagtttataaacccctcctaaagtccagattttctgtaccatattctattgactttatgtacaatcttacataaattcctcttagaaattctgagatcgttgtatatcacttacctttaatatttcagaatgaaaataaagtcatgaatctctaaacgggacttcagattcatctgcagcctctaccaattgttccctcttctttagtttttcttaccctgtttacaag

SEQ ID NO: 892649 - DNA, 422 bp, Homo sapiens
gaactatatgacttaacaagaggtaggttttcatacaaagaaaagtgagacgaatgaaaggctagaagcaatggaccaagtgcttttgggaagagcggggtagcccggaacacagggtggaagtggaacacaagatggtggagacccagactctggaatacaaagttccaactgtagcatgtctctgagacattcccttatttttcaaagtggcaaaataataactacctccttaggctgytgggatgtttgaaaaagataatacaagcataagtacaaggtctggcatagagtgaaggtgcagtgatgctgacaatggtacagataatgaggaatggttgaaatctccctttttgcttcaacaaaatatatatcactgtacacacatgttcatagcagcactgtttgcaaaaggtggaaac

SEQ ID NO: 892650 - DNA, 572 bp, Homo sapiens
aacaagaggtaggttttcatacaaagaaaagtgagacgaatgaaaggctagaagcaatggaccaagtgcttttgggaagagcggggtagcccggaacacagggtggaagtggaacacaagatggtggagacccagactctggaatacaaagttccaactgtagcatgtctctgagacattcccttatttttcaaagtggcaaaataataactacctccttaggctgttgggatgtttgaaaaagataatacaagcataagtacaaggtctggcatagagtgaaggtgcagtgatgctgacaatggtacagataatgaggaatggttgaaatctccctttttgcttcaacaaaatatatrtcactgtacacacatgttcatagcagcactgtttgcaaaaggtggaaacagcttgaatgtccatcaagaaatggccaataaacaaaccatggtgtatacgtacaaccagaacccaggagtaaagtgctgatgtatgctaccatgtgtatccacctccaaaacatgaagctcagggaaggagccggacacaaaaggccacgtactgtgcaattc

SEQ ID NO: 892651 - DNA, 437 bp, Homo sapiens
aatccatgaagacagagtgccgggggcagagaggagcaactgcttcacaggtacagggttacattttgggccagattaacaatttcagggctagatgggggagtgtttgcaccacatggtaaacgtactcgatgttactgaattgttcgtgttaaaatggttgattttacattrtgtgaattttgcctcaatttaaaaaaatacaatgtcaggtaacaaagggaaaccccagagggagagaaatgtggaaggcccatgtcaattgttcaatgatttaaatatcatttattcatgtaattatttcctgagcattaggacaaagtgtcaaagcactaccagatggctattactgacagctgaatagcaggcaaaaatgtgctttgttcatttcactaaatcttttttctttagcatgaaatatacttatgcacatataa

SEQ ID NO: 892652 - DNA, 630 bp, Homo sapiens
ggagtccagggtccttttagtttcaatttgagattggactggaattttttttttttcttgagacagagtctcgctctgtcacccaggctggagtgcagtggtgcgatctcagcttactgcaacctctgcctcctgggttcaagcaattctcctgcctcagcctccagagtagctgggactacaggcatgtgccaccaygcccagctaattttttgtatttttagtagagatggggtttcatcgtgttagccaggatggtcttgatttcctgacctcataatccgcccgccttggcctcccaaaatgctgggattacgggcatgagccactgcatctggcctggactggatttctgatctgcatttctcaaaggcatatccttgacatcccttctcctaaactcatgctactaactcttcagggctgttctagaggaacgttctagggatacatgcacccttccaacttcatgctatgtaaaagaatggcactagcggtgagtaaattaagaaaatgaataaaactcaattacaatttcacattatataaaattagagggtatacttgaaaacattatgctaattgaataaaccagacaaaagaggacaaatactgtatgattccactaat

SEQ ID NO: 892653 - DNA, 601 bp, Homo sapiens
ttttggaggtggggggcacagttgagacagggtctcgctcgtgtcgtccaggctggagtgcagtggtgccatctcaattcactgcaacctctgcctcccaggttcaaccaattctcctgactcagcctcccgagtagctgggattataggcacccactaccacacccggctaatttttatatcatggggtttcgccatgttgaccaggctggtctcgaactcctgacctgaaatgatcygcccaccttggcctcccaaagtgctgggattacaggcatgagccaccgagcctggcctgtcttttttcaaggagaggctgtatatggatggtgtgcagggacactgtcttctgacgatgttgggaaggggaaaagaggaatcagtccttgtcccacggaggtagccagcaaggatgaaggggaagaccaaggacttctctctacggctgcggacgctggtccaaggcacagggtgccagccccagtggtgggcggctctgtaagttggtgccaggtggccgtgcatagtggcccgtggtgagcgtcacttggggaggaggtgggcctggagggaagccggcagcagcagtgtgtgggtctct

SEQ ID NO: 892654 - DNA, 596 bp, Homo sapiens
cacagtggctcacacctgtaatcccagcactctgagaggccaaggcaggcagatcacctgaggccaggagttaaagaccagcctggccaacatggtgaaaccccatctctactaaaaatacaaaaattagccgggagtggtggcatgtgcctgtaatcccagctactagtgaggctgaggcaggagaattgtttgaacccaggaggtggaggttgcactgagctgagatctcgccactgcactccagtctgggtgacaaagagagactctgtctcaaaacaataaataaaattaaaaaataaaacacactagggcaatgttgggaatgacactggtttatgtctcaaaaggagtcttcactggctccatcaggacagcagagttgaaccactccctaaggaagagaattctctaagagaaattaacccacagtatttggtrtaacgtcctcttgcctcattagagccactgattccaagcttccaccctgcaaaactcaacacactattggtgctcacacaactggacttaccctaaaaaaaaaaaaaagaaggagaagaaaagatagataaaaatcagaataaaattgaataaca

SEQ ID NO: 892655 - DNA, 638 bp, Homo sapiens
ttatactgtaacaactaccagaagagcagacctttattataaataggaattatggaaagaaaatcataccttccaagatgtaaactcaagtttccttcttatagaaaaattccttcaatacacataaactctgactgtttcatgtgcaaaaaatcataccattgtgtgagctcacagatacatctgaccataccttcattattggtaacattttctgctactggggctgcattactggttcccgctgccatgtccaaaagaggttgaatratttcaattttgaacactccatttttttgccaaaggttcagcacacgaactattttactctgttacgcatgagaaacacaaatatacaataaatatttgcataaataaccgattatactcttacaaaaaaaagagaggaaaactccctaggctaatatttccatactatgtgtgtttcataaacaaggaaaaaaaaaaatcagaattacaacctggttaaactaattagtctttcttcagtggtatcatctagagtaaggaacagagatggactatagacccagacaataaaaagaaatttattatttgacattttcattttattttacttatggttacaaataaactatcactgaccccccaaaaaa

SEQ ID NO: 892656 - DNA, 646 bp, Homo sapiens
ggaaataaaaacaatgtaccaaaacttatgggacccagcaaaagcagtgctaaagaagcaatttatagctataaatgcttacattaaaaaccaagaaggacctcaaattaacaaactaacattacaacttaagaaactaaaaaagaagaacaaactaaacccaaagttagcagaagtaaggattagtgcagaaatagatgagagacaatagaaaaacagagaaaatcaagaaagccaaaaatggtttctttgaaaagatcaacaaaattgacattttagctagatggaccaagaaaaaaagaagacagattactaaaatcagaaataaaattggaaacgttaccaattctacagtaataaaaagcattaaaaaatactatgcacaattgtatgccaacaaatggaaaaacctagaatagacaagttcctaaaaacacaaaacatatcaagactaatcatgaagaaatagaaaatctgagtagacytataactagtaaggagattgatttaagtaataaaagatctattgacaaaaacctgatggcttcattggtgaattctaccaaacatttaaataactaacactaatcctttttaaactttttcagaaagttgagggaaaactttcaaacttactctatgaggc

SEQ ID NO: 892657 - DNA, 630 bp, Homo sapiens
acgcccggctaatttttgtatttgtttaatagagatggggtttcaccatgttgaccaggctggtcttgatctcctaactcaggtgatccgcccacctcggcctcccaaagtgctgggattacaggtgtgagccaccgtgcctggctattttttgaccttttaatagtagccattctgactgctgggaggtggtatctcactgtggttttgatttgcatttctctgacagtcatcagtgatgttgagttgtttttcacatgctttttggccacatgtatgtcttcttttgaaaagggtctgttcatgtcctttacccactttttaatgggattgggtttgtgtgtgtgtgtagatttgtttaagttccttatagatgctggatatcaaatctttgtcagaggcgtggtttgmgaaaattttctcccattctgtttactttgttgatagtttttgtgtgtgtgtgtgtgtgctgtgtagaagctctttcgtttaattaaatagatcacatttgtcagtttttgcttttgttgcaattgcttttggtgtctttatcacgaaatatttgcccattcctatgtccttaatggtattacctaggttgtcttccagggtttttatagttttggattt

SEQ ID NO: 892658 - DNA, 623 bp, Homo sapiens; identical to SEQ ID NO: 892400

SEQ ID NO: 892659 - DNA, 508 bp, Homo sapiens
agatatttgtggggcaaaaatgatatgctaatccaaaacaaaaaacctcaaggaaacagataaaacacaaaaaaacaaaaaagaacttagaaaaatgctaattagtcctgtcagagaaattaaaataaaatgacaayttacattttgtatggttcaaggcttagtcagtactggggccctttgaaaaatataaaattagaaatatacaattaggtgcaaaaataatatataaaaaagtcacaatttaatttactggaatcttagagattccagtcccttttttctgagatttatttagctagaaaagctttcatagaaatgcttcttgattttaagctattatttacctttctacttagaagttctacaatttccagcaacttttggtactagagtatggggccacctgcctcatggtaaatctactatgccaaaaaaaaaaaaaaaaaaaagaaaggatttagaaaacaagaatgagatctttaaaaatgtaactgccaaaaaccat

SEQ ID NO: 892660 - DNA, 612 bp, Homo sapiens
tttctttaatcttttttctccacatttttcagattgaattatttctgctgctctttcttcaagttctcttaatttttcctctgctatcttaaattggctgttgaagctgtcaagtaaatttttatttcagttattttatttttcaactctggaatttacatttttttatatgttctggttccctttctatatttcctatatgttaattcatcatcatcatattttcctttcattatttgaacataattyccttttaagtctttggacatatatacaaaacttccaagttttgtatataacttgctcggaagtccttgtctataacccaaatcatctgggttcactcaaagcagtttctattgttgactgcttgctttttaagtaactgagtatagaatatattttcctgtttctttgcatatcttgaaaattttgttttaaaaggtaaacatttttaaatattatattgtagcaactctggattctgttttatttttcttaggattgtatttttaataactctttttaattacttacctaaacaaactgtgaaatcactaatgtctctgctgttttttaattatttttgttttttaggctattttcctaaag

SEQ ID NO: 892661 - DNA, 537 bp, Homo sapiens
gcaaggctctacgaaaacagattacaactcagttacttgaggcaatcaatactgtccaatactgtcaagatttggactcagtatcctattgctactgtaaaacaaattaccacaaattttatggcttagaacaagacaaatttattttcttacagtctgaaagtcagaattctaaaatgggtcaacagggctgtgctccttctggaggctctagtggagaatctgtctcttgccttttccagcttctagaggctgcccgccttccttggcttgtggcccccttccatccttaaagcaataaccaggcaagtctttctcacatcacattactctgacataaactcttgctttcctcttccacatttaatgacccttgtgatcacamtgggtcacccaaataatccaagataatctcttaatgttaaggtcagctgattagcaaacataattttatctagcaccttaattctcacttgccatgtaacatgacctattcccaggttccaggaagtaggagttagacatctttgaagagtc

SEQ ID NO: 892662 - DNA, 665 bp, Homo sapiens
agcatgaacctcaggttcttagcaatgtttctgtgcaagatttcaaacaccataatggttatcaaccccgacagatagttttattacctgaaagtatttatttttaacccacgataaagttaacttgttaacaaacttgtgctaaagtaaaataaatatattaattatgtaactttgtatcatttataaatatggagaaaaactcaacttttatgaattattagtgactcttatcctctacctaacaccctaacacatcgttcagattactcatatttatagcagagcagcaggaactgggctttcatcttaccagcacattttgattcatggacatgcctgakatggtatcagagcaatgacctgatcagtcacaaggagaaacctgcaccatacctgtccattgtgttcccctcctgctgacactactctgtgcacttttcagaagctcttcttaacatctgaggactacaaaagtgggatcacttctccattataaattcaatgcaaccatattacactaaaaataagtacagacccaggccttgaaggcaagtagcaacatgtacttcttcatctatcctacctaaatgtctctaaatgtctgttgaactccagtcagaatgcctaggttcaaatctgggctccactatttcctaaatcag

SEQ ID NO: 892663 - DNA, 632 bp, Homo sapiens
taatttcactcccttcttttaataggtagagaagatgaatcacagaaaggctagtatttgtctcaaggtcatataaatgctagtatagcatctggggtcactggaaacgccagagaatgcagaaaatgccaggtctcctgaaattggcatgtggtccttaaaatgctctgaatcggccgggagcggtggcttaacgcctgtaatcccagcactttgggaggccgagacgggcggatcatgaggtcaggagatcgagaccatcctggctaacacggtgaaatcctrtctctactaaaaatacaaaaaaaaaaaaatagccgggcgtggtggcgggcgcctgtagtcccagttactccgggaggctgaggcaggagaatggtgtgaacccgggaggcggagcttgcagtgagccgagatcgcgccactgcactccagcctgggcgacagagtgagactctgtctcaaaaaaaaaaaaaaaacaaaaacaaaaaacaaacaaacaaaaaaaaacaaagaaaaaaagaaaaaagaaaagaaaaagaaaaaagaacactctaaatcatcccaccctgcagcagtcacaccaaatccttcatttcatagctttgtgaacactgcaagaattcggctcc

SEQ ID NO: 892664 - DNA, 630 bp, Homo sapiens
ttaaacttacattatgtttacattacatatttcaccacaataaaaaatttttgaaggaaaaccagaactttaatgacaaacttaggacatattatgctctgaatatatagttttgataacgtctttcctggcaaatcaacaaggtaagaataaaaggatattctgaaatctttttttttctttggagacagagtcttgctctgttgcccaggctggagtgcagtggcacaatctcggctcactactaccttctgcctcccaggttcaagtgatcctcctgcctcagcctcctgagtagctgggattataggcgtgcgccaccacgcctagctaatttttttgtatttttagtagagacggggttttaccatgttggtcacgctggtctcaaactcctgacctcatgatccgcccacctcggcctcccaaaatgctaggattacaggcatgagacaccrcacccagccagatattcttaaatcttatgctcacactccaccccccccaaaaaaattgtccttcaggaaagcataatttaaggaaaaatttcccaaagtgccaccttcagcttcattcttagcaccagaggaagaattgcctgtcatataatgaaagatccttggtgttatc

SEQ ID NO: 892665 - DNA, 608 bp, Homo sapiens; identical to SEQ ID NO: 892523

SEQ ID NO: 892666 - DNA, 617 bp, Homo sapiens; identical to SEQ ID NO: 892524

SEQ ID NO: 892667 - DNA, 670 bp, Homo sapiens; identical to SEQ ID NO: 892525

SEQ ID NO: 892668 - DNA, 468 bp, Homo sapiens; identical to SEQ ID NO: 892526

SEQ ID NO: 892669 - DNA, 565 bp, Homo sapiens
tcactagaactgctataagattcatgtgcagattttattgtgaacacaagttttgatttctctggtttaaattcccaggaatgcaattgcttaatcatatggtaagtatgtgtaattttataaaaaaatgttaagttgttttcaagagtgactttaccattttgcattcctgccagcaatatacaagagttacagatggtctgtctccttgtcaaataaaattgtttatttttagccattctaatagaygtgtggtgatatctgctagtgattttaatttgcatatccctaacaactaatgatcaatgttaaatatcttttcatgttcttttgaatcatctgtataccttctttggtgaagtttctgttcaagtctttgagttttaaaattggattattttcatactggtgagtttacaaggttctttatatgttctggatacaagtacttgttggatatgattttcaatattttctcttagtctgtagcttatctttttagcctcttagtggcgtttttcacagagtgaaagtgtttaattttgatgaaatatggtttatgagt

SEQ ID NO: 892670 - DNA, 543 bp, Homo sapiens
ccaaataactgaataagtgagtgaattagcatacacttaacatagaaaatgagttttctgtgcatcaaaacgtattcacagaaaaactttcatttgtgatacttcttataactagtttctggaaaaagaaaataactgaattgtgactttttgacatagttaataaaaatgttgtctaccttttaaattctaataatactttagaacaggaattaaagtatggcttttattacaacaatatcaattagcatgtatgtgttgtttattttcatattttaattgctacttctaaacaactatataaaattaattccttcttaatatgagaaaactgaaaaatggagaagttaagtaatttcccaagatcatacatcttgagtaaaagaggcagratgaaaattgagtagtatggcttcagaactcacaccgtgaagcaccatattatctgatccttagaggagagggcagtagtattttggtattctcaacttaagaatctttaaagttatttttaaaaagaagggcaatatgttgtatgtgtgt

SEQ ID NO: 892671 - DNA, 560 bp, Homo sapiens; identical to SEQ ID NO: 892529

SEQ ID NO: 892672 - DNA, 531 bp, Homo sapiens; identical to SEQ ID NO: 892530

SEQ ID NO: 892673 - DNA, 560 bp, Homo sapiens; identical to SEQ ID NO: 892531

SEQ ID NO: 892674 - DNA, 585 bp, Homo sapiens; identical to SEQ ID NO: 892532

SEQ ID NO: 892675 - DNA, 562 bp, Homo sapiens
atcatttagggattccagtggttctatgttgtcttccatgtggactattacagatgaaaggagctgagcaaactataaaggcagtacactactcaggcactatgtaagagagccagtacttttctgactattttgtgggctccccccgggaagagtccacatgggcacttacgctctatcrtcaaggattaaaattaggaattaaaacatctgatccccaaatggcaccagcttcactttaaaagtagttcacaaataattacttaaccttagtaaaaataattatcagtttgtctacatacttttggtattttatatgtataatttatgttgtacaataatacaagatataatggacatactataagatgcacatatttataatgtatgatttgattactttgacttatgtgtatactcatgaaactatcaccaaaatcaagataataaacatatccataacacatgtaagttttctagtgccctttggtaattcccacctctggcctttatccgctcccctcttccacaagcaagaactgttctaccttctgtcacaaca

SEQ ID NO: 892676 - DNA, 664 bp, Homo sapiens
gttaattttttgggactacgaggccaataagtgaccaagacaaaattacacttactcttcaggccttttttactacaccatgttgcccctgctatagtaaaactgcaaaggccagttagccccagactgatttggacttaagcttctyattgagtaatggatcccacatgcattcaatcatctctttaagagctcatttgtttttgtgcaaagacttgctggcattagtctcacagctagccttgacgacaatgggagcagtagtttcttaaggcttgtattgcaggtcatccatcctctaaaatattgcccctcaaaaggtgagaagaaatttgacaatcttcctctaggcgtttctttttaaaatgcaaacacttctgcaaggcaaaattggttagcattaataattaatttgaattaatatcagatatttttaaaacaatagtggaaactttggtgataagggaacacttaaaaaagcagaaatcaagggaaaggacaatggagaaaaacgtcttcaatttgctatacatctctgaaattgctagaaattaaaagtaaatatctcaaccattaaatatatatgccaacatgtaatttttatactattgtctttcaaattatgttaacgtttgctaccaataaaaaaagccagaagtgttct

SEQ ID NO: 892677 - DNA, 650 bp, Homo sapiens
ccccttcttgtctggggactagattgcctttgcaggactaataaattagccaaaatttgttagaatttggattagaaattatggtttaggagtcacgcagccggaggcgacaagagtctgaccctccccaaattgctccagaggatgacatcactattgtaaaacttaagatcagtgcttgagatattttcaagaccctgcacttgatggataasctggcatcgcccagatggatcaactcgcttatctgatcttgtgaccccctacccaggaactgactcagcacaagatgacagcttagacttcctatgtcttcatctctgactcaaccaattagcactgctgactcactggcttcccacccactaaactagccttaaaaactctgatccctgaatgctccagcagactgatttgagtaataataaagctctggtctctagcacagctggttctgcatgaattactctttctctattgcaattctccagtcttgataaattgactctgtctaggatgtgggtaaactgaacgcattgagtggttacagtaacttcattgacttttccttgagaaaagaaattgttaagtgaccttaatataatttattttgtatcatcgaaagtgccacaaagtgaaatgatagagct

SEQ ID NO: 892678 - DNA, 638 bp, Homo sapiens; identical to SEQ ID NO: 892604

SEQ ID NO: 892679 - DNA, 668 bp, Homo sapiens; identical to SEQ ID NO: 892605

SEQ ID NO: 892680 - DNA, 668 bp, Homo sapiens; identical to SEQ ID NO: 892606

SEQ ID NO: 892681 - DNA, 628 bp, Homo sapiens; identical to SEQ ID NO: 892607

SEQ ID NO: 892682 - DNA, 613 bp, Homo sapiens
taacttgtttttcactttacaggctcataggtgaaagggacttaccttgtcccagatgagattttggactgtagatttttgaggtaatgttgaaatgagttaagactttggggaactgttgggatgggatgattgtattttgcagtgtgagaaggacatgagatgttggaggggctgggggcagaatggtatgtttttatttgtgtccctgcccaaatctcatgttgaatttttatccytggtgttggaggaggggtctggtgggtggtgttttgatcatgggggctgatttccaaacccttgatgttcctatcatagtaagttctcatgagatctggttgtttaaaagtgtgtagcacctcccccttcactctcctccttctcttctggccatgtaagatgttcctgcttcccctttgccttccgccatgattgaaagtttcctgaggcttccccagccatgctttctgttgaaccatgagtcaattaagccttttttctttataaattacccagtctcaggtagttctttatagcaatgtgagaatggacgaatacagggggtagatagaatatttctgccagaaggcatagcgtatgcaaaagttcttta

SEQ ID NO: 892683 - DNA, 613 bp, Homo sapiens
taacttgtttttcactttacaggctcataggtgaaagggacttaccttgtcccagatgagattttggactgtagatttttgaggtaatgttgaaatgagttaagactttggggaactgttgggatgggatgattgtattttgcagtgtgagaaggacatgagatgttggaggggctgggggcagaatggtatgtttttatttgtgtccctgcccaaatctcatgttgaatttttatccttrgtgttggaggaggggtctggtgggtggtgttttgatcatgggggctgatttccaaacccttgatgttcctatcatagtaagttctcatgagatctggttgtttaaaagtgtgtagcacctcccccttcactctcctccttctcttctggccatgtaagatgttcctgcttcccctttgccttccgccatgattgaaagtttcctgaggcttccccagccatgctttctgttgaaccatgagtcaattaagccttttttctttataaattacccagtctcaggtagttctttatagcaatgtgagaatggacgaatacagggggtagatagaatatttctgccagaaggcatagcgtatgcaaaagttcttta

SEQ ID NO: 892684 - DNA, 643 bp, Homo sapiens
ctcaattagaaagcttaattcaaactgatccccttgggaaacagtgagtctcattgcttaatatgcataatgggatttttatattgtacagaagctgttgtcaaagaggatagagacatgctgcagagcttttaaagctgagatgcctggcaggggatgatgaccatgctggctggagaaaaaaaaaatcatctctgtgagcccatgtttctttcttctttctttgaagcttagttgaatatttgaaacctatatgttttaaattcttctcaaggaatttagccctaattttacagagttatattttttacaaagaaatgtagaaactgatgaagataaaggaacaagctctgctctgtaaggctgaaaagttactttattgatggaaaatcccagaagttttaggatcttgccttatcaattgcttttacaattgactcagagaatgattcctcaagtcttgggtgggtgatagctgaagatagaaaaatttgtaaagtayactatcactaaggaaaaaaatttcatctagataaaagtattttttctagataaaaataccagataaaaatactagataaatattttttctagataaaattatatataaagtagtacatatatataaaaaagcttttatcta

SEQ ID NO: 892685 - DNA, 594 bp, Homo sapiens
aagagattgattgatttataaagaatctcaagggaaattagaatcaaagctataaaaaagtatttacagctagaggtaattttacagctgggttttggaatcctttccccagcccttgcaatgacattgcctgaggtgctctctgatttgcatcttagaaagaataaaacttatcgcagtgcattcaggyggcactacccagtcctgcctgggtaggcagactactgggtaggtagatatccacctactcttggtgaagccaaagatgttcatactggtcaggttacagggtgacctactgtcctggtttcagcaccaaatgtcctgcatccctggaaagccacccagtcccaggtcagtaaccctcattgctaaccagaactgtcctccacattgaaaatacacattgtatttcttttcttgttgcttttcctggttaatatcttttttgggtgattcacacaaattacacttttttagttttattatagcatttgatattaagatccatcattacccttagttaatcctttggacttaagagacacaaccttagatataccaaagacaatcatgggaagagtgtgtaaagag

SEQ ID NO: 892686 - DNA, 541 bp, Homo sapiens
ttttggctccatgtttatgtttttttcccagctgttgtgtgtattttgtaaaattgtgtctatcaggtaggtgggtttggttgctattttctatagtgtattatttttggattcagccttaagctttcttgttctgyattgagagttatgttgatatttcagcaagagactaccagaaaaagtcattaattgttcagacacagtgtaaaaaaatattatgagccaaaacaattattgaatttattttgcaggaaaccattgtctcaccacttttagcccttagtcaaacttgatccaccctctgaaaggctgttttaaaataattgtttctataggttaagtattgatttctcaagcctgcaataggcaccctcttagaaagggtatttcagggattccagtgggataaatagctacagttgtgcctcatcctccccttgatttcaaagattctcaaaaattatgtgtaaaaaaaaatatgaaagacaaagctatttatagactatgaaacttaaattgtcccttctgatgcattgctaga

SEQ ID NO: 892687 - DNA, 637 bp, Homo sapiens
tattttctataatacattgacctaaaatcatacagattctgagggaggttgcaattcagttgggcatttctacatggtggatggatgcacatataaattgctcagccttcacttctgcaggtccctgtagcattacataataaaagcctaaactgtttataccttatgtttcgtaattacaagacattttactctctccaagtaaaaacacgaaaagtgcttaatgtcaatcataatagaatgtataacagtgaagaactgacaacaacttacccaaaaaagtggggtggattaagaaaactgtgacatatccagacaatgaaatattaaatagccattgaaaaggtggattatgttcaggaagaggtacctatgtgaaaatgacaggagaaaataggatagagtcaggccaggcgcggtggtttaygcctgtaatcccagcactttgggaggccgaggcagctcaggagctaagagaccagcctggccaacatggtgaaaccctgtctctactaaaaatacaaaattagctgggtgtggtggcgaacgcctgtaggcccaactactcgggaggctgaggcaggagaatcactggaacccaggaggcagaggttgcagtgagctgaggtagtgccat

SEQ ID NO: 892688 - DNA, 605 bp, Homo sapiens
catctgactttttttatatgtttaacttttcattggtatttttgtctcccctagtgaaatgtaagcttcatgaaaagaggttgcttgtctatttgtatactatgataacccctgaatgtgaaacagtgccggaggtgtgggagacactcacaaaaatgttttcartgaatgaatggtaaacagaaaatgtcttagaggccccatcttactttggaataaaagtatataaataaataatgatgagatggtaaaacaaatatgtttatcgtgtatggaggatatatttatatatttatagtgtataattagatatattaatttccagttgtctttaaaatatatccagcatcagaccacgtctcaccatcaccatcacccaagtcaccaccacccctcaccagagaaattgcaattcccctgattctgtgcttttgaccttgccccattatatctgttctccacagagaagttagtgggatcctgttagactccttgttctttgtcttcttatgaccctccatggtattcccattaaactaaaaatactactttattccaaagtaagatgcagccactaagactatataaatatatattcaagaaga

SEQ ID NO: 892689 - DNA, 605 bp, Homo sapiens
catctgactttttttatatgtttaacttttcattggtatttttgtctcccctagtgaaatgtaagcttcatgaaaagaggttgcttgtctatttgtatactatgataacccctgaatgtgaaacagtgccggaggtgtgggagacactcacaaaaatgttttcagtgaatgaatggtaaacagaaaatgtcttagaggccccatcttactttggaataaaagtatataaataaataatgatgagatggtaaaacaaatatgtttatcgtgtatggaggatatatttatatatttatagtgtataattagatatattaatttccagttgtctttaaaatatatccagcatcagaccacrtctcaccatcaccatcacccaagtcaccaccacccctcaccagagaaattgcaattcccctgattctgtgcttttgaccttgccccattatatctgttctccacagagaagttagtgggatcctgttagactccttgttctttgtcttcttatgaccctccatggtattcccattaaactaaaaatactactttattccaaagtaagatgcagccactaagactatataaatatatattcaagaaga

SEQ ID NO: 892690 - DNA, 619 bp, Homo sapiens
cagtggtctgaaccgaccccacaatatttccaaggtatacatgtcttaagtaattatgtctgattacagtcttaacctggagcagcatcattgcttttaaatattagataaaattacaatgcttttcattataattgcttcttcccacttttcatgatgcttctgtaaagtgcattgaaagggaaatacttaaaggaaaaacaacacatatttgataaactaggataattaagaaaagtttgacttgagggaaaaaattgtcaaggatggagagaaaagccaattattaaatagaaacacaactgagaatgcaatccttagccaatcatctgagattcaaaaagtgtatcagcctccttgagcctggaaaagccttgattttctttgtgtgtttcaagtatatttctytgccatatttttgttccctcacaaacatggggggctaaggaaaattataaactacattttgaactgcagggggcattggaagggctggccaactctctgaaagctgagaatcagaaagacagattttcaaaaggaattatgcataagtggtatgtattacaagcacacaattccctttagtgcttctggaaagagccaaagcatgaaggag

SEQ ID NO: 892691 - DNA, 650 bp, Homo sapiens
aaaaatactaaaactgcaaaaatacttggtcctcaaaatttaggataatactatctgatttccctaatgtatctctctttcaattcattcacttctttcttcaataaacctaccttaagagtttactatgtgataggtttgcaataaaccctttgtaatgcaaaagactaatacatttgtatacaattatataaagcactttacttgaaattaattttatacataaaattgtatttatgtgtatgttatgtatatgttcaaatcagggctgccataaatgccatggagaagttcatggtgctgtgaaagcatggagattctccatattcayggcagttaagaaatggtttccaaggggagtggtgtgtgctgtgaaatctgaaggatgcctgggagccaccttgttgagagagtgtgtgtgtggtgtgtgtatgggtagggggtgatatggtttggatttgtgttcctgctcaaatctcatgttgaaggaagggcctggtggcaggtgattggatcatggaggtagacttcccctttgctgttctgatgacagtgagtgagttctcatgagatatgcttgtttataaatgtgtagcacctaccctccatctcttttcctccttctccagccatgtaagatgagctgcttc

SEQ ID NO: 892692 - DNA, 579 bp, Homo sapiens
tcaatacaattataatttttcaggttatcttttctattagatggaaatcatttacatctctgccacatacaaatcctataaattaacatgtaatttcacagaatctgcatcttaaacaacagtaaatttaaaaataaagagacacctctttagagaatcaaatcacccttggatgaggctattgtactatggccaccatgacaaagaaggtcacacaatcttttttttttttttttgcttcattttcaagtttttataagttttattaaaaaatagaatagtcacttaaaaacaatttttttyttcaccttgatctagcaaggaaagttaaccttgagtttgccatgagccttccatacacaatgttctcagaagaaaacatagtttccaatatataagtgaagaataagaagtctctctcaataggaaacaatttattcagtatggcaaaggacaatggctatgtcaaggaaaattctaggaagggaggatttacattcttttacatatttaaattccttttcaacagatgctggcgaggttgccgagaaaaagggatgctttcacactgttggtggg

SEQ ID NO: 892693 - DNA, 638 bp, Homo sapiens
caagttgcctgcttggccctcttccaagtgtactttactttcttttgttcctgatccaaactttttaataaactttctcccctgctctaaacttacctctatctctccttctgccttctgcccctcattcaaattctttcttctgaggaggcaacaggttgcttcaggccctcgtggatctgccactgctaacctgctttggtaccgtgcaactcagatgctttctgctgctaacaatagtagcagcttcttcacaggggtttgtgaagaatgcatataaagctcatatatacattcctggcacattgtagaagctatagaagtgttggttattgttattttattatattgaagaggaaaaattagctccagtgaagggccttagaaagggagagygtgaagtttctattcctctgtcaagaagatggtatctgccaaattctgacttttctgggcctcgagtgggcactttcgcccttttttcataaaaataactaagctaatattatattttatgattatgttgatataaagatgaacacaattcaggctggatttattatcatatatttattgttattaatatttttcttctgacttaaataaaattaaaatatttttgtggattcctaatgttc

SEQ ID NO: 892694 - DNA, 629 bp, Homo sapiens
ctgtgaaatgaatgaaagaataaataaataaataaaataaataaataaaggaaatgagaaatattgcttgagttttggaaaagacagtggagcatcctgcacttaaatataaggccacctgtatatctatatatctcttcagttgaatgaatgccaaaataagaatttccattttagggcaaaaaaattactgcaagtcagtaaggtcyagtggaatgagtttgtctagttgtcaggagacctgggtcccattggcaagaactagctgtgatcttggttaagtcacaaaactttttttaatgcttggtacctgaaatttaaaatggaaataaaatagttatcaccttagaatttgaaataaacttacagttataacagtactttatttatttatttatttagacagagcctcactctgttgccctcgctcttgtttcagggattggtaatcaccatcctcccacttgtcaatcatctgggttgtcacccttgaccattccctctctttctcttgcagccaaacaccactgttgttggctttgccttctagacagctctgccatacatccacttgtttttgttcccactgccacaatcttactccatgctaccactgcttctctcccaga

SEQ ID NO: 892695 - DNA, 639 bp, Homo sapiens
gttggcattaaaaacctaaactatttctaccactgtatggcttttaactagaggtttgtggtctaccctgaaaacttaatctactatgcatatctttatttctaaactaatacgttcttttgagttcagcctacctaaaagcatacttctggtgtactgcctatttgtaaattgaaacttgtcataagtataataacattgcccccattgttcgtattaattcatagcaagggggaacactactgtatagatgttataaatgcttaggcaagggagaccattcagctcttaacccaatttcctgctgcaaatatcaaaagttggatcaacatatgcccctagttacaaagatgtaacatyatttctaaagtcttcagcagcagaatcctaaagggcccctaaatttcagtcttaactttgttccagccacatcccagctgtttctcccaagtacttcatcacctgcaggctgttttcagttcattatgggaccaaggagaggccactgggacagtatatcaatagaacaatccttgccaaataatgatatttggaaataggctgggcacggtggctcatacctataatccaagaactttaggaggctgaggcaggagaattgcttgagcctaggagttg

SEQ ID NO: 892696 - DNA, 637 bp, Homo sapiens
tcagtttccagatgtcattgattcacaggatttctatagctctttacatggtgattattattatcttggattgcatgactttaagcaacgctgaaatgtaaaggtgatgattcggctcagaaaagtttttcaaaattgcctactgcatctgcctaggaaaagctttctccccacctagtgctgtgaccaccaagactttccaaagatcaggatgggtttttccccggcggggaagctacttycacgtggaattcattctcagaaatacttccctatcactcaatttttcccgtaagttccttgcaacaacagccaccagtcttgttattactttccttgtcacgtacttgaatattctccacccagaggaattttttaatccatgtatctatgcaccacgtaagcaatgataaaatatccacataaactctggcagagcctgtcatcttgtagactcatgggtacttatcattttccacggcccaatgttgttggcaaactcagtattttgcagaggacttaacaaaataaatgcatatgaatctgtcttcaatgtgcccttatcttagagtatttctaatgggtctcaggctaactcacttttttaagtttctgcttcttacagagaatatttatt

SEQ ID NO: 892697 - DNA, 659 bp, Homo sapiens
ttaaacaacagaaatttatttccttacatttctggaggctctaagtccaagatcaaggtgccagcaagctaggtttccggcgaggcctctctccctggcttagagatgactactttcttgctgtgtcttcatgtggccttttcactgttactgtctcttcctcttcttataaggccaccaatacttctggactagggccccacttgtggattataaccccatttaacattacttacctctttaaaggccctacctccaaatacagtcatattagggatgagggtttcawcatctgaattggaggtttaggggaggaagatacaattcagttataacacgaggcatgaatttctggggtctcccttttgctaagttacataaaccaggggggatagtaggactggcacctcattgtaaacctttaggaggctaatcaaggttctcatctgaaggaatattgactgcacctttaaatagaactaggatgttttcattaaaagaaaattctggaacatcaaacaaatattcacggtctccagattcttttctattgatccatattcacagacaaagttttgttgttatttttaattaagtagtgtgtatgcttacaaaggaatatatgtaatttatacatgagttctgaagcataataatga

SEQ ID NO: 892698 - DNA, 441 bp, Homo sapiens
tgtgcgcctgtaatcccagctattcaggaggctgaggcaagagaatcacttgaacctgggaggcggaagctgcagtgagccgagatggcaccactgcactccagcctaggcaacagcatgagactccatctcaaacaaacaaacaaacaaaccacatgtcatatagtcttacttttagatttatcctttctttaaaaaactacagttattttattaatttatgggggagcatatataaattacttaataaaatttatttttaaagkagttctacattcacaaaaaaactgagcagagcacagagttcctatacatacccttccctcacctatgcacccccattatgaacatccccaccagggtggtacatttgctacaattgatgaacctatattgacacatcatcaccaaaattccataatttacattagggtttattca

SEQ ID NO: 892699 - DNA, 671 bp, Homo sapiens
ttgttgagggagcagagtaggaatacaaaagagtaaaaaagaaacagagagaagtttcacctaacgcccttacaaagaaagaagcatgagttctgtccctggagcagcaagaagctatgtaccactccaggacactaaaaagttagcaaggtctcaaagaagatagcagaattatgctaaattcctagcttcagcaaagatttctgcactccatacttggcctacacaacttagccaatggatttcaaaaccacatcatgggctaatgtaatgacaaagtctttcatgaccatcactagcaaaaatttatggattttgatgttacctttgaagtataagcattacatctgatgagatgtaaattataataaatttacagatgaaattttctattagctattttttacactatttttacactattttttacactgtttttttacagatgtttattcctccactttctttacctgaagtggcaatttggttttgcattaygcaatataaaatcaatattagaagttgtgtaaagcctaattcaaacctataaaatgtgtgaggcaaaattttaatgtttatattttattctttttgttggattctcgcagaagttccttgagtttttggtcttagactgcctttacataagtatattttgtgtatacaacaag

SEQ ID NO: 892700 - DNA, 623 bp, Homo sapiens
actttcctaaaaaacagaacatgacagtaggcactgctgaaaataacataaaaataaaaatgaaaaacataaataagaccaagaacagaccttcaatgaactcccagcttagtaaggaagagaaacatttacacaaaaaaagtctcagattgatgcggttagagaaaaaggaaagagaaatcctatgaaatagacctcaaaacaatccagaccaggtccacttagggccttcatccatgctgggctttcacctgcagtttttacaatttaacacccatatctatgactcattccctcaytgccatcagagtgtgttcaaatgtcactcaaggaggccctccctgaacagtattatttatagctagcaccctcccacagatatatctttattctctacttagcatttatcaagccatttatcaccatatgatagacttgcattttactaattttgttgactgtttttctcactggaatataggatatctgtgaaggcaggaatttctttttttctttagggaataaaatagattttaaaaaagtataataaactggggccaaataataaagagctttgaatattaaggtaaaaagtgtggaattcattctaaaggtaatggaga

SEQ ID NO: 892701 - DNA, 642 bp, Homo sapiens
gttgaatccctgaatagaccaataacaagttctgaaattgaggcagtaattgatagcctactaacgaaaaagaagcccagaaccagacggattaacagctgaattctgccagaggtacaaagaggacctggtaccattccttctaaaattaatcctaactatagaaaaagagggaytcctccctaactcatttatgaggccagaatcatcctgataccaaaacctggcagagatacaacaaaaaaagaaaacttcaggccaatatccctcatgaagattgatgcaaaaatcctcaataaaatactggcaaaccaaatccagcgacacatcaaaaagcttatcctccacgatcaagtcagcttcatccctcagatgcaaggctggttcaacatacgcaaatcaataaacgtaatccttcacataaacagaaccaatgacaaaaaccacatgattatctcaatagatacagaaaaagccttggataaaattcaacacacttcatgctaaaagcactcaataaactaggtattgatggaatgtatctcaaaataataagagctctttatgacaaaccagcagccgatatcatactgaatgggcaaaagctggaagcattccctttgaaaactggcaaaagacaag

SEQ ID NO: 892702 - DNA, 642 bp, Homo sapiens
gttgaatccctgaatagaccaataacaagttctgaaattgaggcagtaattgatagcctactaacgaaaaagaagcccagaaccagacggattaacagctgaattctgccagaggtacaaagaggacctggtaccattccttctaaaattaatcctaactatagaaaaagagggactcctccctaactcatttatgaggccagaatcatcctgataccaaaacctggcagagatacaacaaaaaaagaaaacttcaggccaatatccctcatgaagattgatgcaaaaatcctcaataaaatactggcaaaccaaatccagcgacacatcaaaaagcttatcctccacgatcaagtcagcttcatccctcagatgcaaggctggttcaacatacgcaaatcaataaacgtaatccttcacataaacagaaccaatgacaaaaaccacatgattatctcaatagatacakaaaaagccttggataaaattcaacacacttcatgctaaaagcactcaataaactaggtattgatggaatgtatctcaaaataataagagctctttatgacaaaccagcagccgatatcatactgaatgggcaaaagctggaagcattccctttgaaaactggcaaaagacaag

SEQ ID NO: 892703 - DNA, 633 bp, Homo sapiens
gcaatgtagagttcccctagtgatttctattttaaaataaatcagagcatttccaaaagccagagtgcttattttaaaaagagagggcatgaaactaatatagactaaaaaccatgtcttgctttgttgagatattaccatgagccatgcatactaacataatccaattaggggaatcctaagagtagagccatcaatgggaaaaattaaaaatattgcatctatatggaaatmatctatatatttcacctctgaaaaaccatcagagaaataagaaatccattttgcactgacaacacagagtgagatcaaattctccacaagacaccagcatttctgttatgaaaaaagacacccattgttgatggcatgtgtacctcatatgtctccattttgtgtaaaaatcatctgcttttgtatctccttgagcaactctgaaaagaaaatcaagatgtttttctggacagaacaaatgagaagggcaaaagcaaaccagttggtagccagtcttcacttccttaaaaaaaaaaaaaatggcaaaaggacttagcatgtcaacctccacctatccagatggtttgatttatttagtacacgagttccagggaagaacgagcaagaagtatgactaag

SEQ ID NO: 892704 - DNA, 670 bp, Homo sapiens
agcccatccagataccaaggggaggtaaaatggactctacttcttgatgggaagtgggaaagttctggaagaggacaagaggctgaaaatattgttttggccatgaaaataaactactatcattctccaaattgccagcacaccaggactgggaatccctgagatgggcttaggtgatgytcataaaaattgaaattttatgtctcacatcattggaaatgttcagagtagagagacagctctttatcaaggaacactgtgatgcggattcttacaggaattagagagaccaatggatgccttcaacatcctaaggcccatgtgcttgatgcagtgaatcaggctaatgaccagcaccctcggtgctttcaaggagcttcagccactccagagtcttcatttattctggcttgatttcttaattaaacacttggcagctccacagcctgtggagaacatgtgtattcagggttttccatatcagatgaagaggtcaggcacatggaagctcttggggactctactgcagactatgggaacttcaccagtcttgacgggtcagctttttgaagatgacacagtcttatagtcttatatcataaatgaaattgttttgcagttagtggtggattgaagaccatgaagatggaattaacaacggaaaaataaa

SEQ ID NO: 892705 - DNA, 597 bp, Homo sapiens
aagcctctgtatttgaaaatcactttttgttcatagaatcccagaggttagagtaaaaagaaacttcagagggcagttagctctgcccagctcccggatgccaggactgcattcacaaagtatccatgaattggtgactgagaccacgcattagtatctttagagacagggtaggccataaaattatcaatccgcttttcagatgcaactaattattaaaggaattactttttatttattattttattttattttattttattttattttgagacagagtcttgctctgtcacccaggctggagtgcagtggcacaatytcagctcactgcacctccacctcccaggttcaagtgattctcctgcctcagcctcctgagtagctgggactacaggcgcccgccaccatgcctggccaattttttgtatttttagtagaaacattgtttttcaccatgttagccaggatggtctcgatctcttgacctcataatccgcccgcctcggcctcccaaagcgctgggaatacaggcctgagccattgcacccggctagaggaatttcttatgtcaagaagtctgacccattgaatcttcta

SEQ ID NO: 892706 - DNA, 661 bp, Homo sapiens
acgcagactctacaaaagctaaatattagaaaattttatataaagttttgattcactcattctctactattaatttctttatctttgcaatatttctttataaaaggacactcatcaggtattattcaagaagcacagtaccttaactgcaggaacaaatgaacacttgcagacaatgttgtatctaatattcagaattctgagaagcatgatccctttgcagmattgagcctggacaaagtctatttccactccagtgggctgcagtttacactaacaaagagcattactttttgactagctgaggaatgaataaaaaatgaataaattaaatttctctgtctctagtcagaattacaattgagattaacagacttttaagtcagcgagttatttccattactatattaataaatttgtgttttgtctgccaagaatatttcaaggccctgtgagtctcccacagaaaactctttttaaaacttaccactagactctataattgcttctcctcttttctcataaaaatgccattctctcagagccaaacagtcccagttaggtatggacagcaggatgtaggggttggggagtgggtggaagacgctgaatacaccaattttgtgaaattaacttatatgaccattgatctttaattggt

SEQ ID NO: 892707 - DNA, 586 bp, Homo sapiens; identical to SEQ ID NO: 892646

SEQ ID NO: 892708 - DNA, 661 bp, Homo sapiens
acttttcaatttgtcttttaataacatgatagaatctagaaacgttatatttccttccctctcaagcatagcattccaccctacaacatggtttactcaatgaaagcattttatatgaaattccaaaaatatagaaataagatttataatttcacacttagtttgttttgatcagattttttaaatgtttacaatgttttgatamggaaaatcagaagcaaaaccaaaaactatttctgatttaaaaacctgaaatattaagatgtgtcatgtgataaaatttaatgcatgtatgaagaggttttctgaaagaggttttattttcccaattcaatcaatgtttgtccaagataaggacagaaacagcatttcaaggatgttctcaaagatatactaaaaaagatgcaaagactccaacttacaggctgccactgacagagttagctcaattgaaaaagtaatctacttcaagaatatcaatattttataaatccaagacaatagcaaaagacacaaatgtaccttcagtagaagtagtgtgaccatgaaccaactaataactcaaggttaccctttctgccaaggatatgtgtccaatccgtaataatttgccagtccccaaattgtctcatcagtcatctccaattataaatgtatccag

SEQ ID NO: 892709 - DNA, 757 bp, Homo sapiens
gtcacaagtacacaaacaaggaacaaacaatgtagtaagtcttcaacttaccacttgtaactggaatatattgagacactgccttatctcacaccccttttgtatctaaatattaagaatgactgtaaggatttctttttycttttcttttttttttttttttttttttgagacagagtctcactctgtcgcccaggctggagtgcagtggcatgatttcagctcactgcaacctctgcctcctgggttcaggcaatcttcctgcctcagcctcccaagtagctgggattacaggcacccacaaccacacccggctaatttttgtatttttagtagagatggggtttcaccatgttggccaggctgctctcaaactcctgaacccaagtgatccacgcaccttggcctcccaaagtgctgggattacaggcgtgaaccaccacatctagtcaggatttcttcttaaaatgtatttactattcctttcctttcagaaattgttttttatttttttatttgaagaggacaggggagagaactgatgaagattaagatgctcaggtacaattaaaattaaccaatccccaatcacatttacaggaaacgtgaggtgcctgattttttttccattcatcatgattatttaatttagccacataaacaatgtacagcatccttcatcatctcacagatcaaaagcagagcaaaagtacatgtgtcccaaataaccaacaacaaacattatttttcatggaat

SEQ ID NO: 892710 - DNA, 757 bp, Homo sapiens
gtcacaagtacacaaacaaggaacaaacaatgtagtaagtcttcaacttaccacttgtaactggaatatattgagacactgccttatctcacaccccttttgtatctaaatattaagaatgactgtaaggatttctttttccttttcttttttttttttttttttttttgagacagagtctcactctgtcgcccaggctggagtgcagtggcatgatttcagctcactgcaacctctgcctcctgggttcaggcaatcttcctgcctcagcctcccaagtagctgggattacaggcacccacaaccacacccggctaatttttgtatttttagtagagatggggtttcaccatgttggccaggctgctctcaaactcctgaacccaagtgatccaygcaccttggcctcccaaagtgctgggattacaggcgtgaaccaccacatctagtcaggatttcttcttaaaatgtatttactattcctttcctttcagaaattgttttttatttttttatttgaagaggacaggggagagaactgatgaagattaagatgctcaggtacaattaaaattaaccaatccccaatcacatttacaggaaacgtgaggtgcctgattttttttccattcatcatgattatttaatttagccacataaacaatgtacagcatccttcatcatctcacagatcaaaagcagagcaaaagtacatgtgtcccaaataaccaacaacaaacattatttttcatggaat

SEQ ID NO: 892711 - DNA, 655 bp, Homo sapiens; identical to SEQ ID NO: 892644

SEQ ID NO: 892712 - DNA, 689 bp, Homo sapiens
tacttcctttattgattctacgcaattgcctataaagctctcggctgcctttttttgcaaaaactgacaaggtgattctaaaattcatatagaaatgcatgggacccagaatagccaaaataatcttgaaaaagaaaagaaaagctgcataacacacacttcttaatttcaaaacttactacaaagctactatgatcaagactgtatggtacctacataaggatagacatacagattaatttgataaaatgagagtacaggaataaattcttacatttatagtcaactgacttttgacaaagatatcaaaaaattcaattagagaaacaacagccttaacactgatgctgtgacaaatgagtatctacatgcaaaaaagagtaaagtcaaattcytacctcacaccatacacagagattaactcaaaattgatcaaagacctaactgtaagaactaaaactataacattcttagaagaaaatataagcataacatttttattttgattttaggcttctttatatataggcctgagtggaaaagcacaaactgtctttcctttgctctcacaccataacaatcaacatagacaatttctgtgacccagagtgtgggagctccaccttaccagcaagcaagcaatgaatttgccatgggacacaagcggggtgtcctgcaatccgactcaa

SEQ ID NO: 892713 - DNA, 689 bp, Homo sapiens
tacttcctttattgattctacgcaattgcctataaagctctcggctgcctttttttgcaaaaactgacaaggtgattctaaaattcatatagaaatgcatgggacccagaatagccaaaataatcttgaaaaagaaaagaaaagctgcataacacacacttcttaatttcaaaacttactacaaagctactatgatcaagactgtatggtacctacataaggatagacatacagattaatttgataaaatgagagtacaggaataaattcttacatttatagtcaactgacttttgacaaagatatcaaaaaattcaattagagaaacaacagccttaacactgatgctgtgacaaatgagtatctacatgcaaaaaagagtaaagtcaaattcctacmtcacaccatacacagagattaactcaaaattgatcaaagacctaactgtaagaactaaaactataacattcttagaagaaaatataagcataacatttttattttgattttaggcttctttatatataggcctgagtggaaaagcacaaactgtctttcctttgctctcacaccataacaatcaacatagacaatttctgtgacccagagtgtgggagctccaccttaccagcaagcaagcaatgaatttgccatgggacacaagcggggtgtcctgcaatccgactcaa

SEQ ID NO: 892714 - DNA, 627 bp, Homo sapiens
ttcattttttcccttctgaaatttgaactgtatcatttactaaattattgtatagacttagatctatttctggactttctattcaagtgccaataaccactacacctttatgatgttttaacatcaatccagtagtactgtgtccttgttttgcttgyaattttcagactattttttcatagctgttcttgttgcttattattccataatttaatttataaattccaacacaattcccaataaaataccaatattctatttttaattggcaaaactaattctaaagttcattgagctttctttgtaatgagaatacatttctttagtgttggaattggaaattttacttgattcttctttaaatctcttttttcctatattgcattatccaccaccactcccaatcctagtccttgggtttcagttccatcatgtcttaataattttaaacatatttagtgtatattctctttatatcctcattgtaggtatattatctcaaagtctaatattctagaatccagcatcctgatctcactgtttatgattccctgtctcactaattttggctcatatcatcatttggtcattttgattagtaattattaagggtttatttttctgtga

SEQ ID NO: 892715 - DNA, 627 bp, Homo sapiens
ttcattttttcccttctgaaatttgaactgtatcatttactaaattattgtatagacttagatctatttctggactttctattcaagtgccaataaccactacacctttatgatgttttaacatcaatccagtagtactgtgtccttgttttgcttgcaattttcagactattttttcatagctgttcttgttgcttattattccataatttaatttataaattccaacacaattcccaataaaataccaatattctatttttaattggcaaaactaattctaaagttcattgagctttctttgtaatgagaatacatttctttagtgttggaaktggaaattttacttgattcttctttaaatctcttttttcctatattgcattatccaccaccactcccaatcctagtccttgggtttcagttccatcatgtcttaataattttaaacatatttagtgtatattctctttatatcctcattgtaggtatattatctcaaagtctaatattctagaatccagcatcctgatctcactgtttatgattccctgtctcactaattttggctcatatcatcatttggtcattttgattagtaattattaagggtttatttttctgtga

SEQ ID NO: 892716 - DNA, 650 bp, Homo sapiens; identical to SEQ ID NO: 892642

SEQ ID NO: 892717 - DNA, 653 bp, Homo sapiens; identical to SEQ ID NO: 892643

SEQ ID NO: 892718 - DNA, 632 bp, Homo sapiens; identical to SEQ ID NO: 892645

SEQ ID NO: 892719 - DNA, 642 bp, Homo sapiens
tttgactttaaactatagctgatttgctgtaggagatgcttaagacaaccagagatataaattgcctcatctaccgccaagggaaaaatgattgtatcttgtaatatgaacctcaggatagggacgagcttgttggctatatactcctgttaccaacatcagctacaaagaagaaaaatagaattgaggagaagatcatttgttttcagctcattacagggaaaggaaaactacgttagtatatatgattcatayataaagaggaacatatacataaacacacagtgggagagaagcaagctagcatttattaagtcttaatatataccaagagcttcaggtatcttaaacaaccctaagagatttggttatttccatattatgaaggaaagaattgcaaaaacaaaaaaatctgagtttataaacccctcctaaagtccagattttctgtaccatattctattgactttatgtacaatcttacataaattcctcttagaaattctgagatcgttgtatatcacttacctttaatatttcagaatgaaaataaagtcatgaatctctaaacgggacttcagattcatctgcagcctctaccaattgttccctcttctttagtttttcttaccctgtttacaa

SEQ ID NO: 892720 - DNA, 642 bp, Homo sapiens
tttgactttaaactatagctgatttgctgtaggagatgcttaagacaaccagagatataaattgcctcatctaccgccaagggaaaaatgattgtatcttgtaatatgaacctcaggatagggacgagcttgttggctatatactcctgttaccaacatcagctacaaagaagaaaaatagaattgaggagaagatcatttgttttcagctcattacagggaaaggaaaactacgttagtatatatgattcatacataaagaggaacatatacataaacacacagtgggagagaagcaagctagcatttattaagtcttaatatataccaagagcttcaggtatcttaaacaaccctaagagatttggttatttccrtattatgaaggaaagaattgcaaaaacaaaaaaatctgagtttataaacccctcctaaagtccagattttctgtaccatattctattgactttatgtacaatcttacataaattcctcttagaaattctgagatcgttgtatatcacttacctttaatatttcagaatgaaaataaagtcatgaatctctaaacgggacttcagattcatctgcagcctctaccaattgttccctcttctttagtttttcttaccctgtttacaa

SEQ ID NO: 892721 - DNA, 425 bp, Homo sapiens
gaactatatgacttaacaagaggtaggttttcatacaaagaaaagtgagacgaatgaaaggctagaagcaatggaccaagtgcttttgggaagagcggggtagcccggaacacagggtggaagtggaacacaagatggtggagacccagactctggaatacaaagttccaactgtagcatgtctctgagacattcccttatttttcaaagtggcaaaataataactacctccttaggctgytgggatgtttgaaaaagataatacaagcataagtacaaggtctggcatagagtgaaggtgcagtgatgctgacaatggtacagataatgaggaatggttgaaatctccctttttgcttcaacaaaatatatatcactgtacacacatgttcatagcagcactgtttgcaaaaggtggaaacagc

SEQ ID NO: 892722 - DNA, 569 bp, Homo sapiens
aagaggtaggttttcatacaaagaaaagtgagacgaatgaaaggctagaagcaatggaccaagtgcttttgggaagagcggggtagcccggaacacagggtggaagtggaacacaagatggtggagacccagactctggaatacaaagttccaactgtagcatgtctctgagacattcccttatttttcaaagtggcaaaataataactacctccttaggctgttgggatgtttgaaaaagataatacaagcataagtacaaggtctggcatagagtgaaggtgcagtgatgctgacaatggtacagataatgaggaatggttgaaatctccctttttgcttcaacaaaatatatrtcactgtacacacatgttcatagcagcactgtttgcaaaaggtggaaacagcttgaatgtccatcaagaaatggccaataaacaaaccatggtgtatacgtacaaccagaacccaggagtaaagtgctgatgtatgctaccatgtgtatccacctccaaaacatgaagctcagggaaggagccggacacaaaaggccacgtactgtgcaattc

SEQ ID NO: 892723 - DNA, 601 bp, Homo sapiens; identical to SEQ ID NO: 892653

SEQ ID NO: 892724 - DNA, 630 bp, Homo sapiens
taacaactaccagaagagcagacctttattataaataggaattatggaaagaaaatcataccttccaagatgtaaactcaagtttccttcttatagaaaaattccttcaatacacataaactctgactgtttcatgtgcaaaaaatcataccattgtgtgagctcacagatacatctgaccataccttcattattggtaacattttctgctactggggctgcattactggttcccgctgccatgtccaaaagaggttgaatratttcaattttgaacactccatttttttgccaaaggttcagcacacgaactattttactctgttacgcatgagaaacacaaatatacaataaatatttgcataaataaccgattatactcttacaaaaaaaagagaggaaaactccctaggctaatatttccatactatgtgtgtttcataaacaaggaaaaaaaaaaatcagaattacaacctggttaaactaattagtctttcttcagtggtatcatctagagtaaggaacagagatggactatagacccagacaataaaaagaaatttattatttgacattttcattttattttacttatggttacaaataaactatcactgaccccccaaaaaa

SEQ ID NO: 892725 - DNA, 617 bp, Homo sapiens
aacttaaagcttttgagaaagtaggacattttatggcttctccttgcaaagaagattactttagaaaactgaaaaaataactttgaagagaaggatagaaaaatcgggggaccaagcacattattattttctgggatctattatttggtatgttggaaatcaagtacaaagctacgtaaaagaattcttcatattgcaaaaacattaccgcaatactttgtaaaataagggctatagcataagaaaagatcacagtcccacaactcaagcaagacagaccgtctgcattttgaagtcatccctgccattctttgcccacatgtgggtatgctgtatattctyctgctgaacaattttgcagccttagaagggccttcatgggttgggtgtggtggcttacacacttaatcccaacactttgggaggctgaggcaggaggatcgcttgagctcaggggtttgagaccagcctgggcaacatggcaaaaccccatctctaccaaaaaaataaaaaaagtatccaggtgtgacggtgcatgcctgtagtctcacctacttggaaggctgaggtgggaaggtcacctgagccagagagatcaaggctgcagtgagccatga

SEQ ID NO: 892726 - DNA, 636 bp, Homo sapiens
aaatatctcgcttttgcagcttttataaaaacatgtgaacacatttctggaacaccctcctaggccttggaagaggcttgttatagtaaggcacctccaaatttaagtcattagattaaccattaatctggctctgcaaatgccttagtgtatgctgcagacccccccgaccctgaacccaagatgctgcagcttgaaacactagcgctgctgtctctggaaatcagatatggctgctgctgccctagagaakattcttcactatgtctgcttcggtttgtcaccacctttcaattcaaagtctggggagggtgtttggcattggttgagcctaaatcttatgccttcgccctagctgcggggggaggctgggaatgtatctgttaatttgagcttatagagtgaagacaagttctgccttctagtgtggcagccctcaaatcaaagcagaaagtttattgtttgtagttgcattaaaaaaaagcatgaaatgatataaaaggaactgatgaaagtagttacctgtgggggagggtagtgggaggagattaggagccagacttcttaatgtgagcattttcctatcattttgagttttaaaacgtgtgcatatattatctagtcaaaaattaaaaa

SEQ ID NO: 892727 - DNA, 607 bp, Homo sapiens
aaaagaaggtgcaggaattgctttaaaagaaaacaaagagacagaaagtaagacgtgtaatttacaatgtcctgtaaaggttgcctcttgcacacatggactgaatgctgtgactacagaggcacttttcaaactagtacaagaaggaacaagattgcccaatggtgccatcacttagaaaagaaccctttattttacctccacctaattgctgtgcctttgcagtataagagggcttcaagtcttggttcggacggtcagtatgactctgtgccctcagtctccccatctgagaaatgaagattcctgttgtacctgggccagcttcatatgacctgagcaatcactcagggccctgtgttcaaagcattaawctatgcttggtttaatgctctgctattatcatcctggaattcttaataatccttgaacgaggggccccacattttcgttttgcactgggcaagtaaatgacgtagttagcctagttagtacctatctcaaagggttgttgtgagtattaatattttggaaacactttattatttggcacaccagtcatcattcactttaattccagctcccataactgtgttgaaataccaag

SEQ ID NO: 892728 - DNA, 636 bp, Homo sapiens
ttttcctttattccaatgtcacaatctccaaagatatcaggaacctgcatttaagagcacctgtcaaagttctatagctgattatcaaccatcttttgaaaaggaacaatacaagacaacaattatctgtgaatgacaaaatgttcaggctagttacagttaaaaacttgattgacagagaaatttggctacttgtatggtttacaataacttaacataataaccttaattatgattgataacatatactcagacattagaattttagaaatcctawgcaattttggaacatacattaatattattcaccaaaatagaacctgaaaattaaatgttatttttattttggcaatcccatgtaactaaacatgtcaaataatcctgtttacctctcttttggatgttccaggggccctctgtagcatccaaaagttaggggctagaaaagacaaccttgaagctaaagtttgatttttggggaagcctacaaacatgttaaaggtttaaaacatttgatattatgcaatagaattccaggttaccacaagtcatttatttagccaaaataatgatttaaaacatttttaaaaaggcaaaaacctttacatactaagagggaagacttagctttccaaa

SEQ ID NO: 892729 - DNA, 623 bp, Homo sapiens
tttatgctctgcttctcttataaaactgaatgcccttaacagcatccaaatcactcttgaatgctttgctgcttagacatttcttctgtcagataccctaaatcatctctctgaagttcaaagttccacaaatctctagggcaggggcaaaatgctaccagtttctttgcttaaacataacaagagtcacctttgctccagttcccaacaaatttctcatctccatttgagaccacctcagcctggattttattgtccatattgctatcagcattttgggcaaagcccttcaacaagtctctaggaagttccaaactttcccacattttcctrtcttcttctgagccctccaaactgttccaatctctccctgttacccaggtccaaactcacttccacatttttgggtatcttttcagcaatgccccactctacttgtaccaatttactgtattagtccatttccacactgcttataaagacatacccaagactgagaagaaaaagagatttaattggacttacagttccacatggctggggaggcctcagaatcatggaggaaggcaaaaggcacttcttacatggcggcagcaagagaaaattaggaagaagcaaaagcg

SEQ ID NO: 892730 - DNA, 623 bp, Homo sapiens
tttatgctctgcttctcttataaaactgaatgcccttaacagcatccaaatcactcttgaatgctttgctgcttagacatttcttctgtcagataccctaaatcatctctctgaagttcaaagttccacaaatctctagggcaggggcaaaatgctaccagtttctttgcttaaacataacaagagtcacctttgctccagttcccaacaaatttctcatctccatttgagaccacctcagcctggattttattgtccatattgctatcagcattttgggcaaagcccttcaacaagtctctaggaagttccaaactttcccacattttcctgtcttcttctgagccctccaaactgttccaatctctccctgttacccaggtccaaactcacttccacatttttgggtatcttttcagcaatgcyccactctacttgtaccaatttactgtattagtccatttccacactgcttataaagacatacccaagactgagaagaaaaagagatttaattggacttacagttccacatggctggggaggcctcagaatcatggaggaaggcaaaaggcacttcttacatggcggcagcaagagaaaattaggaagaagcaaaagcg

SEQ ID NO: 892731 - DNA, 586 bp, Homo sapiens
tactatggcaatgatggaggaattctgcaagtgcgggaatagtggtactgatcaaagcattatgaataggcatgttagtccattttgtgttgctataaaggaatacttgaggctgggtaatttatttttaaaaagaggtttatttggcttatggttttgcagactgtacaagaggcatggcaccagcatctgcttctggtgaggcctcaggaagcttttactcrtggtagaaggtggaaagtgagccagtgtgtcacaggctgggaaagggtgggggggtgagagagagagagagagagggagagagagaatgatgctaggctcttttaaacaatcagatctcacgtgaactaaaagagcaagagtgcactccttacctcagggagggcaccaaaccattcatgaggatctgcctcgtgaccaaaacacgtcccactaggccccaccttcaacattgagatcacattttaacatgagatttggaggggacaaacatccaaactatatcaatagggaaggcaaatctgtatcagagatatatctatctctgtgaagaataagttctaccaccttcatgatggaaggg

SEQ ID NO: 892732 - DNA, 529 bp, Homo sapiens
tcagtgcatgaaattacaatgctataatcctgggacttgccattcactttcaccttgaatttctttatctctaactttaattgtcttgtacttgctgtattgtttcaaaccatcttaaatccttccaataactaggaatgggatacatactgtgttagtcccctatggctgcaataatgaagtaccagaaactaggtggcttagaacaacagaaatcttatcccacagttctggaggccagagtctgagattgaggtgtcagcagggccacacttcctctgaaactggcaggggaaaatgtttccaggtggactggttaatcatctctgcttaaggaaaaggagacagaagcccccaggggtgtgawcttcctaaggtgacatagcaggtcatttgcaaaatggggatggggtaacattaagtgaaaagagtaaaattatcaagtgaaaaaaagtatactgactgggcactgtggtttacgcctgtaatcccagcactttgggaagccgaggcagatggctcacttgag

SEQ ID NO: 892733 - DNA, 609 bp, Homo sapiens
tcccccactgcttcagggcattcacagctaaaggtatacttggtcagagcagctaaaggtatacttccaaagtgaatcaatagcagtaggaaaacgtagttcctagcatttaagatagtggttcctcagtgtgacagagattgcygggtttttaccccaatattcattctcctctatttttaccattctatttcctaatgggctccaattggtggcacctggccatgcatctaaagactacacttcccagccttacttggctttaggtgtcgccatgtgactaagcactggccaatgggatgtgagtagaagtgatacacgcagcctctgggccctaccttaagagaaggtggtgtgccctctacttccccctcttcccactgttgactggaatgcatacatgatggtgggagtcacagcagccatcagcacaagagaggaaaggcaacacaggatggatgccaatgcaacaagataaaaagacactgtggagccactgtctgggctgagggatgctccatacaggctgttacatgacagagaaatgttggcacagctgttaagctgacatgagggttcgtggctaagtgatctatcaataaaaatact

SEQ ID NO: 892734 - DNA, 610 bp, Homo sapiens
accctctgatccaggaattctacttctgggaccatatgctactgagctattccttcaaagtgtgcaagaacatatgtacaagggggttgattatattattcccaaaaatgaaacatgataacctaagtttccatcaatagagcactgtttgaataacttacagtgcatcggttaaaaagaatgatgggagccatatgtataacatgccctataactacatctatatctgtatgtttctatataaaattrtctagaagaggctgggcacagtggctcacacctataatcacagcactttgggaggccaaagtggtcagatcattggagcccaggagttccagaccagcctgggcaacgtggtaaaaccccatctctacaaaaaatacaaaaattagccaggcacggtggagcatgcctgtagtcccagctacttgggaggctgaggtgggaggatcacctgagcccaggaggtcgaggctgcagtgaaccatgattgtgccactgcagtctagcctggacaatggagtgagaacctgtgtcaaaaaagtaaaaataaaaatagaattatctagaagaatgcatgccatgccatccagaagatgaaaagagg

SEQ ID NO: 892735 - DNA, 504 bp, Homo sapiens; identical to SEQ ID NO: 892453

SEQ ID NO: 892736 - DNA, 633 bp, Homo sapiens
ccctgcctgggatcccacagctggcctgatcttgggctgcttttctttccacataaaggtgatgatcagacccacggcccaaagctctgcccgtggggacactttctccctggttggggctgaagtgcagcagcgggccactttcggtgtgtgcccacataccatgctaaccttgccatgaaaccaggccggcctttcctcctacttctgctaggcataattacccatccccctttatggtcatcatgtgagcagacacagacacggtgcgacaggggtagaggggacaggagtccgagccacctgcatgtggccaacatgcaccctctgaccccatctcaggacctactgggtctcaggcctcatgatggtcacttctgggcagcaccatcacctcgcgtccctcgtcagaagctctgtctctgccgggaccccatagcgtcccaggagctgctttttcaaacagagtayaattatctgctgcagatggccccgcctgaccccagaactctcgtatctatgttgtgactttcctcttgggatttgccataaactccacccagcatcttttcccaccccagacacttcaaggatatgcgaagtcacacattccccaggttggattcacaggcc

SEQ ID NO: 892737 - DNA, 516 bp, Homo sapiens
actctctctctactaagaatataaaaattagccaggcatggtggcaggcgcctgtgatcccagctactcgggaggctgaggctgtaaaatccctttaaccctagaggtgcaggctgcagtgagcagagatcgggccactgtacttgyagcctggtcaacgagggagactctgtctcaaaaaaaacagaaaaggaaaatgaggataaaatacgataaattctttaccttggcccccagaagtgaattcagaattcagaaaagactagccagtgtaaggctgctgtaaccctagttgacagagaggagggattggggtggtgagtgggaaggctgtgtctccggaagaagaaatatacgtccccacctcactctaattaaacctgcttttccagcgcgataaatattcaagataacttttggtttgcatttcaataacaaagtcttgcaccactatcttcagtttaaaaaaaaagtttaatgtttgctctacgtttgaaatgcatgcaggtttaaaag

SEQ ID NO: 892738 - DNA, 515 bp, Homo sapiens
actctctctctactaagaatataaaaattagccaggcatggtggcaggcgcctgtgatcccagctactcgggaggctgaggctgtaaaatccctttaaccctagaggtgcaggctgcagtgagcagagatcgggccactgtacttgyagcctggtcaacgagggagactctgtctcaaaaaaaacagaaaaggaaaatgaggataaaatacgataaattctttaccttggcccccagaagtgaattcagaattcagaaaagactagccagtgtaaggctgctgtaaccctagttgacagagaggagggattggggtggtgagtgggaaggctgtgtctccggaagaagaaatatacgtccccacctcactctaattaaacctgcttttccagcgcgataaatattcaagataacttttggtttgcatttcaataacaaagtcttgcaccactatcttcagtttaaaaaaaaagtttaatgtttgctctacgtttgaaatgcatgcaggtttaaaa

SEQ ID NO: 892739 - DNA, 623 bp, Homo sapiens
ttgggcatctaataataagctgttcaaaattaacatagccaaagcagaattcttttttttttttttttaagacagagtctcacttatcacctaggctggagtgcagtggcatgatctcggctcactgcaagcctcgcctccctggttcaagggattttcttgcctcaacctcccgagtacctgggattacagttgtgtgccaccatgtccagctaatttttatatttttagtagagacagggtttcgccctgttggccaggctggtcccaaacatctggcatcaagtgatccacccgcctaggcctcccaaagtgctgggattacagacttgagccaccgcacccagcccaaaacggaattcttgatgctgtccccaccctaatgcgcacaccccagtcctttctcgtcttagtaaatagcgctgtcaaacacccatttaggcaggccagaaacttcaaaggtgtctttgattccgcycttccaccactttatatctactccatcatgaagtcttgtagactttctgtccagaatatatcctgagtctgaccactcctaatcatttccactgttaaaacattaggccaccactgtctctcatgtgggtgttattgtggtcttc

SEQ ID NO: 892740 - DNA, 572 bp, Homo sapiens; identical to SEQ ID NO: 892320

SEQ ID NO: 892741 - DNA, 629 bp, Homo sapiens; identical to SEQ ID NO: 892603

SEQ ID NO: 892742 - DNA, 666 bp, Homo sapiens; identical to SEQ ID NO: 892573

SEQ ID NO: 892743 - DNA, 666 bp, Homo sapiens; identical to SEQ ID NO: 892574

SEQ ID NO: 892744 - DNA, 681 bp, Homo sapiens; identical to SEQ ID NO: 892321

SEQ ID NO: 892745 - DNA, 617 bp, Homo sapiens; identical to SEQ ID NO: 892322

SEQ ID NO: 892746 - DNA, 640 bp, Homo sapiens; identical to SEQ ID NO: 892577

SEQ ID NO: 892747 - DNA, 651 bp, Homo sapiens; identical to SEQ ID NO: 892325

SEQ ID NO: 892748 - DNA, 596 bp, Homo sapiens; identical to SEQ ID NO: 892323

SEQ ID NO: 892749 - DNA, 598 bp, Homo sapiens; identical to SEQ ID NO: 892324

SEQ ID NO: 892750 - DNA, 649 bp, Homo sapiens
cagggtatactgtaacaagggagtcgtcaccatcacttacattttggtagagactccaaggcaagagtgggaaagtttgacagtgatgttaaccaaaaactgacagaggcaggtgtctcaattgatagcggtttatttcgccaaggctgagaatgtgcctgggaaaaactcgagtcacaggaacatctatgacctgtgctttccaaagagggttttgggaattcagtgtcgaaaaggcaaagaacagacaggagggaaaaaagcgagggagggtgggcagtgaggcaaatggtaacattattgtgaggttctgattaacgctcagtaaattggcattttacataaaataaagcaaacacgtgaaaagaggaagtatggggaaaagtcaatgatgcatttatctcagggtggatgaagggatgatttctggtcttgtccttgtcctcttacctgtgaagataarcttgtaattgacattgttagggtgagattgaacagaactcagtttcggggctagcttataggggggatatgtatcctataagatttagggctcacacagaatttccttgtgagcaatttgtgaagaaggccatctggggagatatgtggcctcctatctttgtgggaacctggcttatgtatgacg

SEQ ID NO: 892751 - DNA, 549 bp, Homo sapiens
actgcactccagcttgggcaacaagagcaaaactccttttcaaaaaaaaaaaaaagtggaaagcataaccttgcttgatggtgaggttgaatccccaccttcgcctttctcagatttattcccatcttcctactcctccaacccctatgttrgctcaagcccagatggctctcacctgcattaacctaaccatctcgtaacccatctcctctctttgttcctttcctatgcaccctccacatggccagctgccagaggatctttcaaaatgactaatcttactattcttctcctctacaaagcttcagaggcttccagtctggactccttaacaacacataaaaaattcctcttctgttcttcctctggctggtggctctcaaccttggctgcacttgaggatcctggggagctttaaaaactgccctgctctggtttagtcagtctgggctgggtcccaggtgtctagagttttagttttgtttcccaggacctggtgactccttgaactatttgcagattcctgaacccctgtcggagagtaagctg

SEQ ID NO: 892752 - DNA, 643 bp, Homo sapiens
tgcatagcaaagactctgtgtatgtgaagccagattttaaaatatggtaacaagtgtctgaaaatatgtggctcaatttgtctcccggttacttttccctctccccctttaaaatgtagaggaaggagaagaagagataagaggtttgtgagtgaagacaagggccctttaaggcctgggaagactaacgccatagggatctccctctgccttaaaaggcacaggaatcttagtggggaaaaagaagtggtgataaatagccagtccgtgtgcctggaatatcaaagtcagtgcgtgccagggatcacactgcgggtcacgtgcactctgggtctctctctgcaaacctgccctgcctcagtctgggaatatgcaactgcctaagaagggtctggcttacacaggggccrtgagacgtggcaggcatagctgggctgctactggtcatgaatcctggacacggcaggcaaggtgtggtgtccatatgcattattcgggtggggcaaagatcacagctctcactagactttcagaggactttgtaacccaaagaaccactcatctcaaggactgtggtaactcaggggctgagccatgccagtgtttattatgtgaaacaaggactggaacctcacaagaccaa

SEQ ID NO: 892753 - DNA, 569 bp, Homo sapiens
tactggtttcacagaatgatttaaggatgagtccctctttctctatcttttggaatagtttcagtaagattggtaccaattctttgaatagctgatagaatttagctgtgaatccatctggtcctggacttttttttttgttgggaatttttgtattattgtttttatcttgctacttgttattggtctgttcaaagtttctgtttattcctgatttaatataggagggttgtatatttccaggaatttatccattcttctasattttctagtttgtgtgtgtaaaggtattcatagtagccttgcatgatcttttgtatttctgtggtgtcagttgtaatagcttctgttttgtttctaattgagcttatttggatcttctctctccttttcttggttaatctcgctaatggtctatcaattttgtttatcttttcaaagaatcatcttttttgtttcacttatctttttgttaatgttgttgtttacatttcatttagttctgctatgatctttgttatttcttttcttctgctgggtttgagtttagtttgttcttgtttctctag

SEQ ID NO: 892754 - DNA, 620 bp, Homo sapiens
aataacaaaattaaatatacactaaccacccgtccttaatcgcttcatgtaaatctgtggcattagaaactgaaaacaaaaattatctgagggtcatgttttgctatgcatttaatggatattacttctgcctgctccaagggcaatgttcagtttccacaaacagtgtagtttattatgaaaaataatttataaatcattcttgtttaaaacaaaatttttttaggagaattagtaacagaatttcaaaraagttgaataatttctaaagattaagatttcaacttcactcttttaatgtatttaaggtaataatcacttactttggtgattatttataacattaacagctctaagaggcctttaagggccattttgttatacaaaaaagaaacacatttataagcattcttagaataatgctaatgtcattagctacagaagcagcacatgctaagatatcagctttaattttaaattcatattagaccttaataaaataagtcaaggatgcattttgtaatatctagaataaccactaaaagaacagtaatgtctaacaggcaagttagtagagggggaaaatgaaacaatttttaaaaatacataattcaggccag

SEQ ID NO: 892755 - DNA, 625 bp, Homo sapiens
tgtggactcttacttcttcctgactttttgatgttctcttttgtcaatgtgaccaaccaattttgaatcagagctactggcatctttagaatgacatgtatggtggctcagaactgtaccctttaaaactcagctccagtaaagggagattctgagcattttaagatgttggaaattgagttgcatcctgcattaaaggcatttcttctttatataaactgtaggattctgttaagacagaaatggggagagctaatgggctattctgaaagaactacccattaaatkgtaaagtacggtatgttttaaagtgacaaacccaagagctgaaaatgactctttgatctttaaaaggctcataaacggtggcagcgtactcacagacctatatttatgtattcaaatattgggaggaaatccaagtagagtctcaagactgcgggactttgcaatttagacaaaaagaggccagggaggagggcaattaaatcaaactttttacagcataaagcaagctttcttccctccttgttaatcaatgaactagaatcttggtaagggcttgctttttaagtggggtttgagccaatctttacacagatgtgaggtatttgtgaagaaagaa

SEQ ID NO: 892756 - DNA, 575 bp, Homo sapiens
agaccttttctctcttcgagcaaaccaatttccttctgtgattactgcttggatagaaaggactctgttgtgtggtgtggggagttcaggaggatggtgggcactgagccattaccaagtttgcacttgttgccttctggccaaggacccagaatgtttattcaaaggagcaatttttaaataagacactgacaccagtatctggtctaagagaagagcaagagagaatagtgggagacctggaggaaaccaggtgttcctccagccagggaagctgtagaatccttgtcgtggactcctttctgtcacctccaccaactgagtgagtagctcagactggaggccsctcaccaagcctgtgggaccaagtgtcacctgaaggcaggggttctgcataacaggccaccaggctaccagctgagcaatcttggactagccacaaaatctctgattgtcaaggcctccgcctgcataatagatctattaacaaaaatatctgcgatggccagtgtttggatatattagcacacaggaagatagtgctccaaaagtgcttggtaacaagagcctggtgc

SEQ ID NO: 892757 - DNA, 643 bp, Homo sapiens
ggaaataaaaacaatgtaccaaaacttatgggacccagcaaaagcagtgctaaagaagcaatttatagctataaatgcttacattaaaaaccaagaaggacctcaaattaacaaactaacattacaacttaagaaactaaaaaagaagaacaaactaaacccaaagttagcagaagtaaggattagtgcagaaatagatgagagacaatagaaaaacagagaaaatcaagaaagccaaaaatggtttctttgaaaagatcaacaaaattgacattttagctagatggaccaagaaaaaaagaagacagattactaaaatcagaaataaaattggaaacgttaccaattctacagtaataaaaagcattaaaaaatactatgcacaattgtatgccaacaaatggaaaaacctagaatagacaagttcctaaaaacacaaaacatatcaagactaatcatgaagaaatagaaaatctgagtagacytataactagtaaggagattgatttaagtaataaaagatctattgacaaaaacctgatggcttcattggtgaattctaccaaacatttaaataactaacactaatcctttttaaactttttcagaaagttgagggaaaactttcaaacttactctatga

SEQ ID NO: 892758 - DNA, 588 bp, Homo sapiens
ttttgaagagcagacatttttaattttgattaagtctaacttacccgtcttttattttatagagtgtgcttttgctgtcgtatctaagaaatctttacctaacccaaggtcacaaagactgcctccattttttttcttckagaagttttatagttctaaattttacatttgtgttcatgatccattttgagtttttttttatatggtgcaaggtctggattgactctttttcattttttattgcatatgaacgtccagttactccagtatcaagatcattcttttttactgaatagccttttgcatctttgtcagcctgctaggattttaattggaattatgctgactctatagatcattttggggataattgacatcttaatgatatggaaacttctaatctatgaacagtttctctcagcaatgtgttctcattttcaatgtgcgggtatcagaggcatttgaaccagagtgactccattttgaataaggactgggtgaaataagactgagacctacaggactgctttcccagaaggttaggcgttcatagtcacaagatgagataggaggtccgcacaagatgca

SEQ ID NO: 892759 - DNA, 588 bp, Homo sapiens
ttttgaagagcagacatttttaattttgattaagtctaacttacccgtcttttattttatagagtgtgcttttgctgtcgtatctaagaaatctttacctaacccaaggtcacaaagactgcctccattttttttcttctagaagttttatagttctaaattttacatttgtgttcatgatccattttgagtttttttttatatggtgcaaggtctggattgactctttttcattttttattgcatatgaacgtccagttactccagtatcaagatcattcttttttactgaatagccttttgcatctttgtcagcctgctaggattttaattggaattaygctgactctatagatcattttggggataattgacatcttaatgatatggaaacttctaatctatgaacagtttctctcagcaatgtgttctcattttcaatgtgcgggtatcagaggcatttgaaccagagtgactccattttgaataaggactgggtgaaataagactgagacctacaggactgctttcccagaaggttaggcgttcatagtcacaagatgagataggaggtccgcacaagatgca

SEQ ID NO: 892760 - DNA, 612 bp, Homo sapiens
tggtgcgatcttggctcaccgcaagctccgcctctcgggttcacgccattctcctgcctcagcctcccgagtagctgggactacaggcgcccgccacaacacccgtctaatttttttgtatttttaatagagacggggtttcaccgtgttagccaggatggtcttgatctcctgacttcatgatccacccgcctcggcctcccaaagtgctgggattacaggcgtaagccaccgtgcctggccttctttttgctttttttgagatggagtgtagctctgttgtccaggctggagtgcagtggtgcaatctcagctcactgcaacctccacctcccaagtccaarcaattctcctgcctcagcctcctgagtagctggggactacaggtgcacaccgtcatgccccgataatttttatatttttagtagagatgggttttcaccatgttggccaggctggtctcaaactgctgacctcaggtgatcttcccgcctcagcctcccaaagtgctgggattacaagtgtaagccacagcacccagcaaaaagtagatttcaaatgttctcactacagaaaaatgatacacttgtgatgttattgatatgttaatta

SEQ ID NO: 892761 - DNA, 632 bp, Homo sapiens
gagggatggtgagggttcctggaatgttgcttcagttacctgaatgcgtagatatgctctggataacgatggaagatctacttcttgctggaagtttggatggaaaatcttttggaaagtgctgtcctggaacacctggcccagctgtcaratcccctctggtatttccccagcggctgatctgctgtcacgtttgaagccaccctttgccttaggtcctccatatccctgtccacgcccccgggtgtgtccctgggggcagtgccatctgatggcttgtccagcgctgtgaggctctccccagcttccctaaagttgagtttcatcctggagctgggccatctcacacatccccttggcatctgccagccatggttgtgggatgctgtaacagacagacagagagacaaacagaagacttcacattatctcatagagatcacgagagccatagtgagctcaggctccatggactgatgctcagatcccagtgtcccatgaacactgagagtcccctcagcgccaaaggctgcatgccagacagctcccgatcctcggggagatgggcaaggtgctgagcagtaatgggatgtggacaccctaagaaacactgatgcaggtagaggggaagc

SEQ ID NO: 892762 - DNA, 588 bp, Homo sapiens
gtttgtttgtttgtttttgagactgagtttcactcttgtcacccaggctggagtgcaatggcagaatctcggctcactgcaacctcctcctcccaggttcaagtggttctcctgcctcagcctccagagtagctgggattacaggcacataccaccatgcccggctaattattgtatttttagtagagacaagggtttcaccatgttggccaggctgttcttgaactcctgacctcaggtgatccaytcgcctcagcctcccaaagtgctgggattacagatgtgagccactgcgtccagccgaaataaaacttttattagcataaaatagccctatttattccagatgacaccttttaccttgaagtttcttttgtctgatatctatataactacaccagttttcctttgagtaggaatttcacggtatctttttccatctgtttactttcatagccattctctaacctagcccaccactcctgcacacgggagctcttctctaaaagacttacctgtgcccttatcgtgcaagagtcatgtttgttttccttgcatttccaacagtttagtcgcatctctatgatg

SEQ ID NO: 892763 - DNA, 549 bp, Homo sapiens
cgcccggcttgatttgtatttttaaacaatctctctggtttctgagtgagaatagactgaagcggccgagggaagctggggaaactgatcacaattctcagctgggagctgatagagcccagaggggagatggcggtggcctggttggggacggcagcagtggagatgataatggctgggttttggatatattttaagtagagccatcaggatttgtgaaaggatcagatgcrgatgtggaagaaagaaaaatatcaagcctgactcctgggccatcgacagtgggaggtgccatttcctgggatgaggaagaccacaagagaagctggggtggggctggggtttggggggatcactgtacctccatggccttctcgaagcctcacactgagtgtcttgtgaaaccagtcctcgctccctgctttggttcacttcctctttatgcttccccctggcctggcttgcctcctcttcgtgtctggtttctgtggatgttcagcccgacggccactccctggcactgccagtccatctctctcccctcccctc

SEQ ID NO: 892764 - DNA, 549 bp, Homo sapiens
cgcccggcttgatttgtatttttaaacaatctctctggtttctgagtgagaatagactgaagcggccgagggaagctggggaaactgatcacaattctcagctgggagctgatagagcccagaggggagatggcggtggcctggttggggacggcagcagtggagatgataatggctgggttttggatatattttaagtagagccatcaggatttgtgaaaggatcagatgcggatgtggaagaaagaaaaatatcaagcctgactcctgggccatcgacagtgggaggtgccatttcctgggatgaggaagaccacaagagaagctggggtggggctggggtttgggggratcactgtacctccatggccttctcgaagcctcacactgagtgtcttgtgaaaccagtcctcgctccctgctttggttcacttcctctttatgcttccccctggcctggcttgcctcctcttcgtgtctggtttctgtggatgttcagcccgacggccactccctggcactgccagtccatctctctcccctcccctc

SEQ ID NO: 892765 - DNA, 549 bp, Homo sapiens
cgcccggcttgatttgtatttttaaacaatctctctggtttctgagtgagaatagactgaagcggccgagggaagctggggaaactgatcacaattctcagctgggagctgatagagcccagaggggagatggcggtggcctggttggggacggcagcagtggagatgataatggctgggttttggatatattttaagtagagccatcaggatttgtgaaaggatcagatgcggatgtggaagaaagaaaaatatcaagcctgactcctgggccatcgacagtgggaggtgccatttcctgggatgaggaagaccacaagagaagctggggtggggctggggtttggggggatcactgtacctccatggccttctcgaagcctcacactgagtgtcttgtgaraccagtcctcgctccctgctttggttcacttcctctttatgcttccccctggcctggcttgcctcctcttcgtgtctggtttctgtggatgttcagcccgacggccactccctggcactgccagtccatctctctcccctcccctc

SEQ ID NO: 892766 - DNA, 604 bp, Homo sapiens
gtggcacatgactgtagtcccagctactcaggaggataaggcagaaaaatcacttgcacccaggaggcagaggtagaagtgagcagagatcacatcactgcaccccagtatggtgacagagtgagactccatctcaaaaaacaaaaaagaaaagaaaaaaatagaaatcacaaatttatatcagtcttgttaaatctaactaatcagctgtcaacataaagattctagaaagtaaagaacatacaaataagtagaaaggcatcccayattcatggataggaagactgagcctgactaacacacaatactacacaaataatctacagattaacaactgctatcaaactggtaacagccatgtgtgcagaaatggaaaagataatcctcagactttaatgaattttcatttgcctcaaataaacttggtaatgttggaaaagaatagtgttggtggatgcacattcatgagattgaaatctacaaaaaacagaaattcagacagcatgcttctagcttgggggcacccataagtatcacagatgtagaatagagagcccagaattaaatgcacacatacagagtcagctgatcttcaatgaaggta

SEQ ID NO: 892767 - DNA, 641 bp, Homo sapiens
gccactaaacggctcttacagaaatccccaacagaaatccccaactgctgctggggggccaaatccaagtgacccatttccttcttctccctttgatccctgtcacgttggttcccaccctcccctggttttcccctggcctccagacccccagcgctgatgcccctcttcccggccccctgactgccttgaccctgggcccagccaatacagattcatgatcatttcccccctcctcccttctgacttgggtcacccatggggccctttccctgaccatcccaaggggccctgaatcaggactgatcacattgctcagcagacgctgagtccccgagggcagccccagcatctcactcctcacacacgtccccaaggctgagtttagaacatgggatgcaatcatcgagtgcacattyattaagcaccgactgtgtgtcaggacgtgtcctaagttttctgtatgtattaagagtactcattttaatccatctgcatatcctcctgtctgtcctcccgcccaagaaaactgaggatcagaggggttacaaaacttatgcaagatgacactagtatcgtatggaatagctgggatttgagtcctagtctggtctgttgccatagcacatgggcataactgt

SEQ ID NO: 892768 - DNA, 630 bp, Homo sapiens
cagatatttggtcaaatattattctgatgtttctgtggcattattttgtgggtgggattaacatttaaattttacatttcacaaacttgtgaaaattaaacaacagtcttttttttgagacagggtctcactctgttgcccaggctggaatgtaatggtgcaatcatagctcactgcagcctcaacctccagggctcaaggaatccctcccacctcagcctcccaaagggctgggatttaagttaccartttccctctatgtgctgatttatctgtatcctacaaatttttatgtggtggtctcatcattgttcagtttaaaatgttacctaattttgtttcttgagttccccaactgttggcttattcagcagtttcttttctctctttcttttttttcctctctctctccttcctttcccttctttctctccttccttccctcctttctgttttagagacagggtcttgctgtgtcagccaagctggagtgcagtggtgcaatcagggctgactgcagcctccaactcttaggctcaagcgatcttcccacttcagcctccgaagtagctggaactagaggaacatgccaccacacctggctaaattgtgttacatgttttgttgaga

SEQ ID NO: 892769 - DNA, 609 bp, Homo sapiens
ataactgtgatggtgacaaaactttgttaatatactaaaaaccactgaattggctttaaaccaattgaattttaaagtatactttgaaagggtggatattatggtatgggaattatatctgataatgaaaatatgattacattgttcaaaagcatagggaagcagctacaaaaaatatgaakcataaattgtggctctttttattctgaagtgtagaaattgaatattatagctcaaaatataaaacaaaaacaaagaaagctaaaagcccttccatttggccatcttggagtaagacctaccacagtccagtgccttttactcagccccacagcctagcctattgtttacatgaaaccctgtagcttccactcctgtttggtgggtgtaaagttatgagtgaccatattgggggaagggaggaaaactccccataaacgtgtatcctgggggcctaaggagagacgatggcccaggtatcagaacatgatatgcctacttgtccctatctccttgtccacacataaggcttggaaggcagccatgttgtatatcacgtgatctccaaccaatgagctgattggcttcttcaacaagagcccaggtaga

SEQ ID NO: 892770 - DNA, 609 bp, Homo sapiens
ataactgtgatggtgacaaaactttgttaatatactaaaaaccactgaattggctttaaaccaattgaattttaaagtatactttgaaagggtggatattatggtatgggaattatatctgataatgaaaatatgattacattgttcaaaagcatagggaagcagctacaaaaaatatgaatcataaattgtggctctttttattctgaagtgtagaaattgaatattatagctcaaaatataaaacaaaaacaaagaaagctaaaagcccttccatttggccatcttggagtaagacctaccacagtccagtgccttttactcagccccacagcctagcctattgtttacatgaaaccctgtagcttccactcctgtttggtgggtgtaaagttatgagtgaccatattgggggaagggaggaaaactccccataaacgtgtatcctgggggcctraggagagacgatggcccaggtatcagaacatgatatgcctacttgtccctatctccttgtccacacataaggcttggaaggcagccatgttgtatatcacgtgatctccaaccaatgagctgattggcttcttcaacaagagcccaggtaga

SEQ ID NO: 892771 - DNA, 634 bp, Homo sapiens
ctctacctgggctcttgttgaagaagccaatcagctcattggttggaggtcacatgatataaaacatggccatcttccaagccctatgtgtggacaacgagatagggacaagtaggcatatcacgttctgatacctggacccacatctgtcgctgggcccacgtctgtcctcaggcccccaggatatacttttatggggagttttcctcccttcccccaatgtggtcactcataactttacacccaacagtcaaacaggagtggaagctacagagtttcacgcaaacaataggctaggctgtgggactgagtaaaaggcactggactgtggtaggtcttactccaagatggccaaatggaagggcttttagctttctttgtttttgttttatatcctgagacaaaatgttcaatttctacactttagaataaaaagagccatattttatgtttcatattttttgtrtgcttcctttcatactcttttgaacaatgcaatcatattttcattatgaggtataattcacataccataatatccgctctttcaaaatatactttaaaattcaattggtttaaagccaattcattggtttttagtatattaacaaagttttgtcaccatcacaattat

SEQ ID NO: 892772 - DNA, 651 bp, Homo sapiens
gaatggataaacaacctgtggtatataatacaatggaataccattcttccttaaaaaggaaggaaattcttacacatgctacaacacgatgcacactgaagacattgtgctaaatgaaacaagccatatacaaaagggctaatactacatgattctaattatatggaatacctagagttagtaatatttatagagacaaaaagtagaatgatggttgccaggggctgggggagggaaaaaagaaagggggtgggtacacagtttagttttacaaaatgaaaaaagtactggagatggatggtggtgatggtagcacaatcatatgartatacttaatgccactgaaccgtataattaaagatggttaaaatgattttttatgtatatttaccatgataataaaactccactgcaaaaagaaaaaaaagaaagattgagataagaccagatagaaaaccagcaagggaatagaagacttgaatagtactgtataccaaccagacctaaagacattatacaacactgcacccaataatagcagaatacacattcttctctcaggtgcacatggaagattgcaggttaggccatatgttaggtcataaaactagtctcattaaatttaaaaagactgaaattggccagatgtgg

SEQ ID NO: 892773 - DNA, 651 bp, Homo sapiens
gaatggataaacaacctgtggtatataatacaatggaataccattcttccttaaaaaggaaggaaattcttacacatgctacaacacgatgcacactgaagacattgtgctaaatgaaacaagccatatacaaaagggctaatactacatgattctaattatatggaatacctagagttagtaatatttatagagacaaaaagtagaatgatggttgccaggggctgggggagggaaaaaagaaagggggtgggtacacagtttagttttacaaaatgaaaaaagtactggagatggatggtggtgatggtagcacaatcatatgagtatacttaatgccactgaaccgtataattaaagatggttaaaatgattttttatgtatatttaccatgataataaaactccactgcaaaaagaaaaaaaagaaagattgagakaagaccagatagaaaaccagcaagggaatagaagacttgaatagtactgtataccaaccagacctaaagacattatacaacactgcacccaataatagcagaatacacattcttctctcaggtgcacatggaagattgcaggttaggccatatgttaggtcataaaactagtctcattaaatttaaaaagactgaaattggccagatgtgg

SEQ ID NO: 892774 - DNA, 577 bp, Homo sapiens
ggtgaatgaatgaacagagagagagagcagccactcctcccttgctttaatttacaaagcactgggatcctcccaacagcctgcaagacagaacttctgggaagcagaccaggtggctggcagggaggggaggcttgccctggcttttgtgggcccagtgggaggcagggagcaggaaggggcatcctgtatgtgtcctctgcagcagcagcagcggaggcctcccttgggctgggcttcctggaagagggtcaggaaacacccgctgtggcccctctccaccacgccctcatccaggacaccaagtatcagtcactcagctcacgagacccaggccctgactcakggagagaggatgtgaggggtggggcaccgggctcctcaggactgagagacccgagatgtggccccaggctgggtgttggggcagactggctatggcagcattgtgtgtaccccagcaggccagtacccacgcagggagcctccaaaccccttcacccatgaccctgggagaagaccgcagccttggagaattggcctcactgaaggggcctgcaccggccagcagggtcag

SEQ ID NO: 892775 - DNA, 585 bp, Homo sapiens
cttctgctggggcaatctgagaaaacttaaaaaaaaaatctcagtgactatcactaatgttatctttcaagctgacatccatgatcttattttttattttattttttgagatggaatttcactcttgttgcccaggctggagtgcaatggygcaatctcggctcactgtaacatccgcctcccaggttcagtgattctcctgcctcagcctcctgagtagctgggattacaggcatgcgccaccatgcccggctaattttgtattcttaatagagatggggtttctgccatgttggccaggctggtcttgaactcccaaccacaggtgatccacccatctcggcctcccaaactgctgggattacaggcatgagccagcacgcccggccatcatccataatcttaatttcatccacagagaaaggtagagagcagcaaggggaattgagacatgagattctgaactctgaaataatctatgatagtcactacatcattgttcctgcctggaaaaacaatccagaccccaaacttttcttctttgatgccctgcagtggggttgacaataaactctcacaggcttg

SEQ ID NO: 892776 - DNA, 652 bp, Homo sapiens; identical to SEQ ID NO: 870113

SEQ ID NO: 892777 - DNA, 652 bp, Homo sapiens; identical to SEQ ID NO: 870114

SEQ ID NO: 892778 - DNA, 518 bp, Homo sapiens
tcacttaggaaactgagacctatgtcctgtccaagggcactctgtgggtcaggggacagcaaagcacagacattcaacccagcatggaggcccctccccacccaggagcaggagcctgccttggaatgccagacctgagataggattactgccacctgggaacagcatacactggtgagaggcaggggcagggagaacaccaccacaggggcagggagaacaccaggatggggaaagggaaccacagggcctactcttttaatyaagcagtagaattgtaagaaaattgcaactttcttttaaaacctgtctttcaaggttgttaaaatggggttttaataacaaaactgtgggagaaagaggtggctgatgtcaaaaacatctcaacccactcccctgggggacctgcagttctctagttcgtgagtttctgctaacaaaaagcacactaaaagaggggccaaaacaaatggaaatcaagcttatcaaacacagatgacatggagttgaccaaagca

SEQ ID NO: 892779 - DNA, 650 bp, Homo sapiens
aagcctgctgttcaagcaagccaaacaaaataatcagtaacaaacttggttacaggccaccatcttgtttcatgtccttgggaacatgacctgtaaccacatggcagtactttgttttagtctctgccattttacaatggtggctgtcttcttgtgctaagtcaattcctgggtgagggccacaaaatcagataagccagtttgtcaatctgggtrgtgccagctgatccatctagggtaatgtttataaaatatcttaagcactgatcttgagagcagttaaggaagggtcaaaaatcttgtagcttccagctgtatgactcctgagccatggtttccagtcttgtggctagttttttggtctggtccccaaacaagagggaagtatatcttaggaaaggactgttatcatctttgttttggactacaaacagtgaaccaggcccctcccaaagttggttcagcctacacccagggatgggcaaggacagcttgggggctggaaacaaaatgaagttggttgggtcagatctcttctactgtctcagtaacaattttttaaacacagtttcaaaagcgcttatcacccccttaaaaatactttgtacactcgcggttaagtcataacctaattaaggcttgttggcttc

SEQ ID NO: 892780 - DNA, 548 bp, Homo sapiens
tgtctagagtaactgcagctatttgaccaaaagtgtaagtccaattatgtttgtatctgaataatatgcttttataattcctcagcccacagccaattgagttgatggtagtaacctatgatagagccacccatgaaatgtgaattaaaaacaaagatttatatacacgtaggtatatatatacatatatacacataacatacacgcatgcatacacatacacagaaacataaaacaaagagaaagagaagttgatatttgtaaaattcactgtcaggcatatccttggaaatacagagtatctttgacactatgtctaaatcttctyactgtaggatctatagataaccttcttttttttttttttttttttttttcagaccaaattggataaaagaggatgaagtcatgaaagggatgtttcttcctcttagtatatttgtcactctaagttagtagtatgcaatcccttaggaacctctgaggttttccatttatgagactctcctactactagagtgggccaaagggagagagaatcctatttg

SEQ ID NO: 892781 - DNA, 578 bp, Homo sapiens
acaaaaaagcatttccactgtccatcagttgctaagtagccatgtgccccatctaatgtaatctaatttatcatggaattttggtttaagctggacattaagaattgcaaataaatggcttttgcctaagattaatagtaacattaatattgtttttcttccatctgcagaagtaacattaatgaaaatcaaatgttaaaattmtataattattagtaaagtgttttattagtaccttatacatctggaattactctttaattctggaaacaatttacttagactacataagagtaagatttcatactataatatagatttatgcaatataattgtttccttctgaattaatatttgaatttgagctgcaagtttttaaaaaagtacttcaaagactaattcaccttcatagattaggcaaatagtctaatcaatttatggagaatgtatttagaatatgtaacagcaagtggcaggaggtactttagagttcaagactcatgtgcccatcactctgctagaagcacccataaatatgaaatcatgtacttgttgaaaatgtcactgatgaaaaatct

SEQ ID NO: 892782 - DNA, 463 bp, Homo sapiens
acagggcctagagaaaaaaaaaatagcaaatggtattttatctcaagaacagctgatgtgacatttccagaggtcaatgtagtaatggctgcaggtaggtgcaaatagaaatgctaatgctgcagaagagttctttgtggaaactgtcaaagctcttgttcccaggctctaagaacacaaggttttgtttggtagcccaggtctacgcctgggtcttgccaagtacaagaagctctagtgagggttgtatttygtttggtcactgaggtgtcgagggctggcccacatgaaccagcaggcctccagctgagtggcaaccccttacggtggggagaagacaggccaaacacaatctacgtctttttttcttttttcaactttctcattcttaagcattttaatagccccgattcttcctttaccatgtttttattaaacatagcagttaagtctgggagcttgt

SEQ ID NO: 892783 - DNA, 654 bp, Homo sapiens
ggatcaaagcagccacttttgccgaaggggtgcatcattcagacaaggctcatgctccagagagatctgttatatttacactgtggattgtcaaacctgcagatctaactctctgtacctgtgcagctaagtcatgtatctcaaaggcatcaattaaaatattttagggttacttgtgagataagattttaatacagattaatctaaacaagctgtcaaccagcagataacaggaccttgaagacttaygacacagagaagcaattaatatggaggtcaggaataggagaaggaagtatctgtgtgcctggagccagaagtagggatggacgcgttaaaataaattacagtaacctccccattgtttgttggtttaaacacttcaggcaatggttctgcatgggtatgattacagcattttcctcaattcataattttattcttgaagcttggaatcttatcttctggagtccgtccatatctttgaagctgaaattggaaattctaactgcgatctgagcaaagttccacagctgatttgccttttttttttttcctgaagcaaagtcagttgagaaatcccacactgcagaccttgtcttttctcagtgatttattggctattttgattccatctgcaatggtttgctccgt

SEQ ID NO: 892784 - DNA, 501 bp, Homo sapiens
tttctactacacagtaagctctctaaagaactgaaccaacttttattcactggaacttgaatgttcatttgcactgctgctacatactagttgcttgataaataattattgcatgaataaataaatgaaaatttcaagaatgagtctttttttcagaattataattgccagatttaacaaacaaaaatataggactcccagttaaatttgagtttcagtaaaacaatgaataatytatttagtataaatacatcctaaatatttcattgctaaaataaaatttttaaatctggaattcaaattgcactgggtgtctgtatttatctagcaactcttgtctgaaaaaattcttccaagactgacttgattgaatgaattgtgggaaaaatgttttaatgctcatatagaagcatcaagaatgcttcatatacatttgtgccaactatgaaaatcaaaagactatgttttactgtgttatttgatggattgaccactccaatt

SEQ ID NO: 892785 - DNA, 587 bp, Homo sapiens
aaaattacctggttactaggtaaatctatcagtatatgatcgaggaacacttatattaacgtcatttactgataaataagaaatactaaataacaattacatgatgtgtttaataatcaaatgtataaattgcaagcacattatttatatgcataatactctagtgtttgttgtatgagacttgaatctcaattaaatgatgttaatatgagaccwtaaaaagtctgaaaagaggcattcactgtcttttcaaaataaattttatatgagaacataaagaaaacccatctcttccctcattttttgccagtatggcaacaaatagcctgcataactgaggcaatttgcaaactggtagaccctctatcattgtgttttatgagaaaaaaaaaagataatagcagagtatgcaccaattcagaattaactggattgaatgctgataattgtatgattctttttattcttaccctgttgtttggcttatgcatctctgttcaagtccatgtggaagacagcttgaggtgcatgatcaataaaatgttggaggacattgaacacagtagatttcctggtgatgtttaaga

SEQ ID NO: 892786 - DNA, 578 bp, Homo sapiens
ggttaaattcagaatattttaatatttttataattattctgttttttactacatgtaaaatacattgtatacaattgtataaaacataatctaagaaactgaacatccaacagatttcccttcttcttattttacaggttttgttttgttaacgttggttcctgcaaaatctatattttgaaatgctttatttaatactttgggttcttgggccaaactaaaactgaaatagcttcttttaaaatacattttattgcaatataatattatattgaaaatatgatcacrtagaaatatggagagcttcccaatttatttaatgggctagtataagtccaatattaaaaaacagctggctcaaaaatgaaaagtaagaaggatataactttcttattgtatatttgcaaatagaatttatcactgtgttaaaaagattactgtgccattagggtttctaatgtaaaatggtaatttcacattagaaaacttattatctaactcagtagattttaaggaaaaatctattaatcttttggggttacaaaagccaatagaagcaacaaaaaaataaagtttga

SEQ ID NO: 892787 - DNA, 589 bp, Homo sapiens
gccaagccaatggtggtgctacagtgttctataataggcaattaaaagttcttgttgaacaaattgatgtgtgtaccatagggtgacaaagactgtattcattgcaaaatgatgttgcccatacatccatatcaatatgaaattaaaattaatttaacaactaaaatgtgcatattttaataaattatatcaacttttactttagatgcagggagtacatttgcagrtttgttacatgagcatattgtgtgtgagatttgtggtctggatgatcctctcactcaggtagtgaacatagcacccattaggtagtttttcaacctttactcccctttcttcttctcctttctagtcgtccccagtgtatgttgttgacatctttgcatccatgagtaccaaatgtttatctcctacttctaagtgagaacatttgtctgtcactgcgttaattcctttaggattatggcctccagctacattcatgttgctgcaaaagacataatttcattattttttatagctgcctaatattccattatgtatatgtaccacattttctttatccaatccactcaagttgatgaacacc

SEQ ID NO: 892788 - DNA, 584 bp, Homo sapiens
ctgtaccttaaaagataatttcaaaaccgtatataagagaaatatttaacactttcaacctatcagaaattttaaatgtatttgttctttggaaaaatatttagtgtggccaggtacggtggctcattcctgtaatcccagcatattgggaggcctaagcaattggatcacctgaggtcatgagctcaagaccagcccrgccaacatggtgaaagtccattcctactaaaaatacaaaaaaaattagccgggcttagtggcaggtacctgtaatcccagctactcgggaggctgaggcaagagaaccgcttgaacctgggagtcagaggtttcagtgagccgagaccatgccattgcactccagcctaggcaacaagagcaaaaccctgtctcaaaaaaggaaaaaaaaaaaaaaaggtaaggaaaaaaaagaaaaatatttagtgaggcctccaacatgccagatagtagtctaggagttgctattaaggtggtaataggacagaaaagcactctaatttctggaggtgatttctccaggggcttgtacggcaataggtttttcaagaaggtgtttgtggaaa

SEQ ID NO: 892789 - DNA, 613 bp, Homo sapiens
taaatataagaataatctaacgccttactttatcatattactttaaaaactgctatgatttgttgatattacacattcagggagagaggaccggggtcatgcagtctgtataaagtgcaatattaaagccttctgtagtttttaatgtctcagagtccaaactctctttgtttcactcttcccagacactaaatctggtctttggccagggttattttctaactgagcagtaagaaaatactaatcataaaaataatttttgccagattttatgtaatttgcctgtgttcaataccagtcagcacttccgcatttagaatgctttstatttctctggggctatgacaacaaatttaggttgctttcagtcttctaccattgttacatatgccaggatttagctttcagttactattatttgttaattccattaagtcagctggaaaccaacttctatattgtatttttttttctattttaaagatatttgaattctcttctttttttctgatatagtataccttgaggacttatgcttttgtttttaacaccactgctatcgattactatgggtacaagagggaaaataagtaaaattgtgtctaatccacta

SEQ ID NO: 892790 - DNA, 591 bp, Homo sapiens
ctcatataactggctgatatgcaccgcacatgaggtcccctctcttggctttggagcccctcctccttcggtctctgtagggggagcttttcctgctttcttctcccttctttgctgcctgttaaactctcggcttcttagaaccactccacaggtgtccatgtcattttatctaatttgacatgagacaagarccctggtggtcctccactcatcagagctgtatcattgtcatgggtcttaagttatttgcattgggttaaaacatgctcctttagcctcagcaaagtttattacccaccttctgaagcctacttctgtcaatttgtccatctcatcctctgtccagtttggtgcccttgctaaagaggtgtttcaatcattaggagaagaagaggcattctggcctttgggttttcagcattttttcattggttctttctcatcttcatgagtttgctggttttgatcgctgaggctgctgacacttgggtgtggttttgattgggacttttttcattgatgctgttgttgctttttgtttgtttttctttcaatagtcaggttcctcttttgtagggctgctgtggt

SEQ ID NO: 892791 - DNA, 690 bp, Homo sapiens
cctagtgtttattcgctccttaataacgttaagtattaatcaaaatttctgaacttgcatatcaattttccatgatagcatttagcaaattatttttgacttgttttcctctacattattttaaaatttacattctattttaaaataaataaggtgagaaggcttgatttaagagaatatagaaagtgtggatggtattcttgaccaaaagaacgtcatgaatgagatgggctgttctagactgcatgggaccctaccagtgatgaagataggactataggctgtcatgtggttrtttgttccatgccaagcagctttgctttgatctctatcatatattggctgctgcacgcaattccacttggggaaaacaaaaaacaccactgaattctcccattggcttaggagttaatctgcattccatgaaggactcctagacttcatgcagaatttggaagggtcaaattttttattctgttgacctaatgcttcgtatttttgaaaatcttattctttggctctttacttcctgtggttttgattactttcatgtttagtaaatatgactttttttttcttctaatgataaattcttttctttaaatagaaaaaaattataatactaacaagcaaggtattgtagcagttaaaagacaaaaactttcaggagcatttttgtttcactttgtt

SEQ ID NO: 892792 - DNA, 659 bp, Homo sapiens
attaaggttaaatataatttcatttcaaattaacacattagaaatgcacaaccaggtatactgcgtaatgtacttttaatcaataagccatgctggcaatatcaatagaagtatatacttttttggtaaatagtcctaaagacacaagatggcagtactagacttatgagttactggaaatatggtaacgcattcaaaaacttttaatgcgcttcccttgctttccttctcagtatttgtaatggagcttttatttctgtgcataaacattcacaagttttgtggatgtttttaaatgctattgagagtgtgctatttatttatttatgggtagccactgcatttagtaaaattcgcctttaaaacatcttagtttcctcatctatataatgatgatattggtccagatagcctttatggttctttcactactggatggccatataatttawtaaatcagaaaaatgagaacctgtacatttcaaatgagcattgaataccttaacgaataaacttactcaaaatttgagataaaatggcagtggacttcttccttgttcagtggtagaagaaagatcaagggtgattattacttagccttcactaaatttggaatatttagtttaccctaaattttatgtaagatgctaatatatgta

SEQ ID NO: 892793 - DNA, 657 bp, Homo sapiens
actaaagacaattttaagaataaacaaacaagtaatttatttcttcattgctgaaatgaaaatcgtaaaattttgaaatgcactagtatggtaggcctctttattgttaaatttgcattttatttggtattaaaacattaagacaggctgggcgctatggcttatgcctgtaatctcaggactttgggaggccaaggcaggtagatcacttcatgtcaggagttcaagaccagcatggccaacatggtgaaaccccatctctactaaaaatacaaaaattagctaggcgtggtgttgcgtacctataataccatctactcaggaggctgaggcaggagaatcacttgaacacacgatgcagaggttgcagtgagccgtgattgcgccactgcactccagcctgggtaacagactgagactctgtcrcgaaaaaaaaaaagcccttaaaacagaaacctttacgtccactgtagtatgagactgtattatttggccaaaattatttctattttcttcaatcctgctatgacttccctgtgggttgatatgactttcacatactccactgatgaaatatgagacttatttggccaatggaagaaggacagaagtgaaaatcaaccagttctaagattattccttaagaagcataacaag

SEQ ID NO: 892794 - DNA, 593 bp, Homo sapiens
attaaaataatatatccactttggaaagcaatttagtagttctttaaaaaaaggcaaatatacgaatgcaacatgatacagacatttcactcctaggtgagaaatgaaagcacatgtttattcaagacatgtacattttatttctaatgtctcaaaacataaggaacacaagtgtctattttcagaatgattaaacacatttttgtgtattgatacaattgatacaatgcactcaataataataagaaagtaaactattgacatacgcaaataaacagatgggtctaaatataattatgytgagtaaaaaaacagattaaaaaagaatacacattgtatgattacacttctgtaacactagataatgcaatgtaatatcttcctcggaaaacagatcagtggctgcctaatgaggtccaggagatgagaataagaaaaaaggaatgcaagggacatgaggaaactcatgtgagtcatgcatatgttcaacatcttagtttttggtggcttcgtatgtcaaaatgtacacgttatatattttaaatgcgcacagtgttattctaattaaatctcaacacagctataacaaagaa

SEQ ID NO: 892795 - DNA, 588 bp, Homo sapiens
tgtttgtcacaagacacttttggttttctttttgtttttgaacctctatgacaaaattaaaagcgatttttataatgctgatagagtattacagtattctagacctgttgatatatttacctttaccagtaagctctatttttcttttgctttcatgttgctgtctacattccttttgttttaaactgaagtatttcatttagaattttttctaaggtagatctagtgatgataaaaatacttctgctgtttggaaaagtctttaattctttcatttttgaaggatacttttgctggataaagtattcttgactggcagtgttttttttttttttcatttgtttgttttcatcactttgaatatgtcattgttctgttttctggcctgcagagttttcgctgaraaaactgctgatggtattatggggtatttttgtacatgatgatgtacattttccttgttgctttcaacattttcattttctttgacttttggcaatttgattatgtgtcttagtataaacattttagattcattgtatttggagtttattgttttacttgaatctgggcatctgttttcttccc

SEQ ID NO: 892796 - DNA, 635 bp, Homo sapiens
gtcctcttagtatttattcatgttcaagtacttcccaaccttaaaaaaataaccttgacccaacatcctctttacctcaacttcacttcataaaattttaaagacatcatacctcaaatccactatcctacctgtcttagtctattttatgttgctatcacagagtactacagaatggataattaataacaaacagttattgatttggcttacaatcctggaggttgggaagtccaagggcatggtgatagcatctggcaaggtagcaagacttcatgctgtgtgataacatggtggaaagagcaagaggatgtgagcaagcaaacaagagggggctgaacttgcttttataacaaaggcactctcatgataactaacccactccgtscataacattaattcatccgtgagggtagagtcttcatgacttaatcacctcttagtagactccacctctcgatgctgttgcttttgggattaagtttccaacacatgaacttcagggaacacattcaaatcatggtactacgttgcatccatattacaatctgttgtgatctacttttgctcccacaggtccattaaaactgtactccatgaatttctggttgctaaatacaatgaacattattcaa

SEQ ID NO: 892797 - DNA, 650 bp, Homo sapiens
tccaattaaaaaggagttttaggagttttagttgactggaaaaattcctggaaatggatctaaaagggagcagaaatgccttgcttttaaaccatagatgttttaacaaacaaaaaccttcaaatcccttataatcagatttcagccaggacaaacaaaaagtaggcctctcattcaatttgtttggttctaaaatgtgatttatttttcaattgtgtgtgcaaatatattaatttaggaattttaaatcaccctcatttttgccattgtgatggccatttgggggtcatcttgagtcatgtgggtccatttacataggtatttgccagatggagcttyataggtattacatgaaaacccagctagtgtttccaagggggattgtcccttcagggaaagctcagttttgatgagcagtttcccataattttagaaattccttttcaaatatgaccaaggccaggacagtgtatcaggttgaagtgtgctgttttgtgagtgtcacttctcaaagagtcaccagagagtcatgacttgcttttcatgtgtcttgtaatctctgatcaccttatggtggcagagtgttcaagacgccaggcaaccagccctcgcacgtaccttctggctgagctgaaagtcatcacaggtat

SEQ ID NO: 892798 - DNA, 634 bp, Homo sapiens
attattctttgtatcacaaattctagaaccataaagataatgagtgagggtcacattgtgcaacttgtgataacattttaggtaatttatcaactagtctggaaactgcagagaagcaaagaaagaacaaaatgcctttaaataattgcccctgggaatgggtgcaccaggagtgtgctgaagtttcwtactcatgtctctctgggcctgattaattttacatacctcacatagcacagaccgctctgagctacttttctttctcactttcttctaaggagatcacaagtatttcatgtattaccttatgttcatgacattcttactattgtatatctgctttatattgtggcattgaaggttcatctccatggtggcagagatgaacatgactctgagagcaatgactttcccatcaatcatgaaagacatatttattcaccaccattctgtattagggatcctattgtgtactgagttactgcagtacccacaagggagtctctgaaaattctgacccccaggacctctatagggcacacttggcatcagatttaattggaaaagcataaggcaagccatgcagcatgccagaatgacagcatcaggcacccctttttaataagacttcttg

SEQ ID NO: 892799 - DNA, 507 bp, Homo sapiens
cagcccagtcacctaggctatttctgctttctccaaagtaataggaggtaaattccacaactggtcccatgctccatgctgagggatatgtaagagaagcccctgtccctgaggaggggaccagctctctagggcaggagcctacacagggagtcattattcagccactcagtaccaaatgggtggaacagacagaaagacctggagagcagcaactgcccagttcctgagcatcagaatcacccacagagcttgttaatcacacagatgcctgggcaccacatcgggtccactgagtaagaactgggaagctgcaaagcataatgtttcaggctgtgaatgygaaaatcagactgcctagacgtaattcttagctctgccatctgactgctgtgtgaccttggacaaattaattaacttctctgagtctcagtttcccttataggagaaggataaaaaatatctgtctcatcgggttgttgggagaattaaatgagataatctata

SEQ ID NO: 892800 - DNA, 536 bp, Homo sapiens
cagaaattttagaaaagacacagcattaaacttttaaagatttgtggtaagaaaacatccactgattatgaagcaggggagaaattcattgatgagtttgccaaggtcattactgatgaaaatctgatgccagaacaagtctaaaatgatgatgaagcaccactattttggcatttttgtttcagaagacgtggacgacagttgatgagatagctttgtaattaaagatgccaagtaaataataattgtgtggagatgtgctaatatagcaagtatgcataagtgtaaacttgctgtgataggcaaaatttgcattctctctgtattcaagtagtgagtttcttgtattattatgctaacaaaaaggcatagatccctagggacatcttttttgaytggtttcacaaatattttgtactagtggcacatgctgattgcagtgaagtaggactggataacgattataaaattttgttatttcttgacaactgttacgcttattctccagctgtaattcccattgaaaataatgttta

SEQ ID NO: 892801 - DNA, 653 bp, Homo sapiens
ataggtgggctctaaggggaaaaacagaaaaattcagaaacgagaatacagtatttgctccccaacctggccccagggactcttataggaaggaaccccaaaagccaaagctgtaaaagttgttctgctaaagactcacatgctacctagacaacaagcagtgttgtttcaaagcccaggtgatgaatttaacagagtttgtggaagagatgtcctccccaaaagatctgtttaaactttagagagaggatttaaattccaaatgttactgagtttttagagataaggtcacacaaaagcaatctatcacataattaaatgtaagacataatacctgtttgctatcatcaaatcctgaaatttctgcctcagataacttcttttccatcctcaaccaaagtatagtrgttcttgctgtcatggatatggcagatgcaattgtctcttacccagacaatgcttcactagcactggtccatgaaacagcacttatctgtaaacacttttttgttcataaaaatgaaaaaaaattatgtggtgctaaatcaatttaatttgaaaaacagcttttaatttagaggttgagtaacagaaagcccaatttagctgtatcgagagcctcggttgacaatagatgttcattttttagtttg

SEQ ID NO: 892802 - DNA, 634 bp, Homo sapiens
tgtcggaacagggtgatttggagtgcttgggtttttttctttgtgtttttctttttttctttttctgtcttttttttttttgtttcgctctgtcgcccaggctagagtgcagtggcgggatctccgctcactgcaagctccgtctcctgggttcacaccattctcctgcctcagcctcctgagtagctgggactataggcgcccgccaccacaccctgctaattttttgtatttttagtagagacggggtttcaccatgttagccaggatggtctcaatctcctgacctcgtgatccacccgtctcggcctcccagagtgctgggattacaggcgtgagccactacgcccggccttttctttgtgtttttcaagttgtctcaactgagcatgcatttttataaaaagtgcattttataaaaagtgcattatcaatatttgtaaaaaccccaaagacttccttgacacccaggaygattctagatcttggagatatctcatcaatatgttattggttgtctgatgatctataatttttggacttattttgtggaaagttctctttgcccaaaaacctcatgtacatgataggcagaaggtacagaccaattccaattcagccagccttctccaga

SEQ ID NO: 892803 - DNA, 596 bp, Homo sapiens
acaccactatctttagggcatggacttaacacgtgcttcccactgcggaatatggatccacaaaggtgagacttcaaaagtggattttacccactccgtcctacacctatcccttctttctgctcaagatcggggctggggggaagtaaatccctggtgtccayatggtgtccaagtcacatcgtcccctcccaaccagctgaggcctgggtggcctgcccccttttgccagcccccttgggggaacagcagagaaatctggaaatgctgtgagcctgacatgagttctgtgatgtggctttcctgccattccacctctccctctggccgcagcagatgagactgcagtggtggaagttccttacacactcagaccttggctgcccaggcctttgctccttctcgggagaggtttgcagtcccctttcccagaagcctgcggtgctgaggccttgcatgtccccagctcggctggttctgatgtttctgcatttcctcccacagtcactgtccttccttagtctcccgggtgccctaagcaaggggaggatttttttttttttttttttttttttttgagagaaacagaaactaag

SEQ ID NO: 892804 - DNA, 642 bp, Homo sapiens
ggctgtcatctttgactcttgcctcaagctcatcttgatcttgtgttggggccaaacaataggtaagaaggactactgagaagatttcaccaactggattattgatgaaaggatggaatggaagggatcggtcccttagaaaaacagctagttattcaaaggggtgggtcttagggaggaagcgggtggggaaagaatcctggaagtagaaagctattcattcctccagcccccagcctccctcccagatgrtccccagaatcaagcgtctctcagctctgagtcctgaggtgagaggagggtttcacttcctgcctagggttaccaagtgctggaagagccattaccactgacatgagctgacttggagtgttgaaatgaaagaactgagtgtcttacccttctcgttcatcatccgtgttgtaatacacctgtggaacaaaacaataggcttactgtaggtcagagacaagaaatggaaaaaatattacgtgatgtacagactttcctaaggcataaactgtctcttaaaaaggcaaaagactaatctgtttaataacagtgtgtgtgtgtgtgtgtgtgtgtgtgtgtgtgtgtgtgtgtatttctaaggaaatgcatatttaagttccttataatctc

SEQ ID NO: 892805 - DNA, 638 bp, Homo sapiens
taattttagcaagtctcaggactgcggcggtttctgagatggacaccaatccttgcgtctctcttgctcccctttctctttctacccacttaagggaaaccagccatatccattgacctgccactgctggctcttgttctgcaggtcaaagttagccaatctctgctccatccccaaatctaaggccatggcactgcctcttccctcctgtctttggaaggatctcccaggcatctaacttttttgagaaaaggcagtctgaaagtccctagccactgtccaagctcctttccttcagctaagccagctgatcaaccacaggatagtcacaggttgttctagggacagctgagtgtgttccttttttgccagaagctcagggcaggcttcttcattgaccccctcatctccaaatccaaggccatgggagaagcctgagagctctgaggaaggyctccagatatacagggggatatataggcaggatatacaggggggtgctgattggactgcctggcaaatgctgaaaccaacagactgaaaagtctgcacttttccttctgattccacctcaggctgacagccgggcttatgacacccgggggcaggagaggtcagcggactgacagtcaggagca

SEQ ID NO: 892806 - DNA, 543 bp, Homo sapiens
catgtgaaagaatatgacacagaagtcctcccattgggatcatatggatgggatcttaatctacacacacacatacacatatgcacacacatacacacaaacacacttcccattgttttatggcttttttttttttttttgcaaaaaaaaaactcaacaggggaagtaaaaagctggctacccgagtgccagggctagaatctggcctagaatctagctagaatctggagttcaggtctgaactccatttcagtgctctttctgctgccacacactgggccctgcccgccatcaatttccaagcagtgacagtgtggacactcagaaccttgtcctcctagatatcagaagcccagggacgcctgttcacattacacaggcttccagcctgcasagaccctgagggcaaaagctgatcctgttggagactattcctgctgcatgtgtcattgtgcagaaagactctgtctcacaaccagcaaaacgggttttgggttgaagaactctgcaatagttctgccagaatccgcctgcaatggacac

SEQ ID NO: 892807 - DNA, 634 bp, Homo sapiens
tcagggttaacacgtatacaactaaataatgatattcatgcctcatccaaaagccctgcttctcttgcattttccccatttctataaatgttaactttatccttatagtttcttaggcccaaaccttggagctatgctgcactgttctcttttttcacatcttacatatgaaccatcaaccaagcctgttggctctaccttcaagcagtaccyggaatacaaccaggtgccccttttctgctgataccaccctggttcccaccaccatcacctcttgcctggatcattgcatggacatcatacctggtcttcctggctctgcccttttcctctttagcttactctcaacacagcagccagagtggtcctgttaggatataaatcagctttatcacatttctgataaaaaccctacactggctcagcttcagtcagagggaaagcagaaagtccctacagtcacctccaggttccacatcacctggtccctcatgatggtgctgatgtcatctcctcccccacctcatgccctccactccagccacatcctggatcttgctaggcttgcctcccagcttagacccctctcattcactgttcttgctcttcaaagagtcttcttacagttatctcc

SEQ ID NO: 892808 - DNA, 711 bp, Homo sapiens
aggaggcccaattatcctggaatttcagataaacagcaacagttgttaggattagcctaacaattgtttagccaactaaaaaagtcacttgctgtttatctgaaattcaaagttaacggggcatcatgtatttaatttgccagatctggcaaccctatttaaatgttatacttgagtttaaagagctcagctcagggcccggctctgtagctcttgctgttattatcagctcacccgatctgttcagaggcctcggcaattcttgtcaaccatgtgcacaggcacttgggtcccccacctggcgctgatctatagaacagcagaaggcggcttcgcagtacagagagcctctgtctccttttatcccccgcccaggtacagctgcctaagaatctgggtttgtgtggtaygggcctgtctgcttgcttgtttcctccacaaaggtgccattccatttggaaacatcctatgtccccttatttgctttgattcacaatgaatagttgtgactaaacaagcacgggattattttaatagttaattaacttgctgatgttaaactgcaggttttactggtactcaagggagcacaatgggtttgtgctgtgctctaggtccagacagctcttcaggatagggctgaaggatgggagaagatcagatgtcacaggataaagccctaaagccctaactgtgtgttgatcacaggca

SEQ ID NO: 892809 - DNA, 667 bp, Homo sapiens
taggggaaacattcttggcaaaaatatattcatgatttttcttcaggccattaatttggaaacttttgcataactgtgagggaatgactcttgggactcccagacatagctttctctcctctcctcccatcacccctgccccagcttatgaatatggtttttaataatatacatttacatacatatatatctgttgtatttgtacatttcaataaaaacacgaattgtgtagcatgaggacttaaattctcagctccaccaagggggcgttgccttctgaaactttgttgacattcagtgggtcagaattagataccaagaaggaaggacgccatcacttcaccaacttgacccaatcaattcagaccagctgagagcaaaacagaagcaaatacagattaaactagctcaccccagggaaygttcacatccttggctgaggtgtccaaatggatcaataatatgctttcctgacctacatataatggtaaaaaattgaactcaggttcacaaagaaactgttaactttggctatagcaatggcatttcccccttctttggaatgtattgaactaatgtttcttctgaatcataaattcctcaaaattaaatctaatgcaaaatcacatttcctataagaaaaaatcaaatttgcagtttcatcaga

SEQ ID NO: 892810 - DNA, 654 bp, Homo sapiens
ttaagtaatatcattgatgaaaatggccatactaaacaatagaatttcaatgtagatgaaatagccttatattagaagatgatgccctccaggactttcatagctagagaagaaaagtcaatgcctggcttcaaagcttcaaagaacaagcttactagcttgttagggactaatgtagctggtaacttcaagctgaagacaatgttcacttaccatttcaaaaatcctaaaacctttaagaattatgctaaatctactctacctatattccataaatggcaagtggcaccaacaaasccttaataatagcacaaagccttaataatagcacatcagttaacatcatggcttgctgaatattttaatcccactgttgaaacctactgctcagaaaaaaatatttatttcaatatattattgctcattgacagtccacgtggtcactcaagaactctgatggagatatacaaggagattaatgctgttttcatgtctgctgacacaacatccattccgtaacccatagattaagaaataattttgattttcaagtcttattatttaagaaataaattttgtaaggctataactgccagaggtatagtaaatttacttacagtaaatttttactataagtaaatagtaaatatatgg

SEQ ID NO: 892811 - DNA, 662 bp, Homo sapiens
attataatctttataactactattattattattttcattaactcctaacccaaggggaggacagttgcttaatggaaccttatcagagcacacagggtgaaatacaaagactatcaacaaacaaactcagacatctttagttagcttgaaattatagaatgaaaaaacacactcctacaagctaattaagattaaggatcacattttcccttaagaaaagctgaaaataaattgggcttttctgcctatctcagtttaaagactataagcyttattaaaagcatagtatataatggcttttcattaatttgatttatttagatgtaaagaaactggagagatgcacatcctgaacttaatatatatcccaaactcctaaactgaagaaggaatggaataagcatatactccatactccagaagcagaaactaatgttttaaaggttggaattatttcacttacactctaacacatggaaggatttttttccatataaactgcaaagacttgaaaataaagattgataatagaaatgccacatgaccccaaggtgaacttggtgggtaagccaagatgcaagaggtcagagttatttccttatgacttgattcctcatctgcctaactcccttagagatctgcagagcttgtagtagttaact

SEQ ID NO: 892812 - DNA, 594 bp, Homo sapiens
ttcgttttatatatatatatatatatatatatatatatatatatatatattttttttttttttttttttttttttttggatggagtctcgctctgttcccaggctggagtgtagtggcttgatctcagctcactgcaagctccgcctgccaggttcacaccattctcctgcctcagcctccccagtagctgggactacaggtgctcgccaccacgcccggctrattttttgtatttttagtagagacagggtttcaccgtgttagccaggatggtctctatctcctgaccttgtgatctgccctcctcagcctcccaaagtgctgggattacaggcgtgagccaccacgcccagccaattttgttatatttatcaatatttatagctgaatacatgcaattagggaatgatccccaaagagcagtatttcaaataaatttatcaatgtggacacaaaagtatgtaagtatgttcttaaagggaaacatgaaatgaaaaatgcaaatttccctttaagaaaagaagcacctttaaactaagagaaaattggggcaaaaacatttctgtccattatgtaatatgtgtaaattcctt

SEQ ID NO: 892813 - DNA, 668 bp, Homo sapiens
aaaaccatcaagaagaaggaaggggaaataaagaagaattcataagattattttaatagcatttaagtggttggagatttttaactttttagacataatatgtttttttctatcgactgtttcttatagcaatggaaagacttttaacayagactgttaaaaatagatcacatgtgatttctacttttattcattatgtaaattagcagtttgaataaaaacttcaaagcactgatataaattggtggctagattatgactcgttactgtgttttgggattatctgagtccaggcacactgtagtaaactaatgaataactatctcacatggtttatgacatgcaaagacagtgttatcaatttaccattaggaaatttgtgttgacttacttctctagtaataaggataagctaatattcgcccatactgcttctactaatttctctttgtcatacatttgtgagattaattagagttaaaggtacagactgtagcaatgaaaagattacaggtaatcagcttgctatgtaagaggaaggaaacagaaaccatatggagctgtgactcagaaaggaaaacaatctcaagttaagtggagaagttggagaaggatggaaaacagtcacaggttctccagatcccccgtgtggggagcaatatggttct

SEQ ID NO: 892814 - DNA, 597 bp, Homo sapiens
gtaatcccagcagtttgggaggccgaggcaggcagatcacgaggtcaggagttcgagaccggcctgaccacattgtgaaaccctgcctctactacaaaaattagtcaggcatgatggcatgcgcttgtaatcccagctactcaggaggctgaggcaggagaatcacttgaacccaggaggcagaggttgcactgagccgagatcatgccactgccctccagcctgggcgacagagygagactccatctcaaaaaaaaaaaaaaaaaagaagactgttcagagcaatattactcatgaggggaaaaaaactagaaacagcctaaattctcatcaatttgagaatgaataaataaattgttgatcattaaaatgatgaaatattgcacagtactaaaaataccaaatatacatacttcaatcacgataaattgtagaaatgtaaaattgagagaaaaatttcacagaaggctgcatacaattttctactgtttttataaacataaaataaataaaacatattttaagtacgcatatatatatttatatgtcataaaatgataaagaatcttgaggccatgataaaaacatcagcttggc

SEQ ID NO: 892815 - DNA, 635 bp, Homo sapiens
ccattgggtctcttgtatctgcataagggcccgctgaggatggatcccagtagaatagattacacaactttcatacaaactttaaccagagtaactttgcctttcttcatgttacgtgttgtatttttaaaaacacaagaaaagagctcttcagataatagaaatttacaaaccactgttccttcaaaattcaaaagctcactttattgagtgaagccaatatgtttataaggctttatctgttattaatctgatgacactagtaatcccgtacatatgtattcatttcttaaatttagagactattccaataaaattttcaccaagcagataacaggattacttttatttaaaaacctgtcattctaaattacagcagtctcctttagaggcaaataaactgcagraaggataaactaatatctcagtgtcttatttctgttattttaaatattaatattttagaactaacagtgatactccattgaatgaaaagcattttggtggggtacaaatgctcaaaaaaaattcaatggggttaatctttgaagcagaggaaaaataaactgcatgattgtcttactcctactgataaggttgatccactttgaaagcttatcagtacgtagtattgt

SEQ ID NO: 892816 - DNA, 657 bp, Homo sapiens
tagtatggggtcttaaatttaaatatttaatccagattgagttaatttttggatatggtgaaaggtagggttcacttttattctgcctatggctagccagttatcctagcaccactaattaaatagggagtcttcttaccactgtttatttttattggctttgtcaaggatcagatggttgtatgtatgttactttatttccaggttctctaacctgttccattggtctacatgtcttttttgtaccaataccatgccattttgatttctgtggccttacagtatagtttgaaggcaggtaatatgatgtctccagctttgktctttttttttttttttttttttttttgaggcagagtctcactctgtctcccaggctggagtgcaatggcgccagcttttttcttttaacttatgaccgctttgataatctgggctcttttttagttccacgtgaattttagaattttttttgaattttatgaaagaggatgtaggtagtttgatagacataggattgaatttgtagactgttttgggcagtatagccagtttaataatattaattctttccatccatgagtataagatgtttttctgtttgtgttatctcttatttctttcagcagtgttttgttgtgctccttgcagagatct

SEQ ID NO: 892817 - DNA, 698 bp, Homo sapiens
catcactaaaaaatattttaagaacttatccaacatctatttagacacccaaagtgaatattttattaagacttttttctcctaaaaacaaaagagagatttcttaggatagccatcgcaggtcatacatcttaattagaagttcctggatgggctgtgactgtgtgtatatgtttgtgcactaaggcaggtcatgaagccatgtgtgtatgccagtatccccttctctggggtgagagttctagtttaattgggacagggccttttttatcacctaataccttagcacaactattttcagcaccctcttcactttygtaagagttgtgagttggaagataaattatagaatcatcctacaaggagagaacaaaataaaggttaagagcattgatgaagtgagcagggtagaatttctagagaaatcagtggtgcaacaactgtcatatattaaagccaaggagccatcagacgaaataccgttatattccacactattaagaatgacaaaatgctgtcaattaatttctgatacattatccattttaataaagcaacctggtttcagagacattcagtagtgaaaagaatgtgggtcttatagtgaaatacaatgtataaatttagcttagaatgaattacaatttaagtaattagagtgaatatattcttgaaatgattgaaaatgtatatcttaa

SEQ ID NO: 892818 - DNA, 599 bp, Homo sapiens
tctctttaaagaaataatagctttaaagtgtagtaactgtggacccaaaggaaacatttttttggatcattttaccataacattttttaaaaggcccagagagtaatggaaagtagataacccccccttcccatatctgtctattgaataaataggcaaacctagcctgcttctttatgtagcaaawcattataagtctgatcagctttcactggcataactgctaagaaatatggtctatttctttctttgtagctttgaagccacaaaggaatttatttctttatcaattttaactatgttaataagacaaaataagcaaagtaacaacattataaatttattttgaaagtgttaagtaagatatccagatatttagatatttaaaagcacctggattaaaaacaaacaaaaaacattatgtgtgttattttcatgggaatatacagaattagcatttgaaagacatggccctaatcctgattttgtttgttcctgcctgttaaatgggtaaaataaaatcagtcccactttttttctgtgtataataagagaagtatattagatgtgtctactcaatcaatttcttagtcataaga

SEQ ID NO: 892819 - DNA, 599 bp, Homo sapiens
tctctttaaagaaataatagctttaaagtgtagtaactgtggacccaaaggaaacatttttttggatcattttaccataacattttttaaaaggcccagagagtaatggaaagtagataacccccccttcccatatctgtctattgaataaataggcaaacctagcctgcttctttatgtagcaaatcattataagtctgatcagctttcactggcataactgctaagaaatatggtctatttctttctttgtagctttgaagccacaaaggaatttatttcttkatcaattttaactatgttaataagacaaaataagcaaagtaacaacattataaatttattttgaaagtgttaagtaagatatccagatatttagatatttaaaagcacctggattaaaaacaaacaaaaaacattatgtgtgttattttcatgggaatatacagaattagcatttgaaagacatggccctaatcctgattttgtttgttcctgcctgttaaatgggtaaaataaaatcagtcccactttttttctgtgtataataagagaagtatattagatgtgtctactcaatcaatttcttagtcataaga

SEQ ID NO: 892820 - DNA, 599 bp, Homo sapiens
tctctttaaagaaataatagctttaaagtgtagtaactgtggacccaaaggaaacatttttttggatcattttaccataacattttttaaaaggcccagagagtaatggaaagtagataacccccccttcccatatctgtctattgaataaataggcaaacctagcctgcttctttatgtagcaaatcattataagtctgatcagctttcactggcataactgctaagaaatatggtctatttctttctttgtagctttgaagccacaaaggaatttatttctttatcaattttaactatgttaataagacaaaatragcaaagtaacaacattataaatttattttgaaagtgttaagtaagatatccagatatttagatatttaaaagcacctggattaaaaacaaacaaaaaacattatgtgtgttattttcatgggaatatacagaattagcatttgaaagacatggccctaatcctgattttgtttgttcctgcctgttaaatgggtaaaataaaatcagtcccactttttttctgtgtataataagagaagtatattagatgtgtctactcaatcaatttcttagtcataaga

SEQ ID NO: 892821 - DNA, 584 bp, Homo sapiens
tattgccttccttacattctttactagactgtgaaccttccagtttcttgaatatgccatactctcacttacctcacaatatgctcatatgcatgaacaatatgctcctgtgcatggaactttttttaatgatatgctccctgtaaaccttaaaatacctaagcttcctcacagaactcttccctggatgctggactaacttaattacagtaatttattttcccacaaggtgttgtatatttccttttataaaccccatcagaaatttttgacttaacacttctatcaaatatattgttaattttttgcatatttaaactatgttgtctttttttgttatcattgtcaagttgtcatattagaatttcagtatctttataaacttgttttaaactccggaaacagcacaaaactatatccacyggatatatttccctaatctcttgagacactaggaaaccacggagctgagattcatgctaatgttaatgtgtcatcatgagcaatgttctttccataacagtgtgttgtttcccaacccaaagcatttaaagaaagataaaaagaaaacagataagcaggaa

SEQ ID NO: 892822 - DNA, 626 bp, Homo sapiens
actaataaaagttttgatggaaaacaacctgtggtaaaaagaatatccttgttgatacattcaagaagacagtaagaaacacacataactcatggttgcatctaatgaaactgcgataatctactaaatgaaatagagattacgaacaacaaaagtttaaaagayaatgtactcttttctatgtagatagtttatatattatgtatataaagtttaaaaaattaaatatatgcttgcataagtttaaaaagacatatcttttaaaaatatatgaatatttatatatgtttacatatatttttaaataaagtacatatcttgtaattaagcagaggataaacataaaaataaatccttcattatggcacctctgatttggatgataaataatatgggaattcattttagagaggcgaatatcgttaccaaatattaatttcattatgttttatttatttatttgtctgtggtttttttagtgctgattgccagattagaagctgattggattcaatgctttatcccggcgagttaaaatccaaatatctatacatcccaggtttcaatccttctggtaatttgtctcttctaaactcctgctatttgaattaaaatatcttaactgc

SEQ ID NO: 892823 - DNA, 669 bp, Homo sapiens
tgcattgacattctcttttgttctgtagtttatgtctagaaagctgatccctgcaggctctgttttccagattcctgggctagctgggttcagttgggtttgtttcatgacagggaccaacaggatttttggagaccagaaaaataagagaggccaagttaatctttttctctctttatcatagtgagtctttctagcagacattgacttcattgacttctctgtgtggctgtcttagtccaccttgtgctgcttttaagaaatacctgattgcagagagccgagatggccccactgcactccagcctgggtgaaagagcgagacttcatctccaaaaaaaaaaaaaggacctgaggtggcataatttatagagaaaagaggtttatttggctcgtggttcagtatgctctacaggagaygtgacactagcttctgcttctggggaggcccacggaagctttcactcatggcagaaagcaaaggggaagaggaatcacacggtgagaggaaggaagcaaagatgggggtaagaggtgccaggctgtttttagctgtctctaacaatcagttcttgtgggaactaatagagcaagaactcactcattatcaggcacaaagccattcataagggattcacctctacaacccaaacaccattcactaagctc

SEQ ID NO: 892824 - DNA, 542 bp, Homo sapiens
gctaactactttcctgagtcatgaccattcctgcagggtataatcaagttctaccctctaactttaaatccacatactctttttgtctctaactctggttcttcaggtggctgtgaagcactctgaaagactttcttttcccggatttccaatcaagggggtagatttatcctcctttacactagaatgttcatgtttgcccaggggtctgtgtgtcactgccacagtaacagaagattaagagtcattcatccctttctcagttctttcccctctyactgggcttttccgccggcccgaaaatatttgtaagtgctttcccagccttttagaatgctgagtcttgttttgtgctttatggtaccactttgcaatttgagtttgccaggtgttggttattgcctttcccaattctcgagccattataaaaatgtctttccatttggtcctaggttgcaatacaataagaattaccactgttatggtttggctgtgtccccacccaaatctcaccttgaattgtaataatccccatgtgtcaa

SEQ ID NO: 892825 - DNA, 635 bp, Homo sapiens
ttgccttgaaaggactttggccagttcgtctaaatctgctcctggctctctggatcgtgtatgataggaaaaattccacaggagaggaccacaagggaatgtgttctcagttgaggaccaagtgctagtcaaaggaagcaggtaacagaaaattgtggtaaaaatgagaaagtggttaagtttatttccagtggtacaagggttccataaagcagaggaaaggactgaaggggaatccattttaggagcttccaggaaatggaagtttttgtgctctaaaaagataaraaaataagagggcataaaatttagaccagattgggaagaatggcttccaaaggaaggaaaagatgagggtaatgtttagaaatgactggattcaaatattttgtttctggcagatgttattttggggacagaatgactaagggttgatctcaaataatacttggtctatgaaactggtataatggatgacagtagccatgtccttaaatagagatgccctattctcatgaaagaaactgaggaacaaattagacagaactctttctgtgcaaagaatgtttcatggtgttcagaagaatagagagagtgtgtcttcaagtggcagaccctgttaaaacctgggagaa

SEQ ID NO: 892826 - DNA, 638 bp, Homo sapiens
tataaattgggtaaattcttctcttcttgagttcccaaaataacttgaggttcctgggccggtcaagaaagtgacattctttacttaccacaggtcagaaattttgtaaagaaattgcttaggcaaggtaagaggccagtattttgaaggggytttttatcagttctattaattcacttcagttcctcaaagcagtctggtcatatgccactccagtcaaagccttggtaaaataaccagtgtttccaattgtgtcctgttacaaaagaaaacagattcttattgaatttatgcaaataactatattgccttaaattaagaatactcacaaatcatttcaaattctggagaaatctggtagagagaaagaaaaatgctttcattttgcttgcaaaagtatattttacccaatttgttgtaagttataaatagcttcaaagaaaaaaaagttctctttaccctggaaaaccaaacattaatagaatcagcaatgtttctaacaaaaaaagtcattaaatttatttcagacaatatgaataatcataccacaaagtaccaaaaggtataccagagtcactacaccaagaccagtcatatgcaaatgtttttcttccactaatgaaaactttgcagaggag

SEQ ID NO: 892827 - DNA, 621 bp, Homo sapiens
tggttatttcttggaaaaaaaaatgctccccaaagtcaatacttcctgttgtaaaacaccaaagcagaaacttgattttatctgaacaaaggcagtttaagaggaaagtactattttttagcttgccaagaggccaggctatgccagatgatgaaagtccacttaaaataaaactcaatttccatcaagaagtcaaatttttcactaatacaattactgttggcggtatgtgtgggagtatcttttcacactgtctcttctctcagagtgacatttgtgatattgctgctttctgcaaaatttcaaaattcatagtgtggacagctccrataagaggttttattgcaggaacttttgtttttcttccagcaccctcaaaatcttttaatcccttttctatttgagcccgtatttatggctacctcattactgtattgacggtgggctctgtatagtgacataacttcccttatctgtttttatctagagcattcagttataggacacagtggctgctttttctatagagttgttcagggtctgtaaaaactgcttccaaggaaaggtttttctcttctcctaacatttgtttcagctggagaatcagccccagaaaattct

SEQ ID NO: 892828 - DNA, 640 bp, Homo sapiens
tacactcttaccacacaattgtactcagtgttacataaacaatgataggaagtcagtatgtatctcttttgtttttatagaaatgtataaagtcatatagagttttttttggtaattttgttgttttgttgttaacatttatttccatatcaatatatgttatataactgctctgcaacttgaattttttgcttcacttggtgacaataacagcacaataaaaacatatcataatcaaatagccactacggatgagtattaacattgttcatattgcttaactaatgcaaatatttcagtagtaaacattcatatatccttattactgattttttatttctgtgggatagttcactggataaaatattcaagtaaaaggaaaatcattttataaatattctcaatgcgtaagtagcttgagatctttgagaaagactgttggaaaataaaattggcaagtccaaatcttgtaggagattatagtccaaagtaaagaatttgytttatcctaggtgcacaaaaaattctctaggaggttttaggcaatgaggtgacaagaataaatgtctttaccaagatcctcgtggtggttatataaagaagtcccccaaaagttaataatcccctgacaattatggtg

SEQ ID NO: 892829 - DNA, 691 bp, Homo sapiens
atgcttagtaaacatcagcttggtaaatgttgatctatggacacctagaaaatcaaacaggactgtgatgtcaaatagttagaaagttaattgaaattcaatattgactaagtaaaatttggtgagacataagacctttttgagtaactaacattttatttaagatttttgcgaccagatgagacatatttgggaagatggagaataaggcttttggcttagagaagacctagtacratagattaaggaggtaacaagcctggcacagaaaaaaaatgcacatttgtcctaatcacaaatgctgtgaggtggtttaacaaaagcagaattactttctcttcagatatcttctcccaatctcagtaaatagcacgaaaatgtagttaagtgatcaaaccaaaattataagattccttcttttttttttttttcattctttcagctcccacacaaatagatagtattaactcactcatttctctgtgacgcaattgttagcacagtagtccaaaccatcaacttctctcatttggactgctcagcattcccacctgagggcttcctgctgctgtcgttgtcccttcaattcattctgtcccctgccctggctttcttgttgcctgaaaaatctaaccctattggctcctatatgaggtggaatttgtttctcttgtctataacttgactttta

SEQ ID NO: 892830 - DNA, 691 bp, Homo sapiens
atgcttagtaaacatcagcttggtaaatgttgatctatggacacctagaaaatcaaacaggactgtgatgtcaaatagttagaaagttaattgaaattcaatattgactaagtaaaatttggtgagacataagacctttttgagtaactaacattttatttaagatttttgcgaccagatgagacatatttgggaagatggagaataaggcttttggcttagagaagacctagtacgatagattaaggaggtaacaagcctggcacagaaaaaaaatgcacatttgtcctaatcacaaatgctgtgaggtggtttaacaaaagcagaattactttctcttcagatatcttcycccaatctcagtaaatagcacgaaaatgtagttaagtgatcaaaccaaaattataagattccttcttttttttttttttcattctttcagctcccacacaaatagatagtattaactcactcatttctctgtgacgcaattgttagcacagtagtccaaaccatcaacttctctcatttggactgctcagcattcccacctgagggcttcctgctgctgtcgttgtcccttcaattcattctgtcccctgccctggctttcttgttgcctgaaaaatctaaccctattggctcctatatgaggtggaatttgtttctcttgtctataacttgactttta

SEQ ID NO: 892831 - DNA, 691 bp, Homo sapiens
atgcttagtaaacatcagcttggtaaatgttgatctatggacacctagaaaatcaaacaggactgtgatgtcaaatagttagaaagttaattgaaattcaatattgactaagtaaaatttggtgagacataagacctttttgagtaactaacattttatttaagatttttgcgaccagatgagacatatttgggaagatggagaataaggcttttggcttagagaagacctagtacgatagattaaggaggtaacaagcctggcacagaaaaaaaatgcacatttgtcctaatcacaaatgctgtgaggtggtttaacaaaagcagaattactttctcttcagatatcttctcccaatctcagtaaatagcacgaaaatgtagttaagtgatcaaaccaaaattataagattccttcttttttttttttttcattctttcagctcccacacaaatagatagtattaactcactcatttctctgtgacgcaattgttagcacagtagtccaaaccatcaacttctctcatytggactgctcagcattcccacctgagggcttcctgctgctgtcgttgtcccttcaattcattctgtcccctgccctggctttcttgttgcctgaaaaatctaaccctattggctcctatatgaggtggaatttgtttctcttgtctataacttgactttta

SEQ ID NO: 892832 - DNA, 691 bp, Homo sapiens
atgcttagtaaacatcagcttggtaaatgttgatctatggacacctagaaaatcaaacaggactgtgatgtcaaatagttagaaagttaattgaaattcaatattgactaagtaaaatttggtgagacataagacctttttgagtaactaacattttatttaagatttttgcgaccagatgagacatatttgggaagatggagaataaggcttttggcttagagaagacctagtacgatagattaaggaggtaacaagcctggcacagaaaaaaaatgcacatttgtcctaatcacaaatgctgtgaggtggtttaacaaaagcagaattactttctcttcagatatcttctcccaatctcagtaaatagcacgaaaatgtagttaagtgatcaaaccaaaattataagattccttcttttttttttttttcattctttcagctcccacacaaatagatagtattaactcactcatttctctgtgacgcaattgttagcacagtagtccaaaccatcaacttctctcatttggactgctcagcaytcccacctgagggcttcctgctgctgtcgttgtcccttcaattcattctgtcccctgccctggctttcttgttgcctgaaaaatctaaccctattggctcctatatgaggtggaatttgtttctcttgtctataacttgactttta

SEQ ID NO: 892833 - DNA, 633 bp, Homo sapiens
attcatgtaatctacatctttaccaatatttcattgcccccagaaagtttccctgtgtccctagctcgcaaatacctgccctgaaacacaacacttctttctttctttcttttctttgaaattataggttagctttgattgctactgaacttcatgcagattgagtcatacagcatgcactcctttgttgtctggattctctcattagatttatccactttgttgggtgtatctgcacttcactcttttcattgctgaacagtatttcattgtatgagtgtactgaaattactgatctgttctgctgaaaaacatttgtcctggctaaatacttaggagtcaaatttctggatcatagaattgaaggatttytaattttataagaaccatcatattgctttccacatttatcatcagtgtattggagttcatttgctccacattctagccagcatttagttttggcagtcctttaaattttagacattctaaaatcacattatcattgtggttttaatttttatttccttggagaataatgttgaaaacttttttaatgggaatattgggcatatgtatgtctttctttgcaaagtatttggtcaatgttttgacatttaaaaaattatgctg

SEQ ID NO: 892834 - DNA, 612 bp, Homo sapiens
acttttcaaaagaagacatacaaactaccaacaaacatgaaaaaatgcttaacatcactaatcatcagagaaatgcagatcaaaaccacaatgagatactttctcacataaggcagaatggctattaataagaaatcaaaaaagaacagatgttggtgaggttgtggagcaaaggggacacttatacattgttggtgagaatgtaaattastgcagccaccatggaaagcagtttggaaatctttcaaacaacttaaaacagagctatcattcaacccagcagtcccattactggctatatatccaaaagaaagcaaattgttctaccaataagacacatatactcatatgttcattgcagcactattcacaataacaaagagatggaatcaaccaaggtgcccatcaatggtgactggataaagaaaatgtggtacataaacaccatgaaatactacacagccataacaaatagtgaaatcatatcctttgcagcaacatggattcagctggaggccactatcttaagcacattaatgcagtaatatacaaccaaatatcacacattctcacttacaagtgggagctgagcaatgggtactcatggacata

SEQ ID NO: 892835 - DNA, 630 bp, Homo sapiens
ctagacctttatcagatatgacattcgcaaatattttctcccattctgtgggttgtcttttcactttcttgattgtctcccttgaaatacacgagtttttaatttttgtttttttgagacagaatctcactctgtcccccaggttggagtgcagtggctcaatctcagctcattgcaacctctgcctcctgggttcaagtgattctcctycctcggcctcccaagtagctggtattgtaggtgtccgccatcattcccagctaatttttgtatttttagtagagacagggtttcaccatgttggcaaggctggtcttcaactcctgacatcaggtgatccacccaccttggcctcccaaagtgctggagttacagacgtgagccaccatagcagccaagtttttaattttgatgaaattaatctatgattttttgaattggatgaaaaccaactcatctaattttgatgaaatctaattcatctattttcatatatttatgaattggatgaataaatctaattcatctattctagatcttttctttttgtttggttacttgttttttgattttttttcttggtgtcatattaagaatgcaaggtcataaagacttaaacccacactttct

SEQ ID NO: 892836 - DNA, 595 bp, Homo sapiens
tgccgactattcactaaaagtgagccaagacacacctgtgtgcacgctttggtggagatatgcctttggacatgccagtggggttggaggcgatgctgggcatagagagtgggtggctgagcctccttcctgagctgctgtttgttttgagcttaagggcctgtagagactctgcctcctctgctggttgccacctcctcttttttttttcctcagagatggggtctcactatgttgtccagggtggtcttaaactcctgacctcscaccttggcctcccaaagtgctgggattacaggcatgagccaccgtacttggccagcgtctcacttttaatagtggagctgtggctgggtgcagcggctcatgtctgttatcctagcgctttgggaggccaaggggggaggatcacttgaacccaggagtttgaggtcagtctgggcaacatagcaagacccagtctctacaaaaaatagaagaaattagctgggcatggtgatgcatgcctgcagtctcagctacttgggaggctgagccaggaagatagcttgagcccagaaagtcacgaaacaccaggagtgtggtctaggtcttg

SEQ ID NO: 892837 - DNA, 620 bp, Homo sapiens
aagtcagcctggcaagtggtcagcacaattttgctgcaggcctccatcttgttttacttccttgggagcatgacctgtatgacatggcagtactttgttttagcctctgccatttggcaatagtagcctggttcattcccggmttagggaatgagtacttactagttaatacctgtgtgactttgccatttgctgattctattcccctccatgaaccatttctagcctcctttcttgaatctttccttctctgagctacctttaaagcttctagattttgtaaaaactgcttgccacctctttgagaatgtcttacacactcccagttaagtcataatcttagttgaggtttgttggtttcgcctctgaggttacttctggtaaagttcaaaagccaaaaatatcggctgcttggtgtggctaaagttgggtaataaggaatttaaaagggctttcttaatgagtgctcagtttaactaaaagtggatacccaagttatgtaaaaataattattcttgctgcactttatgcaaataatcagtccaagtataagactaaaatctcttttgcaaacaagtcagtcctatcataatttgtttttaacaaaaatgaagactgga

SEQ ID NO: 892838 - DNA, 573 bp, Homo sapiens
gtggctttatttctgggctctctattctgctttattggtctaggtgtctgtttttgtaccatgaccatgctgttttggctactgtagccctgtattatactttgaagtcaggtagagcgttggctccagcttaggaggtatcctaagctggatgttctttttgctttggattgccttgactattcaggttcttttttggatccacataaattttaaaatagttttttctagttctgtgaagcatgtcattggtaatttaataggaatagcatttaattaaaaaatttctttgggcagtatggccattttaacaatwttgatccttctaatccatgagctgagcataggatgtttatttgtttgtgtcacctctgatttctttgagcattgtttgttagttctccttgcatagatatttcacctcccttattaactgtattcccaggtattttattgtttttgtggcaattgtgaatggggttgcgttccagatttggctcttggcttgacccttgttggagtataggaatgctagtgatttttgtacactgatttttgcatcctgaggctttg

SEQ ID NO: 892839 - DNA, 420 bp, Homo sapiens
tttattaaagcttcaaatctttttttgtgtttttgttgttcaatttactagaattcataatggggttagggtccaattttccttaggatgaattatcttagtcatttatctatatctctacttttcttgtaattatttcattatatctgtatctctctcatacatttcaattatatgcaatgttcaactgtgtrtttctgttctctgccatccctaatttacaaatttgtgtaatgctgttgctttgttgtaattgattttcataattataatctttctattttattcaaattctggattttgttactgggttcttattgtcttcaactcatttattaagttttaaaagtaataaatagtactgttgaaaatttttctttgattgagtttgcttccaaaatcagtttttggaaatatttt

SEQ ID NO: 892840 - DNA, 511 bp, Homo sapiens
gtgtctagttttcccagttctactttttgaagaaattatacttccttacccattgtgtatccttagcactgttgctaaagatgggttgaccatatatgtatgagtttacatctggtctctttattttggtccacttaatatatctgtctttatgctagtaccatactgttttaattactatggtttctaccacttctattctgtaaagtcctggaagtcttagccagaaccattaggtaagagaaagaaatagaaggaatcaaaattgtaaaggaacagaataaaatgttctctgtttgtagatgacatcatcttgtgtgtagagaaccctaaaactccacytacacaaaatgttagaactaataaacaaattgagtaaatatgcaggatacaaaatcaacgtacaaaaaatcagttgtatttcaaaacattaacaaggaaccattctaaaaataagctaaaaaacaattccatttacaatagcataaaaatcatacaatatttagaaata

SEQ ID NO: 892841 - DNA, 642 bp, Homo sapiens
gaaggaactcacttcttgtcacaattttatgaccaatattattccatgagaatgtatggtactttcctgcttttgcatccattttatgagtatcattccgtcttttatctgcacgcttccttaaagccttcttctgctcacattttttttttctccaaagtcctctatcacttacttctctcatgtattacttttaggggcatataattatacattgyttcaaatatttatttatatattttttcatgtagtaatggttattgctacatcttacatttcatctgcagtgtttagcagatggcagatatttataaaatttgaatgaatgattaaatattgagtaacatatatatctcatataagcatctaaacatgttaatacacaagatagtaaaagcaaaccgatcttttggaggaatgtaagtgctcattcaatatggtggcatgggatcaatatgacaatataactactgtcttcaacctaatggtagctcatttgttacatgttcttaaatacccataattaacctttagatccttttcattgttaaagccactcatctgaaaagtctgctttttttccttgaagattggaagcagaaaaagatatagttttggaagtaaaccaaatttggataggct

SEQ ID NO: 892842 - DNA, 642 bp, Homo sapiens
gaaggaactcacttcttgtcacaattttatgaccaatattattccatgagaatgtatggtactttcctgcttttgcatccattttatgagtatcattccgtcttttatctgcacgcttccttaaagccttcttctgctcacattttttttttctccaaagtcctctatcacttacttctctcatgtattacttttaggggcatataattatacattgcttcaaatatttatttatatattttttcatgtaktaatggttattgctacatcttacatttcatctgcagtgtttagcagatggcagatatttataaaatttgaatgaatgattaaatattgagtaacatatatatctcatataagcatctaaacatgttaatacacaagatagtaaaagcaaaccgatcttttggaggaatgtaagtgctcattcaatatggtggcatgggatcaatatgacaatataactactgtcttcaacctaatggtagctcatttgttacatgttcttaaatacccataattaacctttagatccttttcattgttaaagccactcatctgaaaagtctgctttttttccttgaagattggaagcagaaaaagatatagttttggaagtaaaccaaatttggataggct

SEQ ID NO: 892843 - DNA, 642 bp, Homo sapiens
gaaggaactcacttcttgtcacaattttatgaccaatattattccatgagaatgtatggtactttcctgcttttgcatccattttatgagtatcattccgtcttttatctgcacgcttccttaaagccttcttctgctcacattttttttttctccaaagtcctctatcacttacttctctcatgtattacttttaggggcatataattatacattgcttcaaatatttatttatatattttttcatgtagtaatggttattgctacatcttacatttcatctgcagtgtttagcagatggcagatatttataaaatttgaatgaatgattaaataytgagtaacatatatatctcatataagcatctaaacatgttaatacacaagatagtaaaagcaaaccgatcttttggaggaatgtaagtgctcattcaatatggtggcatgggatcaatatgacaatataactactgtcttcaacctaatggtagctcatttgttacatgttcttaaatacccataattaacctttagatccttttcattgttaaagccactcatctgaaaagtctgctttttttccttgaagattggaagcagaaaaagatatagttttggaagtaaaccaaatttggataggct

SEQ ID NO: 892844 - DNA, 691 bp, Homo sapiens
catgatttcacaacaaaatggcaaagccaaagtgcacgtatctgtagaacttgactctctcgcaccacctcatgagctgtgagaaactggatccaattatattactttagaaaagacgctcaatgagtatagccacatctggccactgcaatactgacttccccttctgctgtctcttttctccctggcctttccattttcccttacccttctctgaattatcagaaaacaaaattggagaggaaacgtcccataaaaggatcaaagaagaagaaagaaggaaaaaggaagagaaggaaagaaagaatgatgggaggaaaacggttgagagtcattaattattgccttacaccaagtcacggggaaaatctgaagcctttgatgatggcagtgtctgtccaaatatacatcttctgaaagtgatactcttgtgtttgaaattacccatttaaaacattattaatttggtcaaactaatagcctctattatgccatattttamttgcaaagaccctcaggaagagaacacattaaagtgttatttgaaaaattaattcaccttaatgtgaaataaatgatcagagacttcccaatgctacagctcatataatttgtttctaaaggaaatacatggagattaaatcagagtggggcagggtgggtggatgcctatgggcataggcatagaaaa

SEQ ID NO: 892845 - DNA, 582 bp, Homo sapiens
acggagccgaatgttaatctccaagacaatggggaaaatatctccagggagtatcagaggctgtcatggcagctcttcccatcacagtcccagaggcctaggaggaaaaggtggttttgtttccggccccagggtccccatgctgtgtgcagcatagggacttggtgccctatgtcccagctgctccagccgtggctgacaggggccaatgtagagctcaagctgcagcttcagagggtgcaagcctcaagacttggcagcttatacatgatgttgagmctgccagtgcacagaagtcaagaattgggctttgggaccctccacctaaatttcggaggttgtatggaagtgcctggatgttcaggcagaagtttgctgcaggggtggcactttcatggagaacctctgctagggcagtgcacaaggtaaatgtggggtcggaacccccaaacagagctcctacttgggcactgcctagtggagctgcgagaagaaggccaccatcttccagaccctagaatggtagatccaccaacagcttgcaccgtgcacctggaaaagccacagagactcaatgccaac

SEQ ID NO: 892846 - DNA, 688 bp, Homo sapiens
agactggaccttagctagaaagaagaatagtactatcttgtacaagagaactgaagacaaaatgaaggtagatacatccgtctatgagtacatgaatagatttggtgacaaaaagttgagaagactcacccagtggtttttatatactctgtgaagaatgtaacaaagttacatgcagaagtttgaggagagtagaaaagttgtgaaatattttttgcacagaatgggagagggttgaccagtaaagtgtagcaggctcactggtcaatattaaggtccaagtaaggaactaatgaatggaagttgaaagcamtatgctgagttcattattttctctatgagtgctcgtttgcttatgcacattcttagagaaaccaggtatttcaggtgatgaagggctggtactttgccagagagaagtgatgaaagacagaagggcaaggcaattttgcctatttttagagaggtattgaaactggcgtagatacgtaatttatgaaaagcaatataacattctatttttctctaactgaacttgattttactttcaatcaccatttatccctgaggtggaaaatttttattcaaaaaaaattactaatgcatggaatctaagccagataggaagcaaagtgaagacagtaaagggataacaacaagggagatgacacaagagagactaagccta

SEQ ID NO: 892847 - DNA, 688 bp, Homo sapiens
agactggaccttagctagaaagaagaatagtactatcttgtacaagagaactgaagacaaaatgaaggtagatacatccgtctatgagtacatgaatagatttggtgacaaaaagttgagaagactcacccagtggtttttatatactctgtgaagaatgtaacaaagttacatgcagaagtttgaggagagtagaaaagttgtgaaatattttttgcacagaatgggagagggttgaccagtaaagtgtagcaggctcactggtcaatattaaggtccaagtaaggaactaatgaatggaagttgaaagcactatgctgagttcattattttctctatgagtgctcgtttgcttatgcacattcttagagaaaccaggtatttcaggtgatgaagggctggtactttgccagagagaagtgatgaaagacagaagggcaaggcaattttgcctatttttagagaggtattgaaactggcgtagataygtaatttatgaaaagcaatataacattctatttttctctaactgaacttgattttactttcaatcaccatttatccctgaggtggaaaatttttattcaaaaaaaattactaatgcatggaatctaagccagataggaagcaaagtgaagacagtaaagggataacaacaagggagatgacacaagagagactaagccta

SEQ ID NO: 892848 - DNA, 599 bp, Homo sapiens
cttttaaactacatatatgattctgatagaaggagaaactttctgacataaatacaggttacccttaagcaacatgggttttaactgggtgcgtccaattagacatggaattttttttcaaccaaacacagatggaaaatacagccttcgtgggatgtaaaacctgcgcatacagaaagccaamtttttatatatacagattccacagggccaagtgtgaggcttcaccatgcataggtttgggtatttgtggacgtcctggtaccactgccctgcgtatactgaaggtcgactgtactatgcatgagagacttccactttaaaatggcatctggtgatatccaaattccccacaaaagcatttgtaaatactctgaaaaatgcaaaaatgtacaatgctacaaaaatttggtctgcaagaatgtatttacttacttacctaaggaaaccaaattgaaaaatgaaataagtagccttccatgccctatttgcctgaaaatatgtctttggttctcctcaaacttcacccaagtgccatgggaaacagcacaggacaacagctaagagtaaagactctggagtgaggctgtgcttgtaag

SEQ ID NO: 892849 - DNA, 599 bp, Homo sapiens
cttttaaactacatatatgattctgatagaaggagaaactttctgacataaatacaggttacccttaagcaacatgggttttaactgggtgcgtccaattagacatggaattttttttcaaccaaacacagatggaaaatacagccttcgtgggatgtaaaacctgcgcatacagaaagccaaatttttatatatacagattccacagggccaagtgtgaggcttcaccatkcataggtttgggtatttgtggacgtcctggtaccactgccctgcgtatactgaaggtcgactgtactatgcatgagagacttccactttaaaatggcatctggtgatatccaaattccccacaaaagcatttgtaaatactctgaaaaatgcaaaaatgtacaatgctacaaaaatttggtctgcaagaatgtatttacttacttacctaaggaaaccaaattgaaaaatgaaataagtagccttccatgccctatttgcctgaaaatatgtctttggttctcctcaaacttcacccaagtgccatgggaaacagcacaggacaacagctaagagtaaagactctggagtgaggctgtgcttgtaag

SEQ ID NO: 892850 - DNA, 591 bp, Homo sapiens
taagtctgtttaaatccaggtagtaacacagttggtttccttcttctgagcctttcaggaaatattaatgtagaaaaaaatctgctgttacagacatgcaaggtgtatcttgccgcatgagaattacttaatgggtacaatgcacattatttgggtggtggctaccctaaagccttgacttggccmccatgcaatctaggcatgcaacaaaattttacctgtgccccatacccttatataaattaaaaaaaaaaaaactttacaaaggtcaggtcatccaagaatcaacagcatttagatagatgttttaggtccctgtagctcaaagtatggccctgagattatcagcacctgggaacttattagaaatgcagaatcttaggccccatccagagttcctcaattatttctgcattttaacaatatcctccaggtgatttgtatatgcattattaaactttgaaaagtactgttttaaatgatcttgaaaataacttataatcttaaaaatgcatgagctaaaatgtgtgtgttttaatgaaatcaggggtatattattattcaaagtaattccagtgtgaatcttttcaa

SEQ ID NO: 892851 - DNA, 599 bp, Homo sapiens
cttttaaactacatatatgattctgatagaaggagaaactttctgacataaatacaggttacccttaagcaacatgggttttaactgggtgcgtccaattagacatggaattttttttcaaccaaacacagatggaaaatacagccttcgtgggatgtaaaacctgcgcatacagaaagccaaatttttatatatacagattccacagggccaagtgtgaggcttcaccatgcataggtttgggtatttgtggacgtcctggtaccactgccctgcgtatactgaaggtcgactgtactatgcatgagagacttccactttaaaatggcatctggtgatatccaaattccccacaaaagcatttgtaaatactctgaaaaatgcaaaaatgtamaatgctacaaaaatttggtctgcaagaatgtatttacttacttacctaaggaaaccaaattgaaaaatgaaataagtagccttccatgccctatttgcctgaaaatatgtctttggttctcctcaaacttcacccaagtgccatgggaaacagcacaggacaacagctaagagtaaagactctggagtgaggctgtgcttgtaag

SEQ ID NO: 892852 - DNA, 601 bp, Homo sapiens
gccagcaaagtctcaggatacaaaatcaatgtgcaaaagcacaagcatttctatacaccaacaacaggcaagcagagagccaaatcatgaatgaacttccattcacaattgctacaaagagaataaaatacctaggaataaagctaacaagggaattgaaggccctcctcaagaagaactacaaatgactgctcaaggaaatcagaaaggacayaagcagatggaaaagcattccatgctcatggatagaagaatcaatatcatggaaatggccatagtacccaaaataatttatagattcaatgctattcccattaaactaccattgatattcttcagagaattcttagaaattcttagaaaaagctattttaaaattcatatggaaccagaaaagagttcatatagccaagaaaatcctaagcaaaaggaacaaagctggaggcatcatgctaccagacttcaaactatactacaaggctacagtaaccaaaacggcatgatattggtacaaaaacagatatataaaccaatgtgaaataatagagaactcagaagtaagaccacacatatacaaccacctgatcttcaacaaccccaa

SEQ ID NO: 892853 - DNA, 652 bp, Homo sapiens
aagagaataaaatacctaggaataaagctaacaagggaattgaaggccctcctcaagaagaactacaaatgactgctcaaggaaatcagaaaggacacaagcagatggaaaagcattccatgctcatggatagaagaatcaatatcatggaaatggccatagtacccaaaataatttatagattcaatgctattcccattaaactaccattgatattcttcagagaattcttaraaattcttagaaaaagctattttaaaattcatatggaaccagaaaagagttcatatagccaagaaaatcctaagcaaaaggaacaaagctggaggcatcatgctaccagacttcaaactatactacaaggctacagtaaccaaaacggcatgatattggtacaaaaacagatatataaaccaatgtgaaataatagagaactcagaagtaagaccacacatatacaaccacctgatcttcaacaaccccaacaaaaacaagcaatggggaaaggattccctatttaataaatggtgctgggagaactggctagccgtatgaataaaattgaaactgtaccccttccttacaccttatacaaaaattaacttaagatgggttaaatatttaaatataaaacccaaagctataaaagcac

SEQ ID NO: 892854 - DNA, 668 bp, Homo sapiens
aacaatggttcttaatcaggctgagatggctgaaatgatagaaatagaattcagaatatggacagaaacaaagatcattgacatacaggagaaagtgaaaacccaatccaaggaatctaaggattacaataaaacaatataggaggtgatagataaaatggtcattaaaagagagaaccacactgatctgacagagctgaaaaacacactacaagaatttcataatgcaatcacaagtattaacagcagaattgaccaaactgaggaaagaatatcagggcttgaagactctctctaaaacaactcagtcagagaaaaattttwaaaaaaataaagaatgaacaaaagctctgagaaatatgccattatgaaaagaaacacattctacgattcactggcgtttgtgaaagaaaggaagagaaattaaccagcttggaaaacatttttcaggatattgtccataaaaatttccccaaccacactagagaagccaatattcaaattcagaaaatttagagaatccctgtgaaatactaaacaagaagaccatccccaagacatatagtcatcagattctccaaggtcaaaatgaaagaaaacctgacaagaaagctagagagaaagtgcaggctgcctactgatatggtttggctgtgttcccacccaaa

SEQ ID NO: 892855 - DNA, 668 bp, Homo sapiens
gtgcagccccagaggaggctgtgagtgcatattatcatgacaaggaagtgaagagttgtgaccaataggtcaaatactatagaataacaaccagttctcatttatctttatgtgtatatccagtgcctgggactatacttgaccattgtgagtcctcaagacatgtatgaagaatgaatgctctgacactgctgatagtgttcccacactcattcgttctgtgaggcatactccaaaccacatcaaactaccaaagatttgaaacacaggatgttgaactccccaattatatttatcgagacattcaacagcttccaaacagaaatacaaagatagagattttcatacagtaaactgttaggttataatttgggcagaagaacataaagttgtagccttagacatggaatttattcatttccgtttgtggtatattgttttccaaaatgcctacaacgatayctcctttcccatgtgtgcctttgcaataggaccatgccacccatcccagcaaggggtacagtctgtttctaccttccttcaatctaggatatccttgcgacttgcttgaccagtagaatgtggtggaagtgaccctatgcagttatgggtctacgtcttaagaggtcttgcaatatttttctaagaggtcttgcaatatttttctt

SEQ ID NO: 892856 - DNA, 604 bp, Homo sapiens
gtgaacataaatccaacctttccagtaaaagcattaaatgcaaatggatgaaacacttcattcaaaggacagagactgacaaaacaaataaaagcaaaaatgatctaattatatactatctacaagagacacacattagattcaaagacatataaattgaaattaaaggatgaaacagtgtatatcatgcaaatagtamacaaaagagaactcaagtagctatatcaacataaatcattcacacactcttccaaaaaaaagatgagaaacacttcccagtttatttgaccagtattaccataataccagtccaaagaaatcataacccaaaaaaataaataaaatagactgtaaaagaaaaagtgaaaccagagacaaaaatgggcatattgtaatgataaacaggcaagccatctggaagacaaagcaattaaaaacatgtatgcactaatgaaagcacctcaaatacatgaagcaaaaaaaaaaaccagtattgaatggagaaatgaacaattcaacaaaacaatttatgactttaatacctcactttcagtaatgggtagaaaaactaggcaaaatatcagccaggaaacagatgcttgaa

SEQ ID NO: 892857 - DNA, 634 bp, Homo sapiens
gaaaacctatcagacaaacaacagattttttagcagaaaccctacaagctagaagtgattggggtcctatctttatcctcctttaaaaaaaaaaattatcagccaagaatattgtatccagcaaaattaagcttcattaatgagtaaaagataaagtctttttcaaacaaacaaatgctgacagcatttgtcactgccaaatgaatactaaaagaattactaaaaggggttccaaattttgaaacaaattctcaaaatacaccaaaatagaaacttcttaaggttcttaaagcacaaatctcacagggcctgtaaaacaataacmcaataaaaaaaaaaaaaaaaaaacaaggtattcaggcaacaaatggcatgatgaatagaaaagtacctcacatctcaataccaacattgaatataaatggtctaatcgctcaacttaagagatacagaatggcagaatggataaaaattcaccaagcaagattctgctgtcttcaagaaactcacctaacataaaaggatttacataaacttaaggttaaagggtagaaaaatatattccatgcaaatgaacaccaagagccaacagaagtatctattcttatattagacaaaacagactttaaagaaa

SEQ ID NO: 892858 - DNA, 580 bp, Homo sapiens
tgaggaaactcaatgatatctaaaataacacagagaaataattcagaatcctatcagataaatttaacaatgaaatggaaataactaataagaaccaagcaaagattctgaagcagaaaaatgtaattgacatactgaagaatgcatcaaagtctctcaagaacagaattgatcaagcagaataaagaattagtggtcttgaagatgggctatttggaaatgcmcagtcagagaaggccaaaaaaaaaagaagaatgaaacacaactacatgatctagaaaacagcctcaaaagggcaaatgtaaaagttattggtcttaaagaggagatagagagagagagatcagggtagaaagtttattcaaagggataataacagaaaacatctcaaacctagaaaaagatatcaatattaaagtacaagaaagttatagaacacaaagcagattttaccaaaataagactacatcaagacatgtgataattaaactcccagaggtcaagaataaagaaaagatcctaaaagtagcaagataaaagaaacaacatacaaaggagatccaataaatctaccagcagg

SEQ ID NO: 892859 - DNA, 515 bp, Homo sapiens
aaaaaagatacttgcacacacatatttatagcagcacattttgaaatggcaaaaaatatgaaaatagcccaaatgcccatcaatcaatgagtagataaaaaaaattgtgtgtgtgtgtgtatatatatacatatatatataaagaaattgtgtgtgtatgtatatatatatatatacaccatggactactactaagccacaaaaaggaacaaaatartggtattagcagcaacttggatggaattggagacttattctaagtgaacaaactcaggaatggaaaacctaacattgtattttctcactcatatgtggaagctaagctatgagtgcacaaagacatgagaataatagactggactttggagactcaggggtaagggtgggaatggcaaaagataaaagactgcatattgggtacagtgtacactgctcgggtgatgggtgcacccaaatctcagaaatcaccactaaagaacttatccatgtaaccaaacactacctattccccaaaa

SEQ ID NO: 892860 - DNA, 519 bp, Homo sapiens
aaatcctcaataaaatactggcaaacagaatctagcagcacatcaaaaagcttatccagcacgatcacgttggcttcatccctgtgatgcaaggctggtttaacatacacaaatcaataaatgtaatctgtcataaaaactgaacaaaaacaaaaaccacatgattatctcaatagatggtgaaaaggyctttgacaaaattcaacaatgcttcatgctaaaaactctcaataatctaggtattgatgggatgtatctcaaaataataagagctatttatgacaaacccacagccaacagcatactaaatgggcaaaaactggaagcattccctttgaaaactggcacaagacagggatgccctctctcaccactcctgttcaacatagtattggaagttctggccagggcaatcaggcaggagaaagaaataaacggtattcagttaggaaaagaggaagtcaagttgtccctgtttgcagataacatgattgtatatttagaaaaccccattgtctc

SEQ ID NO: 892861 - DNA, 570 bp, Homo sapiens
ctaaagacatagatttggaagttattggcatataggtcatgttggagtcatgtaagtgaatgaattatcaagggcagaaagaagagagaggaaaaaaggtagaactcctgagtaacaccaatagttatgggatgtagacagagaaattactagaaggaataaacagagaggttggaaggtaatctagacaccgtggtgcatgcagaaaacctaagaggagagaaaataattctaaagcgggaataatcaatactgccaaattctgcagaaggggaaaaataaggataaggacagaaaagtggccaatagagtctgtatcataaatccagagagagaagagaaaaaaaactaagactacaggtctattgtgccatcartgacttgagatattgccttaatactggctaacagagatattgtgtctaactgaacatcctaggaagttaatacagaggttacttcttcttatgcatatttgaataatattaaatatattcatatagctattaaaaagtataagacagctatatagtaaatttacactagtattttatgagcaggaggatatcc

SEQ ID NO: 892862 - DNA, 637 bp, Homo sapiens
aacataaggtaagaactgattccaggatgggtgactctgctatgtgttgcctgatccggatacattttaaattgaactccatcattttttgaggccctctgggaaacgtatccattgaaaacagtcgacaccagggtctacttgaatggggctgggggaggtgggatgagggagaggagcagaaaagacaactactgggtactgggcttaataactgggtgatgaaataatatgtacaacaaatctcatgacacatattttcccatttaacaaacctgcacatgcacctccaaaccaaaaataaaaataaaaataaatgaataacaacaccacaaagaccagcaggattccagcctgatactgtaatgtattttggattcttaactcgatcctaaaataggaaatttgtgcattgctagtgacagaargaatattatttgcaagatttattggcaactttgcatttattctcgaaggcagtggttcccaacctttttggcaccagggaccagtttcatggaagacaatttttcacagatgggggaaggtgggaggatggttttggtattattcaagctattacatttatcattaaattctcataaggacaacacagcctagatccctcccatgcaca

SEQ ID NO: 892863 - DNA, 619 bp, Homo sapiens
acataaaaattggtatttacgattttttaaaaaaatctcccaaatagttacaaataatactctagaaagtaattgtaatgaatgcaaaacacattcacacatccttaatataaaagctgtagaaaatattaaatattttacccttaaatagatgtaagtcaaaacgtgaatattttgcagaaaaattcatcaaattaataactgtctataatatcaacaataaacacaaaaatgaaatttgcctttttattaaacaattttagaaacattaataaagtaaacatattatttgctggtgagtggatcatataatagacacttctatagctctcagatatattattgtatatgcaatgagaaaacatcaatataacatttctggatgaaaatgtagcaatgcaaayaattatctaacgtttaataaattgatatagcatagagcatcataacagacagtgtttagaagaaaaaccataaaattactaaaagaaaatgtaaaagcaccatctagcatggtagctcattcctgtaatcccagtgcttttggagatggaagccagagaatcacttgaggccaggtgtttgagaccagcctgggcaacatagtgagacttcattt

SEQ ID NO: 892864 - DNA, 607 bp, Homo sapiens
cacggttaggtgtgtctgaagtcagattttccttgggtgatgctcactgtggctgctgtggggtataggggtgtggttcccaggccaatgaagtcatattctcaggagcattatggctgcctctgttgcatcacacaggacgctagggaagtggggaaaagctgacagccacatgtctcacccggctgccgtgctgcccacagccagaaaggctggtcttactcctattgtgcccccacaacagaaccaagtttatttccaagcagctggtaagcagggctgagaacgtgctccaggctacaagcctcccagctgagaatgcaagccaactcacagtttctcaggcatccyatggagcctgcagaggcaatccgcatccttcaaagggtttgtggattctttctgctttcctggtatgttcctgtgtagttcttgaagtgaaagttcacagtgtgggtctgcacaccttactctgtctgagtgtgagctgccagttagtcctgcctcctatcccccatttttcctcgtccttttaattcaatactttttaaataatgtgcttaaactcatctaggtttctactggagggtattcctgagcaatgaaa

SEQ ID NO: 892865 - DNA, 607 bp, Homo sapiens
cacggttaggtgtgtctgaagtcagattttccttgggtgatgctcactgtggctgctgtggggtataggggtgtggttcccaggccaatgaagtcatattctcaggagcattatggctgcctctgttgcatcacacaggacgctagggaagtggggaaaagctgacagccacatgtctcacccggctgccgtgctgcccacagccagaaaggctggtcttactcctattgtgcccccacaacagaaccaagtttatttccaagcagctggtaagcagggctgagaacgtgctccaggctacaagcctcccagctgagaatgcaagccaactcacagtttctcaggcatcccatggagcctgcagaggcaatccgcrtccttcaaagggtttgtggattctttctgctttcctggtatgttcctgtgtagttcttgaagtgaaagttcacagtgtgggtctgcacaccttactctgtctgagtgtgagctgccagttagtcctgcctcctatcccccatttttcctcgtccttttaattcaatactttttaaataatgtgcttaaactcatctaggtttctactggagggtattcctgagcaatgaaa

SEQ ID NO: 892866 - DNA, 607 bp, Homo sapiens
cacggttaggtgtgtctgaagtcagattttccttgggtgatgctcactgtggctgctgtggggtataggggtgtggttcccaggccaatgaagtcatattctcaggagcattatggctgcctctgttgcatcacacaggacgctagggaagtggggaaaagctgacagccacatgtctcacccggctgccgtgctgcccacagccagaaaggctggtcttactcctattgtgcccccacaacagaaccaagtttatttccaagcagctggtaagcagggctgagaacgtgctccaggctacaagcctcccagctgagaatgcaagccaactcacagtttctcaggcatcccatggagcctgcagaggcaatccgcatccttcaaagggtytgtggattctttctgctttcctggtatgttcctgtgtagttcttgaagtgaaagttcacagtgtgggtctgcacaccttactctgtctgagtgtgagctgccagttagtcctgcctcctatcccccatttttcctcgtccttttaattcaatactttttaaataatgtgcttaaactcatctaggtttctactggagggtattcctgagcaatgaaa

SEQ ID NO: 892867 - DNA, 664 bp, Homo sapiens
ttaacttttaatattcattttataatattcagtttataatgatatgatagcctttgttgctatatttatatatttaaataacttaattatttaattcctttaatcctttctaatttttttaaaatctggcaatgtgtatgtgttatgtatattgtagaggccaaaggaagaaattcgaagaaatttgcctttggctaaggaatcattacatacagkggtctattgtggaggtttcttcaaaagaatgtgaacatgttttatttttgctcctttactcactttacaattagaaagattcagatctcttgagtgtaagattactttttaaaaactatactgaacttataaaattgctttatattttcaaagctacatcgtagtttcatctcataaatgatctcatttttcaacattaatttttgcaaggcatggctcaatataatcataatggcttagatcaggtcatgaagtcatcaaattcctattgtcccttgtgcttatgacacaaaaagtatgaagaaaacgaacaatatacatacagatgcatacactacactatggaaggaatgtaatcaagattatcccattttttagtgctaagctaactcattatttgtggctgactcattataacaaaatagacttacttttcaaattactctgt

SEQ ID NO: 892868 - DNA, 662 bp, Homo sapiens
acgggttcacaggtaggtagtgactaggagacatctactttgaaaactaataaaaatatttggctgtctaaaaaatatgcactacccaaatcagtgcagtatagggtaaataattttaaaaagaatgttagggagcaaattcttggtggtttcttacatttatgcattatcttacaaatgaggacacatttgtacctttttccaaactgtgtttttaaaagtgtttgtataagagccttagaaaatayagagtatctacttttgaagagcaaaaaataaacattctaactgaacagttaaaaataatgggcatacataaactcgggatttttctgcagtaaggaagcttaccgcttatgcaggtttaactatccctcttcacattaccctgtgaaaactgggtctcagaaactggtgcagaaatgccagtactctagctatgctgattgttgataataaaaaactcttctttgtatctgattcaggagtcttttatcttctactgtaattcatacaattttgaaaagatacctacttagatttctcgtagggtaaaaactttctaatctttcacagtccttaaacacagctatacattttctacttgaattccttaaataaccacttactttgagcacaaaccatgatcaagacaatattat

SEQ ID NO: 892869 - DNA, 614 bp, Homo sapiens
attgcagatgtaatgatttgagatgagttcataccagagtaggttgggtgcctagtccagcatgactggtgttcttatagaaagagaaaatttgaacccaaatacccatggatggaggaggatgtgaagaggcaaggaagaagatggatatcagtaagcccaggagatagacctgacactgagctttctttgacccccttaaaaggaaccaacccttttgacaatgccttgatcttggacattgagcctccagaactgtgaaatgctaagtttctattgtttaagcaattcagtttgtcatacttctttacaacaatcctagcaaagtaatgyattgatcttacctgacttttgccgtgtttataacaaatctgaatacctcttccttcttgaaattcttcttttgtttgtcttccataatcatttgcttcccactttttccatggacaaatgctaaaactctaatgtttatcacagaataaagcgtgctcttggtgacaaaatatgaacctcaaactatatttccactattatttgtcccctgagttacaaatcagtatacgtaaatggctattagatattatcatgtaatagttctataggcatttcacatt

SEQ ID NO: 892870 - DNA, 609 bp, Homo sapiens
ttctgtctttttctgacccctctacactcttccaacctctgcctgttacctagttcctaagtcacttccacattttcaggtgtcttcataacaatgccgaactcttatgtatcaattttctgtattagttcattcttacattgctataaagaaatacctgagactgggtaatttataaagaaaataggtttaattggctcacagttccacaggctgcacaggaaggatggctgtagaggtctcaagaaacttacaatcacagtgaaaagtgaaagggaagaaggcacatcttcacatgamcagagcaggaggaagagaggtctgggggaggtaccacacactttcaaccagatcttttgagaactctatcatgagaacagcaccaaaaggggaaatatgcttccataatccaatcacctcccaacaggccccaccaccaatatttggaattacaatttgacatgacatttgggcgaggatacaaatccaaaccatttcaaatcctattcctgtttgccttcatgttgataatatttcaacaatcaaggcatactgaaacaaagtgtctgcctttttaaatcaatttcttcattcaaaccagaatggaat

SEQ ID NO: 892871 - DNA, 627 bp, Homo sapiens
attcttctataaaggaatgtaataactaattagtaaccttccaaaaagaacatccttaattacaagttacttactaataaattcaaccaagcatttaagaaagaagtaataccaattctctatattctcttccccaaaatagaagcattagaagtactttctaactcattctatgagcccagcattatctcattatccaaatttagtaaacaattaaaagaaaaaaattcttaaaatatcaaaaactggagaccttatctctcttatctacatacatctcctgaacacaaacagaaacatccttaamaagtaacatcatcctgtaaaattagcaagatggcaaaacaggaaactcaagttttggttccccacagaaatattttttaaaagcttgcaaatgaataaaataactatatagaagcagtggaaaacagtcaaaagtttacagcttcaagtaaatgaacaaacgaggaaaactcaacttttgtggcatttttgcttcctcttcccccactttctctccatttctgggttatcttagtcttggtctgaagacggtggcatgtaggcccaattgtcacttctctcccttgaaccgaactggagggagaagagcagacggtattt

SEQ ID NO: 892872 - DNA, 584 bp, Homo sapiens
caacagtaacagaacagtgttagagggcttactacgtattattccatgacttcatataaagccacagtaggtattaatataaagagatcagtagaaaggaaaaaaaagaacaaaaatatattaacacaaaccctatgaatggattttcaaagctggctagctagtaaggaaaggcttttcatttaatgatttaaatgatgttggaatggtacaaacatctggaagaacaattaactgaattaaaaccatgtgcataatatcacatacctacatatttgacataaaaatatcaatgtatataaaagataaaattatgacaattctagtagaatacatagaatgttttcagaaatttaatactaaacataacataaaatgatwcattaaatgttacagaatatattaaatgttacttactcaaaataaataacatttctaatgaaaagataccaaaagaaaatgaaaagataaaccactaaataggcaaatatatatgcaatgcatgaaacagagatggtatccagaatatatagacatacatatatcaaatagatgtacacacactttgacacacacatacatat

SEQ ID NO: 892873 - DNA, 593 bp, Homo sapiens
atatggtgactgaagagctagttacatagatgactacatttgttaaaacattcatcttatgtttggatgccatttattttattcataaaaattgcacctgtccaaaaaaatcacccaaagatatgggacaattttgaattaattaattataaaatataaaagttcattatattatattgaacataatttgcagcataaaagtgcagcaaaaaaamctctcaaattctgtgtaaaagatttgccaggaaaacatattacttttaaataaaatttttatatttagaagatattctgaaatttgcagccacatagatagaactggaggacattatgtctagtgaaataagccaggaacagaaaattaaacactgcatgatcagactcatatgtggaagctaaaaatggttgatctcacagaagtgaccattagaacagaggatactggaggtggaaagggtagggagaaggcaaggatagggagaaatttgttataagacctaaaattatagcaacataggaagaatgatagctaatgtttaaaccactataggatgactacagttaacagtaatatattatgcagtcccaaatag

SEQ ID NO: 892874 - DNA, 589 bp, Homo sapiens; identical to SEQ ID NO: 860129

SEQ ID NO: 892875 - DNA, 669 bp, Homo sapiens; identical to SEQ ID NO: 860126

SEQ ID NO: 892876 - DNA, 674 bp, Homo sapiens; identical to SEQ ID NO: 860127

SEQ ID NO: 892877 - DNA, 623 bp, Homo sapiens
ttctatgagaaatcatgctgaaaaagcagattgtagtagatcctttagagatttgaatattatgttaggaacttcggattttcttcagtagaaagcaggaagtagaagtaattgaagccttttaagaagggaaattgcagaatttatatatgtgtgtatattatatatgtrcatatacatatatattatatatatatatatatatatatatatatatatatatatatataaaatatcttgatcaaagcatatagtatggattgcagacggcagagagtggagcctgggagatcctaatagtccaacaaggagtactgagtactttaaccagggcagaagcagtgggagagagacatgaagactgacctcaaggatgtggaatgtacaaaggcagggcaagtgatcacaaatgagggagtgaaagtaacttagagagaggccagaaggaagagcaggtggacgtactgatgtgatggattttgccgtgaacttgttgaatgctcactgatgcaagtgaaagtgcccaggactctattgtcaacatggagttgggagtggatgaaatgcgtcagagtgtagaaacaattcatggttgaattgatagcatctgataaaacatctct

SEQ ID NO: 892878 - DNA, 624 bp, Homo sapiens
atcagaactataccgcattttttccagttttgtattatgtctaatatatactaatattattctcttaaaatttgatgaaaaaaataaaatataatgattttcttaaaaacccatatttaaaaggagacagtgattgctagttgaaactttcaaaatccatttttgaaaatttctactacgtaaagaaatctagaatctattctaataagaacatattttcatatgctgaagattgcaattaaatcagtgtaagccctttttcctytagacaaaactgtcccgattcttagaactttctgtatatcatattttccatatctcttataaaatatatttgcttttatgaaacaccttagagttcttcacattccatttaaggttatatggctcacaataaaagaaaagagaaaccttctgttttatgcagcattttctagtctctagtctttaatcctgcagataaaaagtccaagggccagaagtatagctacacgatggaagaaaatatttgcacatcttaatgtaagttaggttattcatcataaaatttaacacagatatggagcagtgaaaagaaaaatgagttttaatactctataatgtgctagagatcatctgtactga

SEQ ID NO: 892879 - DNA, 568 bp, Homo sapiens
tgtaccatgataaagtgggacatatctatgaaatttaaggatggttcaacatatgtaaatcaataaataagatacacctttttaacagaacggataataaaattgatcatctcaatcaaaagatgcagaaaaaaacattcaaaattcaacaatcttttatgaaaaaaaaactyagcaagttatttttaaaaggaatgcacttcaacataataaaggccacaatgacaagctcacaactagcatcatacctaatggtgaattgccagaagctttcttcaaaaatcaagagcaaggcaagtatgcccactctcaccacctctattcaacatagtacagaaagtcttagaacaactgtgcaagataaaaaaaaaaagacatccaaatcagaaaggaagaagttaaatgttctggtttgcaaagcatattattttaaatatcaaaaattctaaacatgctaccaaaatacttttagaataaaagaattcataaaatagagggataaaaagtcaacataaaaaatatgttgtttttctatacataacagcaaactatccaaaacagaaattaa

SEQ ID NO: 892880 - DNA, 617 bp, Homo sapiens
gtgaggtactagtgagccctttgcttttatgaatgtgggcccaatataccaaatagtgactattctttctccacaggagtggccacctggtgaacccatatattgcacacggcatcagtctttcccagaagtgctctataggatggaaatcatagcctgattaagacataaaaccgacagtccccgggcaaatctttatcctaagcttactacatatagtgatgttattgtctgaatatatgtgttctcccaaaattcatctgctaaaatattaattcccaaggtgataacattaggagatgatggcatttgagagatgattagattgtgagggcagwgctctcatgaatggtagtagtgcccacataaaagaggccccagagagctagctagccctgtccatcatgtgagaacgcaaggtgaagatgaccatcagtgaacgagaaagcaggccctcaccaggcattgaatctgccagcaacttgttcatgaacttcccagacttcagaactatgagaaggaaatttcttttgtttataaccttctcagtttttggtattttttatagaaggctgaaaaaactagacagaatcaagacacatgccttaatctgaaat

SEQ ID NO: 892881 - DNA, 617 bp, Homo sapiens
gtgaggtactagtgagccctttgcttttatgaatgtgggcccaatataccaaatagtgactattctttctccacaggagtggccacctggtgaacccatatattgcacacggcatcagtctttcccagaagtgctctataggatggaaatcatagcctgattaagacataaaaccgacagtccccgggcaaatctttatcctaagcttactacatatagtgatgttattgtctgaatatatgtgttctcccaaaattcatctgctaaaatattaattcccaaggtgataacattaggagatgatggcatttgagagatgattagattgtgagggcagtgctctcatgaatggtagtagtgcccacataaaagaggccccagagagctagctagccctgtccatcatgtgagaacgcaaggtgaagatgaccatcagtgaacgagaaagcaggccctcaccaggcattgaatctgccagcaasttgttcatgaacttcccagacttcagaactatgagaaggaaatttcttttgtttataaccttctcagtttttggtattttttatagaaggctgaaaaaactagacagaatcaagacacatgccttaatctgaaat

SEQ ID NO: 892882 - DNA, 420 bp, Homo sapiens
aggtctaaaactgggttgaaagacaagaattggcattgtctgttgttgtggttggagtatgagagcacagtgagggttcccatggctgatctggtgtctgcataggacagagattctaattggcaccaaagaagaaagtaatcaggttttcttatttgttttcatagttayagaaagcagagaagagaaaagagtgggaattaaaagctgtcagctgtcagatttaaaaaatggaatcagaacattacattcctgatcatgcaaatcaaaaccacaatgagataccatctcacaccagttagaatggcaatcattaaaaagtcaggaaacaacaggtgctggagaggatgtggagaaataggaatacttttacactgttggtggactgtaaactagttcaaccattgtggaagacagtgt

SEQ ID NO: 892883 - DNA, 644 bp, Homo sapiens
ctcattttaaattgtatttaaagggtaaaatagaaggttgtctttagttttgaaaatatatatgttatcaaaagtaaagaataaaaattatcaggacaaattgaaacaaagtttaagttgagattcctcaaaataagagtgagtcctcaggagaaaaggagggacgctgtataattacaagcagggtcttagatccatcaagtataagatatgtttagtagtgatttaaacaggattgagattaagtaagctcctgaaactaatgggttattcctaattctttacctttataaggcattaaaatacagaaagagatcctgaagctttagagrtctgttatgtactgaatggtagtgttcccctaaaattcatgttaacatcctaatcaccactgcaatattctaaggagacagagcctttgagaggtaattaggattagatgagcttcatgagagtgaggcccttatgatgggattagtgccctaatatgagacaccagagtgtttcccctttttgtttctctccatagcatgtgatgacacagtaagatgatgatgatctgcaagccaggaagagaactttcaccaaaataggaccatactggcaccttgatcttggactttcaggcttcaggactgtaagaa

SEQ ID NO: 892884 - DNA, 597 bp, Homo sapiens
ctaacctctctttgtgtattaatgttttattttatcgcttaaatattgattcagaataaatattattccgaactaagtacttatacgtgatttgcagagggctttgtaacctaaattctttgagaaattgtattacctgccagctctatactctgtcacaatattccatgtgtcattctggcacattagagctattaccacaatatagaagctttgctttcagctttcataacatttgaaatttgcacatttattatacttagtttaaacataacccacccagtaattrtttctttaggatttactatgggggaaaaataaataaatgaatatcctatgccacatgaccctaaattacattcagcatatttcctcaggtgtatttaaataaatatgtaaaatgttggtgacagaatcaggttaatgttaacaggagacatttaatgcaacagaaatgaataggcaattaattttggtggtagcaatagttcaagactcttaacggtggtacctttgaactgtaagatctttgcaaaaaaggagatgttaatattcttctctatggatgatatacatgtatatttagataattttaac

SEQ ID NO: 892885 - DNA, 585 bp, Homo sapiens
caacagtaacagaacagtgttagagggcttactacgtattattccatgacttcatataaagccacagtaggtattaatataaagagatcagtagaaaggaaaaaaaagaacaaaaatatattaacacaaaccctatgaatggattttcaaagctggctagctagtaaggaaaggcttttcatttaatgatttaaatgatgttggaatggtacaaacatctggaagaacaattaactgaattaaaaccatgtgcataatatcacatacctacatatttgacataaaaatatcaatgtatataaaagataaaattatgacaattctagtagaatacatagaatgttttcagaaatttaatactaaacataacataaaatgatwcattaaatgttacagaatatattaaatgttacttactcaaaataaataacatttctaatgaaaagataccaaaagaaaatgaaaagataaaccactaaataggcaaatatatatgcaatgcatgaaacagagatggtatccagaatatatagacatacatatatcaaatagatgtacacacactttgacacacacatacatata

SEQ ID NO: 892886 - DNA, 594 bp, Homo sapiens
atatggtgactgaagagctagttacatagatgactacatttgttaaaacattcatcttatgtttggatgccatttattttattcataaaaattgcacctgtccaaaaaaatcacccaaagatatgggacaattttgaattaattaattataaaatataaaagttcattatattatattgaacataatttgcagcataaaagtgcagcaaaaaaamctctcaaattctgtgtaaaagatttgccaggaaaacatattacttttaaataaaatttttatatttagaagatattctgaaatttgcagccacatagatagaactggaggacattatgtctagtgaaataagccaggaacagaaaattaaacactgcatgatcagactcatatgtggaagctaaaaatggttgatctcacagaagtgaccattagaacagaggatactggaggtggaaagggtagggagaaggcaaggatagggagaaatttgttataagacctaaaattatagcaacataggaagaatgatagctaatgtttaaaccactataggatgactacagttaacagtaatatattatgcagtcccaaatagc

SEQ ID NO: 892887 - DNA, 639 bp, Homo sapiens
ctgtgcatgggagggatctaggctgtgttgtccttatgagaatttaatgataaatgtaatagcttgaataataccaaaaccatcctcccaccttcccccatctgtgaaaaattgtcttccatgaaactggtccctggtgccaaaaaggttgggaaccactgccttcgagaataaatgcaaagttgccaataaatcttgcaaataatattcyttctgtcactagcaatgcacaaatttcctattttaggatcgagttaagaatccaaaatacattacagtatcaggctggaatcctgctggtctttgtggtgttgttattcatttatttttatttttatttttggtttggaggtgcatgtgcaggtttgttaaatgggaaaatatgtgtcatgagatttgttgtacatattatttcatcacccagttattaagcccagtacccagtagttgtcttttctgctcctctccctcatcccacctcccccagccccattcaagtagaccctggtgtcgactgttttcaatggatacgtttcccagagggcctcaaaaaatgatggagttcaatttaaaatgtatccggatcaggcaacacatagcagagtcacccatcctggaatcagttcttaccttatgttg

SEQ ID NO: 892888 - DNA, 581 bp, Homo sapiens
tctcttcaaactaaaacgtaagatattttaaagggaatttattttgaatggcttaatactatgattctctaggtatgcttctttgttatatgctttttctgattttttaaaacttatttagttaccatctcccctttacatgtcttaagtcatttacatttcaaagcaacaaaatgttaaacataaaagtctattagatgaggaactgggggaggtgaaaataaagaaagtaaccaagaaacttacatatatgtggcactcctgccatcttgtgggttttctgtgttttccactgacttaatttattatttttgtttcagggagttttttgaaagagcatagaggtacatattgagaactaagctgtcaattacccaaacctatcatactcaccaaaagttaaaaaaaattaattagggagacaagttaagtacaaaatgcagcttaatctcaaatagttttgaaaaatatcaatatttgtgcttatgtctatatctacctatacctctatctatagctatacctatacatacactgacatytattcctatggaatatgagacagatagtgagtgagaaag

SEQ ID NO: 892889 - DNA, 670 bp, Homo sapiens
tttctgtgttttccactgacttaatttattatttttgtttcagggagttttttgaaagagcatagaggtacatattgagaactaagctgtcaattacccaaacctatcatactcaccaaaagttaaaaaaaattaattagggagacaagttaagtacaaaatgcagcttaatctcaaatagttttgaaaaatatcaatatttgtgcttatgtctatatctacctatacctctatctatagctatacctatacatacactgacatttattcctatggaatatgagacagatagtgagtgagaaagcctaatcataaacacatgtggtcaaatkataatatatgaatctacgtaatattcttgcaacttttccttaatgttgaaattatctccaaataaacagttacacacacacacacagagagagagagagaggaagagagaacacattatctctctctcatcttttgcaactctgtcccagaaatttctccctctccattttgcatcattagtctttctctttccaccgaatcagtttgaaaagcctctcagtaccccatgtctcccaccagctatcgcaaacgtttttaccttttggaagcaaaattcctttaaagaagagcctattcttattgtcttcatttactccctcctttgccaaattctgtc

SEQ ID NO: 892890 - DNA, 527 bp, Homo sapiens
tagatctaccatttgatgcagcaatcccactactgggtatatatccagaggaaaagaagccattatgtgaaaaagttacctgcacacacatgtttacagcagcacaattcacaattgcaaaattttggaacaagcccaaaggcctatcaattaatgtgtgaataaagaaaatgtagtatatatttaccatggaatactactcagccataagaaaaaatgaaatagtggcagatacarcaacctggatagaattggagaagtaactcaggactggaaaaccaaaaatcatatgttctcactcataagtgggaactaagctatgaggatgcaaagtataagaaggatacaatacactttggggacacaggagaaagggtgggagttgggagatggataaaagtctacacattgtgtacagtgtacactgcttgggtgacgtgtgcaccaaaatatcagaaatctccactaaagaatttatccatgtaaccaaacaccacctgttccccagaaacctattgaaataaaga

SEQ ID NO: 892891 - DNA, 527 bp, Homo sapiens
tagatctaccatttgatgcagcaatcccactactgggtatatatccagaggaaaagaagccattatgtgaaaaagttacctgcacacacatgtttacagcagcacaattcacaattgcaaaattttggaacaagcccaaaggcctatcaattaatgtgtgaataaagaaaatgtagtatatatttaccatggaatactactcagccataagaaaaaatgaaatagtggcagatacaacaacctggatagaattggagaagtaacycaggactggaaaaccaaaaatcatatgttctcactcataagtgggaactaagctatgaggatgcaaagtataagaaggatacaatacactttggggacacaggagaaagggtgggagttgggagatggataaaagtctacacattgtgtacagtgtacactgcttgggtgacgtgtgcaccaaaatatcagaaatctccactaaagaatttatccatgtaaccaaacaccacctgttccccagaaacctattgaaataaaga

SEQ ID NO: 892892 - DNA, 527 bp, Homo sapiens
tagatctaccatttgatgcagcaatcccactactgggtatatatccagaggaaaagaagccattatgtgaaaaagttacctgcacacacatgtttacagcagcacaattcacaattgcaaaattttggaacaagcccaaaggcctatcaattaatgtgtgaataaagaaaatgtagtatatatttaccatggaatactactcagccataagaaaaaatgaaatagtggcagatacaacaacctggatagaattggagaagtaactcaggactggaaaaccaaaaatcatatgttctcactcataagtgggaactaagctrtgaggatgcaaagtataagaaggatacaatacactttggggacacaggagaaagggtgggagttgggagatggataaaagtctacacattgtgtacagtgtacactgcttgggtgacgtgtgcaccaaaatatcagaaatctccactaaagaatttatccatgtaaccaaacaccacctgttccccagaaacctattgaaataaaga

SEQ ID NO: 892893 - DNA, 527 bp, Homo sapiens
tagatctaccatttgatgcagcaatcccactactgggtatatatccagaggaaaagaagccattatgtgaaaaagttacctgcacacacatgtttacagcagcacaattcacaattgcaaaattttggaacaagcccaaaggcctatcaattaatgtgtgaataaagaaaatgtagtatatatttaccatggaatactactcagccataagaaaaaatgaaatagtggcagatacaacaacctggatagaattggagaagtaactcaggactggaaaaccaaaaatcatatgttctcactcataagtgggaactaagctatgaggatgcaaagtataagaaggatacaatasactttggggacacaggagaaagggtgggagttgggagatggataaaagtctacacattgtgtacagtgtacactgcttgggtgacgtgtgcaccaaaatatcagaaatctccactaaagaatttatccatgtaaccaaacaccacctgttccccagaaacctattgaaataaaga

SEQ ID NO: 892894 - DNA, 576 bp, Homo sapiens
gtactacttgttcctattctgattaactggattgtagcactgagacttcattctgtgtgacagtggaaatatgcctaggtaacatgctcagtaatctattacttggatttcttatgactattgcttttgttcagtaaattacatagccaataagtatgagaaaatkgaactaaaaaattaattcattaaaatagtagttaaaagggaataatatctattgtagctttaaacttttagcattttttctttgagatattgtccagcaaatagaatgtatctgagaacgttaaaatgtaacactttagaaattaatatttctttgaatagaaagtaataaaaaacaaaaaagaacatttcctttaatagaatatgttatgctattattcaaatacattaacatgtcctttgtagaatatgttatgaaaatatagaaaagatgtaatgaatacaagtgtatagaagccattatataatttattaatatttattcctattatatataattttgttcttgactacatagggaaaagacagaattactcaacttacttctttgagcttcccagcatgaaccct

SEQ ID NO: 892895 - DNA, 576 bp, Homo sapiens
gtactacttgttcctattctgattaactggattgtagcactgagacttcattctgtgtgacagtggaaatatgcctaggtaacatgctcagtaatctattacttggatttcttatgactattgcttttgttcagtaaattacatagccaataagtatgagaaaatggaactaaaaaattaattcattaaaatagtagttaaaagggaataatatctattgtagctttaaacttttagcattttttctttgagatattgtccagcaaatagaatgtatctgagaacgttaaaatgtaacactttagaaattaatatttctttgaatagaawgtaataaaaaacaaaaaagaacatttcctttaatagaatatgttatgctattattcaaatacattaacatgtcctttgtagaatatgttatgaaaatatagaaaagatgtaatgaatacaagtgtatagaagccattatataatttattaatatttattcctattatatataattttgttcttgactacatagggaaaagacagaattactcaacttacttctttgagcttcccagcatgaaccct

SEQ ID NO: 892896 - DNA, 576 bp, Homo sapiens
gtactacttgttcctattctgattaactggattgtagcactgagacttcattctgtgtgacagtggaaatatgcctaggtaacatgctcagtaatctattacttggatttcttatgactattgcttttgttcagtaaattacatagccaataagtatgagaaaatggaactaaaaaattaattcattaaaatagtagttaaaagggaataatatctattgtagctttaaacttttagcattttttctttgagatattgtccagcaaatagaatgtatctgagaacgttaaaatgtaacactttagaaattaatatttctttgaatagaaagtaatraaaaacaaaaaagaacatttcctttaatagaatatgttatgctattattcaaatacattaacatgtcctttgtagaatatgttatgaaaatatagaaaagatgtaatgaatacaagtgtatagaagccattatataatttattaatatttattcctattatatataattttgttcttgactacatagggaaaagacagaattactcaacttacttctttgagcttcccagcatgaaccct

SEQ ID NO: 892897 - DNA, 589 bp, Homo sapiens
caaaagaaaataaatcattctatcaaaaagacacatgctcttgcatgcttattgctgtgctaccacagcagtgaagacatggaatcaatccagatgcccatcaatagtagattggataaagaaaatgtggtatagatacaccatggaatactatactaccatataaaagaatgaaatcatgtcttttatggccaatggcaatatagatggagctggaagccataaccctaaacaaattaagacagaaacagaaaaccaaatactgcatgttatgacttytaagtgggagtcaaacattcagcattcatgtacagaattatgggaaaaatagacacaaccaacttagagggtggtggcgggggtggaattaaaaaattacctatcaggtactatggtcacagcttaggtgacagaatttttaccccaaacttcagcatcatacaaaatttccatgtaacatacctgcagatgttatgttaaataaataaaagttgaaaaaaaaaaaaaaagcaaaatgtgctcagaggtcttacaaagctgacttccagtctcgtcttattagtaggagatgtgtcacacacacctcccc

SEQ ID NO: 892898 - DNA, 606 bp, Homo sapiens
gtggctttatttctgggctctctattctgctttattggtctaggtgtctgtttttgtaccatgaccatgctgttttggctactgtagccctgtattatactttgaagtcaggtagagcgttggctccagcttaggaggtatcctaagctggatgttctttttgctttggattgccttgactattcaggttcttttttggatccacataaattttaaaatagttttttctagttctgtgaagcatgtcattggtaatttaataggaatagcatttaattaaaaaatttctttgggcagtatggccattttaacaatwttgatccttctaatccatgagctgagcataggatgtttatttgtttgtgtcacctctgatttctttgagcattgtttgttagttctccttgcatagatatttcacctcccttattaactgtattcccaggtattttattgtttttgtggcaattgtgaatggggttgcgttccagatttggctcttggcttgacccttgttggagtataggaatgctagtgatttttgtacactgatttttgcatcctgaggctttgatgacattgtttatcagcttaaggaacttttgg

SEQ ID NO: 892899 - DNA, 585 bp, Homo sapiens
tttatggtattttattccagcaggctgaactgactaaagcattgaattctataagtctataggtatacataaattagtgtattaaggatgtacaacatattttatgtgtcacattgatagtaaaattgaaggctttttctgaataaagtttgctttaaatttgcactgagttccagtaagctcatacactacctattatattagaaatttgaatttgtagctgaatatttcctaagttctttgattgagactgacacttgtgcttttacaaaagatgcaaaagaataaaggatttatcatatacaaacatcactgccttgttattggccatctttatacgggactgmaataacaaagctggatggaaaaaaatatgagtcatgatatcatatatggtttcttacacatatttcaattcaagaggcacaactaaatttcaacaaaaactccctgggtcttctggggtaattcccattaatcaagtagattttaagaagcaagaaccatttgactatagttttgattagaaaagtcagcgtcctaaggttgtagtcactaggaatgggaacataagcctggacaaag

SEQ ID NO: 892900 - DNA, 643 bp, Homo sapiens
cagtctagggtgtaagcctgaaatgtaagagagggccagtatttgagttataggtctcctgggaaccagttaggacatatgagtaaaatcaattaggaaaggactgtcaaatagaacatcagtcaattttaaagcacctagaaaagcagttccacacargaatcaagactttctcatactagctgcattttttattgcattcaactaaatgatggatgagaataaaaaacatcaaaagactcataaaagtaagattttaaaaatatgccctgctgcattttcagggacaagattaaaagtaagggtttatatatttatttcttttatatatttcttttcttatatatatatatatatatatttctttttatagatgatgaatgacaagtgtgtcattgttaataggttctctcaaatattgaagaacttagaacttctattagaaaatacctcataaagcaaaactgggccacatgtccatttctgatccaatcactggcaggggaaatgggataactccttggattattagtctcttcctggaggatgaatggaatttacttatcaagatacttagctatgtgtattaggtgtggggtagagattacctgaaaacacaagtcagaatgctcttggaaagaaa

SEQ ID NO: 892901 - DNA, 664 bp, Homo sapiens
tagaaggcttcttttgcatctattgagataattatatggtatatgtttttagttctgtttaggtggtgaatcatagttattgattactctatgttgaacaaactttgcatcccagtaatgaagactagatacaaacagctcacaaacatgagaaatgctcaacatcactgatcatcagagaagcataaatcaaaaccataaagagataccatctcataccagtcagaatggctattattaaaaagtcaaaaacaacagatgcttgtgaggtcatgggtaaaaggcaacacttatgcactgttgttgggaatataaattagttcagtcactgtgtaaagcaatttgkaggtttctcaaagaacttaaaatgaaactaccatttgacacagcaatttcattactgggtatatatccagaagaaaataaatcatcctacccaaaagacacatacactcatatgtttattacagcactattcacaatagcaaagacatggaatcaacctaggtgcccatcaaaggtggactggataaagaaaatgtcataaatatacactgtggaatactatgcagccataaaaaagaacaaaatcatttcctttgcaacaacatgaatgtaactggaggccattatcctaagtaaattaatgcaagaacagaaaaac

SEQ ID NO: 892902 - DNA, 586 bp, Homo sapiens
attctagatttccatgcagttgtaagacataacacagagaaatcctgtgtaccctttatccagttttcccaatagcaatatcctgcaaatcttagtcacaatattgctactagaatattgacaatgatactaccttattcatattttcctaattttaattgtactcctttgtgtgtttgtgagtktgtgtaggtgtttagttctgtgcaactttatcacatgtgtaggttgtatctaccaccacatcaaaatacagaactgttccttcatcacagattccttatagttcccttttatagccactctgccctccttcctgtgccctgtccctgcccagccctgacccctagcaactactggtcttttctccatttctaaatttttgtcctttaaagaattttgtgtaaatgaaatcatacagtatgtaaacttttgggattgccttttttttccttagcataattctctgaagattaatccaagtcattttaacagttcattcttctttttttgctgagtaatatcccctggtagggatgtaccacaaattttatttaactacttgcccattgaagtaccaagttgg

SEQ ID NO: 892903 - DNA, 586 bp, Homo sapiens
attctagatttccatgcagttgtaagacataacacagagaaatcctgtgtaccctttatccagttttcccaatagcaatatcctgcaaatcttagtcacaatattgctactagaatattgacaatgatactaccttattcatattttcctaattttaattgtactcctttgtgtgtttgtgagtgtgtgtaggtgtttagttctgtgcaactttatcacatgtgtaggttgtatctaccaccacatcaaaatacagaactgttccttcatcacagattcctyatagttcccttttatagccactctgccctccttcctgtgccctgtccctgcccagccctgacccctagcaactactggtcttttctccatttctaaatttttgtcctttaaagaattttgtgtaaatgaaatcatacagtatgtaaacttttgggattgccttttttttccttagcataattctctgaagattaatccaagtcattttaacagttcattcttctttttttgctgagtaatatcccctggtagggatgtaccacaaattttatttaactacttgcccattgaagtaccaagttgg

SEQ ID NO: 892904 - DNA, 633 bp, Homo sapiens
cagtcactgaaaaaaggactacaacattgctaaggctacttacaactgtttcttaataaataaatacatgcttcatataaaaatattatttttaaaactgtaatgtaaaaatttcagatgtatggtaaatatgcaaatgcaacaatattagaaaaaactggtctatattctcagtttactgtttacagttgtgagaactgagtgagagtccttattctcccagtgtaataattattacacattatgcttcctgccaaaactagctgactgccttagtcctttgagttgtgaatatcagtatcaattcaaaaacaactatttaataacaactttcttaaagaaaggaagaaaatataattttatgaaatgaccacttttattattcttgagtgtctcagaaamtttagtgtaaagtgtcctttgctatccaggatataacagctggttccagataacatggtatgtctcattagagagatactagatctaattatgcaacatataagcaagatcattatagaaacattatctcgatgaggtaagtaaagtacatgtgaaatctaactctgctgtttgaaagaatttttgaaagcaaatgtaaggaattaataattacttaagtgtatgaagaaa

SEQ ID NO: 892905 - DNA, 547 bp, Homo sapiens
tgtcctttgctatccaggatataacagctggttccagataacatggtatgtctcattagagagatactagatctaattatgcaacatataagcaagatcattatagaaacattatctcgatgaggtaagtaaagtacatgtgaaatctaactctgctgtttgaaagaatttttgaaagcaaatgtaaggaattaataattacttaagtgtatgaagaaagctgttgcaaactacttatgaatctttgacatgtaatgaaaaaatataatagaawgataagtaccctgattatttgtgctagagataaaaatgaacttctgggcaaatatcttttgctaccgacaaattttttttctaaacagtaaaaatgagtgccttttcatagcatttctactgtgtcagaaattctcaaactttagagtgtaactgaaacacagagagggcttattaaaacaaagattgccggtctccaatctcagattctgttcaataaggctaggtagagccagaaaatttgcatttctaaaattcccaactggtgttcatg

SEQ ID NO: 892906 - DNA, 606 bp, Homo sapiens
ctgttatttattaacagttatttaaggacttgtaccctataaacagaaactatacatttttcaagcatctatgatttaccaaaatagactagtattagttaagaacaagataataataataaataacagaaatttcaggaattacataaggtcacaacttaataatacaaaaaaaataatcttttcataaaaacattccccaaaaatattaaaaacaaacaacaaatcaataacaacattaaaataagcaaaccatttgcctaaataactgttgtgacaaaaggcaaactaaaccataactgtaggccatttaagarcctactaaattacagcaccacgtttcaacactgatgtattaccaaagctcttcttagagacaaattcataggctttaacagtctattaaaaagaagtataaaagaatcatgtctttatcacaggaacttaactggactacaataaagcaaagatgaaacttagaaagaacacaaatttaattgcattagagaaattggaaaatcaacaagtaaatcacagaactaatatttttaaagaaaaaaattcgttactattttaaaaggaataagcagcaggaaaaaaatgaga

SEQ ID NO: 892907 - DNA, 606 bp, Homo sapiens
ctgttatttattaacagttatttaaggacttgtaccctataaacagaaactatacatttttcaagcatctatgatttaccaaaatagactagtattagttaagaacaagataataataataaataacagaaatttcaggaattacataaggtcacaacttaataatacaaaaaaaataatcttttcataaaaacattccccaaaaatattaaaaacaaacaacaaatcaataacaacattaaaataagcaaaccatttgcctaaataactgttgtgacaaaaggcaaactaaaccataactgtaggccatttaagaacctactaaattacagcaccacgtttcaacactgatgtattaccaaagctcttcttagagacaaattcataggctttaacagtctattaaaaagaagtrtaaaagaatcatgtctttatcacaggaacttaactggactacaataaagcaaagatgaaacttagaaagaacacaaatttaattgcattagagaaattggaaaatcaacaagtaaatcacagaactaatatttttaaagaaaaaaattcgttactattttaaaaggaataagcagcaggaaaaaaatgaga

SEQ ID NO: 892908 - DNA, 603 bp, Homo sapiens
cgtacacatccagatggccggttcctgccttaactgatgacattccaccacaaaagaaattaaaatggcctgttcttgccttaactgatgacattatcttgtgaaattccttctcctggctcatcctggctcaaaagctccccaactgagcatcttgtgacccccactcttgcctgccagagaacaaccccactttttcctttacctacccaaatcctataaaacagccccacccctatctcccttcgctgactctctttttggactcagcccrcctgcacccaggtgattaaaatctttattgctcacacaaagcctgtttggtgatctcttcacagggatgcgcatgaaagaatgtgccacagaaaatgagacacatcaatgagggtaggtttgaaataccaatttaaagcagactttcaccgtttggccaggctataaacattaaaaatccataactaagatcttactatatattcaggcattttaagaactctgcatatataattacatttgacccttctaatgcctttatcagataggttctattattgctcttttttaaataaagaagataaactttgaagagattaataaattaat

SEQ ID NO: 892909 - DNA, 588 bp, Homo sapiens
ggccaataccttaaattcatcctggtgagatatgagcagagaactcagctatgccatgctcagatttctcacctgtagagcagtaaattaataagtgagcattatttgaagctgctaagtttgtggtgatttgttacacaycaagagaaaacatatgctgtatatattattagatttttcctttatattggtgggtgtatttgttatctattacttcctaacaaatcgacaataattaagtgtcttaagacaacacatatttattacctcatagtttctgtgggtcagaaatctgggcatggtttatgtgagttctttgatttaaagttgttggcaaatctgtaaacaaggaagcagtcaggaccgaggtctcatctgaaagtcaacttgggatgggtctgcttccagcctcacttaacataacagctggcaggattcagttgctcttgggtagttggattgatggcctcagataactaggtagctattagctagatttcaccctcagtttgttgccgtgtgggcctccctaaggtggcaatttacttcatcaaaaccagcaagggagagagttggctacaatctcta

SEQ ID NO: 892910 - DNA, 588 bp, Homo sapiens
ggccaataccttaaattcatcctggtgagatatgagcagagaactcagctatgccatgctcagatttctcacctgtagagcagtaaattaataagtgagcattatttgaagctgctaagtttgtggtgatttgttacacatcaagagaaaacatatgctgtatatattattagatttttcctttatattggtgggtgtatttgttatctattacttcctaacaaatcgacaataattaagtgtcytaagacaacacatatttattacctcatagtttctgtgggtcagaaatctgggcatggtttatgtgagttctttgatttaaagttgttggcaaatctgtaaacaaggaagcagtcaggaccgaggtctcatctgaaagtcaacttgggatgggtctgcttccagcctcacttaacataacagctggcaggattcagttgctcttgggtagttggattgatggcctcagataactaggtagctattagctagatttcaccctcagtttgttgccgtgtgggcctccctaaggtggcaatttacttcatcaaaaccagcaagggagagagttggctacaatctcta

SEQ ID NO: 892911 - DNA, 588 bp, Homo sapiens
ggccaataccttaaattcatcctggtgagatatgagcagagaactcagctatgccatgctcagatttctcacctgtagagcagtaaattaataagtgagcattatttgaagctgctaagtttgtggtgatttgttacacatcaagagaaaacatatgctgtatatattattagatttttcctttatattggtgggtgtatttgttatctattacttcctaacaaatcgacaataattaagtgtcttaagacaacacatatttattacctcatagtttctgtgggtcagaaatctgrgcatggtttatgtgagttctttgatttaaagttgttggcaaatctgtaaacaaggaagcagtcaggaccgaggtctcatctgaaagtcaacttgggatgggtctgcttccagcctcacttaacataacagctggcaggattcagttgctcttgggtagttggattgatggcctcagataactaggtagctattagctagatttcaccctcagtttgttgccgtgtgggcctccctaaggtggcaatttacttcatcaaaaccagcaagggagagagttggctacaatctcta

SEQ ID NO: 892912 - DNA, 588 bp, Homo sapiens
ggccaataccttaaattcatcctggtgagatatgagcagagaactcagctatgccatgctcagatttctcacctgtagagcagtaaattaataagtgagcattatttgaagctgctaagtttgtggtgatttgttacacatcaagagaaaacatatgctgtatatattattagatttttcctttatattggtgggtgtatttgttatctattacttcctaacaaatcgacaataattaagtgtcttaagacaacacatatttattacctcatagtttctgtgggtcagaaatctgggcatggtttatgtgagttctttgatttaaagttgttggcaaatctgtaaacaaggaagcagtcaggaccgaggtctcatctgaaagtcaacttgggatgggtctgcttccagcctcacttaacataacagctggcaggattcagttgctcttgrgtagttggattgatggcctcagataactaggtagctattagctagatttcaccctcagtttgttgccgtgtgggcctccctaaggtggcaatttacttcatcaaaaccagcaagggagagagttggctacaatctcta

SEQ ID NO: 892913 - DNA, 625 bp, Homo sapiens
gtagggaaagcggtagctaagatgtagttgaggctgggctgacagaatcaggtcaaagtgttctgctccattttgatgtgtcttaatatggagttactcagatgaagttaaatctgtgtaagtcctgagtttggataaaggaaaaacacttcagtgaacatatggagttcccttcagtartttagtttagtcacatatattgatcaaggttaccccaaataatcagaagctattaaaacttatcgaagcctccaaattatttaatgacaacagagttaggaggcaggaaccaaccaataaattctacatttaaaaaaatcaaactggttatttgtggaaataaatatgaaattcctgctactggtttatttatttattttaatgtaaaaattaactttttactttaaacttagatatacagaaaagttttcaagatagtacagaattcctagtacgttagtatggcacacctgtcacaagttatgaatcaatattaatacagtattattaactaaggtctatactttatttaaattttctgtttccctaacattgctttttctgttccagaatctcatgcaagataccatattacatttgttcagtatgtcttcttaggtttctc

SEQ ID NO: 892914 - DNA, 625 bp, Homo sapiens
gtagggaaagcggtagctaagatgtagttgaggctgggctgacagaatcaggtcaaagtgttctgctccattttgatgtgtcttaatatggagttactcagatgaagttaaatctgtgtaagtcctgagtttggataaaggaaaaacacttcagtgaacatatggagttcccttcagtaatttagtttagtcacatatattratcaaggttaccccaaataatcagaagctattaaaacttatcgaagcctccaaattatttaatgacaacagagttaggaggcaggaaccaaccaataaattctacatttaaaaaaatcaaactggttatttgtggaaataaatatgaaattcctgctactggtttatttatttattttaatgtaaaaattaactttttactttaaacttagatatacagaaaagttttcaagatagtacagaattcctagtacgttagtatggcacacctgtcacaagttatgaatcaatattaatacagtattattaactaaggtctatactttatttaaattttctgtttccctaacattgctttttctgttccagaatctcatgcaagataccatattacatttgttcagtatgtcttcttaggtttctc

SEQ ID NO: 892915 - DNA, 625 bp, Homo sapiens
gtagggaaagcggtagctaagatgtagttgaggctgggctgacagaatcaggtcaaagtgttctgctccattttgatgtgtcttaatatggagttactcagatgaagttaaatctgtgtaagtcctgagtttggataaaggaaaaacacttcagtgaacatatggagttcccttcagtaatttagtttagtcacatatattgatcaaggttaccccaaataatcagaagctattaaaacttatcgaagcctccaaattatttaatgacaacagagttaggaggcaggaaccaaccaataaattctacatttaaaaaaatcaaaytggttatttgtggaaataaatatgaaattcctgctactggtttatttatttattttaatgtaaaaattaactttttactttaaacttagatatacagaaaagttttcaagatagtacagaattcctagtacgttagtatggcacacctgtcacaagttatgaatcaatattaatacagtattattaactaaggtctatactttatttaaattttctgtttccctaacattgctttttctgttccagaatctcatgcaagataccatattacatttgttcagtatgtcttcttaggtttctc

SEQ ID NO: 892916 - DNA, 632 bp, Homo sapiens
tctgctgctactacacaaaagttcaatcctgctacttttcttccaagaggaattggtaatcacctatctgggagaattgccctttgaaactgcaatctaaatgctagcctttgcttactcttgacaaatttatctaaaaactgtgtaaaggtcattttaacgttaccaatgagactaatgatagacgtgtacccccttggctatagtcayggctactactacctgggatatacattttcaactttaaaaatggtttatgagtgtgttatctgtccaacagttacatctgttagcaatgtactatataaactttacagttggtagaaaaactttaataaaggcttttgtatactgagattacatgggaaaggaaaataatattttagtgttgaaggccttctgggcctcttttcttttatttctctgagtcagcagcatgtgcaggctcatgtatttgagtggttagccaaactctgccaacattttgcccaacgtgaaatgcccatgtaacaaagaatctacgtcctttttaaatttaaaacatgttggtccatgtctacagatttaaaagcaacaatacaaattgctcaaatggaaaatccttaatttaaaaatacaatcaatgcaagcca

SEQ ID NO: 892917 - DNA, 635 bp, Homo sapiens
atagccaaaaatctagtaaatatttgagcacactaactgggtaaatttttatcctcttttattttgttgttaatgggtgatgagactaatactaatttttgcatgatttataaagtgctgctaaatatgactctagatgactccagaaagtatttgaagtcataacataaagtgaatttcctctttgaataatttgtctcttttgaatcagttttctgttgctgtgtaataaattccacaaatttagcagcatgcaacagtatccacttattagttcatggttctgtagttcagaaataaggacatggcatcatcagttctctgctgagatctcagaatactaaaaatcaaggtgtcatctggtgatatgagttggctgtgtccccacccaaatctcatcttgaattgtggctcccataattcccttgygttgtgggagggacccagtgggaggtaattaaattatagaagagggtttttctcatgctgttctcatgatagtgaataactctcacgagatctgatggtcttataaagggcagttcccctgcacatgctctcttgcctgctgccgtgcaagtcgttctttgctcctcctttgtcctccaccatgattgtgaggcctccccagccct

SEQ ID NO: 892918 - DNA, 657 bp, Homo sapiens
ccatgagggctccacttctgcagcagaattctgtctggacatctaggtgtttccattcatccactgaaatctaggcagaggttcccgaacctcagttcttgtcttctgcacacttgcaagaacaacaccatgtggaagctgccaaggcttggagcttttaccctctgaagcaatggcctgagctgtaccttggcctcttttagccatggttggagctggagcagctgggacacagggtgccatgtcctgaggctgcacagaacagcagggccctgggccgtgcacatgaaaccattttttcatcctaggcctcaaggcctatgatgggaggaacrgccatgaaaatctctgaaatgccctggagacattttcccattatcttggtgattaacattttgcttctctttaattatgtaaagttttgcagccagtggcttgaattcctccccagaaaacctggattttcttttctactgcatgatcaggctgcaaattttccaaacttttatactctgcttctcttttaaacataagttccaatttctgataatctctttgtaaatacatatgactgtatgatgttaggagcagccaggccacatcttgaatgcctggatgtttagaaatttcttccaccagataccctaattcagttct

SEQ ID NO: 892919 - DNA, 625 bp, Homo sapiens
gaatttagaaaatgtggtgcatatgcataatggaatagtattcagcctttaaaaagaaggaaatcctgccatttgaaacaatgtagatgaacctgaggacactatgttaagtgaaataagccaggcacagaaagaaaaatcttgtatggtctcacttacatttgaaagattaaaaagttgaacttatagaagcagagttagaagagtggttaggagaggctggggatggagtgggttagggagatgttcatagataatacaaaatttccacttaatacgaagaataagtttaagagatctattatacaacatgattactctagttaataataatatattgcagcttgaaaatgactaagggagaatttgtgttctcaccacaaaaaataagtgtatgagataaygcatttgttaactagattaatttagccattctgcaatgtatacattttcaaaacataatgttgtacatgataaatatgtataatattttcaattaaataaataaatacaatgttttaaaaatgtaacatgtacagtttaagggttaggtcataaaggaaaataatttaactcctaccttgacttccctgccttctttctgtctgcaatggagatgtatttt

SEQ ID NO: 892920 - DNA, 619 bp, Homo sapiens
ctttttcctaaaccatccatgacccctcctcccatcctgtgcctgtaaaaactggcagagaggaaggtagctggacattgaagcctacggttggatgtcagagagaagcggcttgactctagaaagacagcttggtggcataacttcgragaagaatctggtcagagatggtcggaattcaggggaagatgatcatcctgccccatccccttttcagctccccttcccattgaaagccacttttatcagccataaaatcacctgaatttaccatccttcaattcatgcaacctaatttctcttggactccggacaagagctcgggagacccaagtatggatacaaaaggcagagggcccattgagctgttaacatttaagcagtccacggatggcagagcaaaaaaagcactgtaacactccctctggggcttccggggttgcaggcacctcccccagatgctaccgcggggcctgcacggagtttgctcctgccgccgcccaaaaatgcttgccctgactcctgcaatggctcacctgtgcagcaggtcccagtgagtggagttcggccctgctggcgttgaaacagctggctgcttccagcgttcatgcactccagt

SEQ ID NO: 892921 - DNA, 545 bp, Homo sapiens
catccttttggtttcattcagaccttcagcagattgaatgaggcccacccacatcagagagagcaagtgagctgctttactcagtctactgacttaaatgttaatgtcacccaaaaacacctccacagcaatacccagaatatgtatcaccaaatacctgggcacatattggccaagtcaagttgctctataaaattaacattacagtcccctaagactaactttatagatttttgaaatttgtattttcttttggttattaactattttttaaccyttaaatgtgttaattacggacctttatgttagacatattaatatcattaaatcatttcacatcttcactctcatccaactcatttaaaattatatttacagagtttagtttttaaagatctttaagatattttaatgatacatttaaaattcagacattgtttttataacttcatttttttctagttaaaatctaggatacttgttcaaatcattctaaaattttggtccccataagtcactaatttcaggttatagtgatctcattt

SEQ ID NO: 892922 - DNA, 633 bp, Homo sapiens
ctaatcttttcccctttttaaatatacttatgtattaataatgttacaatctatttataggagacattattaaaacacagccaagagaactcaaaacctaatgatctgattgataaaacgtatgtataaagaacagtaatctaaccacctgtgttagtctgatagggctgccataacaaaatacyatggactggatagcttaaaaacagaaattgttttctcacatttctttaggccagaagttgaagatcaaggtttcaacagggttgatgtctcatgaggactctcttcttggctttcagacatttaccttctcaccgtgtccccacatggcctttcctctgtgcacctagaaagagagagagagagagaactcatttattgctggtgagaatgcaaaataattgtcactttgggagacaatctgacagtttcttataaaactaagcatactgttaacatacaagccagcaatcatgctatttggtctgtacctagaggagctgaaagcttttgtctgcacaaaagcctacatgctgataattatagctttgttcataatccccactacttggttgaagcaaccaagatgtccttcagtaggcatatgaataaacaaactgtggtgcatcc

SEQ ID NO: 892923 - DNA, 624 bp, Homo sapiens; identical to SEQ ID NO: 889568

SEQ ID NO: 892924 - DNA, 640 bp, Homo sapiens; identical to SEQ ID NO: 889569

SEQ ID NO: 892925 - DNA, 608 bp, Homo sapiens; identical to SEQ ID NO: 883207

SEQ ID NO: 892926 - DNA, 624 bp, Homo sapiens
caggtatcattatgtagtgtttcctatattctgatagctattgaattattattttattatacattcttgtaagtatacgtgtagacatgaaaataaacatgcacgacctatatgacatgctatgttcagtgatgacagctgtcttcccatttttttgatgtgttaaatgcaagaggtttatttctttttaaaaagttgttgtgggtacatagtagacatatatacttatggagttcatgagatattttgatacaggaatggaattcataataatcaygttatgaaagatgggttatccatcttgtcaatatctattctttgtgttacacacaattcagttatactgttttagttattttgaaatgtacaattaaatttttactgactataggcaccctattgtgctatcaaacactaggccatattcattcatttggactattttttgtacctgttactaagcctttttccaactccccactacctttctcagcctctggtagccatccttctactctctatctgcatgtgttcagttgtttggatttttagatcccataaatacataagaacatatgacgtttgtctttttgtgccaggcttatattacttaacataatgacc

SEQ ID NO: 892927 - DNA, 534 bp, Homo sapiens
gttgtgggagggacccagtgggagataattgaattatcggtcagtttcctctatactgttctcatggtagtgaataagtctcatgagatctaatggtcgggaaaccccttttgctttgctctcattcttctcttgtctgccaccattttgagacgtgcttttcacctttcaccatgattgtgaggtctccccagcaatgtggarctgtaagtccattaaatctctttcttttgtaaattgcccagtctagcatatgtctttatcagcactgtgaaaatggactagaacatcagactccaagttcttcagcttttggactcttggacttacaccagtggtttgccaggggctgtcaggccattgaccacagactgaaggctgcattgctggcttccctacttttgagattttaggactcggactgatccaccactgacttctttgctcctcaacttgtagatggcctatcattaggctttaccttgtgagtgtgtgagtcaattctctttaataaactcctttcatttataaatc

SEQ ID NO: 892928 - DNA, 599 bp, Homo sapiens
acatatataattatttagatttcagtgttctataaatcctaatgagagatgaagccagctggacttctgggttgagtggggacttggagaacttttctatgtctagctaaaggattgtaaatgcaccaatcagcactctgtaaaatggaccaatcagtaggatgtgggtggggacaaataaaggaataaaagctggccaccccaggcagcagcagcaacccattcaggtccccttacacgctgtggaagctttattatttcacactaagaggggtcaaaatacaacagattcttaatactaaaacacaacatgttgctatcttttttccttggatatgtgattgtgaatcactaaggggccttaacaactctagaaatatgaacatatagaaaagtaatgcatwgtttgaaggacaatccagtacctttgaaaacaccaactacatagcttgaggaagatttaaaacaagcttgtccaacccacgacccgcagaccacatgtgggctcatgagggctttgaatgcagcccaacacaaattagtaaactttcttaaaacattatgaaaatagtttgcatttttcttttgcttatcagcta

SEQ ID NO: 892929 - DNA, 619 bp, Homo sapiens
tccatgtagctaccattgacagtactctttatatatccaggtttctatctgctaccattttcttctgttttaaggactccttaaaatatactatagtgcatatccactggtgatgaagtctttaagtttttatatattaagcaaagtttttcactttctttttgaaatatatgttcactgggtaaataaatacagggaaacaggttttattttggcttttcaatgatacagatataattggatgaaataataattttgctatgtttcattttgtttagactctttcaaaattcttatttttaaagtattttaagatttttctactaatttattatgactgtcattttgttttggttatttttggttaattttatatttttcttaacyatgagttgtatttctctgcctttttgaatgtcaggtaattttgagtgcatactagataatgtgaatttaccctgttgggtgctaaatatttgctttgctaaataaatattcttgagactattgggggattcagttaagttacttaaaaccaattcgattctcttgagtatttatgctttgcttatgcagtgttcactttgtctctggctaattttttgtgggtaccaaagta

SEQ ID NO: 892930 - DNA, 619 bp, Homo sapiens
tccatgtagctaccattgacagtactctttatatatccaggtttctatctgctaccattttcttctgttttaaggactccttaaaatatactatagtgcatatccactggtgatgaagtctttaagtttttatatattaagcaaagtttttcactttctttttgaaatatatgttcactgggtaaataaatacagggaaacaggttttattttggcttttcaatgatacagatataattggatgaaataataattttgctatgtttcattttgtttagactctttcaaaattcttatttttaaagtattttaagatttttctactaatttattatgactgtcattttgttttggttatttttggttaattttatatttttcttaaccatgagttgtatttctctgccyttttgaatgtcaggtaattttgagtgcatactagataatgtgaatttaccctgttgggtgctaaatatttgctttgctaaataaatattcttgagactattgggggattcagttaagttacttaaaaccaattcgattctcttgagtatttatgctttgcttatgcagtgttcactttgtctctggctaattttttgtgggtaccaaagta

SEQ ID NO: 892931 - DNA, 619 bp, Homo sapiens
tccatgtagctaccattgacagtactctttatatatccaggtttctatctgctaccattttcttctgttttaaggactccttaaaatatactatagtgcatatccactggtgatgaagtctttaagtttttatatattaagcaaagtttttcactttctttttgaaatatatgttcactgggtaaataaatacagggaaacaggttttattttggcttttcaatgatacagatataattggatgaaataataattttgctatgtttcattttgtttagactctttcaaaattcttatttttaaagtattttaagatttttctactaatttattatgactgtcattttgttttggttatttttggttaattttatatttttcttaaccatgagttgtatttctctgcctttttgaatgtcaggtaattttgagtgcatactagataatgtgaatttaccctgttgggtgctaaatatttgcyttgctaaataaatattcttgagactattgggggattcagttaagttacttaaaaccaattcgattctcttgagtatttatgctttgcttatgcagtgttcactttgtctctggctaattttttgtgggtaccaaagta

SEQ ID NO: 892932 - DNA, 632 bp, Homo sapiens
tctccatcaagtcatcttcgtttaattcctctggtgtagtaactattagatcttctatttctccatgacctatatcatggcattcttcaccaaaccccattgtttttgctatattcacatctttcatgatttcctcgattggctttttataaattctgtgaagtcatgcacaacatgtgaacgtagttttctctagcaggaatttactgtttaaggcttgattactttcaaggctgtttctataccagtaatggcatcttcaaaagtgtaatccttccagacttttttttttattattatactttaagttttagggtatatgtgcacaatgtgcaggttagttacatatgtatacatgtgccatgttggtgtgctgcacccattaactcttcatttaacattaggtatatctcctaatgctatccctccccgctccctcaaccccacaacaggccccagtgtgtgatgttccccttcctgtgtccaygtgttctcattgttcaatttccacctatgagtgagaacatgcggtgtttggttttttgtccttgtgatagtttgctgagaatgatggtttccagcttcatctatgtcgctacaaaggacatgaactcatccttttttatggctgc

SEQ ID NO: 892933 - DNA, 631 bp, Homo sapiens
tacaacgaaatttattagagtcttaagagttaaaagatgaattgttttcaataaataaacttgtatgtagattaaaacattagagttcactagaccttattgtctcaaaaaacatttctctcacattagactttcttcttactttaaaaataaaacttttaaaccaacaatgtyaattaggctttatctgagccccaaattctttaaaaataatcagtaattttaaatttaaagatttttttctgtcccttttttttccttagagggtgatttgtatttaatgtaatatatttaaaacatgtacaattatgatatttccctaattccaatgtttacaacagcaaaataatatttttgtgacaattgcaaatgactttttgtgaattctgcctgtaccttatatctgggaactatctactaacatggaaatgtagagaaagccaacaattttcctagaaagatagacttattcctgtcacagtgaaggtcacacgtattcccaggcctgttgaacatctgaagacagagattttgaagacagattgcttttttccctctgcgtagcattttgaaatatttctaagtgaggataaaatatgacaggcacagaagtgatttcaaaaaaaaatgg

SEQ ID NO: 892934 - DNA, 548 bp, Homo sapiens
ttattcacacgtttgactggtttacaatattggaaggaggatcattttgagagtaaagtgaaccaaatatggtaactgctttactcttctggttgtctttgaaaatactgaaataccaacatttactgattcaaaatctatctgtagmtttgatcttttaaaagtcacccttgtaactggtcactgagtaaaggtaggatggaggatacttaatttcacactctcaaaggcttaactttctgccttttttctgcacattgttagtttgttgctgagtaggagatgacaggagatgtttgtttattttggaacgatagttttggcatagtaactattccttgtaaatgtaacagcaatataattccaggtcatgagcctcaaaagccacaaccagcaattgcattaacctagtttattgagtttgaatcattattcccaggcacatttcaaatttggccagctatgctaattaccattgccataatactcatgaaaataatattacagcaaagactcatacgtattatatttgaaaacatagtctcatt

SEQ ID NO: 892935 - DNA, 548 bp, Homo sapiens
ttattcacacgtttgactggtttacaatattggaaggaggatcattttgagagtaaagtgaaccaaatatggtaactgctttactcttctggttgtctttgaaaatactgaaataccaacatttactgattcaaaatctatctgtagctttgatcttttaaaagtcacccttgtaactggtcactgagtaaaggtaggatggaggatacttaatttcacactctcaaaggcttaactttctgccttttttctgcacattgttagtttgttgctgagtaggagatgacaggagatgtttgtttattttggaacgatrgttttggcatagtaactattccttgtaaatgtaacagcaatataattccaggtcatgagcctcaaaagccacaaccagcaattgcattaacctagtttattgagtttgaatcattattcccaggcacatttcaaatttggccagctatgctaattaccattgccataatactcatgaaaataatattacagcaaagactcatacgtattatatttgaaaacatagtctcatt

SEQ ID NO: 892936 - DNA, 614 bp, Homo sapiens
ccagttgtaacaactgaaaataaatttagcatctgactgaatttcccttcatttaaaattagattatggaataacaatttttgaggcaacttactttatattgtctgagatgcttctgttgcattagcagaaagtctgggaaaaagtaaggtagataggagtgggataataaaggagatactgtgwtcctgttggaccagagaccatacagaaaacaaaatagttgaaataaatatcccagaattcttcttaagaatatatttgctaatcttttcaaatcattatgagtttgtctttgtttgttatggatgaaaaaggacattttatggaattaagttttgatattattttttcctcttatatcagttagaagcgtatgcactactttctgcaggaagaatactctggaagagaagatcattaataagtaaatttttgcaggtggtattgattggaacaatattttatacaaaacataaaattgtcattgcatagtaagtcagaatatgctgcttttctttaaaatatgaaatatgtttcaaaatgaagacaaggatgaggtagcattgtattgaaatggcattatctgcagattttcctataaagctatagat

SEQ ID NO: 892937 - DNA, 605 bp, Homo sapiens
ttttcctgaacatttttattttttccaattatatccaaagctactgaaaaatatattttatgcattacaacaaagttaaactttaataatgaccctgaaaatagtggtagagtgaatttaaacatttgaaaaatattttaaggaagcaattatagaataaataaatagtaaaaaatatatttttgatttgaaattcaatgttcatctatacatgtatggtatctatctatcaacattttcatgaaactgcctatcaaaacaaaaaggacatagctcatataagagttagtgaaaaagatagaattgttgagcccagttaaaagtctgtaagttaatatttgagaataaaacatttcttgaaawccatgttgaaatattctttggatgaaggtttcttagtcacactagactttaatcacactagacttcaagttcctttaatgaaataacaattcctctttcaagacatttacacattatttattcaatcagaaaactgtccttggcatattttgccaatctaacttatgctcatttttaaagcatcaacttaatcaattattccttagcagaaactgaagtggccccagtgaaatactcttctc

SEQ ID NO: 892938 - DNA, 614 bp, Homo sapiens
tccaggagcacagtgaaagccactggtggatctgccattctgagctctggaggatgatggccctcttctcacagctccactaggtggtgccccactctgtgtgggctctgaccccacatttcccttccacactgccctagcagaggttcttcaggagggcactgcccctgcagcaaacttctgcctgggcattcaggcatttccatatattctttgaaatctaggtggaggtttctaaaccccaattcttgacttctgtgcactcacaggctgaacaccaagacttgaggcttgcactcagtctgarctctattttggcctttttcagccatggctggaatggctgagattcagggcaccatgttcctaggctgaacatagcaatgggaccctgggcgcggcccacaaaaccatcttttcctcctaggcctctgggcttgtgatgggaagggctgccatgaagacctctgacatgccctggagacattttcgccattcattttcttggaaattaacatttgtctccttgttacttatgcaaatttctgcaacaggtttgggtttctcctcagaaaatgggattttctattgcattgtcagtctgcaaatttttc

SEQ ID NO: 892939 - DNA, 592 bp, Homo sapiens
tcctgtcttctgaacccttcaaattgttccaacttctgcatgttacctagttccaaagttgcttccacatttttgggtatcttttcagcagcaccccactcctggtaccaatttaccatattagtctgttttcatgctgcttataaakacatacctgagacttggtaatttatacaggaaaaaggtttattggacttacagttccacatggctggggaagtctcacaatcatggtgaaaggcaaggaggaggaagacatgtcctacattgatagcagcaggcaaagagagagcttttccagggaaactctgccttataaagccatcagatcttgtgagacttatttgctatcatgagaacagcatgggaaagacctggccccatgtttcaattacctcccaccaggtccctcccacaacatgtgggaaatcaagatgagactttgatgggaacacagccaaaccatatcacgtggcaatgtcagaaagttactctacatggtctaaaaaggggagttattaatccagcccttgtttagcatatcatcaagaaaataaccataaaaatgggcaaccagcagttcttggggctt

SEQ ID NO: 892940 - DNA, 592 bp, Homo sapiens
ggatgctaacgatgatgcatgtgaagtttatgtaaaatgctctgaaacaacattctctgaagcatagtgagagcttaatgaatttgagctatggatattgtgaattactaactatttgaccttggcagaatcatgatagaggatgtcctgaggatgcagtgatgtgccgagaatttgagagtaagagtttaaagcaatgttatattcacaaagaaataataaaatatacaaggccagatgtctagagatcacagwctttttaaaataattcatgcttttaaattcatactttgtttttaacaaattcaaatgccttcacaggaggggtaacaaccataactgtgtgaaaaactgagccatcacctaagtaataataatttttaaaaattaataagaatcataaataatcaaaagcctggagtcaacttccacatcccaatttaaacgtgaagctataatgagacttcaaaaattcatggaaaaattgaattaaaatataaaaataaaaaatacaaactttatttctcaacagacactccattaagttcaaaacacttttataagtgactccaaacatttagtccctccataa

SEQ ID NO: 892941 - DNA, 592 bp, Homo sapiens
ggatgctaacgatgatgcatgtgaagtttatgtaaaatgctctgaaacaacattctctgaagcatagtgagagcttaatgaatttgagctatggatattgtgaattactaactatttgaccttggcagaatcatgatagaggatgtcctgaggatgcagtgatgtgccgagaatttgagagtaagagtttaaagcaatgttatattcacaaagaaataataaaatatacaaggccagatgtctagagatcacagtctttttaaaataattcatgcttttaaattcatactttgtttttaacaaattcaaatgccttcacaggaggggtaacaaccataactgtgtgaaaaactgagccatcacctragtaataataatttttaaaaattaataagaatcataaataatcaaaagcctggagtcaacttccacatcccaatttaaacgtgaagctataatgagacttcaaaaattcatggaaaaattgaattaaaatataaaaataaaaaatacaaactttatttctcaacagacactccattaagttcaaaacacttttataagtgactccaaacatttagtccctccataa

SEQ ID NO: 892942 - DNA, 622 bp, Homo sapiens
gcatgtttggttgggtgcagatagtttttgaaactaggtggtgacccaacttacaaatatgtcaccagtggtgacctaggaaaacagactgatataagggaaagctcttctcagtgagatgatttagacatttgaaagggcaagggcaatgaatggggtatgcatgttaggataatgaaattaacttctaaagcctaaggtgtattgagataccacaaagaaatgataaaaaaaaaaaaaactggtgccattgcacaaataatatttaacagtgaaagttggcctcttatacagcttataaggagtgtaagaaaggatacagctgagatgcaagtacargtcttagtagagtcacagagctccaaatatgttgaaatgattagctaaattagatctgtcatgctgtaaacaggtcctaattgagaaaatctgaaactctaaaatatggcatgctatatctatgccagcttgcaacagtgactcacccttttaaaaaaaattgttggctgggcgtggtggctcatgtctgaaatcccagcactttgggaggctaaggcgggtggatcacttgaggtcaggagttcgagaccagcctggccaacatggtgaaaccttgtctcta

SEQ ID NO: 892943 - DNA, 622 bp, Homo sapiens
gcatgtttggttgggtgcagatagtttttgaaactaggtggtgacccaacttacaaatatgtcaccagtggtgacctaggaaaacagactgatataagggaaagctcttctcagtgagatgatttagacatttgaaagggcaagggcaatgaatggggtatgcatgttaggataatgaaattaacttctaaagcctaaggtgtattgagataccacaaagaaatgataaaaaaaaaaaaaactggtgccattgcacaaataatatttaacagtgaaagttggcctcttatacagcttataaggagtgtaagaaaggatacagctgagatgcaagtacaagtcttagtagagtcacagagctccaaatatgttgaaatgattagctaaattagatctgtcatgctgtaawcaggtcctaattgagaaaatctgaaactctaaaatatggcatgctatatctatgccagcttgcaacagtgactcacccttttaaaaaaaattgttggctgggcgtggtggctcatgtctgaaatcccagcactttgggaggctaaggcgggtggatcacttgaggtcaggagttcgagaccagcctggccaacatggtgaaaccttgtctcta

SEQ ID NO: 892944 - DNA, 667 bp, Homo sapiens
cactcattttcacaagaaccgcatgggggaagctgcccccataatccattaccacctcccttccacaacacctgggaattgcaggtccctcccttgatacatggggattaaattcaagatgagatttgggttggaacacagagccaaaccatatcattctgccccttgcccctagcaaatctcatgtcttttcacatttcaaaaccaatcatcccttcccaacagtcccccagtcttaactcattccagcattaactcaaaagtccacagtctgaagtctcatctgagacaaggcaagtgccttccacctatgagcctgtaaaatcaaaatcaagttartaacttttataccatggggatttaggcattgcataaatgctcccattccaaatgggagaaataggccaaaacaaaggggctacagaccccatgcaagtccaaaatccagtgggacagtcattaaatcttaaagctccaaaatgatctcctttgactccatatctcacatccatggaacgagagtgagcaatgtattaaagaaacaggtttaattgactcacagttcatcatggctggggaggccacaggaaacttacaattatggtggaaggggaagcaggcaacttcttcacaactgggcaggaaagagaagactggaggagaaact

SEQ ID NO: 892945 - DNA, 615 bp, Homo sapiens
atacatttttatatctctaccaaactttacagatttataattaatgacaaagtacgcagaagttaaaaaaaaccactgtgtgatggaaaaaaatgacaaaaccaccactttcatcatgcctctgattcttcaagggctgccatgatggctcttttgccctttgtgtggcttcatgggagggaacagggcatgctgctcttttgttttattgctattccagtggtgtgcaggtacgcagaggtgcagrgacagtggagtgcttttagttttacatttacactgaataaagcacattcatggcatccccatctcctttgaggaggagctcgagtctggggagggggggagctctgacctattagtattgagggagtatctactatgtgatgagtgccaaggccaaccctttatatcaactgcagtggggtcggtgtctgctcatgagcatccctggagtaattggcttcatggaatcttgctttggctggcacagtttcctctcacagtctggggaacctctgaactgtggagttgattgtcatgacttgcccagctccccggccagacacctcactcaatatcgcaatagcacagatgcattggaaaacacggcat

SEQ ID NO: 892946 - DNA, 588 bp, Homo sapiens
ggaatttatttccccggctccctccctaccttccctgctgtggtggttgcccatgtcctgtcaggtggtgtcttctacatcagctccaaattcccaacatttcccaaatgttttgatgtcaggatcccttcatgctyttaaaaatggttgaggaaccccaaagagcttttgtttaattttcttgatgtttacggtattagaaattaagactgagaaatactcaaacacaagaatacacagatgtatattccatcagccatgagagcaatgacatcatcacaagtcaggtagtgtccgaaaaacttcactatgtactcatgagaggatgagagcgaagaaggcaaatgatgtcttagtattattatgaaatagttttggccttggggacacctagtagagtctcaggaacaccccacaggttcacccttcccaaactgctccttcagggttgctctgggttgcttttccatcttttgttgactctccttactctgcctaaaactccttattactctcttgatgcaattctcctcgatttctccatttgagcgtgggatctgtttccctaggagacttgactcctcacgg

SEQ ID NO: 892947 - DNA, 691 bp, Homo sapiens
ttcttcagttcagcttcgatttaggttttcttgtgttctgctagcgttggggttagctcgtttctgtagttcttctcgttgtgatgttaagttgttaatttgaaatttttctgactttttgatgtgaaattgacaagccaattctaaaatttacatggaaatgcaagggtatccaaagaaagcttgaaagaacaaagttacgtggttaacgctacctgatttcaaaatttgctatacacccatagtattcaagatagtgtgatactacataatgatcaagaaatagatcaatggtatagaataaaaaacatggactagaccctcatttatgctgtcattttatttcttaagacaacaaatcaatccagtaggaaaacaaacattttttccaaaatgtggttattgtrgtaaaattcatataaaaaaattactatcttaaccacctaaaattgactatttgatggcattacatatatttatattgctgtgcaacgattactgccatctttctccataactcttcgtcttataaaactaaaactctgtatacattaaatcataactccccatcccctcccctaggccttggcaaccactgttctactttctgtctctacgattttgattattccaagttcctcatataagtggtatcatatagtatttgtcattttgtgactggtttatgtta

SEQ ID NO: 892948 - DNA, 617 bp, Homo sapiens
ttccagccctgggacaagctgaggtagaagatatatcctctagttgagctgagctgatggatggaagctctgtggaggagttggtctgccctttccagctttttccattgctgctactggtcacctgtcctactcacagactcagctctctcctyttctgaggcagaagagcattttcaaacttatcagcaagtaggcacttggtggatcctgctttctaaactttgatctccattctttgagttaatatttgtgatgtgcctactatgtgccaaccagtggactggaccttggggatatagacattatcaaacaggcaacattcatgcatttaggaagcttacttttaagtagggggcctgtagtctagtcttgagtgcctgaagccccagtcttctcttaaagctctttgaaaaatttctagactagtcctatctttacaattagatggctacatcagtttccacagtagcactagttgccctgcaaacaaacttagctatgatcctgcctccctgccttgctctttagggatgatctcctgaggaatctggacttgcctctctctgaacagagtcacctcgagtttggctatgagacaaatagttaaccacaat

SEQ ID NO: 892949 - DNA, 623 bp, Homo sapiens
tgcatggtaccagcaagatcaatgatactggtcacaaagcaatgctttggtgactcaaagctcccttctcaaatcagaaataatcctctagaaagagaaatacagattagagataaaatggcaaccacaaggagaaaatcaaactatcatattaatgggcagaattttttgacagtagaaacaaaaagttatctcatcacggttttctttttattccatgctgggaggaaacatgtgtggggagtaccaatttcttcaagggtgctactcctttcagctttgaaaggtaatgggggaaatgtggtggggttcaaaggaggaaaatggagaaattgattctgtttctactttaggctgtgaactgaagagacattagatgtccttagtatttcctcccccttgagatcttactyagattgccaggatggtatatgagatagggcctgggtctgaaaccttttttttttttttttttaaatgaggggtctttaggcatatacaggaaccaagcatggctgcaggaagtggctggaagggttgcatcttgggtatcccttctttggagactatagctaacaacttgatttatttggctcttgatttctttcattataataaatacg

SEQ ID NO: 892950 - DNA, 573 bp, Homo sapiens
caccaccctcagccaaaagaaatgtcatcatcattccattatttctctcaaaatctttccagagttcccagctgcctcagtcatcatcagagattctccaacttctgctacaagattaaaacaatccccactgtttttcacttgatttatcacctcctcagtggtgcttccctgascaccctatccaagtaggcatcccatgttcttctctattatcatcctggttctacttcctagtacttattatagtccataactcttcattcatttttttttactagtttattttttactggtttgttgtccacccttagataagccaagacttgtagagccatagctagtctttccttcctggagcagagatgggggaagaaatatcaatttatttcatattaaatttacctgctacacacactgacccaatttactgttcgcaacaactccatggggtggggaatggcaccactactttgtcaataaggccactgaggtcagaacagttaaaggatttggcttgcaaaacatcagataagtgaacggtctttagttaacaatcagttctgcccatct

SEQ ID NO: 892951 - DNA, 620 bp, Homo sapiens
gcagagtgaggacgaggtccaggacccctggctccttctccagtggtctgcctcctcaggccagaatttatatgggctctatgcttcgaggttgcatttgtggccttaggctgccaagccttttccagttccttgaaggaactgacctaacaaacaaacaaaaactattaaatgcagtaagtcatttatctgccaaaacaatgtggtgaaagagagatccaataaaaagaggggctgatgagcagatcagagtatagagatctgagcaccctgtacactctcccaagtgggcaactgaggttcttttgggccctgctggcatctccccattggctttctgttatccttcattgcaggacctttgtgtatgggcagcaagactgatggcttcytgaacagtgtgattggaaaaattctgcctttatctttaacacagttatgtccaaaataatttcctcaatcagactctcaattccaccattcaagacacagtcaggataaacactgcccctcaattatcctgcccatggggcaagaaaaagttttcagactcacttttgaaaggtggcctgcctattggtggctttccttcactgcatgtgccaagtaatcctacaaag

SEQ ID NO: 892952 - DNA, 633 bp, Homo sapiens
ctttgaaaactggcacaaggcaaacacaccccttctcaccactcctattcaacatagtattgggacttctggccagggaaatgaggaaagagaaagaaataaagggtatttaaacaggaagagaggaagtcaaattgtctctgtttgcagatgacatgaytgtatatttagaaaaccccattgtctcagtcccaaaacttcttaagctgataaacaacttcagcaaagtctcaggatataaaatcaatgtacaaaaatcacaagcattcctatacaccaataatagatgaacagagaggcaaatcatgagtgaactcccattcacaattgctacaaagaaaataaaatacctaggaatacaacttataagggatgtgaaggacctcttcaaggagaactacaaaccactgctcaataagagaggacacaaacaaatggaaaaacattccctgctcatggataggaagaatcaatatcatgaaaatagccatattgcccaaagtaatttatagattcaatgcaattcccatcatgctgccattgactttcttcacagaattagaaagaaatactttaaattttatatggaaccaaaaaagaggctgcatagccaagacaatcctaagcaaaaag

SEQ ID NO: 892953 - DNA, 570 bp, Homo sapiens
tgctgggtataagaccgagtgtgtctgttcttaacacttgtcaaattccccttttaaagcggagcaggctgaacatttttctgtgtcctgcagactcagggtctgaggttgaagaacacatcccagatccccacactaggcaccaggcacgcgggaagcactgtcaaaaatgggagggctgctgtggacagcgggctgctgagaaagggcgggcagctgagcaggcagccaagccagccggagcattgtgtgtgatctgcaggctgaggctggctcaactgccttggagctctttgacagctagagggagagaggccaggccactgtcactgtggatttgcatgggccacaggtcaaagccacactgcctgggaaaggaatgggtagagacgagagcagatctgacagagaaaaggtgttcagcctacttkgatttaaaacggggatgaagaaaagctgtgtgacatgagcagatttggccagtgtgggaaaagacagtctggccttcagcttggtacccagggtaaatggtagggagtgggtgtggagcagtaatgctgtgcatattct

SEQ ID NO: 892954 - DNA, 594 bp, Homo sapiens
agaaagaaaaagaaagccttgctatgtaaaaaaacagttgtctggattaaacagtatagtacatagtgatggagttgatttacattttgtggaaagttccttatttcctcatagggctgtggaccaccctttgaaagcagccagcagamcatcactcctcaacccaagtctggctcttctcctctttctccagggaagaatcggggcacgtcctgcggaaagacctgccgggaagaccgcgatgatgagtggatgggggtgagcctggcccggaagccaaggctgatggccgtgtgttggtaagtccctcctgggggtgctgtgggaagggggtggcaactctgagaatgaatgatctgttaggaaggctggatggcatggtgacaagtgcatggctttgaggttgcttattctggactactgcttagacgaaatgacttatcgtcttaattttctttatctgtcaaatgtgaataatgtctgtcccaaggtgctgagatgtgactattgaaaaataaaacatatgtgaaaagtgctttgtacatctcattcattacataggtatttgtgtgtgtgtgtcttagattgaggtat

SEQ ID NO: 892955 - DNA, 568 bp, Homo sapiens
gggcaaagaggagcatctgacaccatctgctttccttgtgccttttgtttggttttctaattgtggccaaacacatgacataaaacttaccaccttaaccattttgagtgtacagtagtggtaaatgtatggcacattgttgtacaacaaacctttaaactttatcttgcaaaacttacatccattgracaacactctcctttttctccttcccgtggttcctggcaacattgtatttctattaagagtttgactactttagatccttatgtgagtggagtgtggtgttcgtccttttgtgacgaacgtatttcatttagcataatgtcctcaaggttcatcatgttgtagcatgtgaccggatctccttcctttttaaaggcagaataatatttcattgtatgaattcaccatgttttctttattcatctattgacggacatttaggttggttctatctcctggctgccgtgatgaatgctgctataaatgtgtaccaatatctctttgagatcttgttttcagttctttggggtatacacccggaagtgggattactggatcaaat

SEQ ID NO: 892956 - DNA, 568 bp, Homo sapiens
gggcaaagaggagcatctgacaccatctgctttccttgtgccttttgtttggttttctaattgtggccaaacacatgacataaaacttaccaccttaaccattttgagtgtacagtagtggtaaatgtatggcacattgttgtacaacaaacctttaaactttatcttgcaaaacttacatccattggacaacactctcctttttctccttcccgtggttcctggcaacattgtatttctattaagagtttgactactttagatccttatgtgagtggagtgtggtgttcgtccttttgtgacgaacktatttcatttagcataatgtcctcaaggttcatcatgttgtagcatgtgaccggatctccttcctttttaaaggcagaataatatttcattgtatgaattcaccatgttttctttattcatctattgacggacatttaggttggttctatctcctggctgccgtgatgaatgctgctataaatgtgtaccaatatctctttgagatcttgttttcagttctttggggtatacacccggaagtgggattactggatcaaat

SEQ ID NO: 892957 - DNA, 568 bp, Homo sapiens
gggcaaagaggagcatctgacaccatctgctttccttgtgccttttgtttggttttctaattgtggccaaacacatgacataaaacttaccaccttaaccattttgagtgtacagtagtggtaaatgtatggcacattgttgtacaacaaacctttaaactttatcttgcaaaacttacatccattggacaacactctcctttttctccttcccgtggttcctggcaacattgtatttctattaagagtttgactactttagatccttatgtgagtggagtgtggtgttcgtccttttgtgacgaacgtayttcatttagcataatgtcctcaaggttcatcatgttgtagcatgtgaccggatctccttcctttttaaaggcagaataatatttcattgtatgaattcaccatgttttctttattcatctattgacggacatttaggttggttctatctcctggctgccgtgatgaatgctgctataaatgtgtaccaatatctctttgagatcttgttttcagttctttggggtatacacccggaagtgggattactggatcaaat

SEQ ID NO: 892958 - DNA, 628 bp, Homo sapiens
  misc_feature 160, 212, 287, 354, 365, 375, 376, 385: n = A,T,C or G
ctttgatctctgacctccccagaatgcttttagtttagtatgaaatgcaatatttggatcttctaggaattttccaagatcaccccttaaatagtttatggcacttaaaaaatgagacaatacaccagacattaagtacagcaaagccttcctataagtntcagtgtgcagctggctatcagacagcaccatgataaacatccgcctctttncacagcccctccaactcagaaatacaataaaacatggtcaacccttgargccaagggctttgctaagtccaaaancttagcaaaaccaaaacataactgatttacccacaaattagataacaataagtgattcaggtttgcnagccataaganttgagtcagnnctttaaaantcaattatttagcagtatggagtggttatttacttagtgatatattttttatagttctctgcctcatatcatttcagtctatttagaaacctgctattttagcacaaaacagtatcaaggagaggagtgaatgtggtttgcagcaggaaaaataacaatagattgttttctgtagtttaatgtcatacgacaagaggcagaatgtgggcaagctcaggttttgagagtcattctgagtgtgtc

SEQ ID NO: 892959 - DNA, 628 bp, Homo sapiens
  misc_feature 160, 212, 287, 354, 365, 375, 376, 385: n = A,T,C or G
ctttgatctctgacctccccagaatgcttttagtttagtatgaaatgcaatatttggatcttctaggaattttccaagatcaccccttaaatagtttatggcacttaaaaaatgagacaatacaccagacattaagtacagcaaagccttcctataagtntcagtgtgcagctggctatcagacagcaccatgataaacatccgcctctttncacagcccctccaactcagaaatacaataaaacatggtcaacccttgaggccaagggctttgctaagtccaaaancttagcaaaaccaaaacataactgatttacccacaaattagataacaataagtgattcargtttgcnagccataaganttgagtcagnnctttaaaantcaattatttagcagtatggagtggttatttacttagtgatatattttttatagttctctgcctcatatcatttcagtctatttagaaacctgctattttagcacaaaacagtatcaaggagaggagtgaatgtggtttgcagcaggaaaaataacaatagattgttttctgtagtttaatgtcatacgacaagaggcagaatgtgggcaagctcaggttttgagagtcattctgagtgtgtc

SEQ ID NO: 892960 - DNA, 628 bp, Homo sapiens
  misc_feature 160, 212, 287, 354, 365, 375, 376, 385: n = A,T,C or G
ctttgatctctgacctccccagaatgcttttagtttagtatgaaatgcaatatttggatcttctaggaattttccaagatcaccccttaaatagtttatggcacttaaaaaatgagacaatacaccagacattaagtacagcaaagccttcctataagtntcagtgtgcagctggctatcagacagcaccatgataaacatccgcctctttncacagcccctccaactcagaaatacaataaaacatggtcaacccttgaggccaagggctttgctaagtccaaaancttagcaaaaccaaaacataactgatttacccacaaattagataacaataagtgattcaggtttgcnagccataaganttgagtcagnnctttaaaantcaattatttagcagtatggagtgrttatttacttagtgatatattttttatagttctctgcctcatatcatttcagtctatttagaaacctgctattttagcacaaaacagtatcaaggagaggagtgaatgtggtttgcagcaggaaaaataacaatagattgttttctgtagtttaatgtcatacgacaagaggcagaatgtgggcaagctcaggttttgagagtcattctgagtgtgtc

SEQ ID NO: 892961 - DNA, 635 bp, Homo sapiens
ttttttcctggcctgaaggaaatgaagaaacatagccaaatattctaaaacaggattcaacaaacagcccataggccaaatccaccactgcctgtttttgtaaataaagttttattgggaacacatctatgcccattcccttatgtattatctatggctgcttttgctctacaacagcagagttgagtagtgtgactgagaccrtatagcctacaagcccaaaacatatactgtctcacccttttcaggaaaagttgccagccttgttctaaaagaagtagagtaaggatttagtgagaagctggagaaaatattttcaaagacaactgtattctccagggaaacctgagatgaagaccaaggtgaggaaggagccagcagagaaatcgagtccatgaggctgaggaggccactggatgtccagtcttcagctctctgaagcctgagacaggaaacagttgtctcccgagagaaaggtttgaacctcctttaactagggaggaataagagatgatggcttcttagatctgtttacatttgctggaaaaacttcttccagggaaataactagacagggctttggccaactagcaggtgaagtctggagggaggtggaagagactgcttccaagctg

SEQ ID NO: 892962 - DNA, 657 bp, Homo sapiens
aaaatgtatgttacaaaataattataacaaaagctttgttgggaagattgtttaggtttttttgtgtgttgattgcaattcccacatatctcacaatgtagcttgtatttctaatttctatgagtatttgaggggtggctattttatgcttgctgattgtattaagttgaatcatatgaaattgccaatatttgaacttttggacaatttcatatgtatgattcatcctattattaaataaaggtttatgccctcctgcctccacacacacacacacacacacacacacacacacacacacacactagtgtatgttttwacaagttacatttctgtggcaggagagggctgaaggagaggggcaggctgccctgatccaagtgagcagatagtctccttattgtttcagggtttcctcccgcactacatgaatcccccaaggctaaaggtgaaccgtacagcggccttctgtttcctctttgccaaccttttattttagacttcatttaggatgaaggtgctggtcctgatcatttagcctcatttcacagaatggcttccttttgaaacagttccttctgaaagactgttttagccttggggccagaaacccctctattagttttattaccatttctgaaaaacagtcactagttt

SEQ ID NO: 892963 - DNA, 657 bp, Homo sapiens
aaaatgtatgttacaaaataattataacaaaagctttgttgggaagattgtttaggtttttttgtgtgttgattgcaattcccacatatctcacaatgtagcttgtatttctaatttctatgagtatttgaggggtggctattttatgcttgctgattgtattaagttgaatcatatgaaattgccaatatttgaacttttggacaatttcatatgtatgattcatcctattattaaataaaggtttatgccctcctgcctccacacacacacacacacacacacacacacacacacacacacactagtgtatgtttttacaagtwacatttctgtggcaggagagggctgaaggagaggggcaggctgccctgatccaagtgagcagatagtctccttattgtttcagggtttcctcccgcactacatgaatcccccaaggctaaaggtgaaccgtacagcggccttctgtttcctctttgccaaccttttattttagacttcatttaggatgaaggtgctggtcctgatcatttagcctcatttcacagaatggcttccttttgaaacagttccttctgaaagactgttttagccttggggccagaaacccctctattagttttattaccatttctgaaaaacagtcactagttt

SEQ ID NO: 892964 - DNA, 634 bp, Homo sapiens
tttgttgggaagattgtttaggtttttttgtgtgttgattgcaattcccacatatctcacaatgtagcttgtatttctaatttctatgagtatttgaggggtggctattttatgcttgctgattgtattaagttgaatcatatgaaattgccaatatttgaacttttggacaatttcatatgtatgattcatcctattattaaataaaggtttatgccctcctgcctccacacacacacacacacacacacacacacacacacacacacactagtgtatgtttttacaagttacatttctgtggcaggagagggctgaaggagaggggcaggctgccctgatccaagtgagcagatagtctccttattgtttcagggtttcctcccgcactrcatgaatcccccaaggctaaaggtgaaccgtacagcggccttctgtttcctctttgccaaccttttattttagacttcatttaggatgaaggtgctggtcctgatcatttagcctcatttcacagaatggcttccttttgaaacagttccttctgaaagactgttttagccttggggccagaaacccctctattagttttattaccatttctgaaaaacagtcactagttttggtagttatt

SEQ ID NO: 892965 - DNA, 655 bp, Homo sapiens
aaaggggagttcccctgcacacactctcttgcctgccaccatgtaagacgtgactttccttctcattcaccttccgccatggttgtaaggcctccccagccatgtggaactgtgagtcaattaaacctctttcctttataaattacccagtctcaagtatatctttattagcagtatgagaacaggctaatacaggcgggataggcacacctgagaaggaggacagggtcagataaggtggtaagctttgaacagaagaaagcgtatcataggggatgttgagcttgttgggatgaggagcatccaatgggctagagcaggtggtttagggctgaggctgtaaaccacaggggattacctatgtttatctggggcaagttgcaggataaccacaggacaagactagtagttggmcagaaataccaatttttattattctagaatagattaaaatataaaataaaattagattttctctaatatatttagaattgaacctttttgggtacaatattcttttttagtatttcttggtgatttttttttttacaacaaaaaatagagcaatacctttcttggttagtaaaataaatccctaaatatttgccacaatctctagaatcttctaaatcaggaaattttaatgattttcaca

SEQ ID NO: 892966 - DNA, 657 bp, Homo sapiens
aagaggatatgggtgggggagcaataccatccgttccatcttcctgtgttcctttccacccaggttttctctgagctcagctagttcatctctggtaagatagtccagtctcgctgttctctccattgtctcccttcctgagggaaggcagccattcacctgggaaggaggctggtcaggggacccgaggagagtctgctcagcrgctgcctccaccacattggttcacccaactgtggcctctggttgtcttccagcaatgtgtatctgtagccatgactttgcttaagcaaacttggaaattcacttcatttaaatgtaatctttcttacttcagggcagttgttcagggaagttgtgatcagtagaaagtaaattggctagagttcagttgtagatctctgcacttgtttggacctgctatccatgcattcaaaaaaatgggaggttttggtcaagtaatgtacaacatgcagcaagaacaagtgtggtgggaagagcctggcaccagagattaagggagtcctagattcagctgtttgatgggtggccctctgctgggagcaagtcttgttcccttttggggcctcagttccctcatcttaaaaaatgaaggtttttgagcttagtggtctccaggattgcctcaaagctttg

SEQ ID NO: 892967 - DNA, 605 bp, Homo sapiens
ggacatcagattttggtgaaactcaaaattacttggtgagaaaaaaagcacacatatgttacgctttttttttcagcatttcacaatattcactaaagcattttataagcaagtgagttgtaggagctaaatatgatcaatttttaaaaactactttttttttttttttttttgagatggaatcttgctcttttgccagactggagtgcagtggtgtgatctcggctcactgcaatttctgcctcccgggttccagccattctcctgcctcagcctcctaagtagctgggactacaggtgtgyaccaccacacccagctgatttttgtatttttagtagagacagggtttcaccatgttggccaggatggtctcaatctcttgatctcatgatccacccgccttggcctcccaaagtgctgggattacaggcatgagtcatcacgcccggcccaaaactatttactttcatttttacccaaatttatttcccctggacgtctacttcacaagcagtaacataagcaagtatgtatcattaaagatttatcacaaatcaaccatattatatcgtaagtaaagtaaaactggtgaaccaaatttaat

SEQ ID NO: 892968 - DNA, 657 bp, Homo sapiens
aagaggatatgggtgggggagcaataccatccgttccatcttcctgtgttcctttccacccaggttttctctgagctcagctagttcatctctggtaagatagtccagtctcgctgttctctccattgtctcccttcctgagggaaggcagccattcacctgggaaggaggctggtcaggggacccgaggagagtctgctcagcggctgcctccaccacattggttcacccaactgtggcctctggttgtcttccagcaatgtgtatctgtagccatgactttgcttaagcaaacttggaaattcacttcatttaaatgtaatctttcttacttcagggcagttgttcagggaagttgtgatcagtagaaagtaaattggctagagttcagttgtagatctctgcacttgtttggacctgctatccatgcattcaaaaaaatgggaggttttggtcaagtaatgtacaacatgcagcaagaacaagtgtggtgggaakagcctggcaccagagattaagggagtcctagattcagctgtttgatgggtggccctctgctgggagcaagtcttgttcccttttggggcctcagttccctcatcttaaaaaatgaaggtttttgagcttagtggtctccaggattgcctcaaagctttg

SEQ ID NO: 892969 - DNA, 649 bp, Homo sapiens
  misc_feature 402: n = A,T,C or G
acatttttgaccacctactatacaccagggactttttgcatctcgtccgcatcccctcttcactgcatgaggcacaatgtgtgtgaattattggaggagcactctcaggagaagaggggcgagggagcagggaggggcaggggatgggctgggagggatgtgctgtygggtcaaagctagccttggtctgatttatgggctgggaagaggtggggaagccctggagcataaatcactctgcagaattgtccccccttgaagctgctggggacagcatcattttctacccctgtatcgtcattggccactggagggacgcaggcgtggtgagtagcctcccaagcatgctggacaaggaggctctaggaagtcaaagacaatgtgcctgggaaggccacaggnacaagccattgaccactgtagctggccatgggaaaaatgggagcacatcattttgatctctttgccattgaattccagcaacctttgaaacctttgtcacaaggaaccctaggtttcagttcgacagaaacttgacaaagcatcaggctcttcgggacgtggtgagtgttagctccagagtggtgatggagcagggaggtatcttgtagctgctgtggaggcagggccagccagaaacgcagatggg

SEQ ID NO: 892970 - DNA, 649 bp, Homo sapiens
  misc_feature 402: n = A,T,C or G
acatttttgaccacctactatacaccagggactttttgcatctcgtccgcatcccctcttcactgcatgaggcacaatgtgtgtgaattattggaggagcactctcaggagaagaggggcgagggagcagggaggggcaggggatgggctgggagggatgtgctgtcgggtcaaagctagccttggtctgatttatgggctgggaagaggtggggaagccctggagcataaatcactctgcagaattgtccccccttgaagctgctggggacagcatcattttctacccctgtatcgtcattggccactggagggacgcaggcgtggtgagtagcctcccaagcatgctggacaaggaggctctaggaagtcaaagacaatgtgcctgggaaggccacaggnacaagccattgrccactgtagctggccatgggaaaaatgggagcacatcattttgatctctttgccattgaattccagcaacctttgaaacctttgtcacaaggaaccctaggtttcagttcgacagaaacttgacaaagcatcaggctcttcgggacgtggtgagtgttagctccagagtggtgatggagcagggaggtatcttgtagctgctgtggaggcagggccagccagaaacgcagatggg

SEQ ID NO: 892971 - DNA, 594 bp, Homo sapiens
acattttcagatatcttcacagcaatagccccctcctggtaccaatttactgtattagtccgttttcacactgctgataaagacaacaataccccactcctggtaccaatttactgtattagtccatttttacactgctgatagacactgagactgggtaaattacacagaaaaagaggtttaatggactcacagttccatgtggctggggaggcctyacaatcatggtagaaaggaaagacatgtcttacatgggtggcagcaggcaagagagaggacttgtgctggggaactcctcattataaaaccattagatcacatgagacttattcactttcatgaagacagcacaggaaatacctgtccccatgattcagttacctcccactgggtccttcccatgatagtgagaattgtggaagctacaattcaagatgagatttggatggggacacagccaaaccatatcatgggggtagagttgagggaaggagagaacattccagggataggaaatagcacatgcaaaggtcctgtggcatggcctttatgtgtaaaggagatattgataaaccttggtatgaaagactgtag

SEQ ID NO: 892972 - DNA, 594 bp, Homo sapiens
acattttcagatatcttcacagcaatagccccctcctggtaccaatttactgtattagtccgttttcacactgctgataaagacaacaataccccactcctggtaccaatttactgtattagtccatttttacactgctgatagacactgagactgggtaaattacacagaaaaagaggtttaatggactcacagttccatgtggctggggaggccttacaatcatggtagaaagsaaagacatgtcttacatgggtggcagcaggcaagagagaggacttgtgctggggaactcctcattataaaaccattagatcacatgagacttattcactttcatgaagacagcacaggaaatacctgtccccatgattcagttacctcccactgggtccttcccatgatagtgagaattgtggaagctacaattcaagatgagatttggatggggacacagccaaaccatatcatgggggtagagttgagggaaggagagaacattccagggataggaaatagcacatgcaaaggtcctgtggcatggcctttatgtgtaaaggagatattgataaaccttggtatgaaagactgtag

SEQ ID NO: 892973 - DNA, 594 bp, Homo sapiens
acattttcagatatcttcacagcaatagccccctcctggtaccaatttactgtattagtccgttttcacactgctgataaagacaacaataccccactcctggtaccaatttactgtattagtccatttttacactgctgatagacactgagactgggtaaattacacagaaaaagaggtttaatggactcacagttccatgtggctggggaggccttacaatcatggtagaaaggaaagacatgtcttacatgggtggcagcaggcaagagagagracttgtgctggggaactcctcattataaaaccattagatcacatgagacttattcactttcatgaagacagcacaggaaatacctgtccccatgattcagttacctcccactgggtccttcccatgatagtgagaattgtggaagctacaattcaagatgagatttggatggggacacagccaaaccatatcatgggggtagagttgagggaaggagagaacattccagggataggaaatagcacatgcaaaggtcctgtggcatggcctttatgtgtaaaggagatattgataaaccttggtatgaaagactgtag

SEQ ID NO: 892974 - DNA, 587 bp, Homo sapiens
aaggagagtttgtttttctcagtagagtaagtagtgactgcctaggtggcaggattttggatggtagtggtgatgttacttattgatggcacatttgatgactgttagtccatggagtggtgggggtagactaactatctggtcttagtgggttctgtacaatcccattaagttgaaggaataaacctgtagttggagaaataacagtgtgacttctccaagactgattggctgayttttggaccctctttgtcccatttctagtcaggaattatgtcttctactgttccacaacccacaaaagaagatgtctgttccacttctggcctaagcaatcctcaagcctctatacttaacaacattggaatgtcaccatcttaaaacttgtcaaccagtaggccttcaaacctcctgccctttaatatttattgaaaccttggtggaaatgaattctgtttttggtggagtgcgtgaagttatttccctccattagtttgtaggccagaggttgaaaactagtggccgcaggctgagtcttcctcaccgtcccactttgcttgcctggcaaagtgttaacctatacaatt

SEQ ID NO: 892975 - DNA, 621 bp, Homo sapiens
acttgtagatttagggggacataacattgagactgagcagtttcttgaacctctcctctcagcagccaccagcctggcttttgcagaccactggaaagtatcccagctcattagcttttggaatgacgggaagccttttgatgtttgacgtctttatctcaactcttcaacttagctcattctggagcagtcacacgatgacagatgagacggtttgggcgtaagccggccaaacaaayggcagggcaagacctggcaggatgctggggtgggggcgggagtgggccaggatggtgttaacccatccacaggggagttgcctttggctgcccacagcagtgatcccaaggcttttgtcaccccttgggaaaggaaggacaaggaagtcaggctgtgtgggcacctgatcctgctgcttttgcaaactgtggatgcccctgagggactgatgtcaccccatgtaggaagacagatgaggagccagggcagagactgtgggcctatggggtcagcgtcacacagcaccattgtttcagaacaataggagggagaaggagaggggatgtgagagctatttaagtgctgttgccattcagcacttgctggttgagagaggaaggc

SEQ ID NO: 892976 - DNA, 621 bp, Homo sapiens
acttgtagatttagggggacataacattgagactgagcagtttcttgaacctctcctctcagcagccaccagcctggcttttgcagaccactggaaagtatcccagctcattagcttttggaatgacgggaagccttttgatgtttgacgtctttatctcaactcttcaacttagctcattctggagcagtcacacgatgacagatgagacggtttgggcgtaagccggccaaacaaacggcagggcaagacctggcaggatgctggggtgggggcgggagtgggccaggatggtgttaacccatccacaggggagtygcctttggctgcccacagcagtgatcccaaggcttttgtcaccccttgggaaaggaaggacaaggaagtcaggctgtgtgggcacctgatcctgctgcttttgcaaactgtggatgcccctgagggactgatgtcaccccatgtaggaagacagatgaggagccagggcagagactgtgggcctatggggtcagcgtcacacagcaccattgtttcagaacaataggagggagaaggagaggggatgtgagagctatttaagtgctgttgccattcagcacttgctggttgagagaggaaggc

SEQ ID NO: 892977 - DNA, 585 bp, Homo sapiens
cctggcacaataagggcatccgatacatacttggtgtgggagtggtttggcctgcctaggctagcacagggctctttggaactgatttcagactctgggcctggttcccagtaggagagaagggctgctgcctggaggaacctcatctaggtcccaaggtgaccccaggagagagacctgtgggtgggctcaggttcatttccactttactaatcaccrcgaatctctgcccaaatccgacttccacttcttttccaataggacacttaccaccctcaggcccagctcctgaaagaaagggctgggaagactgagctagagacatgtgaagctagactcaggaagagacagagacatagaaaaatacctgagacagagagcgagagacagagtctgagtaacagacacaccaaacttgagactgagatgcccaccaagaggagaaaaagcagaccaagaaacagtgcccgccaggagagattcaaaggtggcgagcaggcaggggcaggctgcgaatgatggaggcagagagcattgcaaagggccctcaactttgtctgggcccacaagccagaaacttggagg

SEQ ID NO: 892978 - DNA, 585 bp, Homo sapiens
cctggcacaataagggcatccgatacatacttggtgtgggagtggtttggcctgcctaggctagcacagggctctttggaactgatttcagactctgggcctggttcccagtaggagagaagggctgctgcctggaggaacctcatctaggtcccaaggtgaccccaggagagagacctgtgggtgggctcaggttcatttccactttactaatcaccgcgaatctctgcccaaatccracttccacttcttttccaataggacacttaccaccctcaggcccagctcctgaaagaaagggctgggaagactgagctagagacatgtgaagctagactcaggaagagacagagacatagaaaaatacctgagacagagagcgagagacagagtctgagtaacagacacaccaaacttgagactgagatgcccaccaagaggagaaaaagcagaccaagaaacagtgcccgccaggagagattcaaaggtggcgagcaggcaggggcaggctgcgaatgatggaggcagagagcattgcaaagggccctcaactttgtctgggcccacaagccagaaacttggagg

SEQ ID NO: 892979 - DNA, 546 bp, Homo sapiens
  misc_feature 265, 266, 274: n = A,T,C or G
agaaaggtgaggaggggcgcaggcggccgcgggctgggggcgagcgcacaccccgcgccgctggagttcactgccgggcgccggcatgggcctgggggaggggtgcacagggcccggagggtgcgtgggtgtgggtgcgcccggaggagagcgaggctgccagagtgcgtgtgccgactgagccagtgtgagtgtgcaggggctsgcgaagagactgggagcgagtgtgtgtgcatctaaccgggaggttgtgagtttgtgtgcnnacgcccgnagagaagttgtgagcctgtgtgtgcacctaacccagaggttctaagtgtgtgcacttgtatgtgtgtgtgcacacgcggacagagtgattgtaaggatatgtgtgcgaacctcacagagaggttgtgagattgtaagggtttgcgcacctaacggagatgttgtgagtgctttttttcctgacaggctgtgagtttgctgttgtgtgtattagaggtttgtatgggcctgactgaggggttgtggaatgtgtgtgcgtgagcaggagcctgg

SEQ ID NO: 892980 - DNA, 546 bp, Homo sapiens
  misc_feature 265, 266, 274: n = A,T,C or G
agaaaggtgaggaggggcgcaggcggccgcgggctgggggcgagcgcacaccccgcgccgctggagttcactgccgggcgccggcatgggcctgggggaggggtgcacagggcccggagggtgcgtgggtgtgggtgcgcccggaggagagcgaggctgccagagtgcgtgtgccgactgagccagtgtgagtgtgcaggggctcgcgragagactgggagcgagtgtgtgtgcatctaaccgggaggttgtgagtttgtgtgcnnacgcccgnagagaagttgtgagcctgtgtgtgcacctaacccagaggttctaagtgtgtgcacttgtatgtgtgtgtgcacacgcggacagagtgattgtaaggatatgtgtgcgaacctcacagagaggttgtgagattgtaagggtttgcgcacctaacggagatgttgtgagtgctttttttcctgacaggctgtgagtttgctgttgtgtgtattagaggtttgtatgggcctgactgaggggttgtggaatgtgtgtgcgtgagcaggagcctgg

SEQ ID NO: 892981 - DNA, 716 bp, Homo sapiens
gtagagtgtttattttttaagcgactatcaattgtatttattttttattttggtgcccacgtgttcagtgctaacatgcagacatacaaaagatttttgaatacttatcttgtatcctatgaccttgctgagctcacttattagttgtaagaggctttttatagattccctgaagtccttcacatagrcaaacgtgtcatcaaataagaacacttacatgtcttcatttctgacttgtatgccttttatttctttttcttgctttattgcactgactagaactttagcagtatgtcgaacaagagtagtgagaatggacatccttgtcttggtcccagtcttagggggaaaccattcagtattttatcattagtataatgtcagctgtaggttttttaatagaagtctttaacaggttgaggaagtaaccttctaattcaatttttctgagagtttttaatcaagaatgaatgttaacttttgtcttatgctttttctgcaacaattagtctaatcatgtgatttttctcctttagtctgttaatgcgatagattaaactgatttttgaatattgaaccagacttgcgtccatggaatgaaccttacttggttgtggtgtataattctttctatatattgatgaattctatttgctaatattttgttaaggatttttttgtctgtaagtgatgttggtctgcagttttcttttttt

SEQ ID NO: 892982 - DNA, 656 bp, Homo sapiens
tgttgttagaaaaggaggctgctgttagctacacctctcattcctagctagtaagaggtgaaggacagttgtcaggacaaatgagggaatatgtatgcacatactttgaaacagcgatccatttgagaggccttctgttgctgttattacagctgctgctgccgmaaaacagctttgaaccctgaggtatgaggctgattttggaagctggggcagggggtgggagagattctggtaacacaggatgtgtgaacttatgttcattgaccaggacctgagcaggactgatgaataagggtcttctgtctcctcagtagtggctttaggttattgtgtaattcttgggaccttagggtcaaacaaggatgtccttgctatcacaagggttatcacaaacatgtccaggcagacagtcagcaaaggatgtaccgcacctgccacacccctgccagactcctctcaatttgagctgtgaggtgacttcatagtaacaggcacaagctcagagcttcttggggacaaaagcccaggagtccctcttcttgtccaccttgcatttctactcttccccagagaagctacaatgggtcaagcgactaccactgtcaggacagggttcctgccaagtccatgtgcagttgcttctggctggtacc

SEQ ID NO: 892983 - DNA, 672 bp, Homo sapiens
gctgcattttgggatcttgtgagcagaggattttccttctcaagaagctgctctgagatgggacccctctccttggaatatttagaacagtttccagcatagaatttacagctttcccttctcagaaaaacagtattggaattttgcctcaagttgattattaacacaacatgacagaaagacaggttctctgaatatattttcacctccaactttttttaaaaagtgaagtgtaaggtagaaaccagaataggaaataggtgaggcaggtgttgagggccatttccagaaaggattacttaatagtagtaggagttttctaatccaaaaccaggtcctggagaagttgagctcgaattggtggaaggctgcagtttcaagagctggagaactggttagcgggaagaagcctacagcggaggaaggatcagcagagatggaatgggaaarggggccagggtttcccttcctcaggatagtggagtctccatcagcatctgttcctggggcctctcctggattccaggagttgcgttcgctgggccctgggggaaacagagaagaaagttgagtttgcctgagtaagccaagtgaaaagcccacaggatagctggagaagggaaatggctagaaggtcaggagcccagagagctaattttaaaggatagggaa

SEQ ID NO: 892984 - DNA, 612 bp, Homo sapiens
tctatgcccattggggtttatgttcacaacacccactgtgaaatatgtactgctatcccatggatgattctcagacccacagtaagtagaaccaaagctaggactggagcccaggtctactgggccaagatgaggcctcctattttctgtttttacaaayggcacctcttgcaggggtgggggcaaaagggattgggtgtaggaaaagttagtgtgtatgtggggggtgttcagtgaggggagggccctgggaggtaatgtcctttggggcacatcgggggacctgctagagaagccagtccaggcatagcagaataaagagtggaagaagtaaggtgaaggaaggaggatggatgctgtcgcatcagtctgagggcttcagaggcactagaaagagctggctggctcgctcttgaatctagttctggccctattttccatgactaggaactaccttatgatgcccccatcatctcccaaagaactatagatggcaactcatagggcatagaaatttggggagggggcctcctgcaggaacatagtactcactgggtaccaggcactgttctaactgctgtgtagatattatctcattcaatcttcgtagca

SEQ ID NO: 892985 - DNA, 615 bp, Homo sapiens
  misc_feature 215, 518, 596, 614: n = A,T,C or G
caacctggaacagcacagggcacagtgatcaccccctcccaccaacaattctccttgacaggttcttatttccccatctggtttgcagtgtggacagaaggcagttgaggtaattttgggtgatgagctagaagtggcagggcttcagggaaaacagcttggggtcacagtgttcatgtcaacccttcaggaaaggctggactgagttaggcatntgggaggctggtctcaaatggggtgggccagggcagccaagcctatgccacaggactgggaggtcctgactgagcctccatgtgtcttcctccatggaaaagatatcaaggctgcctcaggagagaaactggacaaaggcacagacactgaggatgaagcctgttccaacaggagccaaggaatgacgctgtgtcagagagaaagcagagatgtccactgtgtcctctcagctgsccagcctcccttcttgctagtctggcaggcgcacgaaagacacctctggcctgaagaaagaagagggngcactggaaggggcagggactccatgactcatctagacaaggtggctttaaggagcctaggctattggtgtaaaagcnacagctctgggcacagana

SEQ ID NO: 892986 - DNA, 589 bp, Homo sapiens
caaggatgactccaaattttgggcctggacaactaaagaatggagctcccattaactgaaatggggaaggctgaggaggagcaggcactctatttcggacatattaagtttgaggtgccatccagatgtcaagaacatgatggatgtacaagtctggagtttgggagggagatgtgagctagggataaaaactgggatatggttcaaaacatgtttaaaatgtccatgaactctcacattttgcaaatgggattatattctggtataatctttttggagggcattttggcagtatctcagctattaaaatgtgcacacctttggccaagcacttctatgatattatcccacagaaacattgtacrgctatgcaaagtatgcacaaacatgaacaaggttgctcattacagcattatttataggagcaaaaaagaaaaaagtagttctccatgagttgccataggacataataagtgaaaaatacaaatggcaggacaatatccatgtataacattatttcacttgtgttattaatttttttttttttgagacagagtcaaactctgtcacctaggctgtagtgcagtgg

SEQ ID NO: 892987 - DNA, 579 bp, Homo sapiens
gcaggtcattcccataccaagtgtatgtatatttatctaattttatttattaaaacagtcataaaatcttgtggctttgggcctacttatataaaggattttttttaatgttattgcttatggtgagtttatcatgtggtataacagctctgttctgttaaaaagaaaactgaagctgcattttaaactgtgagcaggaagttctgtacagagacagtttcctttctcaggaacagcagggcagccagctccattaacctaattctcatttttcctttctctctgggaaggacctccaagctgaacaagctgaggttgctcagaggcctcacccacaccccactatcttagcctcaactccatagattggcgggaacattgttttgcccagacccagttctttgcagcagattcagtcccagtggaactggcytcaccaagcccacgtcccaggtgaccagactgtttctaacttatcagtggtagcatggctgtagctccgagatcagagaagtcactgtaactatattctcgggacttgcaggacccatcccacaggcctgctgtgctgccacttct

SEQ ID NO: 892988 - DNA, 663 bp, Homo sapiens
aatactagcaaaccaaatccaacagcacatcaaaaagataacacacctgggctgggtgtggtggctcacacctgtaatcccagcactttgggaggccaaggcaggcagatcacctgaggtcaggagttcaagaccagcctggtcaacatggtgaaaacccatctctactaaaaatacaaaaattarccaggtgtgatggtgggcgcctgtaatcccagctacttgggaggctgaggcagaagaattgcatgaaatcaggagatggaggttgcagtgagctgagatcacaccactgcactccagcctgggcgacagagtgagactccttctaaaaataataataataataataataataataataataataataataataacaaaaaccaaaaaaaaccccaccataatcaagtgggatttataaaaggggtgcaaggatggttcaatatatgtaaatcagtaaacatgatacaccatatcaacagaatgaaggacaaaaactgtatgatgaattcaatagaagtagaaaaagcatttgataaaattcaacatcccttcatgatagtctcaagaaattaggcaatggagggaacatacctcaaattaacaaagggcatatacaacaaatccacagctaacatcatactgcatggagaaaagtgg

SEQ ID NO: 892989 - DNA, 644 bp, Homo sapiens
caaagttaaattaatagcagacttttcagcaacagtagtggaagctagaaaatagtggaataatattttcagagagctgaggtaaaataacaatctaaaattttatgttcatctaaattgccattcaggaagaaagacmaaacattttgagaaaagcaacaaaggctcctctgccaagagatctctactgaaatattttttttcagtaaggacagtgatctcagaaagaaaggcagagatgcagggagagatgactgtatggatgcttaccaaatatagacacaaataatgtctgatttgggagctgggtagtaagaacagtgacactaaatacggaacacaagccatatgttaaattagatgtacattggaagagtcattagagtttaaaatatttaagttcccatgagggatggtagagatgttgatttaggcttttagtataagtgtacccattaaagtttataggcctagcttacaacggaataggaatgagatgtataactttaaaagtggctaaaataggaaattttaagagataatccaaatagaggtaacggtagaaaagaaacaaatttaaacatacccagtaatcatatatataaacatacccagaaatcatcaatgtaatgagaccgaactct

SEQ ID NO: 892990 - DNA, 644 bp, Homo sapiens
caaagttaaattaatagcagacttttcagcaacagtagtggaagctagaaaatagtggaataatattttcagagagctgaggtaaaataacaatctaaaattttatgttcatctaaattgccattcaggaagaaagaccaaacattttgagaaaagcaacaaaggctcctctgccaagagatctctactgaaatattttttttcagtaaggacagtgatctcagaaagaaaggcagagatgcagggagagatgactgtatggatgcttacmaaatatagacacaaataatgtctgatttgggagctgggtagtaagaacagtgacactaaatacggaacacaagccatatgttaaattagatgtacattggaagagtcattagagtttaaaatatttaagttcccatgagggatggtagagatgttgatttaggcttttagtataagtgtacccattaaagtttataggcctagcttacaacggaataggaatgagatgtataactttaaaagtggctaaaataggaaattttaagagataatccaaatagaggtaacggtagaaaagaaacaaatttaaacatacccagtaatcatatatataaacatacccagaaatcatcaatgtaatgagaccgaactct

SEQ ID NO: 892991 - DNA, 644 bp, Homo sapiens
caaagttaaattaatagcagacttttcagcaacagtagtggaagctagaaaatagtggaataatattttcagagagctgaggtaaaataacaatctaaaattttatgttcatctaaattgccattcaggaagaaagaccaaacattttgagaaaagcaacaaaggctcctctgccaagagatctctactgaaatattttttttcagtaaggacagtgatctcagaaagaaaggcagagatgcagggagagatgactgtatggatgcttaccaaatatagacacaaataatgtctgatttgggagctgggtagtaagaacagtgacactaaatacggaacacaagcmatatgttaaattagatgtacattggaagagtcattagagtttaaaatatttaagttcccatgagggatggtagagatgttgatttaggcttttagtataagtgtacccattaaagtttataggcctagcttacaacggaataggaatgagatgtataactttaaaagtggctaaaataggaaattttaagagataatccaaatagaggtaacggtagaaaagaaacaaatttaaacatacccagtaatcatatatataaacatacccagaaatcatcaatgtaatgagaccgaactct

SEQ ID NO: 892992 - DNA, 644 bp, Homo sapiens
caaagttaaattaatagcagacttttcagcaacagtagtggaagctagaaaatagtggaataatattttcagagagctgaggtaaaataacaatctaaaattttatgttcatctaaattgccattcaggaagaaagaccaaacattttgagaaaagcaacaaaggctcctctgccaagagatctctactgaaatattttttttcagtaaggacagtgatctcagaaagaaaggcagagatgcagggagagatgactgtatggatgcttaccaaatatagacacaaataatgtctgatttgggagctgggtagtaagaacagtgacactaaatacggaacacaagccatatgttaaattagatgtacattggaagagtcattagagtttaaaatatttaagttccmatgagggatggtagagatgttgatttaggcttttagtataagtgtacccattaaagtttataggcctagcttacaacggaataggaatgagatgtataactttaaaagtggctaaaataggaaattttaagagataatccaaatagaggtaacggtagaaaagaaacaaatttaaacatacccagtaatcatatatataaacatacccagaaatcatcaatgtaatgagaccgaactct

SEQ ID NO: 892993 - DNA, 595 bp, Homo sapiens
cagtattatatttgactcaggaactaattattaagggagctttgacacctgcagatggagggctgatcttgtgtcaagttaacaggaagactgcccacagatgacactgcatttgtatccctgtggatgtagagtattgggaaggcatttgtttagtttcatgcctccaaaccatgcattgtctgtgatgtatctgcccagccttctcagaactcaatgttgtacatttttccctctaggacctgaattggtcttggaggcagcttttagaaatcctctgtgtagttcctgtccacatgcactatatatttgtctctttttctcctctcatgaatctgctcgtttctctacttctgtctacgtagaagcactcrgcaactagtttctgctcattaaatgtgttctatatactaggctcagtgctttacatgtgttgtctcacaatgactctctgaggtaaatacactatccccattttacctgtgagaaaattgaggcttagagagcttagtgtcttacctgagtttcacttttccaaagtagtcatccacaaagtatgaggcagacagatctaagagaagaaagacagctgagg

SEQ ID NO: 892994 - DNA, 608 bp, Homo sapiens
tgcactgtgctgatgatgttgttcctcaggtccgtgcagaggcaagtgcagaggccctcaacctctccccgctggagccgccctgctccccgggaggggtcctcactgtcaccacggtgttgttgctgggtttgtcagggacttgacttcctgctaaacctctgctctcctcagcaccgggtgggaggtgggattaaagaaccacccctgatcaaggccatcctggccaacatggtgaaaccccgtctctactaaaaatmcaaaaaaaaaaaaaaaaaattagccaggtgtggcagtgtgcacctgtagccccagctaggcaggagaattgcttgaacccgggaggcggaggctgcagggagccaagatcgcgccactgcactccagcctgggcgacagagcgagactccatctcaaaaaaaaaaaaaaaaaaaaaaagaaccaccccctcggacaggcctcctccgcctccctggctaccatcagcgggcactggtcagaacagagagaggagacgaagaagccaagagatgggatcacaagggcctcagacaacatggagagcgtcctggattggaagttaggaggcctcctttcccaccctgccc

SEQ ID NO: 892995 - DNA, 600 bp, Homo sapiens
agctatgcatgttgcaagtttcactaaagaatatgatgatgcatgtggggacttttttggctggttgtgttgtttactgtcctctgattctatctataactttcttgtatgcccaatcttcactatttttatacatgtattgctattttatcattgtatgtctcttgtcaatgtcatgcctattgtaggaaaagaaaaggatgcaatcaaakacccacaaatcatcataaattgtaggatagatctgatccagttggcttttcagattgaaccctaggccttactccctctcaccacttaaacaattggctattaaatcaggtcagattgtgtccttcttctgtgatctgaactcactaatattgaaactatcatcaccaatgacagatgaccaaataaacaaccctgggaatgagatttcctagcattgtgggacttcctgctggttgttggccttcacatacattccataaaatgatctttggccaatagtggggactgaggcctcaactctgaccttttattctcttgccaaaaatcctgtctaaggggcctggagattcacactccacaagccataaaatctcgtgattttttttt

SEQ ID NO: 892996 - DNA, 707 bp, Homo sapiens
acttccaaaaacatctgagacaggtctcagttaattaagaaagtttgttctgcctagtttaaggacatgcccatgacactgcctcaggaggtcctgacagcatgtgcccaaggtggtcaggatacagcttgcttctatatattttagggagaaaatacatcagcctgtaaacaaaaaattaaattctaaggtccctgaaccatctgaatgggctttcttctaggccagggcactctaaaattgaagaacctgaacattcctttctattgataatactttcagccagttgagcccattcagaccacagcaaggtgccaggccaggcaagggctgacttgagatacctgccagatgagtcactggcaaaaggtgctgctccctggtgagggagaaacaccaggggctgggagaggcccagaaggctctgaaggagttttggtttggctggccatgtgtgcaattagcgtgatgagctctgacatggccttgcatggacggattgggcaggacaccccagctgaggaggatggcaggagtgatggcacaggggaaagkgtggcatacccaggtgacagctccccactacctccactctgtgctgcagctcaggggctgggtcttctgctgcaactcagcccctctgtaccagccctggcctcattcccttggttccaggacacccagctgacaaaagggacttgcctgta

SEQ ID NO: 892997 - DNA, 606 bp, Homo sapiens
agggcactctaaaattgaagaacctgaacattcctttctattgataatactttcagccagttgagcccattcagaccacagcaaggtgccaggccaggcaagggctgacttgagatacctgccagatgagtcactggcaaaaggtgctgctccctggtgagggagaaacaccaggggctgggagaggcccagaaggctctgaaggagttttggtttggctggccatgtgtgcaattagcgtgatgagctctgacatggccttgcatggacggattgggcaggacaccccagctgaggaggatggcaggagtgatggcacaggggaaagggtggcatacccaggtgacagctccccactacctccactctgtgctgcagctcaggggctgggtcttctgctgcaactcagcccctctgtaccagccctggcctcattcccttggttccasgacacccagctgacaaaagggacttgcctgtacccctgcacctggtcctacacctggctcctgggttgtcagcaggtgtttgttgggccaacgagtgcatggatggaaacacagacagaaggacagatggagagatggtgggtggccagacaaagga

SEQ ID NO: 892998 - DNA, 568 bp, Homo sapiens
tcattctgttggccaggctggagtgcagtggcatgatctcggctcagtgcaacatctgcctactgggttcaatcacttctcctgcctctgtctgctgagtagctgggattacagacatgagacacacagcaccacacctgactagtttttttgtgtttgtttgttttcgttttttttttttctgagacagagtctcgctctgtygcccaggctggatggagtgcagtggcgagatcttggctcactgcaagctccgcgtcccgggttcatgccattctcctgcctcagcctcccgagtagctgggactactggcacccaccactacgcccggatactttttgtatttttagtagagacggggtttcactgtgttagccaggatggtctcgatttgctgaccttgtttgttttttgtatttttagcagacatgtggttttaccatgttggtcaggctggtcttgatctcctgatttcatgatcctcctgcctcagcctcccaaagtgctgggattacaggtgtgagccaatgtgcctggcctggttaccagaattcttagttctgttag

SEQ ID NO: 892999 - DNA, 605 bp, Homo sapiens
gtctcattctgttggccaggctggagtgcagtggcatgatctcggctcagtgcaacatctgcctactgggttcaatcacttctcctgcctctgtctgctgagtagctgggattacagacatgagacacacagcaccacacctgactagtttttttgtgtttgtttgttttcgttttttttttttctgagacagagtctcgctctgtcgcccaggctggatggagtgcagtggcgagatcttggctcactgcaagctccgcgtcccgggttcatgccattctcctgcctcagcctcccgagtagctgggactactggcacccaccactacgcccggatamtttttgtatttttagtagagacggggtttcactgtgttagccaggatggtctcgatttgctgaccttgtttgttttttgtatttttagcagacatgtggttttaccatgttggtcaggctggtcttgatctcctgatttcatgatcctcctgcctcagcctcccaaagtgctgggattacaggtgtgagccaatgtgcctggcctggttaccagaattcttagttctgttagggtctgttggcaaggaagtgaggtcgcttcttta

SEQ ID NO: 893000 - DNA, 616 bp, Homo sapiens
cattccctcacttccagagctcctctctacagccagcctctgctggctccctggggagggtggactcctgggctgcagaggggctgcccacttcttccagagggcctggccatgggtgagggccctgggtagaagacccctccctgcaattcccacacccctggaagctgtaaagcccagctcagacccttggagggcaagtggccaactcagggcctggtgtctttgtccactgctactctgcctggtcctcagatcaggcacctggatttacctcctcatgctccgsccctggctgccccactgctccacccacctgatccagcttcccttgcctgggtgactgccatggcctccttcctctgctcctcagcaaaggactctctccaacaggccctatgatacagccactcagccagttcaccccacccacattccacaggctgctttaggctttaggacagtggcaaacatggcctctgccatcccggtctgtgagcgccccttcttacaccaaggtcagttgctaaccaatgagctgctgggggcctccttctcccactcccactgcactgtgtccagagtggccagcaccagccccaggtgtcaggggtca

SEQ ID NO: 893001 - DNA, 560 bp, Homo sapiens
aatgtggaagtgactttggaagtgagtaacaggcagaggttggaagagtttggggggctcagaagaagacagaaagatgaggaaaagtttgaaatttcttagagactggttaaatggctgcattctgttcatgccctaggaatttgtggaagttcaaacttaagaatgatgatttagagtgyctgatggaagacatttttaagcaggaaagcattcaaggtgtggcctcactgcttctatactcagatccaggagcaaagaaatgacttaaagctggaatttatgtttaaacaggaagcagaccagaaaaatttggaaaatttgcagtctggccatgtgacaaagaaagaaaaaagctttttccaggagaagaatttgagcaggctgtggagcaaacacttgctagagagttgcataattaaaatgaaagccagatgctgatagccaagacaatggggaaaaggccttacatgcattccagagatctccatggcagtccatcacatcacagaccttgaggcctaagaggaaagaatgcttttgagggccaggactttact

SEQ ID NO: 893002 - DNA, 560 bp, Homo sapiens
aatgtggaagtgactttggaagtgagtaacaggcagaggttggaagagtttggggggctcagaagaagacagaaagatgaggaaaagtttgaaatttcttagagactggttaaatggctgcattctgttcatgccctaggaatttgtggaagttcaaacttaagaatgatgatttagagtgtctgatggaagacatttttaagcaggaaagcattcaaggtgtggcctcastgcttctatactcagatccaggagcaaagaaatgacttaaagctggaatttatgtttaaacaggaagcagaccagaaaaatttggaaaatttgcagtctggccatgtgacaaagaaagaaaaaagctttttccaggagaagaatttgagcaggctgtggagcaaacacttgctagagagttgcataattaaaatgaaagccagatgctgatagccaagacaatggggaaaaggccttacatgcattccagagatctccatggcagtccatcacatcacagaccttgaggcctaagaggaaagaatgcttttgagggccaggactttact

SEQ ID NO: 893003 - DNA, 612 bp, Homo sapiens
ctcatgtggggcatgtaacctctttcttttggccaagttacccctttggggatgggaatgcctgtaccacaatgcctgtaccccaattgtgtcttgaagtaaataacttgtttttgattttacaggctcataggtggaaaagacttgccttgcctcagatgagaacttggacttgggacttttgagttaatgctgaaatgagttaaggctttggaggactattgggaaggcatgatggtattttgcaatgtgagaaaaacatgagatttggggcttgtcctggggtggaatgatatagtttggatgtttgtccctgccaaatctcatgcaattttaattcccratgctggtggtgggacctaatgggaggcatttgggccagggggacagatacctcatggcttggtgctatccttgcaatagtgagtgagtactcatgagatcttgctgtttaaggatgttgcacctcccccacaactctctctcttgcttctgctttgccatgtgatgtggaagctcccactttttaacttttgccaagagtaaaggctccctggggcctccccagaagctgaatggatgatagcaccatgcttgtacagcttgcattaa

SEQ ID NO: 893004 - DNA, 656 bp, Homo sapiens
cagttttctcactcaatgttataatagggttaaatcaaatgtcccaaactcaagttcttacaggaggcacacagatatgcatgtaagcgaatttggccagatggggacttcctcaaactagagaatgtttgtccttcctaaaagtggcccctactcctcagttcaagtcarttgttcaatgttgctagttcttccatatttttcaagagaaacatgaaatccgaatttttatctaaaagcactatattttacaatttaattaaaacattttaacactgtgaagaccaatcatgtcagtttttacttctggactagtgtgtagagactaatacaaaactggatgcaaactattaattattaggcatgtgccaagacaagagcaacatgaataattaaaaatttgtgtatgctgtagtctgaagtatttcattgataatactttttttttgaacgaggagggtagtgttatcactagaatgcttaagaactcagcatatctgcattcaaaaaaacaatgactgaattaaaacacacaagatatgttgttaaacactaaatcagctttccgtgtctgcattttacaaatgctgaaacatttgtacatcccattgtctagaacaaaactcctgctttcattttgttcatcttgcttacac

SEQ ID NO: 893005 - DNA, 627 bp, Homo sapiens
cacatggaaacctatcaataaacacattaaagatcaatgaaataaccaatccaatcaaaaggcagagattgtcagactggataataaagtaagattcaataacatactctttatagaatattcaaagataaaaacatatttaaagtaaattaaatgggaaaaatatcaataaatcacaagaaagctggaatggctgtgctaatatcasacaaaacagactttaaaacaagatatattactagatattaaaaagacattggataatgataaaagggccaatcatgaggaggatatagcaattgtaaacatatatgcacctaacagcagagtgtcaaaatacatgaagcaacatctgaagaaatgaagggagaaatagacaagttaacaataatagttgggcacttcaatactcaactttccattcattaaatcaagaaggaaactgaagacttgaacaaaaaccaaacagaactaacagacaactctagaacacaccatcccaaagcagcagaatacacattcttctaaagtacacatagctgggctcagtggcttatgcctgtaatcccaacactttgggaggctgaggtaggaggatcacttgaggccaggagttcaaaactagcc

SEQ ID NO: 893006 - DNA, 627 bp, Homo sapiens
cacatggaaacctatcaataaacacattaaagatcaatgaaataaccaatccaatcaaaaggcagagattgtcagactggataataaagtaagattcaataacatactctttatagaatattcaaagataaaaacatatttaaagtaaattaaatgggaaaaatatcaataaatcacaagaaagctggaatggctgtgctaatatcagacaaaacagactttaaaacaagatatattactagatattaaaaagacattggataatgataaaagggccaatcatgaggaggatatagcaattgtaaacatatatgcacctaacagcagagtgtcaaaatacrtgaagcaacatctgaagaaatgaagggagaaatagacaagttaacaataatagttgggcacttcaatactcaactttccattcattaaatcaagaaggaaactgaagacttgaacaaaaaccaaacagaactaacagacaactctagaacacaccatcccaaagcagcagaatacacattcttctaaagtacacatagctgggctcagtggcttatgcctgtaatcccaacactttgggaggctgaggtaggaggatcacttgaggccaggagttcaaaactagcc

SEQ ID NO: 893007 - DNA, 680 bp, Homo sapiens
tggaagcaaaaaagcaaactaaacgtaaaacaagcagaaagaaaaaaataaaaagaattatagaagaacttaatgaaatagacaataagaaaacaactgtgaaaacacaataaaatcaaaagccagttctttgaaaagatcaacactactaacaagcctgtacctagactgattaacatattaatattattatctcaacagatacacaaaatgtctttgacagaatctaacactttttataagaagcattgaacaaactaggaatagaatggaacttctaactaccaaaaaaaagcatctataaaaaacctacagccaacaacatagtgcaatttgttgcaggaygtcagagcataagaagggtaggaagggtaggtaggagagctgcccagttcgtgaagtcagaattccaaaaaagtgataaggcgtctacctgaaacaacaaggaagaggcaagtgggttgtgctttgacataaagtttctgagtatgtgcaaggtaaggaaggttaggtacactaaaggcttctctgtgtagagattcagagcctgaaaagggtgagaaggcttctgcctggaggagagggcaaacgatcggaggcagctggacctagagtgggggttgaaaatcattcatttggtgtgtggcttgacatgttggagcctgggcagccagagaagg

SEQ ID NO: 893008 - DNA, 641 bp, Homo sapiens
cctcatgccagggaaaaattagtagcatatttaagacatccaaagagagaaagaaaagtcaaggattttatagccaggcaaaatgactttcaagtaaaaaatataaagcaccttacaaactagtatcaaaatgcatttctcaagaaatactgtttccatgaactcttcctgaggaatctactacagaaagagctaaaacacagccaaaacacatcaatataaggaaataatatgagccctaaacacacaggtacttataggactatgattaaataagagttaagagagaatggtatgtaataactgtgtgtgctcacaatgtagataagaccttgtatgagcttgctggrtctgctatgacaaagtaccggagtctggatggcttaaataaaagttgtttattttctcatagttctggaggctgtaagtctaacatatgcgtgtaagcagggttttcttctgaagactctctccttggtttgaagacaacctaactaccttttcttccctgtgtcttcacatggtctttcttttgcatgtgtctgagtcctaatttcctcctctttataaggatacagttatactggattaggacccaataaccaaaatgacctcacttaatcttaattacctctttaaag

SEQ ID NO: 893009 - DNA, 623 bp, Homo sapiens
acatatgcgtgtaagcagggttttcttctgaagactctctccttggtttgaagacaacctaactaccttttcttccctgtgtcttcacatggtctttcttttgcatgtgtctgagtcctaatttcctcctctttataaggatacagttatactggattaggacccaataaccaaaatgacctcacttaatcttaattacctctttaaagaccggtctccaaaaacagtcacatttcaggctactgagggtgagaatttcaatgaattttaggggaacataattcaccttgtaacatacctcaactattttaaaaatggcaagagggagaatgaagagaacgcatgcaaaaacaaattaactgtattttcagtaattataacaattgggcattattsatattattattctgaggctgttctttatgtataatcatgggattttctaatctattatcctgtgtgtatttgacagtatcctcaatgaagaaaggagatttaacttcaagtaggtcaagttaaaacaccacactctcctgctttttctccttattcccttgctctcctctttctcctttgctgcttcctctgcatctcctcaacctacaaacagtggctttcccaag

SEQ ID NO: 893010 - DNA, 623 bp, Homo sapiens
acatatgcgtgtaagcagggttttcttctgaagactctctccttggtttgaagacaacctaactaccttttcttccctgtgtcttcacatggtctttcttttgcatgtgtctgagtcctaatttcctcctctttataaggatacagttatactggattaggacccaataaccaaaatgacctcacttaatcttaattacctctttaaagaccggtctccaaaaacagtcacatttcaggctactgagggtgagaatttcaatgaattttaggggaacataattcaccttgtaacatacctcaactattttaaaaatggcaagagggagaatgaagagaacgcatgcaaaaacaaattaactgtattttcagtaattataacaattgggcattattgatattattattctgaggctgttctttatgtataatyatgggattttctaatctattatcctgtgtgtatttgacagtatcctcaatgaagaaaggagatttaacttcaagtaggtcaagttaaaacaccacactctcctgctttttctccttattcccttgctctcctctttctcctttgctgcttcctctgcatctcctcaacctacaaacagtggctttcccaag

SEQ ID NO: 893011 - DNA, 623 bp, Homo sapiens
acatatgcgtgtaagcagggttttcttctgaagactctctccttggtttgaagacaacctaactaccttttcttccctgtgtcttcacatggtctttcttttgcatgtgtctgagtcctaatttcctcctctttataaggatacagttatactggattaggacccaataaccaaaatgacctcacttaatcttaattacctctttaaagaccggtctccaaaaacagtcacatttcaggctactgagggtgagaatttcaatgaattttaggggaacataattcaccttgtaacatacctcaactattttaaaaatggcaagagggagaatgaagagaacgcatgcaaaaacaaattaactgtattttcagtaattataacaattgggcattattgatattattattctgaggctgttctttatgtataatcatgggaytttctaatctattatcctgtgtgtatttgacagtatcctcaatgaagaaaggagatttaacttcaagtaggtcaagttaaaacaccacactctcctgctttttctccttattcccttgctctcctctttctcctttgctgcttcctctgcatctcctcaacctacaaacagtggctttcccaag

SEQ ID NO: 893012 - DNA, 623 bp, Homo sapiens
acatatgcgtgtaagcagggttttcttctgaagactctctccttggtttgaagacaacctaactaccttttcttccctgtgtcttcacatggtctttcttttgcatgtgtctgagtcctaatttcctcctctttataaggatacagttatactggattaggacccaataaccaaaatgacctcacttaatcttaattacctctttaaagaccggtctccaaaaacagtcacatttcaggctactgagggtgagaatttcaatgaattttaggggaacataattcaccttgtaacatacctcaactattttaaaaatggcaagagggagaatgaagagaacgcatgcaaaaacaaattaactgtattttcagtaattataacaattgggcattattgatattattattctgaggctgttctttatgtataatcatgggattttctaatctattatcctgtgtgtattygacagtatcctcaatgaagaaaggagatttaacttcaagtaggtcaagttaaaacaccacactctcctgctttttctccttattcccttgctctcctctttctcctttgctgcttcctctgcatctcctcaacctacaaacagtggctttcccaag

SEQ ID NO: 893013 - DNA, 613 bp, Homo sapiens
catacacactatttcaaatgagttaaaccctatactaacctttcagattttagtgtgtaagcaactatttcaggcagttttattatcatacaatataactagcattttattatcaaacaagatagcttttcttatcaatttgctataaatgtttaatttagccamcttctagtgacacttttactacattattaaacaaaaagtaccccattgaacttaacatactacaatacattcagatgtgaacagttagaagtgttttggtggctactggttcttccttagtataatatttaaagtttaatttctctgttaaaaagcaagacagaggtatttttctgacatttattctcttttctcatatccttccatcatcaagctcttttgaaaggaaatactagaaattacaaaaagtgaaaaattttgtgttattaatattattactgagaaaaagataggagaatgaagaagctttatataatggcaatgtcaaaatatgaacttctatggtacgatcaccctcactgtcacttttacatttcagtgttgatgaattatgtactagtaaactactatgcatgtaattttggctcattctctaaactgcactcca

SEQ ID NO: 893014 - DNA, 613 bp, Homo sapiens
catacacactatttcaaatgagttaaaccctatactaacctttcagattttagtgtgtaagcaactatttcaggcagttttattatcatacaatataactagcattttattatcaaacaagatagcttttcttatcaatttgctataaatgtttaatttagccaccttctagtgacacttttactacattattaaacaaaaagtaccccattgaacttaacatactayaatacattcagatgtgaacagttagaagtgttttggtggctactggttcttccttagtataatatttaaagtttaatttctctgttaaaaagcaagacagaggtatttttctgacatttattctcttttctcatatccttccatcatcaagctcttttgaaaggaaatactagaaattacaaaaagtgaaaaattttgtgttattaatattattactgagaaaaagataggagaatgaagaagctttatataatggcaatgtcaaaatatgaacttctatggtacgatcaccctcactgtcacttttacatttcagtgttgatgaattatgtactagtaaactactatgcatgtaattttggctcattctctaaactgcactcca

SEQ ID NO: 893015 - DNA, 504 bp, Homo sapiens
tgggtcagttaaacctcttttcctcataggttgcccaatatcaggtagttttttataacagtgtgaaaatggactaatacaaggtcttaggataacaaccatgcttcaggccataggtggacatctggctgcaactggatactattccccaggtggatacctaggctcaaggttgacattagtccccaggtaaacaacaagccccaggtgaatacctatrccctaagtagacatcaggcctcaggctgacactcagtctaacctcaacattaggctccaggtggacacccagactccaggtggatactagaccccaggggtacaccagactcctggtgggcataaggccccacgaggacactagaatccaggtgtatgtaaagccactggttgacaccaagccctcagatgaacaccaggccaactagtggacattaggcacatgagaatacttgggcaccaagcaggtatcaggtcccgggtaaacatcaaacttcaggtgga

SEQ ID NO: 893016 - DNA, 504 bp, Homo sapiens
tgggtcagttaaacctcttttcctcataggttgcccaatatcaggtagttttttataacagtgtgaaaatggactaatacaaggtcttaggataacaaccatgcttcaggccataggtggacatctggctgcaactggatactattccccaggtggatacctaggctcaaggttgacattagtccccaggtaaacaacaagccccaggtgaatacctatgccctaagtagacatcaggcctcaggctgacactcagtctaacctcaacattaggctccaggtggacacccagactccaggtggatactagaccccaggggtacaccagactcctggtrggcataaggccccacgaggacactagaatccaggtgtatgtaaagccactggttgacaccaagccctcagatgaacaccaggccaactagtggacattaggcacatgagaatacttgggcaccaagcaggtatcaggtcccgggtaaacatcaaacttcaggtgga

SEQ ID NO: 893017 - DNA, 555 bp, Homo sapiens
tctgcagtattcagtgtcactagtgaaatgtgtgaaatgaatgaatcgacaactgatgcttaatacctaatgagacaagtgaatgaatccttttgttcattttatggccagaaagatagtgtaattaagtaataacaactggcaaaaaagagaaactcaacctatactttgtccttttctcaagtagcatctaaaacttttyccctctgattaaaaaattatcactgaaggatctctttgaatgtgtcttgaattttatataagcagatgatcacagctcagcataatattagaagattatatgattttaaaaattggttcatagttttatagtcttggaatatctatctatctgtctgtctgtctgtctgtctgtctgtctgtctgtctatctatctaggtatctatctatctatctacctacctacctacttacctaccaatctgtcatcttcaaatatatttaggctgctttcctgaggctaattttttattccattctttcatctttttcaagatcctcgtattccctggtgtattgggtctaggtattta

SEQ ID NO: 893018 - DNA, 555 bp, Homo sapiens
tctgcagtattcagtgtcactagtgaaatgtgtgaaatgaatgaatcgacaactgatgcttaatacctaatgagacaagtgaatgaatccttttgttcattttatggccagaaagatagtgtaattaagtaataacaactggcaaaaaagagaaactcaacctatactttgtccttttctcaagtagcatctaaaactttttccytctgattaaaaaattatcactgaaggatctctttgaatgtgtcttgaattttatataagcagatgatcacagctcagcataatattagaagattatatgattttaaaaattggttcatagttttatagtcttggaatatctatctatctgtctgtctgtctgtctgtctgtctgtctgtctgtctatctatctaggtatctatctatctatctacctacctacctacttacctaccaatctgtcatcttcaaatatatttaggctgctttcctgaggctaattttttattccattctttcatctttttcaagatcctcgtattccctggtgtattgggtctaggtattta

SEQ ID NO: 893019 - DNA, 684 bp, Homo sapiens
cttaatacctaatgagacaagtgaatgaatccttttgttcattttatggccagaaagatagtgtaattaagtaataacaactggcaaaaaagagaaactcaacctatactttgtccttttctcaagtagcatctaaaactttttccctctgattaaaaaattatcactgaaggatctctttgaatgtgtcttgaattttatataagcagatgatcacagctcagcataatattagaagattatatgattttaaaaattggttcatagttttatagtcttggaatatctatctatctgtctgtctgtctgtctgtctgtctgtctgtctgtctatctatctaggtatctatctatctatctacctacctacctacttacctaccaatctgtcatcttcaaatatatttaggctgctttcctgaggctaattttttattccattctttcatctttttcaagatcctsgtattccctggtgtattgggtctaggtatttatgattaggagaagaaatgattcagtggcagctccacaggattttgaattatgagatatgaaactagaaatggcaacttaggtggattgtttgagaacactgtgtattactgcttctgtatcaacttctattctcccttgttcatacttttttaatacgcatttcaagcactatatattggtgaacat

SEQ ID NO: 893020 - DNA, 516 bp, Homo sapiens
gcatccttctactgatagtagagtctcattatccttcctcagatatatgcagtgatgaaaatagataatgagaawgcatgcatccaagtaactctttgagtgtataagggctgattaagttgaaagaagattgccaggcgaggtggctcacgcctgtaatcccagcactttgggagactgaggcaggcagatcacttgaggtcaggatttcgagaccagcctcgccaacatggtgaaaccccatctctactaaaaatataaaaaatattcgggcgtggtagcgcatgcctgtgatccaggtactcgggagactgaggcaggagaatcacttgaacccaggaggcagaggttgcaatgagctgagatgatgccactgcactccaacctgggcagaagagtgagactccattcaaaaaaattgcaaagtatctactaatctaaaaaatgcacagcctcagttctcaaagagtttatgttgtaggatcacgtcagttccatatataatttgtttatcac

SEQ ID NO: 893021 - DNA, 501 bp, Homo sapiens
agcagtatggagatatgacactggagagcataaatgagtcgagttttcaaaaaaatagaacaaaattttttgaagtcagttgcctattagcttccctcacagttcttagggagatataactgaaggcctccaaagaatttgtgtctgtccataaggtacagaataaatttatttcaaagatctcctcctcccagagttgattatttgacttagggcaaaagacygaatgtaaatagtagcgaaactgtctctgatattattgtaaggaataaaataattttgctttgtaaataaaatagaatattttctagagagaactgacccaaactcaattttaggactggtcctgaaattcagaaatgcctttcccatattgcctaactgtgcctttttcactggaaagaaagtgctgccttcagggagcacgcctccgcagagatcagtaaaatcaatgagaaatgcaatgtccatttgtcagtaaagacatctgaagtttgatgg

SEQ ID NO: 893022 - DNA, 573 bp, Homo sapiens
ccataaggtacagaataaatttatttcaaagatctcctcctcccagagttgattatttgacttagggcaaaagactgaatgtaaatagtagcgaaactgtctctgatattattgtaaggaataaaataattttgctttgtaaataaaatagaatattttctagagagaactgacccaaactcaattttaggactggtcctgaaattcagaaatgcctttcccatattgcctaactgtgcctttttcactggaargaaagtgctgccttcagggagcacgcctccgcagagatcagtaaaatcaatgagaaatgcaatgtccatttgtcagtaaagacatctgaagtttgatgggtttcttgggactggataactagttaaagattctaaagaaaaattaagtggggcatagaaaccaaaaatctcaagagatctttgaagaaagaaacatgaaaaatgaggacaaatttagagaaatgttgctggcatagatgttaacttccagaagaagatggaaatagactaccatgcaaaacaaaaagacagaagagaatattagcactctgttgcaaag

SEQ ID NO: 893023 - DNA, 501 bp, Homo sapiens
agcagtatggagatatgacactggagagcataaatgagtcgagttttcaaaaaaatagaacaaaattttttgaagtcagttgcctattagcttccctcacagttcttagggagatataactgaaggcctccaaagaatttgtgtctgtccataaggtacagaataaatttatttcaaagatctcctcctcccagagttgattatttgacttagggcaaaagactgaatgtaaatagtagcgaaactgtctctgatattattgtaaggaataaaataattttgctttgtaaataaaatagaatattttctagagagaactgacccaaactcaattttaggactggtcctgaaattcagaaatgcctttcccatattgcctaactgtgcctttttcactggaaagaaagtgctgccttcagggagcacgcctccscagagatcagtaaaatcaatgagaaatgcaatgtccatttgtcagtaaagacatctgaagtttgatgg

SEQ ID NO: 893024 - DNA, 632 bp, Homo sapiens
tgcagctgtctaagttatcagatggacctatctcagtatcgcagtgtttgtgttcaagtaacccttattttacttaataatggtctcaatatgcaatagtgttgatgctggcaattcagatatgcaaaagagaaacctgaaagtgctttcagtaactgaaaagcagaaagttttgcacttaatgaggaaaaagatatgctgagattgctaacatctagggtaagaactattcctttattggtacaattgtggaaaaggaaaaataaattcttgctagtttcgcttttgtacctcaaacttcaaaagtcacagacacagtgtgtagtaagtgctaatgtagggttcggtattatccatggtttaagacatccactggaggccttccaaagtatgccccacagataaagagggaatactgtagtctttttatgctaattccaatacctgcataatgtatttattctattgactgcatgctttaacatcattataagctcaatgatttaaacatataaggtgtgcacctgctcattgcagtcatcatcatcaycatcatcatcattattttggtttgtttgtttttgagacagatcttgctttatggcccatgctggagtgcagtggcataatca

SEQ ID NO: 893025 - DNA, 658 bp, Homo sapiens
ccagtgtgtctgtgagccagcttgtgtgtgtgtgcaaaggtgtgagtgtgtgagcatccatgtggctgtggaaattagaaagcatgtgtgtacacacgcgagtgtgacagtgaagtgctgagagttgaaacagtgtgcgtttggggtcagtgtgaccttgtctgtgtgggcacacaggtgagctgtggcgacggtggagggatgtgagtgactctgagtgtggaagctgagcccagggcagatggacaaatgcatcctttgagctcctgtagagactgccactccataccttgctcaactactccctctttgtcatcctgggctccctcaaatcargatggggtgcaggaaggggaagtgaagctggtgacctatgggaaggggactgtctgcttcctgggcctgtcagccactgatctgttccatgttcctacaaatacttacaaatcccagctgctgaggagcaagacatcctccaccagccagttggggctcctggcctggagctatggagcgagacacatgggggaggggaggggggaccgcatcagaaaggctggcatcagggactcctgagttcagctcctagttttgccaaaggttagcctgggcaccccagtatgtcttcatcaggaactgcagagccagacacaccatc

SEQ ID NO: 893026 - DNA, 640 bp, Homo sapiens
caggcacaccacaggcccttgggcatttttgtggcatcatcagccttattcctggatcaccatgtcaagctttcccaatagcagttggtggcaaactccaactcctactgtcagaaggcatcacaaggcccagatatgctgggcctcccagctcaggcaagcccagctgtcagggacacagaaacccctgacactgagccaagatcttttccccctgtcttggcttgaaattcagatatattgatgktgagccctcctggcccgcagtgggaccccccttagccttacagaggtaatgcctatatcatggcctaggtttttccaaaaagccagactctgggaagaacctggagtggaggaaaaaaccaggcagaggtaaccccatgaggggctctggcatgtgactccctgctggaaacgtgcccctaacagggcatcaaagccaggcaggcaggggctcctgctctgccagaggctggaaatcaggactgcagcttcccatcttactctggggatgcaggtcaactattttccctcagatgagagatgctgaagttccaattttataagatgagaagaagggctgaggtgatgcccattctgccactttgctgagtccagagctgtgatgaagagggag

SEQ ID NO: 893027 - DNA, 592 bp, Homo sapiens
cttgtacatgggatggaaggtgccagaagagagcagccaaattctcccacccacacacatgcatcaccagccatgatcaggtgggacctccaagatcatcctcaaatactgccttctcctagctctgtgttcccctttacttagggcatcttggagtgagatgggcagggaggggtcgagtgagtcccttcatgaacaaaccttatctttgtttcagggacaggactgggtacataatttgcaggacccggtgctaactgaaaatgtggagtctgttcaaaaattgttaagaatttgaaggcagtgacaacatagcactaaaccaagttcaggtcccctctgacagtggggcttttgccactgcacaggtggcacctctatgaagccagccttgtgcaggggtttggtttaatgaacatttacytagcgcccactgctcagctcttctggctctgtaatatggtgtggctctgtgtctgcacccaaatgtcattttgaactgtaatccccacgtgttgggggaggggccttgtgagagggcattacatcatgggagtggttcccacatgctgttctcgtgatactgagtgag

SEQ ID NO: 893028 - DNA, 623 bp, Homo sapiens
ctaaaccaagttcaggtcccctctgacagtggggcttttgccactgcacaggtggcacctctatgaagccagccttgtgcaggggtttggtttaatgaacatttacttagcgcccactgctcagctcttctggctctgtaatatggtgtggctctgtgtctgcacccaaatgtcattttgaactgtaatccccacgtgttgggggaggggccttgtgagagggcattacatcatgggagtggttcccacatgctgttctcgtgatactgagtgagttcccacgagatctgatggttttataaggggactttcccctcttctgcacttctctctcctgctgccacgtgaaggatgtgtttgcttccccttccaccatgattgtaagtttcctgaggcctccccagccatgtggaactgtgaattaaacttctttcctggagtgtgaaaatgaactaataaactctgtgacctcagagactccctctcwgtgaccctgttctcaaatgtatgaagatgggtgctcaaagatctctctctaaacatggaacagggcctgtctgaagacataagtgattaacttctaatctataactaaggtctgagtcctgaagaccttcctctgg

SEQ ID NO: 893029 - DNA, 652 bp, Homo sapiens
gcaggtgattacctttatcttgtttcctgcaaaatcatggaggtttgggaagttcctttagacccattctcgtatggaggtttgttttcttcttttttctttcctgcaaggacaaaccgaattctgtgatggtttgtgtagcatttttgagtttattgccaaaaattgaggctcgtttgtagactacattttttaataaaataaaactttctagacaaagaaatgcaggtgaaactgttcctttgacaccattttccaaatctacacagagttgatagcaaatttttctctttatctttccttaaattgtatatattcatataaatgctcttaaattcttagtgcaaccgagtggattgtcattacagagcatgtccttagcatagagcacagatcttcccactgtcaactgggctctgttcacaaagcacccagagctggccttcaayttccactcctcagttcctttgcctaccttatttctaaaatagggaaggtatttgtctttttaatatttaataaatgacatttattatcattctgcctactgaatttcacttgtctgtctggtaataacctactcccgtaagaatcaatgagttcttggtacatattggtctaaatttgcctcctctttgaacctttttccagt

SEQ ID NO: 893030 - DNA, 623 bp, Homo sapiens
cattacagagcatgtccttagcatagagcacagatcttcccactgtcaactgggctctgttcacaaagcacccagagctggccttcaacttccactcctcagttcctttgcctaccttatttctaaaatagggaaggtatttgtctttttaatatttaataaatgacatttattatcattctgcctactgaatttcacttgtctgtctggtaataacctactcccgtaagaatcaatgagttcttggtacatattrgtctaaatttgcctcctctttgaacctttttccagttttccaggcaaggttgatttatctatctatttattctatgtttccataacaatctttccaagcataatacagtaaaaaaagagctgattcatcatgtcctgtccgtttccctctggagactttggagccaatgtgagggtacaggtatgctcctgtataagctctttggtcgcctttgtcagtttaggacagttctcagtatgtaattgttctcaggtgccattaaactagacctgaataattgaaggattgaaagtgttcagaaatcacccaggatgcttcaataattcatcctaattagggatatggggatagtttgcatgagaaagaa

SEQ ID NO: 893031 - DNA, 623 bp, Homo sapiens
cattacagagcatgtccttagcatagagcacagatcttcccactgtcaactgggctctgttcacaaagcacccagagctggccttcaacttccactcctcagttcctttgcctaccttatttctaaaatagggaaggtatttgtctttttaatatttaataaatgacatttattatcattctgcctactgaatttcacttgtctgtctggtaataacctactcccgtaagaatcaatgagttcttggtacatattggtctaaatttgcctcctctttgaacctttttccagttttccaggcaaggttgatttatctatctatttattctatgtttccataacaatctttccaagcataatacagtaaaaaragagctgattcatcatgtcctgtccgtttccctctggagactttggagccaatgtgagggtacaggtatgctcctgtataagctctttggtcgcctttgtcagtttaggacagttctcagtatgtaattgttctcaggtgccattaaactagacctgaataattgaaggattgaaagtgttcagaaatcacccaggatgcttcaataattcatcctaattagggatatggggatagtttgcatgagaaagaa

SEQ ID NO: 893032 - DNA, 623 bp, Homo sapiens
cattacagagcatgtccttagcatagagcacagatcttcccactgtcaactgggctctgttcacaaagcacccagagctggccttcaacttccactcctcagttcctttgcctaccttatttctaaaatagggaaggtatttgtctttttaatatttaataaatgacatttattatcattctgcctactgaatttcacttgtctgtctggtaataacctactcccgtaagaatcaatgagttcttggtacatattggtctaaatttgcctcctctttgaacctttttccagttttccaggcaaggttgatttatctatctatttattctatgtttccataacaatctttccaagcataatacagtaaaaaaagagctgattcatcatgtcctgtccgtttccctctggagactttggagccaatgtgagggtacaggtatgctcctgtakaagctctttggtcgcctttgtcagtttaggacagttctcagtatgtaattgttctcaggtgccattaaactagacctgaataattgaaggattgaaagtgttcagaaatcacccaggatgcttcaataattcatcctaattagggatatggggatagtttgcatgagaaagaa

SEQ ID NO: 893033 - DNA, 616 bp, Homo sapiens
aaagccatggagaaactggaggcaattctgttaattatttgccctctagaggcaattgggttaattaccctcccttccctatccatgacacaatttctccagttacatgtagaatgctgttatgtgtctcctgaccagaccccttatttcatagatgtggaaactgaggccatgaaggatgaggtgactgttcacaatccacatggctagttagtgtccagagcctggcctggacktctctcttgttctggggccttgagttctctccctcttctttagtacatatggccacaggtaacgtaatctgcgtaccacatttgcatttggagtgcatctgttttgcattcatttaatcttgttgagatggtttgcttgttgacctactcagtcagttatcttttcacctttgtgagttgagagctttgtgtattaaatctgtaaaactttgcatcgtggaaagtgacataatctgtagcagacccatgctgtttttagatgcatcttcattgtggtagtgacagtgattgagaaactttacatgtttttctgtgctatttcagaatatgccttctgaattcagctagaggtggagtcaaaaacaacagaatactatatt

SEQ ID NO: 893034 - DNA, 639 bp, Homo sapiens
tttgtgaccactctgttattcctctctctctggcagtcatttcccagaattgacaaggaattcatcctgagatgatttctgctaagtaaatcctagcacttcttgacactttagaaaaggctttggaataattttatattagcatttttcacctgcatatttttacatgtaaatataagctgtgaatgcattactttgaaagagagccaggataaaatttaaagaaacatggktttagaagtccaatggtagtataagatttcacaaagaaacagactgctcttcattcagtacttcctatttactccccagacacagccaacttcaacattttttacttaaaaaatgtatttttatatttcaaaataacatgtttatgtgacctgtctctcacccatcctgccctactctggctttacccccttcagaatatttaaaatttcttgagtatccttagcatataccattccaatcatgaatcttggggtaggcttattttttttttaatttgtgcatttaataaacccctagtggtacatgtctgtttttcttgttaattcttggaaatgtctttctattgtttctacaataattttcttcccctctagcttccctttttcttctggatctcgttaggta

SEQ ID NO: 893035 - DNA, 639 bp, Homo sapiens
tttgtgaccactctgttattcctctctctctggcagtcatttcccagaattgacaaggaattcatcctgagatgatttctgctaagtaaatcctagcacttcttgacactttagaaaaggctttggaataattttatattagcatttttcacctgcatatttttacatgtaaatataagctgtgaatgcattactttgaaagagagccaggataaaatttaaagaaacatggtyttagaagtccaatggtagtataagatttcacaaagaaacagactgctcttcattcagtacttcctatttactccccagacacagccaacttcaacattttttacttaaaaaatgtatttttatatttcaaaataacatgtttatgtgacctgtctctcacccatcctgccctactctggctttacccccttcagaatatttaaaatttcttgagtatccttagcatataccattccaatcatgaatcttggggtaggcttattttttttttaatttgtgcatttaataaacccctagtggtacatgtctgtttttcttgttaattcttggaaatgtctttctattgtttctacaataattttcttcccctctagcttccctttttcttctggatctcgttaggta

SEQ ID NO: 893036 - DNA, 639 bp, Homo sapiens
tttgtgaccactctgttattcctctctctctggcagtcatttcccagaattgacaaggaattcatcctgagatgatttctgctaagtaaatcctagcacttcttgacactttagaaaaggctttggaataattttatattagcatttttcacctgcatatttttacatgtaaatataagctgtgaatgcattactttgaaagagagccaggataaaatttaaagaaacatggttttagaagtccaatggtagtataagatttcacaaagaaacagactgctcttcattcagtacttcctatttactccccagacacagccaacttcaacattttttacttaaaaaatgtatttttatatttcaaaataacatgtttatgtgacctgtctctcacccatcctgmcctactctggctttacccccttcagaatatttaaaatttcttgagtatccttagcatataccattccaatcatgaatcttggggtaggcttattttttttttaatttgtgcatttaataaacccctagtggtacatgtctgtttttcttgttaattcttggaaatgtctttctattgtttctacaataattttcttcccctctagcttccctttttcttctggatctcgttaggta

SEQ ID NO: 893037 - DNA, 572 bp, Homo sapiens
tattgattttctttttttgtgtatatatctagcaatgagattgctggatcatatgatagctctaattttagttttttgaggaacctccaaattgttctccatagtggttgcactaatttacattcccaccaacagtatgcaagggttggctttttttccatatcctcaccagcatttgttatcacctgtcttttgaaaaaamagccattttaactgaggtgagatgatatctcttcatagttctgatttgcatttctctgataatcagtgatgttggccaccttttcctaagtctgttagtcttttgtatttctttttttgagaaatatctattaagatctcttgcccattttcaaatcagattattagatttttctctatacagttgtttgagctttttatatattctggttattaatcccttgtcaaatggatagtttgcaaatacgtttccccattttttggattttctctttgttgactgtctcttttgctatgcagaagctttttaacttagtgcaatcccaattgtccacttttgctttggttgtctgtgcttgtggggtattgct

SEQ ID NO: 893038 - DNA, 572 bp, Homo sapiens
tattgattttctttttttgtgtatatatctagcaatgagattgctggatcatatgatagctctaattttagttttttgaggaacctccaaattgttctccatagtggttgcactaatttacattcccaccaacagtatgcaagggttggctttttttccatatcctcaccagcatttgttatcacctgtcttttgaaaaaacagccattttaactgaggtgagatgatatctcttcatagttctgatttgcatttctctgataatcagtgatgttggccaccttttcctaagtctgttagtcttttgtatttctttttttgagaaatatctattaagatctcttgcccattttcaaatcagattattagatttttctctatacagttgtttgagctttttatatattctggttattaatcccttgtcaaatggatagtttgcaaatacgtttccccattttttgsattttctctttgttgactgtctcttttgctatgcagaagctttttaacttagtgcaatcccaattgtccacttttgctttggttgtctgtgcttgtggggtattgct

SEQ ID NO: 893039 - DNA, 634 bp, Homo sapiens
acaaagaaaatcctggaagcaatagcttcactgctgtattttaccaaacacatacagaataactaacaccaatcctactcaaactatcccaaagaatagaggagggaggaatatttcaatgcctgatacttaaaccaaagacaaattaaaagagaaaactacaggccaatatccctatgaaaaattgatgcaaaaatcctcaaggaaatttacaaacaaaacaaatccacaacatattgaaaattattcataatgactaagtggaatttatgccaggaatggaaggatggttcaaaatatgcaaatcaatgtgatcatcatatcaacagaatgaaggacaaaatttatataataatgtcaattgatgcggtaaagcatttgataaaattcaacattttattgtraaaacccttcaaaaaacagggtatagaagaaacatacctcaacacagtaaaagccatataagacactcccacaagtatagtatcttactgaatggcagaaaaactgaaagcctctcctctaagctctggaacaagagatgctcattttcaccactctgcctcctgagttcaagcaattctcctgcccaagcctccctagtagctaggactataggtgcatgccaccacac

SEQ ID NO: 893040 - DNA, 634 bp, Homo sapiens
acaaagaaaatcctggaagcaatagcttcactgctgtattttaccaaacacatacagaataactaacaccaatcctactcaaactatcccaaagaatagaggagggaggaatatttcaatgcctgatacttaaaccaaagacaaattaaaagagaaaactacaggccaatatccctatgaaaaattgatgcaaaaatcctcaaggaaatttacaaacaaaacaaatccacaacatattgaaaattattcataatgactaagtggaatttatgccaggaatggaaggatggttcaaaatatgcaaatcaatgtgatcatcatatcaacagaatgaaggacaaaatttatataataatgtcaattgatgcggtaaagcatttgataaaattcaacattttattgtaaaaacccttcaaaaaacagggtatagaagaaacatacctcaacacartaaaagccatataagacactcccacaagtatagtatcttactgaatggcagaaaaactgaaagcctctcctctaagctctggaacaagagatgctcattttcaccactctgcctcctgagttcaagcaattctcctgcccaagcctccctagtagctaggactataggtgcatgccaccacac

SEQ ID NO: 893041 - DNA, 511 bp, Homo sapiens
tatgctcctaactatcatgttatactcattcatataaacctaacaattaatttgaagttagacacacaggatttactcatcagtattagagcattcgctgttatccaggaagaaaactatccctggtgctgaaactgctctgtgtagtccwtgcggttgaagaattaaaagtctcttttagacatttcctttcattgaaattatgaattggataagtgttcataccttaaaggaagtattaaatttcacatatgttaacatcttaattaatataagattaatattctacttatgactatgttataatattgaaaaatgagtttatgatgagtttcattagtttctagagaaaacagtggtttaaaaaatttcagtcataagacattgaagagtctatgactgttccagaaatctgaaaacatataccactaatcaaaagtttctccattcatgttgactagcatttgccttaggtgtcagaattaatggatttgtgttaaaaataaacacc

SEQ ID NO: 893042 - DNA, 500 bp, Homo sapiens
taattaatataagattaatattctacttatgactatgttwtaatattgaaaaatgagtttatgatgagtttcattagtttctagagaaaacagtggtttaaaaaatttcagtcataagacattgaagagtctatgactgttccagaaatctgaaaacatataccactaatcaaaagtttctccattcatgttgactagcatttgccttaggtgtcagaattaatggatttgtgttaaaaataaacacctgaaatctaattccctaactacattataacacacttgatttcaagttcttagcttttatttaatgcttctaatgactttaaattgtagcaaaatgggcttcccccaagagcactgctttgttgatcctgagttggggtcctaagccagaagttaactatgctttcatatattcttgcaagtagaagtacagtgttggtgtaaattccccttagatggatagctaagcccagaggaaataatggtaattggaa

SEQ ID NO: 893043 - DNA, 556 bp, Homo sapiens
ctgctctctcttaaccagtcctactgatactacttcctaagtatttttcagccctgtccttcctctccatcatgatggattcacttccagttgaaatccttatggtaccctccctggattatggcagtaatcagagagctggtctccttaactcaggattcacttcttctcatctgttgttcacagtgacatcagaaagatattttaaaatgatgaactagaattaattatataaaacacacatacacacataaataatacttaaatttttcaatgatgttccaattatgtaaaatataatataggaggcactttatgttctggcctcaatctttcaattcaaacttatctcctgccactatctcctttgaacattgtattccagctactttagaataataataatayataatattcatagagcccttcctgggttcctatcaccgtacaaaatacttcacatataacatttaatctttgacaactttattaggcatgcacaattattatctatctatatatctatatctatatatataaaatctatattttatag

SEQ ID NO: 893044 - DNA, 654 bp, Homo sapiens
ccagtgtgtctgtgagccagcttgtgtgtgtgtgcaaaggtgtgagtgtgtgagcatccatgtggctgtggaaattagaaagcatgtgtgtacacacgcgagtgtgacagtgaagtgctgagagttgaaacagtgtgcgtttggggtcagtgtgaccttgtctgtgtgggcacacaggtgagctgtggcgacggtggagggatgtgagtgactctgagtgtggaagctgagcccagggcagatggacaaatgcatcctttgagctcctgtagagactgccactccataccttgctcaactactccctctttgtcatcctgggctccctcaaatcargatggggtgcaggaaggggaagtgaagctggtgacctatgggaaggggactgtctgcttcctgggcctgtcagccactgatctgttccatgttcctacaaatacttacaaatcccagctgctgaggagcaagacatcctccaccagccagttggggctcctggcctggagctatggagcgagacacatgggggaggggaggggggaccgcatcagaaaggctggcatcagggactcctgagttcagctcctagttttgccaaaggttagcctgggcaccccagtatgtcttcatcaggaactgcagagccagacacac

SEQ ID NO: 893045 - DNA, 636 bp, Homo sapiens
caggcacaccacaggcccttgggcatttttgtggcatcatcagccttattcctggatcaccatgtcaagctttcccaatagcagttggtggcaaactccaactcctactgtcagaaggcatcacaaggcccagatatgctgggcctcccagctcaggcaagcccagctgtcagggacacagaaacccctgacactgagccaagatcttttccccctgtcttggcttgaaattcagatatattgatgktgagccctcctggcccgcagtgggaccccccttagccttacagaggtaatgcctatatcatggcctaggtttttccaaaaagccagactctgggaagaacctggagtggaggaaaaaaccaggcagaggtaaccccatgaggggctctggcatgtgactccctgctggaaacgtgcccctaacagggcatcaaagccaggcaggcaggggctcctgctctgccagaggctggaaatcaggactgcagcttcccatcttactctggggatgcaggtcaactattttccctcagatgagagatgctgaagttccaattttataagatgagaagaagggctgaggtgatgcccattctgccactttgctgagtccagagctgtgatgaagag

SEQ ID NO: 893046 - DNA, 588 bp, Homo sapiens
cttgtacatgggatggaaggtgccagaagagagcagccaaattctcccacccacacacatgcatcaccagccatgatcaggtgggacctccaagatcatcctcaaatactgccttctcctagctctgtgttcccctttacttagggcatcttggagtgagatgggcagggaggggtcgagtgagtcccttcatgaacaaaccttatctttgtttcagggacaggactgggtacataatttgcaggacccggtgctaactgaaaatgtggagtctgttcaaaaattgttaagaatttgaaggcagtgacaacatagcactaaaccaagttcaggtcccctctgacagtggggcttttgccactgcacaggtggcacctctatgaagccagccttgtgcaggggtttggtttaatgaacatttacytagcgcccactgctcagctcttctggctctgtaatatggtgtggctctgtgtctgcacccaaatgtcattttgaactgtaatccccacgtgttgggggaggggccttgtgagagggcattacatcatgggagtggttcccacatgctgttctcgtgatactgag

SEQ ID NO: 893047 - DNA, 656 bp, Homo sapiens
tgctgcaggtgattacctttatcttgtttcctgcaaaatcatggaggtttgggaagttcctttagacccattctcgtatggaggtttgttttcttcttttttctttcctgcaaggacaaaccgaattctgtgatggtttgtgtagcatttttgagtttattgccaaaaattgaggctcgtttgtagactacattttttaataaaataaaactttctagacaaagaaatgcaggtgaaactgttcctttgacaccattttccaaatctacacagagttgatagcaaatttttctctttatctttccttaaattgtatatattcatataaatgctcttaaattcttagtgcaaccgagtggattgtcattacagagcatgtccttagcatagagcacagatcttcccactgtcaactgggctctgttcacaaagcacccagagctggccttcaayttccactcctcagttcctttgcctaccttatttctaaaatagggaaggtatttgtctttttaatatttaataaatgacatttattatcattctgcctactgaatttcacttgtctgtctggtaataacctactcccgtaagaatcaatgagttcttggtacatattggtctaaatttgcctcctctttgaacctttttccagt

SEQ ID NO: 893048 - DNA, 627 bp, Homo sapiens
ttgtcattacagagcatgtccttagcatagagcacagatcttcccactgtcaactgggctctgttcacaaagcacccagagctggccttcaacttccactcctcagttcctttgcctaccttatttctaaaatagggaaggtatttgtctttttaatatttaataaatgacatttattatcattctgcctactgaatttcacttgtctgtctggtaataacctactcccgtaagaatcaatgagttcttggtacatattrgtctaaatttgcctcctctttgaacctttttccagttttccaggcaaggttgatttatctatctatttattctatgtttccataacaatctttccaagcataatacagtaaaaaaagagctgattcatcatgtcctgtccgtttccctctggagactttggagccaatgtgagggtacaggtatgctcctgtataagctctttggtcgcctttgtcagtttaggacagttctcagtatgtaattgttctcaggtgccattaaactagacctgaataattgaaggattgaaagtgttcagaaatcacccaggatgcttcaataattcatcctaattagggatatggggatagtttgcatgagaaagaa

SEQ ID NO: 893049 - DNA, 627 bp, Homo sapiens
ttgtcattacagagcatgtccttagcatagagcacagatcttcccactgtcaactgggctctgttcacaaagcacccagagctggccttcaacttccactcctcagttcctttgcctaccttatttctaaaatagggaaggtatttgtctttttaatatttaataaatgacatttattatcattctgcctactgaatttcacttgtctgtctggtaataacctactcccgtaagaatcaatgagttcttggtacatattggtctaaatttgcctcctctttgaacctttttccagttttccaggcaaggttgatttatctatctatttattctatgtttccataacaatctttccaagcataatacagtaaaaaragagctgattcatcatgtcctgtccgtttccctctggagactttggagccaatgtgagggtacaggtatgctcctgtataagctctttggtcgcctttgtcagtttaggacagttctcagtatgtaattgttctcaggtgccattaaactagacctgaataattgaaggattgaaagtgttcagaaatcacccaggatgcttcaataattcatcctaattagggatatggggatagtttgcatgagaaagaa

SEQ ID NO: 893050 - DNA, 627 bp, Homo sapiens
ttgtcattacagagcatgtccttagcatagagcacagatcttcccactgtcaactgggctctgttcacaaagcacccagagctggccttcaacttccactcctcagttcctttgcctaccttatttctaaaatagggaaggtatttgtctttttaatatttaataaatgacatttattatcattctgcctactgaatttcacttgtctgtctggtaataacctactcccgtaagaatcaatgagttcttggtacatattggtctaaatttgcctcctctttgaacctttttccagttttccaggcaaggttgatttatctatctatttattctatgtttccataacaatctttccaagcataatacagtaaaaaaagagctgattcatcatgtcctgtccgtttccctctggagactttggagccaatgtgagggtacaggtatgctcctgtakaagctctttggtcgcctttgtcagtttaggacagttctcagtatgtaattgttctcaggtgccattaaactagacctgaataattgaaggattgaaagtgttcagaaatcacccaggatgcttcaataattcatcctaattagggatatggggatagtttgcatgagaaagaa

SEQ ID NO: 893051 - DNA, 620 bp, Homo sapiens
ttagaaagccatggagaaactggaggcaattctgttaattatttgccctctagaggcaattgggttaattaccctcccttccctatccatgacacaatttctccagttacatgtagaatgctgttatgtgtctcctgaccagaccccttatttcatagatgtggaaactgaggccatgaaggatgaggtgactgttcacaatccacatggctagttagtgtccagagcctggcctggacktctctcttgttctggggccttgagttctctccctcttctttagtacatatggccacaggtaacgtaatctgcgtaccacatttgcatttggagtgcatctgttttgcattcatttaatcttgttgagatggtttgcttgttgacctactcagtcagttatcttttcacctttgtgagttgagagctttgtgtattaaatctgtaaaactttgcatcgtggaaagtgacataatctgtagcagacccatgctgtttttagatgcatcttcattgtggtagtgacagtgattgagaaactttacatgtttttctgtgctatttcagaatatgccttctgaattcagctagaggtggagtcaaaaacaacagaatactatatt

SEQ ID NO: 893052 - DNA, 635 bp, Homo sapiens
tttgtgaccactctgttattcctctctctctggcagtcatttcccagaattgacaaggaattcatcctgagatgatttctgctaagtaaatcctagcacttcttgacactttagaaaaggctttggaataattttatattagcatttttcacctgcatatttttacatgtaaatataagctgtgaatgcattactttgaaagagagccaggataaaatttaaagaaacatggktttagaagtccaatggtagtataagatttcacaaagaaacagactgctcttcattcagtacttcctatttactccccagacacagccaacttcaacattttttacttaaaaaatgtatttttatatttcaaaataacatgtttatgtgacctgtctctcacccatcctgccctactctggctttacccccttcagaatatttaaaatttcttgagtatccttagcatataccattccaatcatgaatcttggggtaggcttattttttttttaatttgtgcatttaataaacccctagtggtacatgtctgtttttcttgttaattcttggaaatgtctttctattgtttctacaataattttcttcccctctagcttccctttttcttctggatctcgtta

SEQ ID NO: 893053 - DNA, 635 bp, Homo sapiens
tttgtgaccactctgttattcctctctctctggcagtcatttcccagaattgacaaggaattcatcctgagatgatttctgctaagtaaatcctagcacttcttgacactttagaaaaggctttggaataattttatattagcatttttcacctgcatatttttacatgtaaatataagctgtgaatgcattactttgaaagagagccaggataaaatttaaagaaacatggtyttagaagtccaatggtagtataagatttcacaaagaaacagactgctcttcattcagtacttcctatttactccccagacacagccaacttcaacattttttacttaaaaaatgtatttttatatttcaaaataacatgtttatgtgacctgtctctcacccatcctgccctactctggctttacccccttcagaatatttaaaatttcttgagtatccttagcatataccattccaatcatgaatcttggggtaggcttattttttttttaatttgtgcatttaataaacccctagtggtacatgtctgtttttcttgttaattcttggaaatgtctttctattgtttctacaataattttcttcccctctagcttccctttttcttctggatctcgtta

SEQ ID NO: 893054 - DNA, 658 bp, Homo sapiens
ctaaacatacatttcaccatgttggccaggatggtctcgatgtctttacctcgtgatccgcccatctcagccacccaaagtgctaggattacaggcgttagccaccgctcccagccttggcttcttaattttgttttataagctttcttcaaaggcctggtcatcatttgctgtgtgtttatatatttttattttttcagtgggcaaaatacatgtaacataaaatgtatcacattaackattttaagtgtacagttcagttgctttaactatattcataatgttttgtaatgattcccaccattcctctctagaactttttcatgtgaagctctgtacctgtaaaacagtaattcctaactcctgtcatcttccagtccctattaaccaccattctactttctgcctctatgactttgcctatcttaggtacctcatataagtggaatcatacagtatttgtctttttgtgtttggcttatttccattagcataatgtattcaaggtttcattgttcatccacattgtgaaatgtgtcagaatctccttcctttaaaaaggaataatattccaataatattccattgcgtgcatatatcacatttgtttatccattcatccaccagtgggcatgatgttgcttccaccttctggcta

SEQ ID NO: 893055 - DNA, 658 bp, Homo sapiens
ctaaacatacatttcaccatgttggccaggatggtctcgatgtctttacctcgtgatccgcccatctcagccacccaaagtgctaggattacaggcgttagccaccgctcccagccttggcttcttaattttgttttataagctttcttcaaaggcctggtcatcatttgctgtgtgtttatatatttttattttttcagtgggcaaaatacatgtaacataaaatgtatcacattaactattttaagtgtacarttcagttgctttaactatattcataatgttttgtaatgattcccaccattcctctctagaactttttcatgtgaagctctgtacctgtaaaacagtaattcctaactcctgtcatcttccagtccctattaaccaccattctactttctgcctctatgactttgcctatcttaggtacctcatataagtggaatcatacagtatttgtctttttgtgtttggcttatttccattagcataatgtattcaaggtttcattgttcatccacattgtgaaatgtgtcagaatctccttcctttaaaaaggaataatattccaataatattccattgcgtgcatatatcacatttgtttatccattcatccaccagtgggcatgatgttgcttccaccttctggcta

SEQ ID NO: 893056 - DNA, 638 bp, Homo sapiens
ttgttatcacctgtcttttgaaaaaacagccattttaactgaggtgagatgatatctcttcatagttctgatttgcatttctctgataatcagtgatgttggccaccttttcctaagtctgttagtcttttgtatttctttttttgagaaatatctattaagatctcttgcccattttcaaatcagattattagatttttctctatacagttgtttgagctttttatatattctggttattaatcccttgtcaaatggatagtttgcaaatacgtttccccattttttgsattttctctttgttgactgtctcttttgctatgcagaagctttttaacttagtgcaatcccaattgtccacttttgctttggttgtctgtgcttgtggggtattgcttaagaaatctttccatagtctaatagcctggagaatttccccaatgtcttcttgtagtagtttaacctaccaagattaaaccatgaagaaattcaaaacctgaaccgaccaataacaaataatgaaatcaaagccttaataaaaactaccaacaaagaaaatcctggaagcaatagcttcactgctgtattttaccaaacacatacagaataactaacaccaatcctactcaaactatccc

SEQ ID NO: 893057 - DNA, 600 bp, Homo sapiens
agtaccggtggcatgtgtattagtggagatgcagcctgtgctctgcagacagggagtcacacagacacttttctataatttcttaagtgctttgaatgttcaagtagaaagtctaacattaaatttgattgaacaattgtatattcatggaatattttggaacggaataccaaaaaatggcaatagtggttctttctggatggaagacaaacttttcttgtttaaaataaattttattttatatatttgaggttgaccacatgaccttaaggatacatatagacagtaaactggttactacagtgaagcaaattaacatatctaccatcktacatagttacatttttttgtgtgacaggaacagctaaaatctacgtatttaacaaaaatcctaaagacaatacatttttattaactatagccctcatgatgtacattagatctctaacttgatcatcctatatgtctgctttgtattttcttaatgtacgtctccccatttgctattggtcatttcctatttggctcatttttcaactgggttgttttcctgttattaaaagagttctttactgatttttggacattaactctttatca

SEQ ID NO: 893058 - DNA, 654 bp, Homo sapiens
ttgctgaggttgcagagaaaagggaaatcttatacacttccgttgggaatgtaaattaattcagccattgtataaagcagtgtgaagatttctcaaaaaacttaaacagaactaccatttggcgcagcagtctcattactgggcacatacacaaagaaatatgaattgttctaycaaatgacacatgtacttgtatgattatcacagcactattaacagtagcaaaaacatggaaccaacctagaggctcatcagtggtggactagaaaaaaaaaatgtgtaccgcctgacgtggttgctcacgcctgtattcccagcactttgggtggccgagatgggcggatcatttgatattaggagtttgagaaaagcctggccaacatggtgaaacaccatctctactaaaaatacaaaaattagccaggcatggtggtacatgcctgtagacccagctacttgggaaactgaggtggcagaatagcttgaacctgggaggcgaaggttgcagtgggcccagattatgccacagcactccagcctgggtgtcagagtgagactctatctcaaaaagaaaaaaaattggtacatatacaccatgaaatactgtgtagcaacaaaaaaacaataaatttatggcttttgcaacaaaatgga

SEQ ID NO: 893059 - DNA, 654 bp, Homo sapiens
ttgctgaggttgcagagaaaagggaaatcttatacacttccgttgggaatgtaaattaattcagccattgtataaagcagtgtgaagatttctcaaaaaacttaaacagaactaccatttggcgcagcagtctcattactgggcacatacacaaagaaatatgaattgttctaccaaatgacacatgtacttgtatgattatcacagcactattaacagtagcaaaaacatggaaccaacctagaggctcatcagtggtggactagaaaaaaaaaatgtgtaccgcctgacgtggttgctcacgcctgtattcccagcactttgggwggccgagatgggcggatcatttgatattaggagtttgagaaaagcctggccaacatggtgaaacaccatctctactaaaaatacaaaaattagccaggcatggtggtacatgcctgtagacccagctacttgggaaactgaggtggcagaatagcttgaacctgggaggcgaaggttgcagtgggcccagattatgccacagcactccagcctgggtgtcagagtgagactctatctcaaaaagaaaaaaaattggtacatatacaccatgaaatactgtgtagcaacaaaaaaacaataaatttatggcttttgcaacaaaatgga

SEQ ID NO: 893060 - DNA, 480 bp, Homo sapiens
gtaatcctggctactcaggagcctgaggcaggagaatcaattgaaccagggaggcagaggttgcagagagccaagattatgccactgcactctagcctgggtgagagagcaaggcttcatctcaaaaagaaaaaaaaaaaaattgagaacccagataaaaatagctaactttcttctccaaaagaaaaaagaatgacagtgagtagaggtctgcttctattggctatcagataatcttataaccctgcagtactgtggtggtacgaagcacatccacagcagtagtgtgaccrtcaggtatcaaatagacaagaacttcagagaagacaaatgtaacatttgaaatcagtagaaagaagtattactttgagaaagttggttattatttggaatttgaagaaataaacaataaatttcaaataacttaaagaatgaaataaaaaataaaattaatactacaaggaagtttttaaaatattc

SEQ ID NO: 893061 - DNA, 753 bp, Homo sapiens
aaaaatacatatgcacttcataaattcatatgtcacttcagcatttttacagttaatatcacttttgttattcttaaaaagttgaaaaattaaatgagttaaaagcagtatgagagaaattattgcaaatatgtgtataatattgttaggagaaacccaagtaagaccccagaggtgtaagtttaaattgaagactaatcagtttatatatataataatttaaaaatattctgtgcattataaaactcacaaaagaattaaaaggcaaaaaaatcaagaaaaaataatttcaaaataaatgccacaacacagcttcctgtggtcaagatttctctccattctactttgacgtctaaatagatctttgggcatctagactaatattgggtttgtatactcccagaaaattcaagactactaaacgcacccaaccttacaaccccgaagcatattatcacataggggtcttgtgtagtttgctaaagtgtaatgtactacctgtcacagaatgagcacttaactgatgttgggtgtgatgtagcatagtagcaaaaaactttagaattaggccacartgtttttaagggctttgcacgacccattattttttggcacttaatttaaaaaaatctgcatgcttattttaattttgtcattacttgccattgtatccatctcagcacactgatcaaataatcacaaaaatcacagagatgatactctgctaattaagaaagttttctttttttcttt

SEQ ID NO: 893062 - DNA, 556 bp, Homo sapiens
cctgtcacagaatgagcacttaactgatgttgggtgtgatgtagcatagtagcaaaaaactttagaattaggccacagtgtttttaagggctttgcacgacccattattttttggcacttaatttaaaaaaatctgcatgcttattttaattttgtcattacttgccattgtatccatctcagcacactgatcaaataatcasaaaaatcacagagatgatactctgctaattaagaaagttttctttttttctttgtgaaaccattcttcattttttttttttttggtatttagaaataatttctagtgctaatttatttttagtgacattttgcacagactctccaaataaaaaaccaagaacgaccaattttattgggaaaatactaaatgtaacaaactttattttttgatgagtgaagactatttttctaattttgcttaaaaattttaggtttagccttaggtaataaagttaatagagagaatgtttactaccatgcataaattcaaaagacttgttagtttagattgtcaatttaatgttgaacaaag

SEQ ID NO: 893063 - DNA, 616 bp, Homo sapiens
aaattttcagatgaaataactttaggtaagcttaagaaaagtttgattgcattttgtttataatcttgtacttctattttcattctgatttagtaggctgcacactttttaaaaaaaaatttcaggtggattgtggccattccttttcctcttaagtcttatttgattgttcttccagaacaaatattaacatttgcagtcctgcatctggatcaagcagtttggttagagaaatttaaacctttaaatcacaaaacagcttattttcaattgtcatagctgacactgaatctatgactaatggtgtaagcaatgtggatattggaatgtctctgagtttttatattaataaatttactagctaaataagtgatgtaatcatctgtygatgtctgagatgaagagtgagtaaaaaccacataaaagtcttccataaaactaaacttatcttggaattctttgtaaaaataatttctgtgagatggaactttggaaagttttcctgtaatttcttgaaatcaaatttaacagtgcatggtagtctgaccattctgcattctcctttctgtataaaaaacatcactatttcaaggccagagagccccctttacatggc

SEQ ID NO: 893064 - DNA, 600 bp, Homo sapiens
gctactttggggcttaacactttctccaattaagaagagatgttgagagcttctaggaacccatcatccaagactgcggcactaaaaaaacacacctgagattttgctctacgaagttattttctattaaattcactgcctttttcacatcagagtgaataatgacaaaacattgtagcttggtcgttttgcactcttcattctgattttgcagcaacttgcattcctttcaactgctcataagttaaatttctcaatgaagtaatcacaacagaactatctccttgaacagtttkgagtttcctgaaaaaaaacagatatactaccatatgatccaaaaatcccactgcttggtatatacccaaaagaaaggaaatgagtatatcaaagagatttctgcactcctaggtttgctgcagcactgtttacaattactaatatttgaaagcaacctaagtgtccatcaacagatgaatgaagaaaatgtggtacatatacacagtggagtactattcagccataaaaatgaaagcctgtcatttgcaacaacatggatggaactgaagatgattatgtcaagaaaaataagccaggcacaga

SEQ ID NO: 893065 - DNA, 571 bp, Homo sapiens
tggcccacatagagagatgtctggcatttggtagtacctgggtgagagctttccaagctcttaggaagtatacaatgcataaggtccatttctaaatactagaaacatcttgctgtgaaagcacataaagtccatagttaagatgatgatgccatgcagaaaaacacgtggcaatgtaaccaccagtctttactttttcaatggccttgcacatggctgttactgtactgctgaagtccagcgtcagcagtttatgtttccccattgtgtcatcagcccaatgcaaagtaccatcaaaataacacctggaggtgctracaggaaaataatctgagtaaatccacatttgctgtctcaacttccaaagactggtcatcaaacagtgtgtttctgtctttctatcttggctgccacctttactacactgtaggggtctgaggtttgtagagtggatatcgcagagttctggttgtccttgtgaggtttgatatgataaactttttaaaagaaagtaggcctgattacagaaatgagtattgtcccgacaatccacatagaattctggggcatt

SEQ ID NO: 893066 - DNA, 571 bp, Homo sapiens
tggcccacatagagagatgtctggcatttggtagtacctgggtgagagctttccaagctcttaggaagtatacaatgcataaggtccatttctaaatactagaaacatcttgctgtgaaagcacataaagtccatagttaagatgatgatgccatgcagaaaaacacgtggcaatgtaaccaccagtctttactttttcaatggccttgcacatggctgttactgtactgctgaagtccagcgtcagcagtttatgtttccccattgtgtcatcagcccaatgcaaagtaccatcaaaataacacctggaggtgctgacaggaaaataatctgagtaaatccacatttgctgtctcaacttccaaagactggtcatcaaacagtgtgtttctgtctttctatcttggctgccacctttactacactgtaggggtctgaggtttgtagagtggatatcgcagagttctggttgtccttgtgaggtttgatrtgataaactttttaaaagaaagtaggcctgattacagaaatgagtattgtcccgacaatccacatagaattctggggcatt

SEQ ID NO: 893067 - DNA, 622 bp, Homo sapiens
aaaaaaaaaagaatgttaattagtatacatactacagaaaccagtgggaggttcctccaaaaattaaacctacaactaccacttcatctaacaattctactactaagtatactttcagtgccaaagaaatcagtttatgcaagaggtatcagccatcctatgtggactgcagcactattcacaatcgccaagataaggaataaacttacctgcccatccacagatgaagggataaagtaactgtggtggacatacacaaagagaatagtcttcagccagaaaatcagaatgaaatttcatcatttggagccatactgttgaacctggaggacagcatggtaaatgacctgaaccaggtagagaaagaaaaacattgccacatctcactcatgtagaacccaaaataaaaggctttattgcaatagatctagagagcacaacagtggtttccagagattggaaggaagcagrggcatgggcagggatcagaaataggtacaaaattacacttagatgagagcaatgaattgttcctctctgttctacagcactgtgaccagaggttaacaaaacatcacagctttttcacaaaatctggaaaagaagattccaaatgttttca

SEQ ID NO: 893068 - DNA, 580 bp, Homo sapiens
atctcactcatgtagaacccaaaataaaaggctttattgcaatagatctagagagcacaacagtggtttccagagattggaaggaagcagaggcatgggcagggatcagaaataggtacaaaattacacttagatgagagcaatgaattgttcctctctgttcyacagcactgtgaccagaggttaacaaaacatcacagctttttcacaaaatctggaaaagaagattccaaatgttttcaccacaaataaattaacaactgtttgtgataacagagactctaaatatcctgattttaacattcctctgtgtctgcattaaccaaaatgccccactctaactccccccattgtatacctttactatatggccaaccttttaaaaaatatgtaaatatgcaatgctaaaattcatgcagaccacaaaacaccctgaatttctaaagcaatcctgagaagtccacactacattggttgtgtcacacttcccgattttaattttcattgaaaagctagggaccccatttcacacagagcagtggaacagattagaggacccagatgtaaacccacaccccta

SEQ ID NO: 893069 - DNA, 526 bp, Homo sapiens
acaaataaattaacaactgtttgtgataacagagactctaaatatcctgattttaacattcctctgtgtctgcattaaccaaaatgccccactctaactccccccattgtatacctttactatatggccaaccttttaaaaaatatgtaaayatgcaatgctaaaattcatgcagaccacaaaacaccctgaatttctaaagcaatcctgagaagtccacactacattggttgtgtcacacttcccgattttaattttcattgaaaagctagggaccccatttcacacagagcagtggaacagattagaggacccagatgtaaacccacacccctaacaccatctgatcttcaaaaaaatccacaaaaataagctttggagaaaggactccctcctctcaatagatggtgccaggataaagtgctagccagttgcagaagaaaaacagtgggcccctgtgtctcaccctgcacagaaattaactcaagatgaatgaaagatgtaaacacaagacctcaaactatga

SEQ ID NO: 893070 - DNA, 603 bp, Homo sapiens
ataatgaagcagtgtcatttagagcaacacagatgaacctggaacacattatgttaaatgtaatgagctaggcctagaagacaaacactgcatgataccactcgtgaaatcttaagatgtttatcttaatgaagtagaaagcacaatattggttaccagagtttgggagatagagggggaatggggaaggattgattatggaaacaaagttatcttaacattaaaggaataaatctgaagttctcctcctcagcctggtgactggagtaaacaatatcatatttttctagagcaagaagggagaattttgaatgttctccccacaaaaaaaaaaaaaaaaaaatgcctggacgagcaaatagagatcctaagtaccctgatttgatcattacccaayctatatgtatgaaaatgtacccctaattatggacctttatgttgtgaaaaaaagttaatagaaataaataggtattgctaaaaatcacagggaaccacaaaagcaatgaatatctaaaggaatcctcagaaatacaaagtgaagacccacaatcctcaatatcaaattacactgccaagttgtagttatacagctgatatatgata

SEQ ID NO: 893071 - DNA, 719 bp, Homo sapiens
gctgcatggtgccagagccagggcccagctcttctagcgcaggttgtggaggggccaggggccccccaggctggagaggcccccccaggctggagagcagcgtcatgaacacagcttactgaagcctcatcctcccagattcaagctaccctctcatctcagcctcccgagtagctggtagctgggactacaggcgggtgccatcatgcctgtattatattttayatacattttggagagacagggtctcaccatgttgcccaggcagatcttgaaagcctgcagttcaaatgatcctctcaccttgacctctctcagtggtgggattatatgtgtgagccactgtgccctacctgccgcttttcttataaggatacttgtcattggatttagggcccatcctaatcatctcaaggtgctggatttaattacatctgcagattgttttccaaataaaggcacattcacatgttccaggtagacatatcttttgatagaccaccatgcaatccactctaggagtattaaagtgccagtgtggactgaggcaccaaagaatcacattatgatgtcatataacttgccttatttgtagtgaccagtgggcttggaaacaaccatttgcagctgtcagggaagtgcacagtgcctgacctttcccgcagcctcctccccactggtcttccatgagaggatcaacccttggagtgtccagagat

SEQ ID NO: 893072 - DNA, 719 bp, Homo sapiens
gctgcatggtgccagagccagggcccagctcttctagcgcaggttgtggaggggccaggggccccccaggctggagaggcccccccaggctggagagcagcgtcatgaacacagcttactgaagcctcatcctcccagattcaagctaccctctcatctcagcctcccgagtagctggtagctgggactacaggcgggtgccatcatgcctgtattatattttacatacattttggagagacagggtctcaccatgttgcccaggcagatcttgaaagcctgcagttcaartgatcctctcaccttgacctctctcagtggtgggattatatgtgtgagccactgtgccctacctgccgcttttcttataaggatacttgtcattggatttagggcccatcctaatcatctcaaggtgctggatttaattacatctgcagattgttttccaaataaaggcacattcacatgttccaggtagacatatcttttgatagaccaccatgcaatccactctaggagtattaaagtgccagtgtggactgaggcaccaaagaatcacattatgatgtcatataacttgccttatttgtagtgaccagtgggcttggaaacaaccatttgcagctgtcagggaagtgcacagtgcctgacctttcccgcagcctcctccccactggtcttccatgagaggatcaacccttggagtgtccagagat

SEQ ID NO: 893073 - DNA, 605 bp, Homo sapiens
agaaaaacagaccctcctctacccaccatcctcatacacagccttccagcccaggatctgaaccatttattcattttctctcatattcattcattcattcaattcttcatcacacatttagtgaagctctgccgtggaatgttcacacagaaggtacaaaaatgaggcaggtgtattttctcccatctaacaggggatgaccacatgaaaagaactggtggcctgtgtgtcccatggtcttacagggcagtggtggagggtggcccggtcatccactttctggggaggcagaaccagaagcaccagttggacaactgctaaaaagatatttatgcagcctcatatgttaagtcktatattttgaaagctttttaaattttttctttaagaagattttagatgcttatcactgagtaccagagggatgtaggctgatgcccttatcaacaaagtcagggactgtggcacacaaggattgactactgcagacacggtcacaatgctacctctagagggcctgaatccccctgccctctctggtggggagaagggctggcagagccattagcatgggctccggccaatcctggccactttgacactcc

SEQ ID NO: 893074 - DNA, 474 bp, Homo sapiens
tttgaaagctttttaaattttttctttaagaagattttagatgcttatcactgagtaccagagggatgtaggctgatgcccttatcaacaaagtcagggactgtggcacacaaggattgactactgcagacacggtcacaatgctacctctagagggcctgaatccccctgccctctctggtggggagaagggctggcagagccattagcatgggctccggccaatcctggccactwtgacactcctggtgctgacccagggtcctggaggaagggatgaggtgggcagtagagatgctcagggcagtggcccctttccatccacactggaactatttcaatattttaccaccaattcagccattcccttgtgcgctggctgaacatcagccctgctccaggtctcagtttcccctttgtaaagggaaagctctggattcaggagtgatgagaggtcatcatggtcttgagatt

SEQ ID NO: 893075 - DNA, 572 bp, Homo sapiens
agaaggaatggactccaggaacagggatgagaaaaacaagttcttatcagcttccccctttgagattctttcccaggccaatatttctttgctctgctctcataactatttttgtaactatttctgtaagtttataaggattttttaagttcctgttttccatcggtgtgaccctgagaaggtcacaagacatgcctgtgcaagcctaaaacagttgccatctgctgagagcctgctgggtggcccagcagaggtcaccagacatgtttgagtcatacacttgtcactgtttgattaactgcctttgttctgcttctgtaagcttgctaagcctgccctgtaagttttkcaaagctgcatgcttaaaaaacaggccccatcttttttccgggctcagccttttggatgcaaatccactgggcaagtggtcattttaataaaatcctcctgtctcacccattggtctctccagtctcttgactccctcaacactgagacggctccaaggtagcatgtgagatttaagtaataacttttttgtttgtttgtttgtttttatttttgtatgagac

SEQ ID NO: 893076 - DNA, 749 bp, Homo sapiens
aaaaatacatatgcacttcataaattcatatgtcacttcagcatttttacagttaatatcacttttgttattcttaaaaagttgaaaaattaaatgagttaaaagcagtatgagagaaattattgcaaatatgtgtataatattgttaggagaaacccaagtaagaccccagaggtgtaagtttaaattgaagactaatcagtttatatacataataatttaaaaatattctgtgcattataaaactcacaaaagaattaaaaggcaaaaaaatcaagaaaaaataatttcaaaataaatgccacaacacagcttcctgtggtcaagatttctctccattctactttgacgtctaaatagatctttgggcatctagactaatattgggtttgtatactcccagaaaattcaagactactaaacgcacccaaccttacaaccccgaagcatattatcacataggggtcttgtgtagtttgctaaagtgtaatgtactacctgtcacagaatgagcacttaactgatgttgggtgtgatgtagcatagtagcaaaaaactttagaattaggccacartgtttttaagggctttgcacgacccattattttttggcacttaatttaaaaaaatctgcatgcttattttaattttgtcattacttgccattgtatccatctcagcacactgatcaaataatcacaaaaatcacagagatgatactctgctaattaagaaagttttcttttttt

SEQ ID NO: 893077 - DNA, 552 bp, Homo sapiens
cctgtcacagaatgagcacttaactgatgttgggtgtgatgtagcatagtagcaaaaaactttagaattaggccacagtgtttttaagggctttgcacgacccattattttttggcacttaatttaaaaaaatctgcatgcttattttaattttgtcattacttgccattgtatccatctcagcacactgatcaaataatcasaaaaatcacagagatgatactctgctaattaagaaagttttctttttttctttgtgaaaccattcttcattttttttttttttggtatttagaaataatttctagtgctaatttatttttagtgacattttgcacagactctccaaataaaaaaccaagaacgaccaattttattgggaaaatactaaatgtaacaaactttattttttgatgagtgaagactatttttctaattttgcttaaaaattttaggtttagccttaggtaataaagttaatagagagaatgtttactaccatgcataaattcaaaagacttgttagtttagattgtcaatttaatgttgaac

SEQ ID NO: 893078 - DNA, 786 bp, Homo sapiens
tgtcattccaggacgttgagaggctaaggcaggtgggttgcttgagctcagaactttcagaccaagcaagggcacatggtggaaccccgtctctatgaaaaatatgaaaattagccaagcatggtggtgcccgcttttagtaccagctactggaaaggctgagacgatcatttgaccccaggaggttgaggctgcagtaagctctggttgcaccactgcactccagcctgggtgaaagagggaaaccctctgcccaggactcttgggatatgactatatccatagggactgcccgcagtaacctcacatttgagtggaagtggagatcgtatgtacctacaccaatatgtagcaaaaaaagaaaaacagaaatgatagcagaaatggcccaaagaataaaagaaggtgggggtaattgagagaggctttctgctgataaaatttgaactgatttctggagaatgggtttaattccaatagggggagatggaccaaatttaattttgatgagggaaatgtcttgagcaaaatctagaaaaggaaaatatgcccattttaagttttaatgagtggtccagttggggyacagtgcaagaagagagttctagtgaaaaggtagttggtctgataggtcagggtcttgcaggcagaggcagatactatcattattccgtttttcagattggaaaacagacacagagagtccaaggtcacaaagacagaaagggaatctgggcagtctagcagtagcaccctcttcttaaatgatccgttaaagggcctctt

SEQ ID NO: 893079 - DNA, 655 bp, Homo sapiens
ctttgccagcctctggctgcatggcagggtgactgtgtctttgaatatccctgatggaagctggtcatccttttgtctttgggtgaatagactactcaggaaggcagggatgaatgcaccccccaccctgctttcttgttaaygagtttgccatttattttggcagatctgaaatagtatttcaaaggcagtgcagaagcagatggggacattacttgtaattgtttaatactgttatgacatgacatttgcttacagaaagagaggcaagccaccatcttcaagggagggcatagtcatcgactgtgatcctggtgtccatgttggaatatcatggcaactatctcccagcactggacttgattacttctactgcattcccagtgatagctgagttgcttaatttactttcttcaacaccgtttgtgaaagggaagctagaaaactgcactatgtatggcttagtgcactgaaaatttgacgttatcaaaggagccatgatctcgtctttctctatccctcttcaaatgttttctataattatattcaaaggctcatgggtcttaccatgggtcatcgaggaagggctggtaactctttaaaccacaggtaaaatattacaaacatctgaaacctgcatttttacaggtgagag

SEQ ID NO: 893080 - DNA, 612 bp, Homo sapiens
aattttcagatgaaataactttaggtaagcttaagaaaagtttgattgcattttgtttataatcttgtacttctattttcattctgatttagtaggctgcacactttttaaaaaaaaatttcaggtggattgtggccattccttttcctcttaagtcttatttgattgttcttccagaacaaatattaacatttgcagtcctgcatctggatcaagcagtttggttagagaaatttaaacctttaaatcacaaaacagcttattttcaattgtcatagctgacactgaatctatgactaatggtgtaagcaatgtggatattggaatgtctctgagtttttatattaataaatttactagctaaataagtgatgtaatcatctgtygatgtctgagatgaagagtgagtaaaaaccacataaaagtcttccataaaactaaacttatcttggaattctttgtaaaaataatttctgtgagatggaactttggaaagttttcctgtaatttcttgaaatcaaatttaacagtgcatggtagtctgaccattctgcattctcctttctgtataaaaaacatcactatttcaaggccagagagccccctttacat

SEQ ID NO: 893081 - DNA, 608 bp, Homo sapiens
gctactttggggcttaacactttctccaattaagaagagatgttgagagcttctaggaacccatcatccaagactgcggcactaaaaaaacacacctgagattttgctctacgaagttattttctattaaattcactgcctttttcacatcagagtgaataatgacaaaacattgtagcttggtcgttttgcactcttcattctgattttgcagcaacttgcattcctttcaactgctcataagttaaatttctcaatgaagtaatcacaacagaactatctccttgaacagtttkgagtttcctgaaaaaaaacagatatactaccatatgatccaaaaatcccactgcttggtatatacccaaaagaaaggaaatgagtatatcaaagagatttctgcactcctaggtttgctgcagcactgtttacaattactaatatttgaaagcaacctaagtgtccatcaacagatgaatgaagaaaatgtggtacatatacacagtggagtactattcagccataaaaatgaaagcctgtcatttgcaacaacatggatggaactgaagatgattatgtcaagaaaaataagccaggcacagaaatacaaa

SEQ ID NO: 893082 - DNA, 646 bp, Homo sapiens
gttgcagagaaaagggaaatcttatacacttccgttgggaatgtaaattaattcagccattgtataaagcagtgtgaagatttctcaaaaaacttaaacagaactaccatttggcgcagcagtctcattactgggcacatacacaaagaaatatgaattgttctaycaaatgacacatgtacttgtatgattatcacagcactattaacagtagcaaaaacatggaaccaacctagaggctcatcagtggtggactagaaaaaaaaaatgtgtaccgcctgacgtggttgctcacgcctgtattcccagcactttgggaggccgagatgggcggatcatttgatattaggagtttgagaaaagcctggccaacatggtgaaacaccatctctactaaaaatacaaaaattagccaggcatggtggtacatgcctgtagacccagctacttgggaaactgaggtggcagaatagcttgaacctgggaggcgaaggttgcagtgggcccagattatgccacagcactccagcctgggtgtcagagtgagactctatctcaaaaagaaaaaaaattggtacatatacaccatgaaatactgtgtagcaacaaaaaaacaataaatttatggcttttgcaacaaaatgga

SEQ ID NO: 893083 - DNA, 575 bp, Homo sapiens
aaaatggcccacatagagagatgtctggcatttggtagtacctgggtgagagctttccaagctcttaggaagtatacaatgcataaggtccatttctaaatactagaaacatcttgctgtgaaagcacataaagtccatagttaagatgatgatgccatgcagaaaaacacgtggcaatgtaaccaccagtctttactttttcaatggccttgcacatggctgttactgtactgctgaagtccagmgtcagcagtttatgtttccccattgtgtcatcagcccaatgcaaagtaccatcaaaataacacctggaggtgctaacaggaaaataatctgagtaaatccacatttgctgtctcaacttccaaagactggtcatcaaacagtgtgtttctgtctttctatcttggctgccacctttactacactgtaggggtctgaggtttgtagagtggatatcgcagagttctggttgtccttgtgaggtttgatatgataaactttttaaaagaaagtaggcctgattacagaaatgagtattgtcccgacaatccacatagaattctggggcatt

SEQ ID NO: 893084 - DNA, 575 bp, Homo sapiens
aaaatggcccacatagagagatgtctggcatttggtagtacctgggtgagagctttccaagctcttaggaagtatacaatgcataaggtccatttctaaatactagaaacatcttgctgtgaaagcacataaagtccatagttaagatgatgatgccatgcagaaaaacacgtggcaatgtaaccaccagtctttactttttcaatggccttgcacatggctgttactgtactgctgaagtccagagtcagcagtttatgtttccccattgtgtcatcagcccaatgcaaagtaccatcaaaataacacctggaggtgctaacaggaaaataatctgagtaaatccacatttgctgtctcaacttccaaagactggtcatcaaacagtgtgtttctgtctttctatcttggctgccacctttactacactgtaggggtctgaggtttgtagagtggatatcgcagagttctggttgtccttgtgaggtttgatrtgataaactttttaaaagaaagtaggcctgattacagaaatgagtattgtcccgacaatccacatagaattctggggcatt

SEQ ID NO: 893085 - DNA, 705 bp, Homo sapiens
cttggagctctaatcattctgagctccatcatgctctgagcaccatctgctctgagcaacatctgcaccaagctccatcttgcttagatctccttattgctcagagtttcatctgctctgagcaccatcttgttcagagctccatcttgctcagagttccaactgctcagagaactgttgagagttccaacgactccaagctttatcttgctctgggctccatcttacacagaggaacatcrgctccaagctccatcttgcttggagctccttcttgtctgagctatatttgctctgagctggacactccatgctccatggtgctctgagttccatctgctaagagctccatctgctccaagctccatcttgcttggagctccaatcactccaagctccatcttgctctgagcaccatctgttctgagctccaccttgctcagagccccagtcactcctagctccatctggctctgagtaccatctgctcggagctccatcttgctctgagaccacaggcttggtgctccatcatactcagaaacatctgctccgagcttcatattaatcggagctccatctcacctggagctccatctgctctgagctccatcaagcttggagctcatcttgctcagaggtccatcttgctttgcgaaccatctgctccatgtatggttatagcagcactattcacaatggtaa

SEQ ID NO: 893086 - DNA, 597 bp, Homo sapiens
gagcaaaatctagaaaaggaaaatatgcccattttaagttttaatgagtggtccagttggggcacagtgcaagaagagagttctagtgaaaaggtagttggtctgataggtcagggtcttgcaggcagaggcagatactatcattattccgtttttcagattggaaaacagacacagagagtccaaggtcacaaagacagaaagggaatctgggcagtctagcagtagcaccctcttctwaaatgatccgttaaagggcctcttctccaggcactctaaaacccttctccatctttagttccccagagtacagtgaggccccctgtctacctcacaggacggggtctcagaaaagcaacagatcccaactcatactagcttttaaataaaaaaatttataaccttgcaaaacaagaagtgcagaggttgggcaagagccagccctggttcattcagcagctcaacaataaatccaaggacctgggtattggttcacctctccacaccaccgtcctcatgggccagcttctacctcctcctgaatactgtgtctttgcctagttttctccctgattttggctcaattgctgcttcctg

SEQ ID NO: 893087 - DNA, 558 bp, Homo sapiens
catctgatgatttgcattttttagaaactgggagacacataaaaccaagttagaaatttgggttatgagttataatattttcaaaagataaaaagtcaacagaatcaaattcagagataattcagatgttggaactaaatgcaactaatttaaaataataatgatcaaaatgttaaagaatctacttaaaaaaagacaacatgyatggaaaaatgaggaatttcagcagagatgggaacagtaaaaggcaaaagctagaaataagtgaaagcatgagaacagaaatgaagaattacaacagcaagctgattagcagactggtcatcagagctaaagaaagaagcagtaaattttatgctaggtcaatacaaattatttgaatggtagcacaaagggaggaaagagaaaaacaaaataaaccaatgagccaagcaaataaaatactccagtgaatccaagaattctctggtaacatgaaattaagtaaaatacaattaattggaattccaggagagtaaaaacagaatgtaagggaagaaaaatttgaaaaagatgact

SEQ ID NO: 893088 - DNA, 667 bp, Homo sapiens
gtctccaccattgtgtagtttccatatgttttttaagatttaatattactttttccaacatctttttatcctcaagttttttatattcctgttgtatttttttatagataataactcctgttgaataactttttagtcaaatagacatattttgaagatacagctttcagctttgctgtaagatcatcgaactacattaataaaataatatagcttgataatgaagtaggctgagaataatctcatacaaaaccaataacaaattttgaaatacatttacttgcaataaaatgttatctataatgtagattctttaaatgttaacccgtactcagaaattcaagaacaaagtaaaagccaccatgagtcacaaacatatattctttactctcatcatctttgccacagaacttttgcacttgatcttactgttgtttttctgataatttgtgttttttcctttcttaaatggctctaagttaactcttattagaaagtttcaaacccccttctctcatcatcatgccccaaaatttgtcaaaaaaaagtttcagagatattatattgagttatttaggccaaaggcaataaatggctcttasaataagactttgaaaataatgtaatactctacaataggcatggtgtatcatgcatataatcctag

SEQ ID NO: 893089 - DNA, 650 bp, Homo sapiens
cctactaatgtttgcacttactccttgccggcctggaagctctgaggcagcaggagcagtgtgtgtgcccacgtgtgtgtgcactttcttgggtgtgtgtgtgtctgtgtaattggattccccacagcacattattgttttatccatagtaaatggtggatgaatatttgcagtatttaactggactgcagcattgtggaggtcagataaccacattttgatagacaagttgcattctaaccttgaagcaaacaaaatgcccatcttatcagcctccctcacactggctgtgcctttcctttgtggttgtatgtttaaagagctcatccaacaagcttcttaaaaaggggattggacctttgccagcctctggctgcatggcagggtgactgtgtctttgaatatccctgatggaagctggtcatccttttgtctttgggtgaatagactactcaggaaggcagggatgaatgcaccccccaccctgctttcttgttaaygagtttgccatttattttggcagatctgaaatagtatttcaaaggcagtgcagaagcagatggggacattacttgtaattgtttaatactgttatgacatgacatttgcttacagaaagagaggcaagccaccatcttcaagggagggca

SEQ ID NO: 893090 - DNA, 647 bp, Homo sapiens
cctgatggaagctggtcatccttttgtctttgggtgaatagactactcaggaaggcagggatgaatgcaccccccaccctgctttcttgttaatgagtttgccatttattttggcagatctgaaatagtatttcaaaggcagtgcagaagcagatggggacattacttgtaattgtttaatactgttatgacatgacatttgcttacagaaagagaggcaagccaccatcttcaagggagggcatagtcatcgactgtgatcctggtgtccatgttggaatatcatggcaactatctcccagcactggacttgattacttctactgcattcccagtgatagctgagttgcttaatttactttcttcaacaccgtttgtgaaagggaagctagaaaactgcactatgtatggcttagtgcactgaaaatttgacgttatcaaaggagccatgatctcgtctttctctmtccctcttcaaatgttttctataattatattcaaaggctcatgggtcttaccatgggtcatcgaggaagggctggtaactctttaaaccacaggtaaaatattacaaacatctgaaacctgcatttttacaggtgagagaaatgaggccagaaaagttaagtgcatcatgttgaatacaa

SEQ ID NO: 893091 - DNA, 597 bp, Homo sapiens
gagcaaaatctagaaaaggaaaatatgcccattttaagttttaatgagtggtccagttggggyacagtgcaagaagagagttctagtgaaaaggtagttggtctgataggtcagggtcttgcaggcagaggcagatactatcattattccgtttttcagattggaaaacagacacagagagtccaaggtcacaaagacagaaagggaatctgggcagtctagcagtagcaccctcttcttaaatgatccgttaaagggcctcttctccaggcactctaaaacccttctccatctttagttccccagagtacagtgaggccccctgtctacctcacaggacggggtctcagaaaagcaacagatcccaactcatactagcttttaaataaaaaaatttataaccttgcaaaacaagaagtgcagaggttgggcaagagccagccctggttcattcagcagctcaacaataaatccaaggacctgggtattggttcacctctccacaccaccgtcctcatgggccagcttctacctcctcctgaatactgtgtctttgcctagttttctccctgattttggctcaattgctgcttcctg

SEQ ID NO: 893092 - DNA, 636 bp, Homo sapiens
cttattaaaaaataagcaaagaatcagaatagacatttcctacatcatacaaaaggccaaccaggtacatgaaaaaatcataaacattcctaattatcagagaagtgcaaatcaatgccacaatgagatatcacctcacacattttactagggctattataaaaaaagatggaagataagtgttggtgaggatgtggagaaaaagaaaccctgtacactgttggtaggaatggaaattagtacagccatcttggaaaacagtacgaagctttctcaagaaattataaatwtatttaccctatgatccatcaatcccacttctggatatgtgtccaaaggaatttcaatcaatatgtcaaaaagagacatctgcaatttcatgttcattgcagcaatattcataatagccgtgaattacaaacaacctaagtgcttatcaactgaagaatggataaaaatatgtggaaaaattggaacccttctacaccactggtgagaccttaaaatgtaaaacagtctggcagttcttcaaatggttaaacatagagttatcatatgacccagcaattccactcctatgtatttaccaaaaagaaaagaaaacaaatgctacacaaaaagtagtacaaaaatgtt

SEQ ID NO: 893093 - DNA, 597 bp, Homo sapiens
gagcaaaatctagaaaaggaaaatatgcccattttaagttttaatgagtggtccagttggggcacagtgcaagaagagagttctagtgaaaaggtagttggtctgataggtcagggtcttgcaggcagaggcagatactatcattattcygtttttcagattggaaaacagacacagagagtccaaggtcacaaagacagaaagggaatctgggcagtctagcagtagcaccctcttcttaaatgatccgttaaagggcctcttctccaggcactctaaaacccttctccatctttagttccccagagtacagtgaggccccctgtctacctcacaggacggggtctcagaaaagcaacagatcccaactcatactagcttttaaataaaaaaatttataaccttgcaaaacaagaagtgcagaggttgggcaagagccagccctggttcattcagcagctcaacaataaatccaaggacctgggtattggttcacctctccacaccaccgtcctcatgggccagcttctacctcctcctgaatactgtgtctttgcctagttttctccctgattttggctcaattgctgcttcctg

SEQ ID NO: 893094 - DNA, 695 bp, Homo sapiens
ttgctttcctgcgactagatggtcccatctgggggtgatgggagatggtgacagatcataaaggcatttgattcacataaggagtgaacaacctatatcccctgcatgagcaacttacaacagggttcaggtcacactcttaggacgatctaatgccaccgctgatctgacaggaggagcagctcgggtggtaatgcgagcgacagagagtggctgcaaacagatgaagctttgcttgctcacctgcctctaacttcctgctgtgtggcccaggtcctaacaggccagggactggtactgrtctatggcctataactcatactttttgtgtttattttttggaaacattttccacttatattcttgattcctatgtattttataaacaacttagaaattccttttagaacaagacagggtctaatattatgtttttaacataggactttgaattaattttatctgtgtatgagagagagatgtgaaataaactcatcattaagcattttccattttacttttatttcatgcatattaagaataaaactgggaagtcctaggcaaagcaattgggcaagagaaataaagggcatccaaattggaaaagaggaagtcaaactatctcttcaccaatgatattaccttatacctagaaaaccctgaagattcctacaaaacactcctagatttgataa

SEQ ID NO: 893095 - DNA, 579 bp, Homo sapiens
cgttatctctttttctttttcttcatttttctctggactaggaattgtgctggtacatggttcttcctccgaaagtggttattccttaatgtgtttctttttaccctttttcttcttcttagaaaggggattttaagtaaaaaactgaagtaatggaaacagtaagctagaagaatatctggggaaaaagcattccagacayggggaactgctaagtgcagaggtgtgactggagtttttaagcactagagataggtaaggaatagcaagaagttcagtgtggctgaaacagagcaaaagagataagaaacagaagtttaagcaggagagataacatgccagatggttgactgccttttagttattaggaggaactctgacacatacttagcgtgaaatgggaggcaatcagaagggctggggcaggggaatgacacaatttgacttatgttttaaatacatccactgagttaagaattgatgaaaggggaagtttttaaaaaccaggactatcaattcccagtctatgacactcatctagatggcagatgatggtggctcacatgtgcaagatatgac

SEQ ID NO: 893096 - DNA, 623 bp, Homo sapiens
aaaggacaacatacttaacactcacgactgagaatgatgtaattttcatccacagtcatggaaaagtgatagacaagaaatagtttccaaattttacataacaggtggaggtttcaaatgctatgtaacaattatatatttcaaaggttataaaaattatacacatgtggcattaaatgccagaccaaggttttaaaggcccctagaacatttctagatcacataagctgattatcattttgttcattcatgcttatacataaagaccaagaaataytaaaggtctcaacgagaatatttcttgcttgataaaaatcagccaattctaggacagttgacactcatcaaatatacaaagtaattgatcacagtaaaatactgagttctattaacaggaataaagagagagaaatgcagaaaataatcttattttataaatgaagtttttaaaattatatgaagtcactgtggaaaaatatggtgaggtgaatactcaaatatatccttttctcaaaggaaagataatgtcacccatgcaggacacttttacatataagagtcaatgcattagcagcaccttccttttagcacaaaggtcagcaaataagcacctgtgggccaaa

SEQ ID NO: 893097 - DNA, 666 bp, Homo sapiens
ttagctgggtgtgatgttgcacacctgtggtcccagctagtagagaggctgaggtgggaggatcactagagcccagaaagtcgaggctgcagtgatcacacaaccatgatcacacaactgcactccagcctgggaaacagagccagaccctgtctcaagaaaataaatatatgtagtccacaaagcctaaaatatttactaattggttctttgcagaaaaagctggccaactcttggtttagtagatcaaagatctttgaygtattttaataaaagttttacccaatacactgaaatgtttatattaaatatagatccccatgtacaatcccttggcaatattcagactgagggtccaatatttcagcactcaggcactgacaacaaaaatttaataattagcaatcttgttgctaacaaggtacagtgtcaatgtagcatgtagcttccatttccaacacagcagatattacaagaattttaacaagaactcctaagatgtgtcattaaactaaatgctttaaatacattttaattgtgaaataatcagtataccctagatctaacctcatttttcaaaaacggttgcataatacattattttgggggtatggacattgagctatttcctattgataagggagtagactagctccaaatttttag

SEQ ID NO: 893098 - DNA, 561 bp, Homo sapiens
atggggcttcaggaatagaatggaagatggcccttttctgcactaagatattcttctcccccactgcctttgagcattcttttttcattaggttcctaggatatcaaaaacacgaaggtgctcactgaaacatgggaaccaaagtttcccacaacataaggagcagagtgaaactgcwgaggtacaatcatggaattccagaaaatgagttgctccccaaatttcacattcgatagccataaaattttctagctggaaaatacacagaataaaaaattatctactttagccacattttctattgataatcagactaaaaccaagaaagataaaattattgatccaaagctcctaaagtggcattacttagcattttacggcaccatttgggactattccataataatgaaagaatatctctagggtttgcatctctttaaaattcaatgtatagaattctgagttaagtattaaatttttcactgatgatttatgctacttacatgataggatcacgtatgcctacacttactacactttgttaaacaacataatgtaaaa

SEQ ID NO: 893099 - DNA, 561 bp, Homo sapiens
atggggcttcaggaatagaatggaagatggcccttttctgcactaagatattcttctcccccactgcctttgagcattcttttttcattaggttcctaggatatcaaaaacacgaaggtgctcactgaaacatgggaaccaaagtttcccacaacataaggagcagagtgaaactgctgaggtacaatcatggaattccagaaaatgagttgctccccaaatttcacattcgatagccataaaattttctagctggaaaatacacagaataaaaaattatctactttagccacattttctattgataatcagactaaaaccaagaaagataaaattattgatccaaagctcctaaagtggcattacttagcattttayggcaccatttgggactattccataataatgaaagaatatctctagggtttgcatctctttaaaattcaatgtatagaattctgagttaagtattaaatttttcactgatgatttatgctacttacatgataggatcacgtatgcctacacttactacactttgttaaacaacataatgtaaaa

SEQ ID NO: 893100 - DNA, 630 bp, Homo sapiens
ggtcccattctgcaagatatgattcctttaataggcagttgggttgcttttttgacctggttccctccctaaacagaaacactgaggtcaatgagagaccacaaggcagaatatatctttaaccttagtatcagtgactgacaatataaaactgcagattttcaatcactggccatgattactctttaaccatgaatccagctcagggaccatcagtgttacattgttcataattctattgcttaataatataatccaataattgatgttacattcttcatcatgttaggrtgttgtaaaaataaaagaacaaagttctgaaatttgtttttgcctctattccaaaaggaaagattagctataagctaatcaagaaggcagataagaatattttaaaataagagtattttaaatttcatagtgggttatgttgaagttaaatatcaaatattaaattagaatctattgattcttttaataaggttgctgaatttattacaataaattttaagaatctattaaaatatttttttttttttttttttttttttttttgacacagagtcttgctttgtcacccaggctggagcgtagtggcagatctcggctcactgcaagctccacccccca

SEQ ID NO: 893101 - DNA, 652 bp, Homo sapiens
aataatataatccaataattgatgttacattcttcatcatgttaggatgttgtaaaaataaaagaacaaagttctgaaatttgtttttgcctctattccaaaaggaaagattagctataagctaatcaagaaggcagataagaatattttaaaataagagtattttaaatttcatagtgggttatgttgaagttaaatatcaaatattaaattagaatctattgattcttttaataaggttgctgaatttattacaataaattttaagaatctattaaaatattyttttttttttttttttttttttttttgacacagagtcttgctttgtcacccaggctggagcgtagtggcagatctcggctcactgcaagctccaccccccaggttcatggcattctcctgcctcagcctcctgagtagctgagactacaggtgcccaccaccacacccggctaagtttttgtatttttagtagagacggggtttcatcatcttagccaggatggtctcgatctcctgacctcatgatccgcccacctcagcctctcaaagtgctgagattacaggcatgagccacccccccagccaaaagattcttaaaaaaagaatctattgattctcaaagcctagtctcaaaagtaatttcatt

SEQ ID NO: 893102 - DNA, 652 bp, Homo sapiens
aataatataatccaataattgatgttacattcttcatcatgttaggatgttgtaaaaataaaagaacaaagttctgaaatttgtttttgcctctattccaaaaggaaagattagctataagctaatcaagaaggcagataagaatattttaaaataagagtattttaaatttcatagtgggttatgttgaagttaaatatcaaatattaaattagaatctattgattcttttaataaggttgctgaatttattacaataaattttaagaatctattaaaatatttttttttttttttttttttttttttttgacacagagtcttgctytgtcacccaggctggagcgtagtggcagatctcggctcactgcaagctccaccccccaggttcatggcattctcctgcctcagcctcctgagtagctgagactacaggtgcccaccaccacacccggctaagtttttgtatttttagtagagacggggtttcatcatcttagccaggatggtctcgatctcctgacctcatgatccgcccacctcagcctctcaaagtgctgagattacaggcatgagccacccccccagccaaaagattcttaaaaaaagaatctattgattctcaaagcctagtctcaaaagtaatttcatt

SEQ ID NO: 893103 - DNA, 652 bp, Homo sapiens
aataatataatccaataattgatgttacattcttcatcatgttaggatgttgtaaaaataaaagaacaaagttctgaaatttgtttttgcctctattccaaaaggaaagattagctataagctaatcaagaaggcagataagaatattttaaaataagagtattttaaatttcatagtgggttatgttgaagttaaatatcaaatattaaattagaatctattgattcttttaataaggttgctgaatttattacaataaattttaagaatctattaaaatatttttttttttttttttttttttttttttgacacagagtcttgctttgtcacccaggctggagygtagtggcagatctcggctcactgcaagctccaccccccaggttcatggcattctcctgcctcagcctcctgagtagctgagactacaggtgcccaccaccacacccggctaagtttttgtatttttagtagagacggggtttcatcatcttagccaggatggtctcgatctcctgacctcatgatccgcccacctcagcctctcaaagtgctgagattacaggcatgagccacccccccagccaaaagattcttaaaaaaagaatctattgattctcaaagcctagtctcaaaagtaatttcatt

SEQ ID NO: 893104 - DNA, 594 bp, Homo sapiens
attagaatctattgattcttttaataaggttgctgaatttattacaataaattttaagaatctattaaaatatttttttttttttttttttttttttttttgacacagagtcttgctttgtcacccaggctggagcgtagtggcagatctcggctcactgcaagctccaccccccaggttcatggcattctcctgcctcagcctcctgagtagctgagactacaggtgcccaccaccacacccggctaagtttttgtatttttagtagagacggggtttcatcatcttagccaggatggtctcgatctcctgacctcatgatccgcccacctcagcctctcaaagtgctgagattacaggcatgagccaccccccmagccaaaagattcttaaaaaaagaatctattgattctcaaagcctagtctcaaaagtaatttcatttggactatctaatattattaaagcaaaaaaaaaaaaaataaaaaacgttaaaccaaaagtttaaatttaagagtttccatgcctctggctggctattttcacttcctttaagcctttgtgactcttcctctgatgtcagctttaagtcttgt

SEQ ID NO: 893105 - DNA, 637 bp, Homo sapiens
accccctaagctgtacattatttctccatatgtctgtcccctctgctccaaaactgcaggggagagtcttgcacatcatctttgtaaaaacagtctttgttttactcagaaaatttgtattgagtcctgctacatacatgctaggcattasggtctaaaaagaatgaaaataaagcatctcagggatggcttttctagaacacatgcccaagcagagacttaaatattgaggctggccagattaaaaggggtagagggcaggaaagggtgacagcatgcccggcagcagcaagagcgggagcgaggcctgaaagaatgaaagtatttgcctacaatagaaggatgagtgagtagggcactaccagcagctcagtaatgccagagaaagggcacacagggaaaagggctaaagatggagagtggggcagaagtcagattatgaaagcctcatgtgtaattttaagatgcttggacattaatgttcaagagtggtccctggtcctatctgcatttagatatagatcactttaaatgccaaaaccaatatttgtagtgaaccattattcattaagacaaggtgactgataattcatgtggacacaactgaaatgatactatgtagcgaattctcaataat

SEQ ID NO: 893106 - DNA, 637 bp, Homo sapiens
accccctaagctgtacattatttctccatatgtctgtcccctctgctccaaaactgcaggggagagtcttgcacatcatctttgtaaaaacagtctttgttttactcagaaaatttgtattgagtcctgctacatacatgctaggcattagggtctaaaaagaatgaaaataaagcatctcagggatggcttttctagaacacatgcccaagcagagacttaaatattgaggctggccagattaaaaggggtagagggcaggaaagggtgacagcatgcccggcagcagcaagagcgggagcgaggcctgaaagaatgaaagtatttgcctacaatagaaggatgagtgagtagggcactaccagcagctcagtaatgccagagaaagggcacacagggaaaagggctaaagatggagagtggggcagaagtcagattatgaaagcctcatgtgtaattttaagatgcttggacattaatgytcaagagtggtccctggtcctatctgcatttagatatagatcactttaaatgccaaaaccaatatttgtagtgaaccattattcattaagacaaggtgactgataattcatgtggacacaactgaaatgatactatgtagcgaattctcaataat

SEQ ID NO: 893107 - DNA, 564 bp, Homo sapiens
aacatgcatagaaaaacattagtcattcctgctgacctgctgttctttgctcttctgtattcaccagaaaatttcctactccttcctcacgtctaggttaaatactagtgtacaacctggaaacctgtacatcatctgagatttctctctgtcccccaagcctttctcattcaattatcactaaatcatattgacgatacctctcttctgcctccattttgtattcccactgccactgggaacatgawcatttacaaaatggcttttatgaaaaaaaaaactgccaacaattaatgttatttcttacgggaaaaaaattaagctaaacaaatgaaaaaagcataacaccaaaaaaaaaaaaaaaaaaaaaaggccaacatattaaaacgagtaattgagattcctaactttatttatttcactatggacaggtgaaaaccttgtaatacattgatgctactccaaggatgtatgacaaggaaaccatagctgactactgcaaaagcttcctttgtctcctggtttctttacatagtaaagaaccttccatcaatcccagcaaac

SEQ ID NO: 893108 - DNA, 564 bp, Homo sapiens
aacatgcatagaaaaacattagtcattcctgctgacctgctgttctttgctcttctgtattcaccagaaaatttcctactccttcctcacgtctaggttaaatactagtgtacaacctggaaacctgtacatcatctgagatttctctctgtcccccaagcctttctcattcaattatcactaaatcatattgacgatacctctcttctgcctccattttgtattcccactgccactgggaacatgaacatttacaaaatggcttttatkaaaaaaaaaactgccaacaattaatgttatttcttacgggaaaaaaattaagctaaacaaatgaaaaaagcataacaccaaaaaaaaaaaaaaaaaaaaaaggccaacatattaaaacgagtaattgagattcctaactttatttatttcactatggacaggtgaaaaccttgtaatacattgatgctactccaaggatgtatgacaaggaaaccatagctgactactgcaaaagcttcctttgtctcctggtttctttacatagtaaagaaccttccatcaatcccagcaaac

SEQ ID NO: 893109 - DNA, 564 bp, Homo sapiens
aacatgcatagaaaaacattagtcattcctgctgacctgctgttctttgctcttctgtattcaccagaaaatttcctactccttcctcacgtctaggttaaatactagtgtacaacctggaaacctgtacatcatctgagatttctctctgtcccccaagcctttctcattcaattatcactaaatcatattgacgatacctctcttctgcctccattttgtattcccactgccactgggaacatgaacatttacaaaatggcttttatgaaaaaaaaaactgccaacaattaatgttatttcttacgggaaaaaaattaagctaaacaaatgaaaaaagcataacaccaaaaaaaaaaaaaaaaaamaaaggccaacatattaaaacgagtaattgagattcctaactttatttatttcactatggacaggtgaaaaccttgtaatacattgatgctactccaaggatgtatgacaaggaaaccatagctgactactgcaaaagcttcctttgtctcctggtttctttacatagtaaagaaccttccatcaatcccagcaaac

SEQ ID NO: 893110 - DNA, 662 bp, Homo sapiens
acactacaacagcagacaacagcagggttaagaagacatgacagagaccacatagtctaaaatatttcccacctagtcctttacagaaaaagctttctaacccattttacaccataaccagaagccttaatactcaaatttaatcttgtgactcccctgctcaaatttctccaatgagcccctgcagcacacattgttggctccctatcaatagccattccttattctttcttgcagaagaaacacaagtctattgggatatttattatcccaatccccctcctcagcctcagaaagagaaatgtttattctaagytaatcatgtattttccttcccagtgcctggtttgggaatgagcaggtactctgacctagccaatgaaatattacaggaagcccttgcatgcttctaagttttctcccagttacgtgaataaaacactgccaacagcacagctgaaagagggacaagtgggatcctaggatatcaatgaacaaacaaaacaactctggttcctactgttttagccaccgctcatctagtatttgcagtccaaagcattctacctggtaaacttcccatggcccatggggtaaaacctactcatttctgtagtattaaaatgtctatcatgaacttgccttagctaagtattcacctc

SEQ ID NO: 893111 - DNA, 578 bp, Homo sapiens
cctcctcagcctcagaaagagaaatgtttattctaagctaatcatgtattttccttcccagtgcctggtttgggaatgagcaggtactctgacctagccaatgaaatattacaggaagcccttgcatgcttctaagttttctcccagttacgtgaataaaacactgccaacagcacagctgaaagagggacaagtgggatcctaggatatcaatgaacaaacaaaacaactctggttcctactgttttagccacygctcatctagtatttgcagtccaaagcattctacctggtaaacttcccatggcccatggggtaaaacctactcatttctgtagtattaaaatgtctatcatgaacttgccttagctaagtattcacctcattcccaacctctcgtatctcacacttttggtattagcaaaagtgaattgctcagaatccctgcaaagttcactcaagcatcttgtcttttgcacttgctgctctttctgccaaacaggcaatctcattagatgttccttctggcaaacacacaacctcgttgcatgttccttctgccaaacattattcttctg

SEQ ID NO: 893112 - DNA, 665 bp, Homo sapiens
tgaaattcttaacagtatttcaaacaatatcagaataacagaacttaacagtattatcccatccacttatgagtacattctgcaaacttctctttaagcttctaattaaagaagaaaaaaatgtagggtgaaatactcataaatcgagggcatgtgacccagtaaattaggttgcattaacctgacataatagaaagtgtcccaactctgcataagtcctagctccataatgaacagctatttgttcttggacaacttgcttctcttaggctcaatgtcttcttcaacaaagtgaggactttgctgccttatttccctaggttcygataaaaatttaatgagatcacattttttaaatgctgagagaaatagtaaagcaatggaataatctcttcctaaactttatgactaaaattatcttggaatcacaaataaaacccaatgcgtattttgttcataggttctaatatgcaaatgttgtagttttcagaaaatgttattaagtccgaattttgcctcttagttgtcctactctttatggcttatatttcagggcatctcaactatgtcatagtttgtaactaaatgtattcctaaatatctcattaaagtagataatgtgattgtccactattacggagttgatcaatcacaccaagggcaga

SEQ ID NO: 893113 - DNA, 577 bp, Homo sapiens
taatctcttcctaaactttatgactaaaattatcttggaatcacaaataaaacccaatgcgtattttgttcataggttctaatatgcaaatgttgtagttttcagaaaatgttattaagtccgaattttgcctcttagttgtcctactctttatggcttatatttcagggcatctcaactatgtcatagtttgtaactaaatgtattcmtaaatatctcattaaagtagataatgtgattgtccactattacggagttgatcaatcacaccaagggcagaaaaaccaatggatgttaagacctggtttggaccaatgagccttctctacagactcaaactctgagcccgcagatgttggttacaatgatgctttatattgatgttcaattccggctgacatgggagaccaaaagtctacttttattttttttagtttccatgaagaagtagcaagctgacattctgtcattttcgacatacatactaacaatatattttgcaccaaacatgttattcagctctaagtcatctcatagaccatcttacatgactatttttgcagcgcaaatcacaatt

SEQ ID NO: 893114 - DNA, 636 bp, Homo sapiens
cccagtaaattaggttgcattaacctgacataatagaaagtgtcccaactctgcataagtcctagctccataatgaacagctatttgttcttggacaacttgcttctcttaggctcaatgtcttcttcaacaaagtgaggactttgctgccttatttccctaggttccgataaaaatttaatgagatcacattttttaaatgctgagagaaatagtaaagcaatggaataatctcttcctaaactttatgactaaaattatcttggaatcacaaataaaacccaatgcgtattttgttcataggttctaatatgcaaatgttgtagttttcagaaaatgttattaagtccgaattttgcctcttagttgtcctactctttatggcttatatttcagggcatctcaactatgtcatagtttgtaactaaatgtattcctaaatatctcattaaagtagataatgtgattgtccactattacggagttgatcaatcacaccaagggcagaaaaaccaatggatgttaagacctggtttggaccaakgagccttctctacagactcaaactctgagcccgcagatgttggttacaatgatgctttatattgatgttcaattccggctgacatgggagac

SEQ ID NO: 893115 - DNA, 603 bp, Homo sapiens
tggtagcaaagaagaagaaacaaacactgatctctttctgccacccctctgaccctttggaactcctctgaccctttagaacaagcctacctaatatctgctagagaaaagaccaacaacggcctcaaaggatctcttaccatgaaggtctcagctaattcttggctaagatgtgggttccacattaggttctgaatatggggggaagggtcaatttgytcattttgtgtgtggataaagtcaggatgcccaggggccagagcagggggctgctgctttgggaacaatggctgagcatataaccataggtatgggaacaaaaaacatcaaagtcactgtatcaattgccatgaagacttgagggacctgaatctaccgattcatcttaaggcagcaggaccagtctgagtggcaacaatgcagcagcagaatcaatggaaacaacagaatgattgcaatgtccttttttttctcctccttctgacttgataaaagggaccgtcttccttggatttagtgaacccctttggttcctgaaaaattcaaggagtatctaggacatagtccccagaagacagtacaagactttctgataaactggac

SEQ ID NO: 893116 - DNA, 542 bp, Homo sapiens
aatgtccttttttttctcctccttctgacttgataaaagggaccgtcttccttggatttagtgaacccctttggttcctgaaaaattcaaggagtatctaggacatagtccccagaagacagtacaagactttctgataaactggacatttcaagacccaaataactaatcagaaaaatcaaagatgtgatactattttttatcccatgcataggtgctacacttggatcaaatgaacaatgttgggatctctatggataaaggtcttaaaagtcctgagataaagaatcctgcacccactggtacttctaacttgtcttgttttttgtctgatttctggctgatgcaggggactagctcactgccacrcgaaaattacctgaactgaactatgacatctcacctgatatgtaagatgtaactgttataattattttaaacctcaatttagcattaactagccttttaatgtaaacacttacacattatgacgactagaaacagcatactctctggccgtctgtccagatagatcttgagaa

SEQ ID NO: 893117 - DNA, 579 bp, Homo sapiens
tctggctgatgcaggggactagctcactgccacacgaaaattacctgaactgaactatgacatctcacctgatatgtaagatgtaactgttataattattttaaacctcaatttagcattaactagccttttaatgtaaacacttacacattatgacgactagaaacagcatactctctggccgtctgtccagatagatcttgagaagatacatcaatgttttgctcaagtagaaggctgactatacttgccgatccacaacatacagcaagtatgagagcagttctaaaatgacagagataggaacagtaataaagttattktaaaagctaatttgatatactttaccaatttaacatcttgcctgtccgtgcagaatcaaacatttacatgcactaaaagacataagcatcttcagtgctcaagtgttcatctttgtaaaataccaccaaggttgaaaggaagggacaaaaaaaaaaaaaccctcttatctcagtggggtattgcatagcagaagctactaatttaaagtcctttgatggacaagaaacaatattagggccacttatctgaaatgaa

SEQ ID NO: 893118 - DNA, 579 bp, Homo sapiens
tctggctgatgcaggggactagctcactgccacacgaaaattacctgaactgaactatgacatctcacctgatatgtaagatgtaactgttataattattttaaacctcaatttagcattaactagccttttaatgtaaacacttacacattatgacgactagaaacagcatactctctggccgtctgtccagatagatcttgagaagatacatcaatgttttgctcaagtagaaggctgactatacttgccgatccacaacatacagcaagtatgagagcagttctaaaatgacagagataggaacagtaataaagttattttaaaagcyaatttgatatactttaccaatttaacatcttgcctgtccgtgcagaatcaaacatttacatgcactaaaagacataagcatcttcagtgctcaagtgttcatctttgtaaaataccaccaaggttgaaaggaagggacaaaaaaaaaaaaaccctcttatctcagtggggtattgcatagcagaagctactaatttaaagtcctttgatggacaagaaacaatattagggccacttatctgaaatgaa

SEQ ID NO: 893119 - DNA, 659 bp, Homo sapiens
tagaaagtaaataaaatgtagtcgcttccttctcactcttctgtgctttcccacacgctgctccttcccttggaaacaccccttctctgcctcaccacagtaactctactcatctcaaaaactcactttaaacatttactgcttccaaggctctttgcttctaacccagcatttgatatggtattattggatggtaatatttttcccatctaaacaaagagctccttgagggcaggggctgtatcttttgtttctatatcctcaaccctaagataaattgcgtataaagcaagaatttgcatgtaaaatatttctttagtttcatgttttactgaaagttcaacctccaacatgcaacaaaaattgctattaaaactcacactgcccatctgaaaaaattttccaacatttatttatttaaaatctatttatatttaactttcccagattgttactaaataatcagttcataggactactgaaactaaattaacagaattyctatctgcattcttaataactccatggttttaagtgtgtaaaactgccatgctgattatgccaaagctctacatacttaaagagacacactggacagtccacaatacagcttcaattgataaaaaacagtttagaatttgcttaattccaattgagaa

SEQ ID NO: 893120 - DNA, 659 bp, Homo sapiens
tagaaagtaaataaaatgtagtcgcttccttctcactcttctgtgctttcccacacgctgctccttcccttggaaacaccccttctctgcctcaccacagtaactctactcatctcaaaaactcactttaaacatttactgcttccaaggctctttgcttctaacccagcatttgatatggtattattggatggtaatatttttcccatctaaacaaagagctccttgagggcaggggctgtatcttttgtttctatatcctcaaccctaagataaattgcgtataaagcaagaatttgcatgtaaaatatttctttagtttcatgttttactgaaagttcaacctccaacatgcaacaaaaattgctattaaaactcacactgcccatctgaaaaaattttccaacatttatttatttaaaatctatttatatttaactttcccagattgttactaaataatcagttcataggactactgaaactaaattaacagaattcctatctgyattcttaataactccatggttttaagtgtgtaaaactgccatgctgattatgccaaagctctacatacttaaagagacacactggacagtccacaatacagcttcaattgataaaaaacagtttagaatttgcttaattccaattgagaa

SEQ ID NO: 893121 - DNA, 567 bp, Homo sapiens
ttaagtttctgagatataagaatttatatattacatttatgtattcagtggttcttaagcaggagtgtatccagattttgagaaaattgttgctgttgttattgttgctgtcgtttttagagacaggggctcattatgttgacaaggctagactcgaactcctgagytcaagcaatcctcccacctcagcctccctaacagttgggactacagccatgcaccaacatgcctggcttcaaggaaacatttttaaatatacatatccaagctttattagacttactgtatcaaaatcttcaggaataagcctagacttgttgattatttaaaaattttcctcaggttactgggatgcacaattctagctgaaagctagtacaatagacaattacttcagtctcatttctcaccacccagataaccaattccctttcttatttgaagatttggccaaaaagagtaaagagtaggagagagacccatttgctgaaaacaccacataatttttcccggtaacacaacagtatctagtcaactcaaaatccaacttgatcttgttactcattt

SEQ ID NO: 893122 - DNA, 578 bp, Homo sapiens
aagtttctgagatataagaatttatatattacatttatgtattcagtggttcttaagcaggagtgtatccagattttgagaaaattgttgctgttgttattgttgctgtcgtttttagagacaggggctcattatgttgacaaggctagactcgaactcctgagctcaagcaatcctcccacctcagcctccctaacagttgggactacagccatgcaccaacatgcctggcttcaaggaaacatttttaaatatacatatccaagctttattagacttactgtatcaaaatcttcaggaataagcctagacttgttgattatttaaaaattttcctcaggttactgggatgcacaattctagctgaaagctagtacaatagacaattacttcagtctcatttctcaccacccasataaccaattccctttcttatttgaagatttggccaaaaagagtaaagagtaggagagagacccatttgctgaaaacaccacataatttttcccggtaacacaacagtatctagtcaactcaaaatccaacttgatcttgttactcatttatcttccaccttc

SEQ ID NO: 893123 - DNA, 567 bp, Homo sapiens
ggttcttaagcaggagtgtatccagattttgagaaaattgttgctgttgttattgttgctgtcgtttttagagacaggggctcattatgttgacaaggctagactcgaactcctgagctcaagcaatcctcccacctcagcctccctaacagttgggactacagccatgcaccaacatgcctggcttcaaggaaacatttttaaatatacatatccaagctttattagacttactgtatcaaaatcttcaggaataagcctagacttgttgattatttaaaaattttcctcaggttactgggatgcacaattctagctgaaagctagtacaatagacaattacttcagtctcatttctcaccacccagataaccaattccctttcttatttgaagatttggccaaaaagagtaaaragtaggagagagacccatttgctgaaaacaccacataatttttcccggtaacacaacagtatctagtcaactcaaaatccaacttgatcttgttactcatttatcttccaccttcccatccagacactctagatttgaaagcagagctgag

SEQ ID NO: 893124 - DNA, 645 bp, Homo sapiens
atttatcttcattgtagatagcatagtgtagagcggtatttccatactcatctggaatattcggatcagtgccatgttccagcaacattaacgcacattcatcttcctggcattgtacggcctgtcagtattacaccataaacaaattacaaatcctaggatttcaaaataacattccacagctttcaccaactagttatatttaaaggagaaaactcatttttatgctatgtattgaaatcaaacccacttcacgctgacatagttggctactgcatacctttgtcagagctgtcctctttttgttgtcaaggatattaagttgacatcgtctgtccagcaggagttttactacttctgaatttccattggcagaggccagatgtagagcagtcctatgagggtgagaagactttttaggaaattgtagtgcactagctacagccatatcaatgayacacataatcgcaaacactgaatagcctgctattactgtgccttcaaaacaaacatttaactttcccatgaaaaaagcacacgatttattatctctcattactcgctgtattaatgaaagagcagcctatatgaatacaaagagcatagcccttggatgacattcaacttgggctggaatcctacttg

SEQ ID NO: 893125 - DNA, 497 bp, Homo sapiens
caggaccacctttgtaatgtccttctcttttttatctttattcgcatagtctgttttgtcagaaagtaggagtgcaacacctgcttttttctgttttccatttgcttgaaatatttttctccattcctttattttgagcctatatatgccaccgcatgtgagatgggtttcttgaagacagcatactccagtgggtcttggttctttatccagcttgccccgtgtctttcaatgggagcatttagcccattttcatttaaggttagtaatggtatgtgtggattttatcctgtcgtcatgctgtcagctggttattttgcagacttaacgtatgtgkttggtttttagcatcactggactgcgtaattcactgcgttcttcactgcatttttgtagtggctggtgatggttttttctttccatatttagtgcttccttcaggagctcttgtaaggtagatctggtgatattgaattccctcagcatttgcttgtctg

SEQ ID NO: 893126 - DNA, 648 bp, Homo sapiens
attttgcagacttaacgtatgtggttggtttttagcatcactggactgcgtaattcactgcgttcttcactgcatttttgtagtggctggtgatggttttttctttccatatttagtgcttccttcaggagctcttgtaaggtagatctggtgatattgaattccctcagcatttgcttgtctgaaaaggatctyatttctccttcacttatgatgcctaattttgctggacatgaaataatgggctgaaatttcttttctttaatggcagttgatgtgggttggggtgtgtgctgccctcctgtgtgctgtcagtgcaagtaaagcaaaatccacctgtgtaaacacacacagcaaaatgatgtaggaagtttccatataaagggctgcagtatggagaggtaatgtgcaggctggtgcgtggccgtaggtgccaccttgctgcagctctccactgatatggtacggtccactagcacagaaactatggtatgggcatctgagagtgccctgtaagcaggtgtggccaggctggggccctgggagaggcaagcagactaaggagtgctgagatcagaccagccccatctcatgtgcaagactgcccagcctctaaagatcaggtctcagaggagaactctctcaaaa

SEQ ID NO: 893127 - DNA, 648 bp, Homo sapiens
attttgcagacttaacgtatgtggttggtttttagcatcactggactgcgtaattcactgcgttcttcactgcatttttgtagtggctggtgatggttttttctttccatatttagtgcttccttcaggagctcttgtaaggtagatctggtgatattgaattccctcagcatttgcttgtctgaaaaggatctcatttctccttcacttatgatgcctaattttgctggacatgaaatwatgggctgaaatttcttttctttaatggcagttgatgtgggttggggtgtgtgctgccctcctgtgtgctgtcagtgcaagtaaagcaaaatccacctgtgtaaacacacacagcaaaatgatgtaggaagtttccatataaagggctgcagtatggagaggtaatgtgcaggctggtgcgtggccgtaggtgccaccttgctgcagctctccactgatatggtacggtccactagcacagaaactatggtatgggcatctgagagtgccctgtaagcaggtgtggccaggctggggccctgggagaggcaagcagactaaggagtgctgagatcagaccagccccatctcatgtgcaagactgcccagcctctaaagatcaggtctcagaggagaactctctcaaaa

SEQ ID NO: 893128 - DNA, 648 bp, Homo sapiens
attttgcagacttaacgtatgtggttggtttttagcatcactggactgcgtaattcactgcgttcttcactgcatttttgtagtggctggtgatggttttttctttccatatttagtgcttccttcaggagctcttgtaaggtagatctggtgatattgaattccctcagcatttgcttgtctgaaaaggatctcatttctccttcacttatgatgcctaattttgctggacatgaaataatgggctgaaatttcttttctttaatggcagttgatgtgggttggggtgtgtgctgccctcctgtgtgctgtcagtgcaagtaaagcaaaatccacctgtgtaaacacacacagcaaartgatgtaggaagtttccatataaagggctgcagtatggagaggtaatgtgcaggctggtgcgtggccgtaggtgccaccttgctgcagctctccactgatatggtacggtccactagcacagaaactatggtatgggcatctgagagtgccctgtaagcaggtgtggccaggctggggccctgggagaggcaagcagactaaggagtgctgagatcagaccagccccatctcatgtgcaagactgcccagcctctaaagatcaggtctcagaggagaactctctcaaaa

SEQ ID NO: 893129 - DNA, 648 bp, Homo sapiens
attttgcagacttaacgtatgtggttggtttttagcatcactggactgcgtaattcactgcgttcttcactgcatttttgtagtggctggtgatggttttttctttccatatttagtgcttccttcaggagctcttgtaaggtagatctggtgatattgaattccctcagcatttgcttgtctgaaaaggatctcatttctccttcacttatgatgcctaattttgctggacatgaaataatgggctgaaatttcttttctttaatggcagttgatgtgggttggggtgtgtgctgccctcctgtgtgctgtcagtgcaagtaaagcaaaatccacctgtgtaaacacacacagcaaaatgatgtaggaagtttccatataaagggctgcagtatggagaggtaatgtgcaggctggtgcgtggccgtaggkgccaccttgctgcagctctccactgatatggtacggtccactagcacagaaactatggtatgggcatctgagagtgccctgtaagcaggtgtggccaggctggggccctgggagaggcaagcagactaaggagtgctgagatcagaccagccccatctcatgtgcaagactgcccagcctctaaagatcaggtctcagaggagaactctctcaaaa

SEQ ID NO: 893130 - DNA, 587 bp, Homo sapiens
ccagagattagcagcagcaggaagtttctatcatacttaggattgggaaaacaacagaagttactggaacacaaaagcagggtcatgttattaaaaactggggccatggtgagtgtctgtgaccattacctaatatgtcacactgaataaagacagatagcacatgatctgaggcttttttcttccacagatgccttccattggccagaattagcaagtatttagagtgcactgaagactgggagggtctgttctctgtaacagagtgaasagaaggagaaggtgagatgctcattaccttagtgatggcttcaatcgtaccccaaaactcagtatcacacaataaacctgcacatttttattcaatctaaaataaaagttgaatttaaaaaaaaatacagaaagcagtttagactttactaatcagtagtaaagtctttagagctgctcttccaaaagtaagccattgcactgagaaaactgaccattttattcatcagaagaaaaattcaatgaacctttactcactgacaatagtgagaatcagaatgaatgaatcagaatgtctgtcctaactactccctctg

SEQ ID NO: 893131 - DNA, 590 bp, Homo sapiens
tgaaaagcctgaaatgcattcagttgatgcaccagacatcagttactgaagaagcagaggcaatgaacttcccttaacgttgacctaagtggataaacgcatggcaacatgctgagtgacttcaacaatgcagacacactcaatgtcaaaatgccacagggctacccggtgctgcaargctgggactcggtttccgtaagactgtcttaaggcagtgagatttctgatggaactgtggacataagcatatgcccccatacgccactcccactactcactgtaggaacagcagtgtaacatttgtcccggctaatgatgacaaacaatccccaagtccctatgcaaaccaagtgctggggccacacagtggcctgagcaacatacctatgggtagtaactattgagaagacatttccaagggattgccattccaacaggcgtggggaatgctcaacatcaccaatcatcagagatgaggtaccggtgccatcacacgctggtcagagtggccatttgtcctaagtcaaaacataacatgctggtgtggcagcagagaaaagcaaacatggctattctcttggaggtaatgc

SEQ ID NO: 893132 - DNA, 670 bp, Homo sapiens
acattctgtacacaatacataaatacatctaaaaatctatcaggcatatctatggaagtactgaaaccacttttgcaaaactgcaactaaggaaattatgacagtgaaagaaatcagacctaaccgactctatcttgcttctaacccttaagctgtccttgttcattccttggtgtaagctcaactaactttgggaaggaatttagttcacggtttgactctgaaagcaaattgataacaaccctttcctgaaaagaaccccttcttgcctggggagcagtctrcctttgcaggactaacatattagctacaagattagaatgtacagtttaggggtcatgcagtctctggcttcgaaagtctgaacctccccaaactgctcctgcaggtaacatcacatcactactgtaaaacctaagatcagggcttgatacgtgttgcagaccctgcccaggccagtaatctggcccaaccagttgtgccgtcatacccatgaatagaagacagaaagataacctaacttcaaccccctatgattctatctccaacctgactaatcagcactccccacttcccaagcccctacccaccaaatatctttaaaaactctgatccccgaatgctcggggagaccgatttgagtaaaaactttggtctgccatgcagccgg

SEQ ID NO: 893133 - DNA, 670 bp, Homo sapiens
acattctgtacacaatacataaatacatctaaaaatctatcaggcatatctatggaagtactgaaaccacttttgcaaaactgcaactaaggaaattatgacagtgaaagaaatcagacctaaccgactctatcttgcttctaacccttaagctgtccttgttcattccttggtgtaagctcaactaactttgggaaggaatttagttcacggtttgactctgaaagcaaattgataacaaccctttcctgaaaagaaccccttcttgcctggggagcagtctgcctttgcaggactaacatattagctacaagattagaatgtacagtttaggggtcatgcagtctctggctycgaaagtctgaacctccccaaactgctcctgcaggtaacatcacatcactactgtaaaacctaagatcagggcttgatacgtgttgcagaccctgcccaggccagtaatctggcccaaccagttgtgccgtcatacccatgaatagaagacagaaagataacctaacttcaaccccctatgattctatctccaacctgactaatcagcactccccacttcccaagcccctacccaccaaatatctttaaaaactctgatccccgaatgctcggggagaccgatttgagtaaaaactttggtctgccatgcagccgg

SEQ ID NO: 893134 - DNA, 649 bp, Homo sapiens
tctaccttgataaatcggttctgtctaggcagcgggcaaggtgaacgcattgggctgtcacggtacattttatagattgaagacctccccctttttttctctctcagactttcagattcttggtaacttgtttcacaaccctaggcagctgtcaactaaacagccttaaatttgaacgttaagggaaacaattcaggtgaaaatcaaatagcaaaatttactacataaagcacacaaggaaagagtctggtggtgctagagggagacactaatattttcttcgagccaaaytaaacattaaattaaactacagtcttccttaaaaacccaagagtagcctctgttgcaataactactttagtcaagaaaaatcaagtgaaaacagaattcagtcaactgagaaaaaaaagacaaaaaaaacataaacacagttgctcaacaacaacaaaaagacaaggtcttaggagagtaaaacaaacaaaaaaacaaaaaacatgaaggcctttcaaatacaaacatgcgcacacatgcacacacatctggatgttacccttttaattaagctgacttttacacaattgtgctcctttaaacaaaactcttttaatcttattaccatatttcagcgaggacaaaatgctgctaaact

SEQ ID NO: 893135 - DNA, 649 bp, Homo sapiens
tctaccttgataaatcggttctgtctaggcagcgggcaaggtgaacgcattgggctgtcacggtacattttatagattgaagacctccccctttttttctctctcagactttcagattcttggtaacttgtttcacaaccctaggcagctgtcaactaaacagccttaaatttgaacgttaagggaaacaattcaggtgaaaatcaaatagcaaaatttactacataaagcacacaaggaaagagtctggtggtgctagagggagacactaatattttcttcgagccaaactaaacattaaattaaactacagtcttccttaaaaacccaagagtagcctctgttgcaataactactttagtcaagaaaaatcaagtgaaaacagaattcagtcaactgagaaaaaaaagacaaaaaaaacataaacacakttgctcaacaacaacaaaaagacaaggtcttaggagagtaaaacaaacaaaaaaacaaaaaacatgaaggcctttcaaatacaaacatgcgcacacatgcacacacatctggatgttacccttttaattaagctgacttttacacaattgtgctcctttaaacaaaactcttttaatcttattaccatatttcagcgaggacaaaatgctgctaaact

SEQ ID NO: 893136 - DNA, 615 bp, Homo sapiens
aaagaaggctgggcaagggtgggcataggaaacaggtacaaagtgacacgttgcatgagaggaatgaaacctgctgttctattcctcagcaggatgactagggaaaattttaccaaagggtggtcttcaagacagccagaaaggagggttctcgctctcctcactcaaagacatgaaaactctaccaggcatraaaggatgctaaataccctgatttcatccctatacgatgcatgcatggacccaaatgtcccactcgaccctctagttgtacatatttaggacagggccaattttgtttcctaaaaacaacataaacaaacaatgctaaaattcccatgggaccacaaaatgccctgaaactccaaagccatgctgaaacaccaaacgtcagatggacaaaaggctcactatgcagtgaagggcactgggctaggtggctagacacatgcagatggacaacactggagccttaactctcgtcagatacaaaaactaacccaaggtgaatgaaagatttcagcagaatacctcaaactataaaagtcctacaaggaaacctaggacatatctttctcagtacgggctttggaaaagcatttaaacaaaaagcaa

SEQ ID NO: 893137 - DNA, 615 bp, Homo sapiens
aaagaaggctgggcaagggtgggcataggaaacaggtacaaagtgacacgttgcatgagaggaatgaaacctgctgttctattcctcagcaggatgactagggaaaattttaccaaagggtggtcttcaagacagccagaaaggagggttctcgctctcctcactcaaagacatgaaaactctaccaggcataaaaggatgctaaataccctgatttcatccctatacgatgcatgcatggacccaaatgtcccactckaccctctagttgtacatatttaggacagggccaattttgtttcctaaaaacaacataaacaaacaatgctaaaattcccatgggaccacaaaatgccctgaaactccaaagccatgctgaaacaccaaacgtcagatggacaaaaggctcactatgcagtgaagggcactgggctaggtggctagacacatgcagatggacaacactggagccttaactctcgtcagatacaaaaactaacccaaggtgaatgaaagatttcagcagaatacctcaaactataaaagtcctacaaggaaacctaggacatatctttctcagtacgggctttggaaaagcatttaaacaaaaagcaa

SEQ ID NO: 893138 - DNA, 615 bp, Homo sapiens
aaagaaggctgggcaagggtgggcataggaaacaggtacaaagtgacacgttgcatgagaggaatgaaacctgctgttctattcctcagcaggatgactagggaaaattttaccaaagggtggtcttcaagacagccagaaaggagggttctcgctctcctcactcaaagacatgaaaactctaccaggcataaaaggatgctaaataccctgatttcatccctatacgatgcatgcatggacccaaatgtcccactcgaccctctarttgtacatatttaggacagggccaattttgtttcctaaaaacaacataaacaaacaatgctaaaattcccatgggaccacaaaatgccctgaaactccaaagccatgctgaaacaccaaacgtcagatggacaaaaggctcactatgcagtgaagggcactgggctaggtggctagacacatgcagatggacaacactggagccttaactctcgtcagatacaaaaactaacccaaggtgaatgaaagatttcagcagaatacctcaaactataaaagtcctacaaggaaacctaggacatatctttctcagtacgggctttggaaaagcatttaaacaaaaagcaa

SEQ ID NO: 893139 - DNA, 618 bp, Homo sapiens
atcactaatcactccaaacatgtaagtcagaatcacactccaatatcagataccatcaaactccactgagaatattaccaaaaacaggaataacatttttggaaggtagcagccagtgtagacttacagaaagggaaactcttatacgctattgatgccaatgtgaattagtgaatayactgtgaaaaagttgggatgttcctcacactgcgtatgcatttaaagcaaaggaaaccggtaccttaaggagttacctgccttcccatgtttcatgacagtattcgcaatatagaagatatggaatcaacctacctgtccatccatagatgaagggatgaagaaactgcagtatatctgcacaacacaatactcttcatccataattaatgtaattttcatttggagccatatggatgaacctggaaaatatgttaaataaaataagccaagcatagaaaaataaccacagattcatctcacttatatggaatccagaaaactttgccttggataagtagtggttttctgaggagaggggaaggagggaatgggaggattggttgtggaaacaaagttgcagttagttgggacagatacattcttgtgctctataccaca

SEQ ID NO: 893140 - DNA, 629 bp, Homo sapiens
taaaaaaatcaagaggcagaaaaacaaataacccaatcaaacaatgggtacaagacatgaagacgttcttgtaaaaataagatgtacaagtgaccaatagacaaaaaaaaccctcaacatcactcatcatcagagaaatgcaactcacacacacactgagataccatctcccgtcggtcagaatggccatttgtccaaagtccaacatttacatgctgacaaggcagcggaggaaagcaaacaytgctacactcctggagggaataaaaactagtgctcacactatgagaagcggtttggaggttcctcaaaaaacttaacaactaccatccaaatgagcaatcgcataactgggtatctagacagaggaaactaaatcataaacccttctttcaaaatgacacagacatgggtatgttcttggtagtgctattcacaagaaaaaataaaataaaattgacctatgttccctttaacagttgattcgatgttttaaagtgttgtatatagatactgcaaaatcctacacagcttaaacaaattcatgctctcggcagcaagaaggatgaacctgcaggccactatgctaagcaaactaaggaaagaacagaaaaccaaataccacatgt

SEQ ID NO: 893141 - DNA, 629 bp, Homo sapiens
taaaaaaatcaagaggcagaaaaacaaataacccaatcaaacaatgggtacaagacatgaagacgttcttgtaaaaataagatgtacaagtgaccaatagacaaaaaaaaccctcaacatcactcatcatcagagaaatgcaactcacacacacactgagataccatctcccgtcggtcagaatggccatttgtccaaagtccaacatttacatgctgacaaggcagcggaggaaagcaaacattgctacactcytggagggaataaaaactagtgctcacactatgagaagcggtttggaggttcctcaaaaaacttaacaactaccatccaaatgagcaatcgcataactgggtatctagacagaggaaactaaatcataaacccttctttcaaaatgacacagacatgggtatgttcttggtagtgctattcacaagaaaaaataaaataaaattgacctatgttccctttaacagttgattcgatgttttaaagtgttgtatatagatactgcaaaatcctacacagcttaaacaaattcatgctctcggcagcaagaaggatgaacctgcaggccactatgctaagcaaactaaggaaagaacagaaaaccaaataccacatgt

SEQ ID NO: 893142 - DNA, 628 bp, Homo sapiens
ttggctcaagtgatctgcccaccttggccttgcaaagtgcttggattacaggcaccagccattatgcctggccataagaaaacatgcatggcaacatcaaagtgaaaagtttttgcaaggaaaaggaaacaatgaacccaaaaagaaaggctgggagaatgttttgaggaatcacgaatcagctaaggggttgttatggaaaatatacaacacattaacagtactaagtagcaacaaaaaaaccaatgatccatccaaaaatgagcagggaccctgaatagacatttctgcaaagaggacagtaaaccacactcaaggtcccttcccccagtcaggtggccatgactagagggacagagttaggcaggcactgcagggagtggagaaatgtgacmcctacgtcctgatagcagggatacagatttaaaaattcaccagaccgggtgcagtagttaatgcctgtaatcccagcactttgggaagttgaggcgcgaggactgctttgagctcagaagtttgagacaagcccaagcaacatggcgaaaccctgttgctaccaaaaatacaaaaaaaaaaaatagctgggcatggtggcataggccaaaatactgttgaggctgaggctgga

SEQ ID NO: 893143 - DNA, 648 bp, Homo sapiens
caaaaaaaaaaaatagctgggcatggtggcataggccaaaatactgttgaggctgaggctggagaatcccttgggcccagaaaatggaggttgcagtgagctgagatccaccactgcactccagcccgggcaacagagcaagactgtatctccaaaaaawaaaaataaaaataaaaacaattaaaaaatcagcaaaccctggaggttaagttggatcctttccttccatctgaggcttgaaagcaaggcagccaaactggggcctggccccaaaaccccacctgggccaggcttccccttcctcccacagccagagctttcctctccacctacatggggagtctccctcagaaacagccctaaagcctcccacacattccaaactcaaaagccctcagggaatgagtactactgtaaaattaatggcaagatatcaagagagaaaaaaggagtgagaatctagcagaaatgcacagaacattccacaaaacgaaagcttctgtactcaccatgaaagaaaaacgccccaaagaagctgggccacggagaagccacgccgaagcactgtcctcagcagtcagcaccatggacaggaggtgtttcttccccaggatgcgccctcaagttatcccaaagctgctgcagcac

SEQ ID NO: 893144 - DNA, 660 bp, Homo sapiens
tttgtttatgcataccacatatttttaaacttttttcacaggttcattgagatataatttatgtattatttaattcactcaattaaagtataaaattcaggtttttttagtgtattaactgggtgcataaacaatcrcaatataattttagaacacttttatgctccttataagaaaccttgcacccattagcaatcttttcccattttccccactcttcctttaaaaccctcccagccctaggcaatcatccatctacttcctaaggatttgccaattctggaaggatttgcctattctggacatttcatgtaagtggaatcataataatatatagttatgtgtgactcactactttcacttattttttcaatgttcatcctttttggagcatctattaataccgttttctttttcattgccaaataatattttattttatggacagatcacattttattaatccactcctcaactgatggacatttctgttgtttcctactttttgttgccataaacagttgtatgctactttttgtgtaaggcatttgttttaattcctttttgctgtatacataggagttaatttactgagtcgtgataattctatacttaaccttttgaagaacagtttcatttttctgcacgtggcttgccaat

SEQ ID NO: 893145 - DNA, 660 bp, Homo sapiens
tttgtttatgcataccacatatttttaaacttttttcacaggttcattgagatataatttatgtattatttaattcactcaattaaagtataaaattcaggtttttttagtgtattaactgggtgcataaacaatcacaatayaattttagaacacttttatgctccttataagaaaccttgcacccattagcaatcttttcccattttccccactcttcctttaaaaccctcccagccctaggcaatcatccatctacttcctaaggatttgccaattctggaaggatttgcctattctggacatttcatgtaagtggaatcataataatatatagttatgtgtgactcactactttcacttattttttcaatgttcatcctttttggagcatctattaataccgttttctttttcattgccaaataatattttattttatggacagatcacattttattaatccactcctcaactgatggacatttctgttgtttcctactttttgttgccataaacagttgtatgctactttttgtgtaaggcatttgttttaattcctttttgctgtatacataggagttaatttactgagtcgtgataattctatacttaaccttttgaagaacagtttcatttttctgcacgtggcttgccaat

SEQ ID NO: 893146 - DNA, 660 bp, Homo sapiens
tttgtttatgcataccacatatttttaaacttttttcacaggttcattgagatataatttatgtattatttaattcactcaattaaagtataaaattcaggtttttttagtgtattaactgggtgcataaacaatcacaatataattttagaacacttttatgctccttataagaaaccttgcacccattagcaatcttttcccattttccccactcttcctttaaaaccctcccagccctaggcaatcatccatctacttcctaaggatttgccaattctggaaggatttgcctattctggacatttcatgtaagtggaatcataataatatatagttatgtgtgactcactactttcacttattttttcaatgttcatcctttttggagcatctattaataccgttttctttttcattgccaaataatattttattttatggacagatcacattttattaatccactcctcaactgatggacatttctgttgtttcctactttttgttgcyataaacagttgtatgctactttttgtgtaaggcatttgttttaattcctttttgctgtatacataggagttaatttactgagtcgtgataattctatacttaaccttttgaagaacagtttcatttttctgcacgtggcttgccaat

SEQ ID NO: 893147 - DNA, 585 bp, Homo sapiens
acatgctcataaccttaaacataactgaaaagtgtccaaattacaggccttacacattactgtgggcttgaaaaataatatagattgtctttaaagcaggcaagaaaatgtataaacttccagaagaatgagtaaaaataaaaataaaaaaacggttcacaccaaaggtagtaatactaggaataaaagagggctcaacactgcaggttcttagaggcaaaagttaataaagccttgtttttggttgtgactctttgccttaaaacattatacacggccaggcatggtggctcaygcctgtaattccagcactttgggaggccaaggcaggtggatcacctgaggtcaggtgttctagaccagcctgaccaacatggtgaaaccctgtctctactaaacatacaaaaattagccgggcatggtggcaggtacctgtaatcccagctactcgggggtccaaggcaggagaactgcttgagcccaggaggtgcgggttgcagtgagccaagatcgcaccattgtactccagcctgggggcaagagctagacttcatctcaaaaaaaaaaaaagaaaaaagttacaca

SEQ ID NO: 893148 - DNA, 585 bp, Homo sapiens
acatgctcataaccttaaacataactgaaaagtgtccaaattacaggccttacacattactgtgggcttgaaaaataatatagattgtctttaaagcaggcaagaaaatgtataaacttccagaagaatgagtaaaaataaaaataaaaaaacggttcacaccaaaggtagtaatactaggaataaaagagggctcaacactgcaggttcttagaggcaaaagttaataaagccttgtttttggttgtgactctttgccttaaaacattatacacggccaggcatggtggctcatgcctgtaattccagcactttgggaggccaaggcaggtggatcacctgaggtcaggtgttctagaccagcctgaccaacatggtgaaacccygtctctactaaacatacaaaaattagccgggcatggtggcaggtacctgtaatcccagctactcgggggtccaaggcaggagaactgcttgagcccaggaggtgcgggttgcagtgagccaagatcgcaccattgtactccagcctgggggcaagagctagacttcatctcaaaaaaaaaaaaagaaaaaagttacaca

SEQ ID NO: 893149 - DNA, 585 bp, Homo sapiens
acatgctcataaccttaaacataactgaaaagtgtccaaattacaggccttacacattactgtgggcttgaaaaataatatagattgtctttaaagcaggcaagaaaatgtataaacttccagaagaatgagtaaaaataaaaataaaaaaacggttcacaccaaaggtagtaatactaggaataaaagagggctcaacactgcaggttcttagaggcaaaagttaataaagccttgtttttggttgtgactctttgccttaaaacattatacacggccaggcatggtggctcatgcctgtaattccagcactttgggaggccaaggcaggtggatcacctgaggtcaggtgttctagaccagcctgaccaacatggtgaaaccctgtctctactaaacatacaamaattagccgggcatggtggcaggtacctgtaatcccagctactcgggggtccaaggcaggagaactgcttgagcccaggaggtgcgggttgcagtgagccaagatcgcaccattgtactccagcctgggggcaagagctagacttcatctcaaaaaaaaaaaaagaaaaaagttacaca

SEQ ID NO: 893150 - DNA, 613 bp, Homo sapiens; identical to SEQ ID NO: 860821

SEQ ID NO: 893151 - DNA, 614 bp, Homo sapiens
catgggcgttggcctatacttccctgtcacctaaactcagggtgtccccccacccccgtctagaagtgtctctctgttttgcttgtctggatagaatgccagtcactattgggtggtcctccaggccttcttgagttgattcttcattagggttataggactgagcaggacagggactggcctaggtgcaactgaggcctttccagcctggtcagggtccyggccactgtcccttctcttgacccattgcctcactgccaacagggatgggcagctcctaggggtgagggccacctgcctagactctgggtctgggaacagctggtcagctgaagggagctcctgcagaggtttctgagggccgaggcccagtggcagtggttgggatcccagatcccagcctgagacctgccatgtctcccagccctccagcacagagctcagcccaagtcccctctctctgcaggtcccctgaagaccttgccaaagtgtgagatcaccctggagaaactcaagaatgacatggcggtggtgagtgggatgctggggacccctgggggatcggggctccctcaagagctcctgggggcaccactggaggggccttcatggtc

SEQ ID NO: 893152 - DNA, 614 bp, Homo sapiens
catgggcgttggcctatacttccctgtcacctaaactcagggtgtccccccacccccgtctagaagtgtctctctgttttgcttgtctggatagaatgccagtcactattgggtggtcctccaggccttcttgagttgattcttcattagggttataggactgagcaggacagggactggcctaggtgcaactgaggcctttccagcctggtcagggtcctggccactgtcccttctcttgacccaytgcctcactgccaacagggatgggcagctcctaggggtgagggccacctgcctagactctgggtctgggaacagctggtcagctgaagggagctcctgcagaggtttctgagggccgaggcccagtggcagtggttgggatcccagatcccagcctgagacctgccatgtctcccagccctccagcacagagctcagcccaagtcccctctctctgcaggtcccctgaagaccttgccaaagtgtgagatcaccctggagaaactcaagaatgacatggcggtggtgagtgggatgctggggacccctgggggatcggggctccctcaagagctcctgggggcaccactggaggggccttcatggtc

SEQ ID NO: 893153 - DNA, 600 bp, Homo sapiens
gctttaattgctgtgggtatttaagatttagcaggaattggttttcgtttttagacataggagttaaaaagccctgtaactcaatgttgcaaggattttgaaagcatatacaggaagatacatggatgtaataacttcaattttaaaaaatctcagtttttttcctaagtaaaccaaaacttaatgtgacaactttattatataaaagtttttggattttttaaatatataaatccttattgtaacttacattgttcatgacatggtcagactttctgatttgttctgaacatcctttctttttaaacaaccagttattttattttaggactaaacttactacacaggattctttcttatataatagtatttctctttmaactcttttttacctcaaaaactacctctttacaactttctttacatttttttatttcctggttccttttactttgttttatatataactttaaataagctttgaattagacaaaacatgttcttttttttttttttttagaaaaaaagacacttttttggcaagaatgttttcctacaatatatgtgtattggaaaatacccaaataatgaaatatctat

SEQ ID NO: 893154 - DNA, 664 bp, Homo sapiens
acattctgtacacaatacataaatacatctaaaaatctatcaggcatatctatggaagtactgaaaccacttttgcaaaactgcaactaaggaaattatgacagtgaaagaaatcagacctaaccgactctatcttgcttctaacccttaagctgtccttgttcattccttggtgtaagctcaactaactttgggaaggaatttagttcacggtttgactctgaaagcaaattgataacaaccctttcctgaaaagaaccccttcttgcctggggagcagtctrcctttgcaggactaacatattagctacaagattagaatgtacagtttaggggtcatgcagtctctggcttcgaaagtctgaacctccccaaactgctcctgcaggtaacatcacatcactactgtaaaacctaagatcagggcttgatacgtgttgcagaccctgcccaggccagtaatctggcccaaccagttgtgccgtcatacccatgaatagaagacagaaagataacctaacttcaaccccctatgattctatctccaacctgactaatcagcactccccacttcccaagcccctacccaccaaatatctttaaaaactctgatccccgaatgctcggggagaccgatttgagtaaaaactttggtctgccatgc

SEQ ID NO: 893155 - DNA, 664 bp, Homo sapiens
acattctgtacacaatacataaatacatctaaaaatctatcaggcatatctatggaagtactgaaaccacttttgcaaaactgcaactaaggaaattatgacagtgaaagaaatcagacctaaccgactctatcttgcttctaacccttaagctgtccttgttcattccttggtgtaagctcaactaactttgggaaggaatttagttcacggtttgactctgaaagcaaattgataacaaccctttcctgaaaagaaccccttcttgcctggggagcagtctgcctttgcaggactaacatattagctacaagattagaatgtacagtttaggggtcatgcagtctctggctycgaaagtctgaacctccccaaactgctcctgcaggtaacatcacatcactactgtaaaacctaagatcagggcttgatacgtgttgcagaccctgcccaggccagtaatctggcccaaccagttgtgccgtcatacccatgaatagaagacagaaagataacctaacttcaaccccctatgattctatctccaacctgactaatcagcactccccacttcccaagcccctacccaccaaatatctttaaaaactctgatccccgaatgctcggggagaccgatttgagtaaaaactttggtctgccatgc

SEQ ID NO: 893156 - DNA, 655 bp, Homo sapiens
tctaccttgataaatcggttctgtctaggcagcgggcaaggtgaacgcattgggctgtcacggtacattttatagattgaagacctccccctttttttctctctcagactttcagattcttggtaacttgtttcacaaccctaggcagctgtcaactaaacagccttaaatttgaacgttaagggaaacaattcaggtgaaaatcaaatagcaaaatttactacataaagcacacaaggaaagagtctggtggtgctagagggagacactaatattttcttcgagccaaattaaacattaaattaaactacagtcttccttaaaaacccaagagtagcctctgttgcaataactactttagtcaagaaaaatcaagtgaaaacagaattcagtcaactgagaaaaaaaagacaaaaaaaacataaacacakttgctcaacaacaacaaaaagacaaggtcttaggagagtaaaacaaacaaaaaaacaaaaaacatgaaggcctttcaaatacaaacatgcgcacacatgcacacacatctggatgttacccttttaattaagctgacttttacacaattgtgctcctttaaacaaaactcttttaatcttattaccatatttcagcgaggacaaaatgctgctaaactaacaat

SEQ ID NO: 893157 - DNA, 621 bp, Homo sapiens
gttggaaaagaaggctgggcaagggtgggcataggaaacaggtacaaagtgacacgttgcatgagaggaatgaaacctgctgttctattcctcagcaggatgactagggaaaattttaccaaagggtggtcttcaagacagccagaaaggagggttctcgctctcctcactcaaagacatgaaaactctaccaggcatraaaggatgctaaataccctgatttcatccctatacgatgcatgcatggacccaaatgtcccactcgaccctctagttgtacatatttaggacagggccaattttgtttcctaaaaacaacataaacaaacaatgctaaaattcccatgggaccacaaaatgccctgaaactccaaagccatgctgaaacaccaaacgtcagatggacaaaaggctcactatgcagtgaagggcactgggctaggtggctagacacatgcagatggacaacactggagccttaactctcgtcagatacaaaaactaacccaaggtgaatgaaagatttcagcagaatacctcaaactataaaagtcctacaaggaaacctaggacatatctttctcagtacgggctttggaaaagcatttaaacaaaaagcaa

SEQ ID NO: 893158 - DNA, 621 bp, Homo sapiens
gttggaaaagaaggctgggcaagggtgggcataggaaacaggtacaaagtgacacgttgcatgagaggaatgaaacctgctgttctattcctcagcaggatgactagggaaaattttaccaaagggtggtcttcaagacagccagaaaggagggttctcgctctcctcactcaaagacatgaaaactctaccaggcataaaaggatgctaaataccctgatttcatccctatacgatgcatgcatggacccaaatgtcccactckaccctctagttgtacatatttaggacagggccaattttgtttcctaaaaacaacataaacaaacaatgctaaaattcccatgggaccacaaaatgccctgaaactccaaagccatgctgaaacaccaaacgtcagatggacaaaaggctcactatgcagtgaagggcactgggctaggtggctagacacatgcagatggacaacactggagccttaactctcgtcagatacaaaaactaacccaaggtgaatgaaagatttcagcagaatacctcaaactataaaagtcctacaaggaaacctaggacatatctttctcagtacgggctttggaaaagcatttaaacaaaaagcaa

SEQ ID NO: 893159 - DNA, 621 bp, Homo sapiens
gttggaaaagaaggctgggcaagggtgggcataggaaacaggtacaaagtgacacgttgcatgagaggaatgaaacctgctgttctattcctcagcaggatgactagggaaaattttaccaaagggtggtcttcaagacagccagaaaggagggttctcgctctcctcactcaaagacatgaaaactctaccaggcataaaaggatgctaaataccctgatttcatccctatacgatgcatgcatggacccaaatgtcccactcgaccctctarttgtacatatttaggacagggccaattttgtttcctaaaaacaacataaacaaacaatgctaaaattcccatgggaccacaaaatgccctgaaactccaaagccatgctgaaacaccaaacgtcagatggacaaaaggctcactatgcagtgaagggcactgggctaggtggctagacacatgcagatggacaacactggagccttaactctcgtcagatacaaaaactaacccaaggtgaatgaaagatttcagcagaatacctcaaactataaaagtcctacaaggaaacctaggacatatctttctcagtacgggctttggaaaagcatttaaacaaaaagcaa

SEQ ID NO: 893160 - DNA, 643 bp, Homo sapiens
atgttatggatagtgaagtttacacacattggcatttgttttgagtaaattataggtgggaatagctattttatgctgtggacattgtagagtctaagataagtacctttcctgtgaggttagtgaacggaagtttttggctttatcatttgaggcatttgctctgctcctcctactctgccttttgggtgggcttatcaggttgtccattggcaggcagggctctaagtgcagtaacttgatttgctgttgtagttgcttaggcacagcagcacttccgaaagagtgatggcactgctgaggcgcactgagcatcccactgcaggaaacactgaggtgtgcyctaagcaacaaaaacacctctcccaggcacccacgctcgattttggaagcctcttgttacatatgtgtgatcaggaatagctttgaagtaaatccaagatacgtgcatattacaagtataatatctgagtacttaatatatatcaagtttgaagcttggctgttgctgattgatgtttagctctagacttaaagttgctttcaagtgataactgtcttcattttagacttgggaagatacacatgcaaaatgggaacaagcaacaaaactaatccttagctatccaaaagcccaaatgga

SEQ ID NO: 893161 - DNA, 643 bp, Homo sapiens
atgttatggatagtgaagtttacacacattggcatttgttttgagtaaattataggtgggaatagctattttatgctgtggacattgtagagtctaagataagtacctttcctgtgaggttagtgaacggaagtttttggctttatcatttgaggcatttgctctgctcctcctactctgccttttgggtgggcttatcaggttgtccattggcaggcagggctctaagtgcagtaacttgatttgctgttgtagttgcttaggcacagcagcacttccgaaagagtgatggcactgctgaggcgcactgagcatcccactgcaggaaacactgaggtgtgctctaagcaacaaaaacacctctcccaggcacccacgctcgattttggaagcctcttgttacatatgtgtgatcaggaatagctttgaagtaaatccaagataygtgcatattacaagtataatatctgagtacttaatatatatcaagtttgaagcttggctgttgctgattgatgtttagctctagacttaaagttgctttcaagtgataactgtcttcattttagacttgggaagatacacatgcaaaatgggaacaagcaacaaaactaatccttagctatccaaaagcccaaatgga

SEQ ID NO: 893162 - DNA, 625 bp, Homo sapiens
acaagaaaaacctgtcacacattgatattgatagtaattgataaaataatttgccattctttactgcacacaaactaggctgtgacaacaaggtaaccagaaattgtgtatgctctcctataaataaatgtcttactgttttcaaacttacgtttagttcrttttatttgatggttaaagtattttgaatgccttatcttgtgtctgtatctgataacttttttattgtctctatgtctgtataggtacgtttgtgtgcttgggaatatggtccatgcaattcaaataaaaacgaaactgtgtcagttggttgaagtaacgatggcaaggagagatgacctctcattttgccgagagatgaaatttaggtgagttctcaaaagagcaatgtagggtcttgtaaatcttaatttgttgaatgaagtacagaaatagagtagatatctggttattggtaggaagaaagacataaaaagagagcagtttacatgtttgtttttctctgtgtctctcctcaaatttccctaagctttgtgcctgtggcaagcctccctttttctaaaactctgctgtacttgagctaagaatttgattctgtttccaatctgatagcataactaaaggc

SEQ ID NO: 893163 - DNA, 528 bp, Homo sapiens
ccaacctttaatacaaccaggatgtttttactttcccttttttgtgtaagtagaaagcaaacattggtgaggaaggtagaagatgtgtgtcccctcctctttaattttttttttttttttttgcgacagagtctygctctatcacccaggctggagtgcagtggctcgatcttggctaactacaagctccgcctcccgggttcatgccattctcctgcctcagcctccctagcagctgggactacaggcgcatgccaccatacccggctgactttttgtatttttaatagagacagggttccactgtgtttgccaggatggtctctatctcctgacctcgtgatccacctgcctcggcctcccaaagtgctgggattacaggcatgagccaccatgcccagtctaaaatctgactagtttacaaatagcaaagatttctggaaaacaaagttgggttggtttttttttcaggatcagaaactgttatatttgtattccttctctgtggtgatctagaaaaagctaaag

SEQ ID NO: 893164 - DNA, 541 bp, Homo sapiens
ctgcataatcttagataagtttatttttccaaatctgttgcttcatatgttaaagctggggtgtgtgcttatgaaaactgtccacctctcctataaagtgttttgtgacctataaagttgtgtaaggagtaaattkgagattttctttttttctttctttctctttctgggggatatggcactgtcagtttcagattttcagtccttttagcttcttacttagacctactggagctcctcctggccttcattttcgcctggtgggaagcctagctccaggacagatgagtacacagtacatcagggcagagcatccatttactccattatgaaggtcttgtctgtctatatgccatcagctttgtcaaagagcacttgggtttgacttgtcttttgatactcctctgtttctgcggcttagactaccatgtattaagtgatgctttttgaattgcggattttccaatctcctcatagatagtccgcagacgtttcagacttgaaatgtccaaaacttaattcagtatctcttccaatcaac

SEQ ID NO: 893165 - DNA, 541 bp, Homo sapiens
ctgcataatcttagataagtttatttttccaaatctgttgcttcatatgttaaagctggggtgtgtgcttatgaaaactgtccacctctcctataaagtgttttgtgacctataaagttgtgtaaggagtaaatttgagattttctttttttctttctttctctttctgggggatatggcactgtcagtttcagattttcagtccttttagcttcttacttagacctactggagctcctcctggccttcattttygcctggtgggaagcctagctccaggacagatgagtacacagtacatcagggcagagcatccatttactccattatgaaggtcttgtctgtctatatgccatcagctttgtcaaagagcacttgggtttgacttgtcttttgatactcctctgtttctgcggcttagactaccatgtattaagtgatgctttttgaattgcggattttccaatctcctcatagatagtccgcagacgtttcagacttgaaatgtccaaaacttaattcagtatctcttccaatcaac

SEQ ID NO: 893166 - DNA, 529 bp, Homo sapiens
tgaattcatacaaccaagagaagccctgaccagaacctgggttctagggtgtaagagacagcatctggccagttttttctttatagtttcacgaatgttatgattgctaatattatggtatttctattattatatttgtgaaagcatggttttctgagttacaagtatgtgaaagacacatgtatacwtgtaatgaaatgtatagttttccttttatttctgtaaagcaagttagcttgtattgatacatgatgagtttttttcagaggtttcagaaacaggttagaaaatgcttccatagtatttcatagattctttataatttgagcagtttttcagggttttcagtccatttaaaccatttatctaatgaacagtaaatagaaactctgagctctacattctcttgtaagctttctttttctgttatagttgagcaaatttgttgacattcttatatttttgcattttgattttttgcaaaatgtttggttaaaatactttgggggaaaaatgcaagtactttgtt

SEQ ID NO: 893167 - DNA, 616 bp, Homo sapiens
aagaacattgatgagtgccaggcacggtggctcatgcctgtaatcccagcactttgggaggccgaggtgggcggatcacctgaggtcgggagttcgagaccagcctggccatcatggagaaaacgccatctctactaaaaatacaaaattagcccggtgtggtggcacgtgcctgtaatcccagctacttgggaggctaaggcaggagaatagcttgaacctgggaggcggaggttgcagtgagccgagatggcgtcattgcactccagcctaggcaacaaaagcaaaactctgtctcaaaacaaatacatatatggaagcaaactaagtgtctatagatggatgaatggatgaataaaatgtggtatatatatgcagtggaatgctattcarccttcaaaagaaggaaatcctgccgtttatgacaatgtggatgaacctggaggacatatgctaagtgaaataaatcagacacagaaagacaaatatcatgtgatctcacttctctgtggaacctgaaaaagtagaattcacagaaacagagtggaagggtggttaccagagggcagggagcgggggaaatgggaagttgttcgtctaagggtagaaactttca

SEQ ID NO: 893168 - DNA, 544 bp, Homo sapiens
tacaaaactctagaataaacatgacgcaaaatgttgaaagttctcctttgaggtcaagaacagggcacacttctagtcagcactgctggaagttctatgcaatagaataagggaagaaacataaataaaagttatacrcaattgaaagaaagaaataaaactatttctggacagttttatacctgaaaaactgaaaataatctacaaactattagaattaataaatttatttagcaaggttgctgggtataaggtcaatataaaaaatggactatattcataaaaactaccatcaaacaattagaaaatgaaaaacagctgagatcatgccactgaactccagccagggcgacagagctagactccatctcaaaaaaataaaaaaagttggtgcggtggctcaggcctgtaattccagcactttgggagactgacacaggcgcatcgcttgagcccaggagtttgacaccagcctaggtaacatagtgagaccccatctctctaaaaaagtcatttataatagcatctcaaagtagaagcagct

SEQ ID NO: 893169 - DNA, 679 bp, Homo sapiens
gtggcacacctgtagtctcagctacttgggaggctgaggcaggaggatcacttgagcacgggtgctcaaggccagcctgggcaacatggtgagacccatctcttaaaaaataaaataaaatacaatttaaaataggcatatatgacaatggaaaccaattatagaagagattatatctatatgtatatatataattggattacaggcatgagccaccactcctagcaactttcaattttataaactgagtttttaacaacattattaacttaaaaataaacgtgtttgttttgaaatgggcaaaacaacaaaaatattttgttttggaaaataaatttatatgatcctgtaaatgtgtaagatacttaggaaagaaaaataaagatgagttggcatcttggaagagcaggctcactcaacagcagtgcttgtttcctcctccttcagaggggtcacagctgatggccaggtaacccggagaagggttttcctggggtcaccataacttgttccattcacrcacctttatctgtattctcagctcattttacctatttaaaagacaaaagtcttttaagaaagttttcttaatttaattcgcatttcccttaatgattctaccaagacccaggcagatgtaaaaatctctttgtgagtatactgtttcctgccttaggaa

SEQ ID NO: 893170 - DNA, 673 bp, Homo sapiens
ctgcgcatcgatgaccagacagtcaaggtgatcaaccagtaccaggtggtgaaaccaactgctgaacgcacagcccatctcctgtattactgccgagtggacctgctgtaaaccctgtgtgcgctgtgtgtgagcccagtgtccgctttgtaggacaccacctcacactcacttyccgcctctctttattggctctttagagagaaactctttctccctttgcaaaaatgggctagaatgaaaaggagatgccttggggttcgtgcacaacatagcttctgttgactctaactttgaaatcaaaatcatttggttgaaacagactgtcgcttgattttaaaaaacacacaaaaacccatatttctgaaataatgctgattcctgagataagaaagtggatttgatccccagtctcattgcttagtagaataaatcctgcaccagcaacacttgtaaatttgtgaaaatgaattttatcttccttaaaaaagaaatgttttaatccatcacatttttcttccctaccctttagtttttgataaatgataaaaatgagccagttatcaaagaagaactagttcttacttcaaaagaaaaataaacataaaaaataagttgctggttcctaacaggaaaaaaattagtaattgtgctgagggaaactgcttacata

SEQ ID NO: 893171 - DNA, 673 bp, Homo sapiens
ctgcgcatcgatgaccagacagtcaaggtgatcaaccagtaccaggtggtgaaaccaactgctgaacgcacagcccatctcctgtattactgccgagtggacctgctgtaaaccctgtgtgcgctgtgtgtgagcccagtgtccgctttgtaggacaccacctcacactcactttccgcctctctttattggctctttagagagaaactctttctccctttgcaaaaatgggctagaatgaaaaggrgatgccttggggttcgtgcacaacatagcttctgttgactctaactttgaaatcaaaatcatttggttgaaacagactgtcgcttgattttaaaaaacacacaaaaacccatatttctgaaataatgctgattcctgagataagaaagtggatttgatccccagtctcattgcttagtagaataaatcctgcaccagcaacacttgtaaatttgtgaaaatgaattttatcttccttaaaaaagaaatgttttaatccatcacatttttcttccctaccctttagtttttgataaatgataaaaatgagccagttatcaaagaagaactagttcttacttcaaaagaaaaataaacataaaaaataagttgctggttcctaacaggaaaaaaattagtaattgtgctgagggaaactgcttacata

SEQ ID NO: 893172 - DNA, 673 bp, Homo sapiens
ctgcgcatcgatgaccagacagtcaaggtgatcaaccagtaccaggtggtgaaaccaactgctgaacgcacagcccatctcctgtattactgccgagtggacctgctgtaaaccctgtgtgcgctgtgtgtgagcccagtgtccgctttgtaggacaccacctcacactcactttccgcctctctttattggctctttagagagaaactctttctccctttgcaaaaatgggctagaatgaaaaggagatgccttggggttcgtgcacaacatagcttctgttgactctaactttgaaatcaaaatcatttggttgaaacagactgtcgcttgattttaaaaaayacacaaaaacccatatttctgaaataatgctgattcctgagataagaaagtggatttgatccccagtctcattgcttagtagaataaatcctgcaccagcaacacttgtaaatttgtgaaaatgaattttatcttccttaaaaaagaaatgttttaatccatcacatttttcttccctaccctttagtttttgataaatgataaaaatgagccagttatcaaagaagaactagttcttacttcaaaagaaaaataaacataaaaaataagttgctggttcctaacaggaaaaaaattagtaattgtgctgagggaaactgcttacata

SEQ ID NO: 893173 - DNA, 623 bp, Homo sapiens
aggtgctcctggatgtcctaattaattttgaattaacaaatcataagtatgactttttctctgtttttttttaaaaaaactttgttccttaattgcatgcaaaatgtatctgttgagataaaataatttcatacctatttctaattagttgctcaaataattgttatccttggagagcagtaaatgacagatgaacattaaaaattttgtaaaaatrtcaattgcagtttgttcatatatcacgtagcaattaccagccttgtctggctgacatatacctgagggagtgtggaaagtgccgaatgcctgaagataaatcaactcttcctctgggaggtgagtttattcttctttgaaacccatgggtatttagtgtctggagatggtggtatggagtacatagagaagcccttcattaggagtgaactcttacttattttctctgatgaactctcagactattttgctgcctcaaattgcactacgacctgtcaggcgttagagagatcagcagtggagacagtcccaggaaacagtctggaaacaaaagggtctgcccctctcctgggtacatcaaatatggaagcatcacatttgccaagagacaacaccataagaggata

SEQ ID NO: 893174 - DNA, 410 bp, Homo sapiens
agccttgtctggctgacatatacctgagggagtgtggaaagtgccgaatgcctgaagataaatcaactcttcctctgggaggtgagtttattcttctttgaaacccatgggtatttagtgtctggagatggtggtatggagtacatagagaagcccttcattaggagtgaactcttacttattktctctgatgaactctcagactattttgctgcctcaaattgcactacgacctgtcaggcgttagagagatcagcagtggagacagtcccaggaaacagtctggaaacaaaagggtctgcccctctcctgggtacatcaaatatggaagcatcacatttgccaagagacaacaccataagaggataactgacagcagtcaattctatcctgaaaatgctctgaggctt

SEQ ID NO: 893175 - DNA, 617 bp, Homo sapiens
tggtttaaacacgcttgccatcatctggtatcctgctagattagaacctcttaaaagcaaattggttttctttcaaagaccaacctgactccaaagacagatacggaatcctgcttcttctgctgcataaagaaatctcaaccttcattttacttgaacacagaccgaagtgttcctacttctgcgttgtctatgagctagttctayggatgttccactcagatttaaagctttttattgcacaggacgtggatatgaagcctaactcttgtatctgatggcaaggcatatgttgtagccacagtactggctatggtccctttgctgaaagaagctacagaagcactgattcaagctgtgtttgtgctagaagttttaatcttgtagatttgtgaggatggctctttttccttcataatagattacatgtacaagcaagtcagggccatatactggagacaggctaaagctgcttttcccttcaagaaagtttcctacagataaggtatttatgagcattgagaaagtcaggacgtgtactctaaatcacacagagtgttaattccacaggaaggcaatgccagacattggaagaggatcacattcaacttctaata

SEQ ID NO: 893176 - DNA, 633 bp, Homo sapiens
gtccgtgtgctttctttcaaaacaatatatagcatttcccttgctagtaaacccccaatcttctctttgtccttcacacatatagaagaccaccgtggttttcagttttgttcagaactacaattctgtgattcccaaataaattgtataatttagagatccatctttattttgacttcaatagtggtgataaattctgatacaatattcaagaatatgttttataacaatactaagtcaatttagaaatgcattttagtgtgatataaaatccttaacttttctcctacactgacattatgtatgattttgttattattttacaagcacttaaaaattctctattttacataaggtttatattagatataattttgtgaggaaaataaaagttcggttttctatttgcattgtgctaattcagactgcacttgsttcttcatgcacactgtataagctaaagtttagacaaattattgtaaaaactgatacacatatagaccattatagtgttatttttaaaagcacaagaaactactttaaaagatcacaaggagattacagcaaatgaatcttcatattcattacctcaatgaaatataatttaacactagtttcgatttttttccaaaa

SEQ ID NO: 893177 - DNA, 631 bp, Homo sapiens
atgcattttagtgtgatataaaatccttaacttttctcctacactgacattatgtatgattttgttattattttacaagcacttaaaaattctctattttacataaggtttatattagatataattttgtgaggaaaataaaagttcggttttctatttgcattgtgctaattcagactgcacttggttcttcatgcacactgtataagctaaagtttagacaaattrttgtaaaaactgatacacatatagaccattatagtgttatttttaaaagcacaagaaactactttaaaagatcacaaggagattacagcaaatgaatcttcatattcattacctcaatgaaatataatttaacactagtttcgatttttttccaaaagactaattttcaagtgaaagctttagatctttgaaagtaatagaattaaagataaagatagaaaagatacataattcatttcagcagttttctgagaaataccatattttccaaaatatatatgttcttataagaaatggattctctttaggctattagattatcaatcttctacaataggccaattttcaaagcactaggcctatgttcactcaaccagtctcatgaagcaaaaactgaattaag

SEQ ID NO: 893178 - DNA, 619 bp, Homo sapiens
aatgaaagatgagttagaaaaaccagaggctttagttcaaaaatgacaatctttggtactgcagcaaggaaataactagctggtgaaattgatgactccacctggctttatctcggtaatgttctgaaatacatgcaatgaacaacttgacattgtttgatgttcttaattctttacagccatctctattggtrgtcttaatagatcagatcaatcagaaatgatcatattatgaaatgtatatcacttcacatgacttatctggaaaatgtgcttgtacttacttgcaccatctcaagttccaagagccaaaaacatacacatgctcatggaggagaatttcctttctgattttagaacagtctgaaagggtgtgaaaaaatgaaaaaagaagggggagcttacaaataacaaaaatgtatatccaaatgaaagttagaatgtctatggaactagtagtagtaacaacagtagacaaaagataggatgtagatgttaagaagatgtctacaagggaagcacaagactccaaatgctcttgctactaaaatgcagattcaaggtttaccatctgtaatattctgctgccatgtacatctatggccactagtactgtcta

SEQ ID NO: 893179 - DNA, 619 bp, Homo sapiens
aatgaaagatgagttagaaaaaccagaggctttagttcaaaaatgacaatctttggtactgcagcaaggaaataactagctggtgaaattgatgactccacctggctttatctcggtaatgttctgaaatacatgcaatgaacaacttgacattgtttgatgttcttaattctttacagccatctctattggtagtcttaatagatcagatcaakcagaaatgatcatattatgaaatgtatatcacttcacatgacttatctggaaaatgtgcttgtacttacttgcaccatctcaagttccaagagccaaaaacatacacatgctcatggaggagaatttcctttctgattttagaacagtctgaaagggtgtgaaaaaatgaaaaaagaagggggagcttacaaataacaaaaatgtatatccaaatgaaagttagaatgtctatggaactagtagtagtaacaacagtagacaaaagataggatgtagatgttaagaagatgtctacaagggaagcacaagactccaaatgctcttgctactaaaatgcagattcaaggtttaccatctgtaatattctgctgccatgtacatctatggccactagtactgtcta

SEQ ID NO: 893180 - DNA, 621 bp, Homo sapiens
tctatggaactagtagtagtaacaacagtagacaaaagataggatgtagatgttaagaagatgtctacaagggaagcacaagactccaaatgctcttgctactaaaatgcagattcaaggtttaccatctgtaatattctgctgccatgtacatctatggccactagtactgtctaaaaggaggatatatattaagaaatcatcaaaaaggactgcatagcagaaacttctgatatcaagggatcaacttaactacaattatatacaggtgccaatttcctctggagtaaactaccacactgggcctcatgtaccagttagataatccaagtcagcctttattgcataacctatctaaaagattggactctacattttggctctgcagaactgagagaagaaatgtataaatargatagtgatattgcctttgtctatgggaattcttgagtctaataaaaactctgggaaaaatctaacttcatgattacactcgggcacatagatgattaatacgaatgaagtaacaaccataaatacaatcataaccacaagaacaacagtaattcaaattttctcacttcatagatgttcttacaatgctttattggtatcttgtag

SEQ ID NO: 893181 - DNA, 661 bp, Homo sapiens
aaaggcaaacacaccacactctcctctgttcaatgtctgccatccttgtctttttggcctctgactcttccctatactactgtctatgcacttgagatcttcactgatatagcttggctctgtatttattgataagaatatctcttttctcttagactaggcatggccaaaaggttaatctggattcaaagattaatgacaatgaccactcagtttttattcaagatcaattttatttgttgtaaaaacaaacatgggttatgttccagacaaacagatataagtgagtagacttatgcctttgtgcctccttgactcttcacaggttgcaaaaacaaatcctgccagcaggaggtggcaggttgctgaggtggctggttgctctttgagccatcttggccttgtctggcatgcacaggccctggcactgcaaaatattcagggagtaagagtgttgcacaaaggattttaccaacctcgtcacattaagcagcrttcaaggatttgctgaccaccacttaaacaaatgttgtgttatgctatagcaatgaacttacttgttctatttctaaacacaacattgggttcacacacaggcctggacaaagcttcccacttctgaactatttactgatcttcctattctcaaagaatgcaagat

SEQ ID NO: 893182 - DNA, 579 bp, Homo sapiens
tcccacttctgaactatttactgatcttcctattctcaaagaatgcaagatgaatgatgtgcaataccatggctatggcatgtgacttttctagacctggatggttagtgtcccaatatttaactgattttttggggggtgaaaatatgccaacagttcttccttctatcatccccatcactaccatacatgtaatgacataatcatgtcaaagtgtgtcctcagaatcactattcctagctgagtatactaaggctttctatctaggtcagttcattgtgtctgtgtctcctctaaaccctccttcatcaygcctaccttgaggaattcagcaagtgatcattcacacaagctaaaggattttagctttctctgccataaagattattgctaaaatacacaccatacaacaaaccaacccatttcccacaaatcttactgtctgacttctcacaaaatacataatgacttttattgtgtctcttccttctgtgtttctctttcctaactgaactgttctttatccatgccttcttcctatcctgacatattttaaaacctttagcatttctgcctata

SEQ ID NO: 893183 - DNA, 680 bp, Homo sapiens
caagctaaaggattttagctttctctgccataaagattattgctaaaatacacaccatacaacaaaccaacccatttcccacaaatcttactgtctgacttctcacaaaatacataatgacttttattgtgtctcttccttctgtgtttctctttcctaactgaactgttctttatccatgccttcttccwatcctgacatattttaaaacctttagcatttctgcctataatatttgggttttctccttttcctatctttatttaataagtcccatacaaatattttccctgtaatcacaatgttttcttttcactttgcccaagaactgagttatgagttccaaatttggataaactctacattggctaagttttagtcatttgcattgctaagaaagatggcaattcaacatgctgaagatgacttcctcccttataaaggggctaacacagagggcaatactgttcatgcctctgagtcttgatcacaagaattgctttaggcaattacaatcatgtctcctctgacacatcatattattcaagtgagacagagaaagaatatgtcctatgtcacacagctgggtggtgacagctgctttagcatcagcacactgcgttccctctgatttcttcattcatctctaagtagcagtaaatccggtcctgaatactgac

SEQ ID NO: 893184 - DNA, 680 bp, Homo sapiens
caagctaaaggattttagctttctctgccataaagattattgctaaaatacacaccatacaacaaaccaacccatttcccacaaatcttactgtctgacttctcacaaaatacataatgacttttattgtgtctcttccttctgtgtttctctttcctaactgaactgttctttatccatgccttcttcctatcctgacatattttaaaacctttagcatttctgcctataatatttgggttttctccttttcctatctttatttaataagtcccatacaaatattttcccygtaatcacaatgttttcttttcactttgcccaagaactgagttatgagttccaaatttggataaactctacattggctaagttttagtcatttgcattgctaagaaagatggcaattcaacatgctgaagatgacttcctcccttataaaggggctaacacagagggcaatactgttcatgcctctgagtcttgatcacaagaattgctttaggcaattacaatcatgtctcctctgacacatcatattattcaagtgagacagagaaagaatatgtcctatgtcacacagctgggtggtgacagctgctttagcatcagcacactgcgttccctctgatttcttcattcatctctaagtagcagtaaatccggtcctgaatactgac

SEQ ID NO: 893185 - DNA, 680 bp, Homo sapiens
caagctaaaggattttagctttctctgccataaagattattgctaaaatacacaccatacaacaaaccaacccatttcccacaaatcttactgtctgacttctcacaaaatacataatgacttttattgtgtctcttccttctgtgtttctctttcctaactgaactgttctttatccatgccttcttcctatcctgacatattttaaaacctttagcatttctgcctataatatttgggttttctccttttcctatctttatttaataagtcccatacaaatattttccctgtaatcacaatgttttcttttcactttgcccaagaactgagttatgagttccaaatttggataaactctacattggctaagttttagtcatttgcaytgctaagaaagatggcaattcaacatgctgaagatgacttcctcccttataaaggggctaacacagagggcaatactgttcatgcctctgagtcttgatcacaagaattgctttaggcaattacaatcatgtctcctctgacacatcatattattcaagtgagacagagaaagaatatgtcctatgtcacacagctgggtggtgacagctgctttagcatcagcacactgcgttccctctgatttcttcattcatctctaagtagcagtaaatccggtcctgaatactgac

SEQ ID NO: 893186 - DNA, 763 bp, Homo sapiens
tgtggaattttccacttgtggcatcatgtcagcactcaagacattttggattttggagaatttcagattttggattttcgagtaggtgtgttcaatctgtatatatgggccagattaagttgtttcctttaatccttggctgaaggaagcacagaagactttggggcctcaatctctcatatgcagtgacattctcaaagccattgactcagcttctcacctgggtttccttccagtgagccacagatagaagtcacaggtgatgacaggggcctgctggctgatggcattccagtactgggttgtgaagttgctggtggtgaaatcagcatatggcctcatcaaagctctctcaaatggaattggaatttcaaaggttgccaagacctggaatcctgggggaaaaaaagagagtaagtgctagaggagaataggaraatatatgcccatcatagtggaaggtatttataatgggtcacaacaataaagacgaaggatttgctgtgtagagtcaagaatcaatttctgagaacaaggtaaagatttttatgctaggcaagtggttatctgcaaaatgaaacaatgtgaatgggttaagaattggaccatttatttgaaacatctactctaaaacaaattcttggggaaacacatgtagtcaataaaagggggtactgttcagaaaaacataaatccacatttaattctaaggttatctagtttattctgaaagccccaagacagaggctagaaactttatttt

SEQ ID NO: 893187 - DNA, 632 bp, Homo sapiens
ctttggccatcacatatcaaatagcagccttcccacaatactatttacttctttaatctgttttatttttctgcaatcactcaaccatatctaatgcatatttctcctttctaagatttaagtaccataacaaaattttgtctgttttgtttgaacctatacagtaccttgaaaagtggctgacaggtaatcagtgcctaataaacattttttgactaaacgaatcaataaatrtctcagcaacatacacttactttccttttctgaaatctatatcaatccttcaatccttcctttagccatttcaaatatatttatttagcatttaacacttgccaggcactgtggtagatgctgaggtaaaaaaaattacatatgatatattgtctttagagaactggcaatctggtgggagatgtggacaattcgtgattacaatattttgcctgagtattctgctagaggccagtacaatatgcactggaggaatacaaaagaagcatctagttctgtctgggtgccaggaaggggaggggtggggctgggttaggaaaggctttctgagaaagctgtccaaatggtaatagcaagcatttactaaagtgttcactgttctaaccactgtactaagc

SEQ ID NO: 893188 - DNA, 653 bp, Homo sapiens
acaaagcagcataataaagagtcaataggctgggcatggtggctcatgcctgtattcccagcacttttggaggctaaggtgggtggatcacctgaggtcaggagttcaagaccagcctgaccaacatggagaaaccccatctctactgaaaatataaaattagccaggtgtggtggcacatgtctgtaatcccaactactctactcaggaggctgaggcaggagaactgcttcaacccgggaggcagaggttgtggtgagccaagaaattgccattgtactccagcctgggcaacaagagtgagaccccatctcaaaaaaaaaaaaaaaaaaaaaaaaaagagaaagaaagaacaaagaaaaaagtcaataaaggccaaagaagtaaatacattttaaaacasacaaaatcttaggaaaagagacaaatataatttactaaaactgattccagcataaaatagagcctgcaaaattctttaactattaaagacactgaagcaataaaaagtcttctcacaaaaaattatgaatccagataatttaaaggtgcttttcacttactgtagccttgtagtatagtttgaagtcaggtagcgtgatgcctccagctttgttcttttggcttagaactgacttggcgatgtgggctct

SEQ ID NO: 893189 - DNA, 653 bp, Homo sapiens
acaaagcagcataataaagagtcaataggctgggcatggtggctcatgcctgtattcccagcacttttggaggctaaggtgggtggatcacctgaggtcaggagttcaagaccagcctgaccaacatggagaaaccccatctctactgaaaatataaaattagccaggtgtggtggcacatgtctgtaatcccaactactctactcaggaggctgaggcaggagaactgcttcaacccgggaggcagaggttgtggtgagccaagaaattgccattgtactccagcctgggcaacaagagtgagaccccatctcaaaaaaaaaaaaaaaaaaaaaaaaaagagaaagaaagaacaaagaaaaaagtcaataaaggccaaagaagtaaatacattttaaaacacacaaaatcttagraaaagagacaaatataatttactaaaactgattccagcataaaatagagcctgcaaaattctttaactattaaagacactgaagcaataaaaagtcttctcacaaaaaattatgaatccagataatttaaaggtgcttttcacttactgtagccttgtagtatagtttgaagtcaggtagcgtgatgcctccagctttgttcttttggcttagaactgacttggcgatgtgggctct

SEQ ID NO: 893190 - DNA, 638 bp, Homo sapiens
tattcgtctaaaattctcttttttggttgtgtctctgctcggctttggtatcaggatgatgctggcatcataaaatgagttacggaggattccctctttttctattgattggaatagtttcagaaggaatggtaccagttcctccttgtaccctggtagaattcggctgtgaatccatctggtcctggactctttttggttggtaagctattgattattgccacaatttcagctcctgttattggtctattcagagattcaacttcttcctgctttagtcttgggagggtgtatgtgtcaaggaatttatccatttcttctagattttctagtttatttgtgtagaggtgtttgtagtattctctgatgrtagtttgtatttctgtgggattggtggtgatatcccctggccaggtactcctctgagacaaaacttccagaggaacgatcagacagcagcttttgtggttcacgaaaatctgctgttctacagccaacgctgctggcacccaggcaaacagggtctggagtggacctctaggaaattccaacagacctgcagctaagggtcttgtctgttagaaggaaaacaaacaaacagaaaggacatccacaccaaaaaccaatctgtacttcac

SEQ ID NO: 893191 - DNA, 694 bp, Homo sapiens
tatcaaaaacataacaattcaaactctcttttaattaaagttggttcttgtattggtagtaagtagggagcttggctggagagatgtgtacaagtgtagatggaagtccccgggtaaagctcttgtttgggaagattcatttgattgtatgacatgttcctccattctctctctctctgtctctgtcttttgttgttgttgatgttgttgttgttgttgttgttgttgttctaagaatctagaatgaaaaccacaaggccagggtttgctaccatggaccactctctcctttgcagaaagagctgcttctgagtgaaatagaaggacaagggtgycaaattaactcctctccacaaagtgaccccacgtggaaaagtacttgagaagctctgtaaagacgtggtaaaagcttaccaaagacagtagcattatcctttccttacacacaaagtggagggaaagcgtgggtaagtggtgtgtctaaaagcattgctttaaattatacatccatttgtaaacattcattttttcttaactacatgtcgtttgtaaattggacaaaaaatgcatatttgtcatggaaaaattaggaaataaagatattagcataaaagaggaaacaacgaatcttaattacccataatcccatgacttcatgtttgtgtgagattatataataatattgtttcatgat

SEQ ID NO: 893192 - DNA, 668 bp, Homo sapiens
ccgggtaaagctcttgtttgggaagattcatttgattgtatgacatgttcctccattctctctctctctgtctctgtcttttgttgttgttgatgttgttgttgttgttgttgttgttgttctaagaatctagaatgaaaaccacaaggccagggtttgctaccatggaccactctctcctttgcagaaagagctgcttctgagtgaaatagaaggacaagggtgccaaattaactcctctccacaaagtgacsccacgtggaaaagtacttgagaagctctgtaaagacgtggtaaaagcttaccaaagacagtagcattatcctttccttacacacaaagtggagggaaagcgtgggtaagtggtgtgtctaaaagcattgctttaaattatacatccatttgtaaacattcattttttcttaactacatgtcgtttgtaaattggacaaaaaatgcatatttgtcatggaaaaattaggaaataaagatattagcataaaagaggaaacaacgaatcttaattacccataatcccatgacttcatgtttgtgtgagattatataataatattgtttcatgatctgccattttcactcagtgacatattttgcacgtgaaatacattttacttaaatatttgtataatttgagtagttattacctt

SEQ ID NO: 893193 - DNA, 656 bp, Homo sapiens
catctccaactaggcaagttaccttttctgcctgtttcactcttcaaaaattagagatacaataataccgacctgatttctttgggtttcataagtaggaaataaaataatacatagaaaagacttggaatattgcctgacacaaaatagttgacttaaaacgttaattattattattttcaatgttgccaagagaacaaaccctgtggtggtgaatttgcatatgyaaacctgttaaactaatacacagtctttcttttctcataatattgtcgcacttgcaccttatgtcctaagttttctagtaatcttgaatgtacataatgtttggttgtacaaataaattttcctttgtgagggaattagttgtaattgagggtagagtcaaagtttgttcagcttagtgagcatttaaagggagctaataaacaccatgacttgtatttgaaagtagaaaataccgactttcaattgtcatttcccccaaggaaaccattaaccagcacaattatttttaaatatcaacctgaaataacactgtatttttattgctattctttctctctccttctctctctttgggatacagtttggctttgaaaaaatatggtatatatgcagtgtttggtcaaataatttagcactatggaaaaggt

SEQ ID NO: 893194 - DNA, 607 bp, Homo sapiens
cagtctttcttttctcataatattgtcgcacttgcaccttatgtcctaagttttctagtaatcttgaatgtacataatgtttggttgtacaaataaattttcctttgtgagggaattagttgtaattgagggtagagtcaaagtttgttcagcttartgagcatttaaagggagctaataaacaccatgacttgtatttgaaagtagaaaataccgactttcaattgtcatttcccccaaggaaaccattaaccagcacaattatttttaaatatcaacctgaaataacactgtatttttattgctattctttctctctccttctctctctttgggatacagtttggctttgaaaaaatatggtatatatgcagtgtttggtcaaataatttagcactatggaaaaggttgtgaaccagtcatagtatttgaggttgtaagaagaaacctttgcaaaggtagtggctgcacaaatgtattaacttagtaatacaaagtagggagttctgaaactgtggtggaaatattgcctgccttgactacctgttcttcttgagtccgtttgctgatcagaactcaggtaacttaaaagtcatacaccctggaa

SEQ ID NO: 893195 - DNA, 325 bp, Homo sapiens
gtaaagaaagaggaaagatcctcagcggctatacaagtgagagatatggcagagttctaataagattgagtaaaagcttgatactgtcttacatgaaaggagcaaataattgttctacctggaatgtccgggccccaattcacaaatgcattcttaccttttgaactgaataatgatctctttcccrataaactgttctaagacaaaaaatctgaaaggaaaattgttgcacacacatcatattcttatattctgtattttctgggacagtctgtttcagattagatgatgagtcctaatttaggtttgcaaaatattatcaagg

SEQ ID NO: 893196 - DNA, 537 bp, Homo sapiens
ccatagcatagaacaaagtttcaattttctgcatccctgtagaatgtccgagtcctgggctcacatacatgaccataagagagctatagcacagtgataccacagccaaatgagacccacaggtagagaaggccttatgtctcccagtgcttgaaggcatacccaacatagctttcaggacaagagtataggatccaataataaagaggaagttaccaaaaataactaatgagcttagagtgtagcaaaacagttggattcttggggcagaaacacaatccaatgcaaatmgtggccctgggtcacacacaacatggtcaataatgtttgggccacagaagggcatctgagagatgagaacaatggggatcaggaaccacagaaatccacaaacccagcacagtatgaccagtttggcatagagatgcccagtcatgatattaggatagagcaagggacggcagatagcaaggtactgatcaaaggccatcacagtcaaaagcaagcattctgatgtacccaaagagaagaagaaat

SEQ ID NO: 893197 - DNA, 626 bp, Homo sapiens
gtttcttactgcaaacccaacttatggtgcaatagactcagtaaagaaagttttgaccatttacatttcagctaaacatattacttaacattatttacatatgcaaaagaaatgcacatattttaaaataaattggtagcaatcacgttaaagccattatctctgaatttctattgctgctgttgttagcttaagtgattatctaatgttactcaccaatattgatttttaatattaatattgtaaagctgcaatgttttctgtagaaagcaaaggctttaagcttctgattaatcttttaccttaatttcataaactgatatagtgattattatattgataaaatcaatataatattgatttagtcattatgtacaaaagtttgcaaagatctagacattaaactttacttttgaaggyatttcataaaattttgagattgattttccttatatgctttttttaaaattgaaaatttttaccagatgacagaaatcaaacacttattttgttataggtaaacttccttcttcctacattcttataaaaatatattagggatttgagttacctggaaaaaacttttcttttcctcagaaatatggagggatgtgagtcctagatgt

SEQ ID NO: 893198 - DNA, 575 bp, Homo sapiens
catcatcgttttgacaggaaccaaatctctaaatgatttattttataaatcatattatgtcttcagctagacagagttttattgtggccggccccaaaattaaaaatgcactttatgaaactcacattctcctgggatgtagcctctatagcattaggaaagttatcttccaagatgaatctttaaaaagttaatgattacatattctctgaagaatcagtaaagagtaatgacaactattctaaggcatcattatttacaaagagcttgcccaccagatggattccagaaaatcttctggaagacacagtctgaggagaaataagatacmaaatgttaccaaaagttttgacataatgtttaggaacatttcaagtgttactgtgcatatattggaggatatacagcccagtgaggaaaatactgaggttccaacattgtcacacattgaacaaaaacttacagaatttagaaataacttttagaaggatggcacttttttgccagaatcctttagatatgagaagaaagtataagaagtagcaacatttaagttaattaacagaaatacttca

SEQ ID NO: 893199 - DNA, 523 bp, Homo sapiens
aatgaaaagggattgacacaggagtgtcatgattctcagcagtgctcaaaaggtgaagccatcatcgttttgacaggaaccaaatctctaaatgatttattttataaatcatattatgtcttcagctagacagagttttattgtggccggccccaaaattaaaaatgcactttatgaaactcacattctcctgggatgtagcctctatagcattaggaaagttatcttccaagatgaatctttaaaaagttaatgattacatattctctgaagaatcagtaaagagtaatgacaactattctaaggcatcattatttacaaagagcttgcccaccagatggattccagaaaatcttctggaagacacagtctgaggagaaataagatacaaaatgttaccaaaasttttgacataatgtttaggaacatttcaagtgttactgtgcatatattggaggatatacagcccagtgaggaaaatactgaggttccaacattgtcacacattgaacaaaaacttaca

SEQ ID NO: 893200 - DNA, 571 bp, Homo sapiens
aacatttcaagtgttactgtgcatatattggaggatatacagcccagtgaggaaaatactgaggttccaacattgtcacacattgaacaaaaacttacagaatttagaaataacttttagaaggatggcacttttttgccagaatcctttagatatgagaagaaagtataagaagtagcaacatttaagttaattaacagaaatacttcagaggaacatgtgacttcccaattaatagagagaagtatttacttgtatttattagtatctcttctatttttactttatgacatttaggggccaacatagygtaactaaacactcatgtgtgagtgaatgctcataccaagtgctgtgaagtagttgaggacatcagggatgtatgccctaggaccacagacatctgtctaaaagcaaacttccactttgagagactacagaggaaaatgtttattcagacctttattatcacttagtcataatacttagaaacttctaaaacatagctttgatattctcgtctgctcaaaagctgtcaatgatttcaagttcccaagttctccacaaattg

SEQ ID NO: 893201 - DNA, 443 bp, Homo sapiens
ttattttaccatctttgtgtctttgtcatgatactaatcacaagctgccttatatcagtattcatccatgatattggcttgaagttttttttgttgttgttgtgtctctaccaggttttggtatcaggatgatgctggcctcatagaatgagttggacaggggtccctcctcctcagtttttttggaatcatttcagcaaaaatggtactggctcttctttgcatatctggtagaatttggctgtgaatccatctagtcttgagcttyttaaaatatatatattttttggttggtaggctatttattacagatgcaattttggagcacgttattggtgtgtccaggaagttccccatctcttacaggttttcaagtttgtgtgcatagaggtgtttgtagtagtttctgatggttattttttatttctgtggggtcagtggta

SEQ ID NO: 893202 - DNA, 632 bp, Homo sapiens
tctgattctgccatttatttgctatgtgcctggggcaaattacttacctctctgcaccatcatgtctaaaatgccaatcatttgactaacttatcaagtgatcgcagagaagtaggattaagcacatattatgctgttcttatagacaattttgcatttaacaaaattttagttcattttgcatagtaatctataataaatgctaaatgcaacayaatgtttgattcaccatcttgtcatgttttctttccacaccaaaggtcaatttcacagagttctttaataattctttcttgcagctgggcaggaaaggaactagggtggctaggaagttgaacaaccttaagattatttctgctctgcaacagaattggtggtgtcgctacattattcgtgctagaggatggaagaagtgttgatactaactcagaagtgacaagcaatagtttccccttcttcatgatattgtcatggaggaagaaatttcctaggagaggcaataaactacaatagggaaagtatgggctttagagattagagacctgcattccaattttgctgtataactgggcacaaattacataaccctggatagaggacagctttcatgaactaatatctcatctgtgata

SEQ ID NO: 893203 - DNA, 510 bp, Homo sapiens
actaacttatcaagtgatcgcagagaagtaggattaagcacatattatgctgttcttatagacaattttgcatttaacaaaattttagttcattttgcatagtaatctataataaatgctaaatgcaacacaatgtttgattcaccatcttgtcatgttttctttccacaccaaaggtcaatttcacagagttctttaataattctttcttgcagctgggcaggaaaggaactagggtggctaggaagttgaacaaccttaagattatttctgctctgcaacagaattggtggtgtcgctacattattygtgctagaggatggaagaagtgttgatactaactcagaagtgacaagcaatagtttccccttcttcatgatattgtcatggaggaagaaatttcctaggagaggcaataaactacaatagggaaagtatgggctttagagattagagacctgcattccaattttgctgtataactgggcacaaattacataaccctggata

SEQ ID NO: 893204 - DNA, 619 bp, Homo sapiens
ggagtgcaggtatctctcagatatcctgatttcctttctttcgtatatatacctaccaatggcattgctgggtcatatggtagctctatttttgtttttgttttttttctgagaaacctccaaactgttctccatagtaattgtactaatttacattcccaccaatagtgggttcccttttctccacatcctagccagtatttcttactgcctgtcttttggatataagccatcttaactagggttagatgattcgtcttgtagttttggtttgcatttctctgatgagcaatgatgttgagcactttttcacatgcctgtttgccatttatatgtcttcttttgagcaagatcttttgcccatttttaaattggatgatcagattttttctatagagttgtttgagctccttatatattctagttgttaatcccttgtcagatggatagtttacraatattttctcctattttatgattgtcttttcaacatcaattgaaatgatcctgtggtttttgtttttaactttatgtgatgaatcacatttattgatttgcatatgttgaatcatcctagcatttctagaataaaactcaattgatcatggtgaattaaatt

SEQ ID NO: 893205 - DNA, 580 bp, Homo sapiens
gaagccatcatcgttttgacaggaaccaaatctctaaatgatttattttataaatcatattatgtcttcagctagacagagttttattgtggccggccccaaaattaaaaatgcactttatgaaactcacattctcctgggatgtagcctctatagcattaggaaagttatcttccaagatgaatctttaaaaagttaatgattacatattctctgaagaatcagtaaagagtaatgacaactattctaaggcatcattatttacaaagagcttgcccaccagatggattccagaaaatcttctggaagacacagtctgaggagaaataagatacmaaatgttaccaaaagttttgacataatgtttaggaacatttcaagtgttactgtgcatatattggaggatatacagcccagtgaggaaaatactgaggttccaacattgtcacacattgaacaaaaacttacagaatttagaaataacttttagaaggatggcacttttttgccagaatcctttagatatgagaagaaagtataagaagtagcaacatttaagttaattaacagaaatacttca

SEQ ID NO: 893206 - DNA, 530 bp, Homo sapiens
aatgaaaagggattgacacaggagtgtcatgattctcagcagtgctcaaaaggtgaagccatcatcgttttgacaggaaccaaatctctaaatgatttattttataaatcatattatgtcttcagctagacagagttttattgtggccggccccaaaattaaaaatgcactttatgaaactcacattctcctgggatgtagcctctatagcattaggaaagttatcttccaagatgaatctttaaaaagttaatgattacatattctctgaagaatcagtaaagagtaatgacaactattctaaggcatcattatttacaaagagcttgcccaccagatggattccagaaaatcttctggaagacacagtctgaggagaaataagatacaaaatgttaccaaaasttttgacataatgtttaggaacatttcaagtgttactgtgcatatattggaggatatacagcccagtgaggaaaatactgaggttccaacattgtcacacattgaacaaaaacttacagaattta

SEQ ID NO: 893207 - DNA, 578 bp, Homo sapiens
aacatttcaagtgttactgtgcatatattggaggatatacagcccagtgaggaaaatactgaggttccaacattgtcacacattgaacaaaaacttacagaatttagaaataacttttagaaggatggcacttttttgccagaatcctttagatatgagaagaaagtataagaagtagcaacatttaagttaattaacagaaatacttcagaggaacatgtgacttcccaattaatagagagaagtatttacttgtatttattagtatctcttctatttttactttatgacatttaggggccaacatagygtaactaaacactcatgtgtgagtgaatgctcataccaagtgctgtgaagtagttgaggacatcagggatgtatgccctaggaccacagacatctgtctaaaagcaaacttccactttgagagactacagaggaaaatgtttattcagacctttattatcacttagtcataatacttagaaacttctaaaacatagctttgatattctcgtctgctcaaaagctgtcaatgatttcaagttcccaagttctccacaaattgacttcaa

SEQ ID NO: 893208 - DNA, 503 bp, Homo sapiens
ggatgctttgtttacatactcaagcctcggcaatggtgggcgcccctcccccagccttgctgtcaccttgcagtttgatctcagactgctgcgctagcagtgagcgaggctctgtgggtatgggaccctccaagccakgtgcaggatataatctcctggtgtgccttttgctaagaccattggaaaagcacagtattagggtgggagtgacccgattttccaggtgccatctgtcaccccttcccttggctaggaaggggaattccctgaccccttgcacttcctgggtgaggagttgccttgccgtgctttggctcacgcttggtgggctgcacccactatcctgctcccactgtctgatgagcctcagtgagatgaatgccgtaactcagttggaaatgcagaaatcacccatcttctgtgtcactcaccctgggagctgtagactggagctgttcctatttggccatcttggaactgccctccaatctcatatttttagt

SEQ ID NO: 893209 - DNA, 505 bp, Homo sapiens
ttcatcccccaaatctgttccactcacagccttttaatacctcagtaaaggttgggtgtggtgctcatggctgtaatcccagaactttgggaggccgagatgggcagatcacgaggtcaggagttcgagaccagcttggccaacatggtgaaaccccatttctactaaaaatacaaaaattagccaggcatggtggcaggtgtctgtaatccccgatactcagggggctgaggcaggataatcacttgaacctgggaggaagaagttrcagtgagctgagattgtgccactgcactccagcctgggtgacagggagactctgtctcaaaaaataaataaataaaaagaaatcctattggtcctactttcaaaaatgaactaaacagacaccctactacctcagagcctttgctcaatctgttccttttgccagaaatgttcttttctaagataaatgcagtttattccttcttctccttcagattttctctcaaatgtcaccttc

SEQ ID NO: 893210 - DNA, 448 bp, Homo sapiens
catttttattttaccatctttgtgtctttgtcatgatactaatcacaagctgccttatatcagtattcatccatgatattggcttgaagttttttttgttgttgttgtgtctctaccaggttttggtatcaggatgatgctggcctcatagaatgagttggacaggggtccctcctcctcagtttttttggaatcatttcagcaaaaatggtactggctcttctttgcatatctggtagaatttggctgtgaatccatctagtcttgagcttyttaaaatatatatattttttggttggtaggctatttattacagatgcaattttggagcacgttattggtgtgtccaggaagttccccatctcttacaggttttcaagtttgtgtgcatagaggtgtttgtagtagtttctgatggttattttttatttctgtggggtcagtggta

SEQ ID NO: 893211 - DNA, 614 bp, Homo sapiens
tactcactgatgctgggagcaatttagagcaaatgttatccaaagtgacattacctagatcactaggttctttctttcacccacctccaatcctgctgttctttcagttctaagtcaaggatactacaagtttacactttgcaggagcccctggaatatttgaggtttcatactgcacatcaaaactatttctcactgacacaatcatctattaaaaattttgttgaatttctgccattttaatggctatctatctgccttcgtaygaacttcttggtattatagtagtcagtgtgcttccaaattaatcccaattcgtttacttttattttaagatgaaatgtaggccgagcatggtggctcacacctgtaatcccagcactttgggatgctgaggcgggcggatcatgaggtcaggagttcgagaccagcctggccaacatagggaaacctggtctctactaaaaatacaaaacaaactagccaggcatggtggcgggtgcctgtaatcccagctacttgggatgctgaggcaaggagaatcatttgaacctgggaggcggaagttgcagtgagccgaagtcgcaccactgcactccagcctgggtgacagt

SEQ ID NO: 893212 - DNA, 614 bp, Homo sapiens
tactcactgatgctgggagcaatttagagcaaatgttatccaaagtgacattacctagatcactaggttctttctttcacccacctccaatcctgctgttctttcagttctaagtcaaggatactacaagtttacactttgcaggagcccctggaatatttgaggtttcatactgcacatcaaaactatttctcactgacacaatcatctattaaaaattttgttgaatttctgccattttaatggctatctatctgccttcgtacgaacttcttggtattatagtagtcagtgtgcttccaaattaatcscaattcgtttacttttattttaagatgaaatgtaggccgagcatggtggctcacacctgtaatcccagcactttgggatgctgaggcgggcggatcatgaggtcaggagttcgagaccagcctggccaacatagggaaacctggtctctactaaaaatacaaaacaaactagccaggcatggtggcgggtgcctgtaatcccagctacttgggatgctgaggcaaggagaatcatttgaacctgggaggcggaagttgcagtgagccgaagtcgcaccactgcactccagcctgggtgacagt

SEQ ID NO: 893213 - DNA, 600 bp, Homo sapiens
ttgtacagtagatctccaaaacttattcatcctgtttagctgaaacattgtaccttttgaccgatatctctcaattcccctgggtggaattttcaatagctagtcaggaaaggcctcactgaaaaggtgatatttggtcaaagatttgaagggagtgtgggggaaagaaacataaatatctgggaaaagagcattccaggcagaggagatggcatgtatacgggccacaaggcaggagcrtgactgccatacttgagagaccgtaaggaatcttcatcttttcctcatgtctttctcacctctaatatatttaaatatggcttccccccaccacacccttaaaatggccattgcataaatcaccaataacatttgttttagtccattttacattgctataaaggaatacctgagactgagtaatttataaagaaaagaggtttatttggctcatggtcctgcagtcagtacaagcgtggcatcagcatcttcttagcttctgaagcctagggaagcttttactcattgaagaaagcaaagggggagcaggtgtgtcacatggcaagagagggagaaaggtggggagggggttgtcccaca

SEQ ID NO: 893214 - DNA, 688 bp, Homo sapiens
tattgtgttgaagtatatttcttctaaaccaactctgttgagaatcttttcatgaaacaatgttgaatttttcaaatgccatttctgcatctaattagatgattatataattttggggcttcattttgttaatgttgtatatcacatttatagatttatgtatgttgatccaccttgtatccttggggtaaatccacttgagcatggtaagttatctttttaatrtgctgttgaattcagtgtgctagtatttgattgaggattcttgcatctatgttcatcagggatattggcctgtaatttttcttttcttttctttttcttgttcttggctgactttggtatcagagtaatgttggccatgtaaaaaaagtttggaagtgaagtattccttcctcttagattttttttggaagagtttgaggattgctaattatttaaatgtttggtagaatacaacagtaaagctattctgggcttctctttgatgggagactttattacaattcaatcttattcatttttggtctgttcgtacttactttttcttcatgattcagtcttggtatcttgcatgtatcttggaatttatttatttcttctgctttattcaatttgttactgtacaatttttcatagtactctcttatgagctttttttcttatgagcttttatatttctgtggta

SEQ ID NO: 893215 - DNA, 688 bp, Homo sapiens
tattgtgttgaagtatatttcttctaaaccaactctgttgagaatcttttcatgaaacaatgttgaatttttcaaatgccatttctgcatctaattagatgattatataattttggggcttcattttgttaatgttgtatatcacatttatagatttatgtatgttgatccaccttgtatccttggggtaaatccacttgagcatggtaagttatctttttaatgtgctgttgaattcagtgtgctagtatttgattgaggattcttgcatctatgttcatcagggatattggcctgtaatttttcttttcttttctttttcttgttcttggctgrctttggtatcagagtaatgttggccatgtaaaaaaagtttggaagtgaagtattccttcctcttagattttttttggaagagtttgaggattgctaattatttaaatgtttggtagaatacaacagtaaagctattctgggcttctctttgatgggagactttattacaattcaatcttattcatttttggtctgttcgtacttactttttcttcatgattcagtcttggtatcttgcatgtatcttggaatttatttatttcttctgctttattcaatttgttactgtacaatttttcatagtactctcttatgagctttttttcttatgagcttttatatttctgtggta

SEQ ID NO: 893216 - DNA, 688 bp, Homo sapiens
tattgtgttgaagtatatttcttctaaaccaactctgttgagaatcttttcatgaaacaatgttgaatttttcaaatgccatttctgcatctaattagatgattatataattttggggcttcattttgttaatgttgtatatcacatttatagatttatgtatgttgatccaccttgtatccttggggtaaatccacttgagcatggtaagttatctttttaatgtgctgttgaattcagtgtgctagtatttgattgaggattcttgcatctatgttcatcagggatattggcctgtaatttttcttttcttttctttttcttgttcttggctgactttggtatcagagtaatgttggccatgtaaaaaaagtttggaagtgaagtattscttcctcttagattttttttggaagagtttgaggattgctaattatttaaatgtttggtagaatacaacagtaaagctattctgggcttctctttgatgggagactttattacaattcaatcttattcatttttggtctgttcgtacttactttttcttcatgattcagtcttggtatcttgcatgtatcttggaatttatttatttcttctgctttattcaatttgttactgtacaatttttcatagtactctcttatgagctttttttcttatgagcttttatatttctgtggta

SEQ ID NO: 893217 - DNA, 653 bp, Homo sapiens
ataaaactcatggttactggtagtcgatcaatataaaactcacaatgattcagaattactaggtatgcaaagaaaacagaaaatactgctcctaatgaaggaaaaaaaaaacaatgaaaccaaaccctgaaattacacagatgataaaccagacaaaaccaaaccctaaaattacacagatagcagacaagaatactaaaacttattattataactatatttcaaatgctcaaaaaagttaaggaaagactaaacatgagatatagaatatataaaaattactcaaatcaaacttccagagatggaaagtatgaaataagaaaaaagtacgctggatgagattaatatagctactgcagaaggaaaagtaatcttgtagagtaagcaacataagctgtctaaaatgaaacacaaagagaaaatatactgagaaattatgaaccgggcttagtgatctggggaactactttaaatggcctaatatatgtgttaactggcatctccaaagaaagggggcagttgctgaaaactatttaaagaaatatggcagmaaatagtccaaatatgatgaaaaaactataaaaccacatgttcaagaaactcaatgtacccacacacacagaaaacatacaataccactaaattgcttaaaa

SEQ ID NO: 893218 - DNA, 565 bp, Homo sapiens
atgaagcctcatccatcttgcatgctcaggcagtgagtaatttctgttaagtgaatttttggaagctaaaaattacaacaaatcttctcattttattgccttttaaaaaaatctaccaaattttccctgacttccaaaattataatgctgtattctagagatgatgtcacttcattgtttcatcaaaagtgagcccctggaatgatgactcatacagrttaatttgcctttaatgtggcaatttgatgcttagaaatggttctgatttattaatgactatctttgtttcccctagaaataaagtctgtgtatagaacaagatccctccatcaatgctcctaaatgttatggacattattgcttttgtctatttcattgctgcagggagtattcacattcaattaatctagttaggcctttggctacttacttctttacattttcagacatctatttttttatactgcgcttattttcctgaattggattttgctgacattattcactaataagaataatctattttttaatatggcaattgactgatcaattcattctgggtata

SEQ ID NO: 893219 - DNA, 565 bp, Homo sapiens
atgaagcctcatccatcttgcatgctcaggcagtgagtaatttctgttaagtgaatttttggaagctaaaaattacaacaaatcttctcattttattgccttttaaaaaaatctaccaaattttccctgacttccaaaattataatgctgtattctagagatgatgtcacttcattgtttcatcaaaagtgagcccctggaatgatgactcatacaggttaatttgcctttaatgtggcaatttgatgcttagaaatggttctgatttattaatgactatctttgyttcccctagaaataaagtctgtgtatagaacaagatccctccatcaatgctcctaaatgttatggacattattgcttttgtctatttcattgctgcagggagtattcacattcaattaatctagttaggcctttggctacttacttctttacattttcagacatctatttttttatactgcgcttattttcctgaattggattttgctgacattattcactaataagaataatctattttttaatatggcaattgactgatcaattcattctgggtata

SEQ ID NO: 893220 - DNA, 565 bp, Homo sapiens
atgaagcctcatccatcttgcatgctcaggcagtgagtaatttctgttaagtgaatttttggaagctaaaaattacaacaaatcttctcattttattgccttttaaaaaaatctaccaaattttccctgacttccaaaattataatgctgtattctagagatgatgtcacttcattgtttcatcaaaagtgagcccctggaatgatgactcatacaggttaatttgcctttaatgtggcaatttgatgcttagaaatggttctgatttattaatgactatctttgtttcccctagaaataaagtctgtgtatagaacaasatccctccatcaatgctcctaaatgttatggacattattgcttttgtctatttcattgctgcagggagtattcacattcaattaatctagttaggcctttggctacttacttctttacattttcagacatctatttttttatactgcgcttattttcctgaattggattttgctgacattattcactaataagaataatctattttttaatatggcaattgactgatcaattcattctgggtata

SEQ ID NO: 893221 - DNA, 594 bp, Homo sapiens
gagaaatatataataatgattttatactcttatgtcaatcacaattcattaggaataacataaaatttttactaaccattatttaatcatgcagtactcaccgaaagcttgctatacgtctgcaacttttattccctactctcatgtagcttacattctagtggtgatcaactagaaaagctagaaaggaatattacttgaggctgtgtatggtgactcacatttgtaawcccagcactttgggaggactaggtgagtggatcacttgaggccaggagttcgagaccagcctggccaatatgccaaaaccccaactccacaaaaaatacaaaaattagccaggtgtggtgacacgaacctgtagtcccaactagttgggaggctgaggcaggagaatagtttgagaccagaaggtagaagttacagtcagctgagattgtgccactgcacttcaacctgggcaacagagtgagactctgtctcaaaaaaaaaaaagaatattaattaaaaagagcttatgcaaattgcaacagcataaggaaacatgccttctcatgcactatactgcaggtgctcgagaaggtctgtcttaac

SEQ ID NO: 893222 - DNA, 594 bp, Homo sapiens
gagaaatatataataatgattttatactcttatgtcaatcacaattcattaggaataacataaaatttttactaaccattatttaatcatgcagtactcaccgaaagcttgctatacgtctgcaacttttattccctactctcatgtagcttacattctagtggtgatcaactagaaaagctagaaaggaatattacttgaggctgtgtatggtgactcacatttgtaaacccagcactttgggaggactaggtgagtggatcacttgaggccaggagttcgagaccagcctggccaatatgccaaaaccccaactccacaaaaaatacaaaaattagccaggtgtggtgacacgaacctgtagtcccarctagttgggaggctgaggcaggagaatagtttgagaccagaaggtagaagttacagtcagctgagattgtgccactgcacttcaacctgggcaacagagtgagactctgtctcaaaaaaaaaaaagaatattaattaaaaagagcttatgcaaattgcaacagcataaggaaacatgccttctcatgcactatactgcaggtgctcgagaaggtctgtcttaac

SEQ ID NO: 893223 - DNA, 630 bp, Homo sapiens
tctggtggccagaagagttagaggtataatgatgacacaggttactaatcccttattgttagtggaaagaaggaaaaaaatctatcagccaacgaaagaaatcagatgttgaagctcctcattgcttgtttgtttgttggtttgttgttttttgtgtttttgttttgagatggagtctcactctgtcaccaggctggagggcagtggtgcaatcttggctccctgcaacctccacctcccgggttcaagtgattctcctgcttcagcctcccaactagctgggactacaggcgtctgccaccacgcccggctaatattttgtacttttaatagagacaaggtttcatcatattggccaggattgtctcaatctcttgaccacgtgatctgcccgccttggcctcccaaagtgctgggattacaggcatgagccaccgcacccagccaaattaaacaaatttaatttgcacgcctcctgaccaaataagatcctyaaaagatgtttatctaagaaattaaatgtttacttcattgagacttctcaaaagttttgttggatctgctgtaaattaaatttaaaaagctgttgaatgaagtatataaaataacttaaagttgtgttcctataga

SEQ ID NO: 893224 - DNA, 509 bp, Homo sapiens
ttcatcccccaaatctgttccactcacagccttttaatacctcagtaaaggttgggtgtggtgctcatggctgtaatcccagaactttgggaggccgagatgggcagatcacgaggtcaggagttcgagaccagcttggccaacatggtgaaaccccatttctactaaaaatacaaaaattagccaggcatggtggcaggtgtctgtaatccccgatactcagggggctgaggcaggataatcacttgaacctgggaggaagaagttrcagtgagctgagattgtgccactgcactccagcctgggtgacagggagactctgtctcaaaaaataaataaataaaaagaaatcctattggtcctactttcaaaaatgaactaaacagacaccctactacctcagagcctttgctcaatctgttccttttgccagaaatgttcttttctaagataaatgcagtttattccttcttctccttcagattttctctcaaatgtcaccttctcct

SEQ ID NO: 893225 - DNA, 639 bp, Homo sapiens
gtgtctgtgtagaaagaagtagacataggagcctccattttgttctgtactaagaaaaattcttctgccttgaaaaaaaaaagagtcttttgaggcataaaaaaaatttcaaacatgaatatgcccacataaacaacccccaaacaagaaatacagcattaaccaaactacagtggcccccacttatgctccttcctagtcatcatgccctctatacccaacaaggtgtcaatctttgcctctatttgaaaattatataattaggattccaattatataattcattatataattgctgttaggaacaagccccccaaaatctggccataaacaggccccaaaacyggccataaacaaaatctctgcagcaccgtgacatgttcatgatggccgtaatgcccacgctggaaggttgtgggtttaccggaatgagagcaaggaacacctggtctgcccaggatggaaaacctcttaaaggcattcttaagccacaaacgatagcatgagccatctgtgccttaaggttgtgctcctgctgcagttaactagcccaacctattcctttaattcagcccatccctttgttttcaataagggataattttaattaatttaatatctatagaaacaatgctaatg

SEQ ID NO: 893226 - DNA, 577 bp, Homo sapiens
aagattcagaagttcatagcagtgttctggaatcacatgtgaggaagaaacactcagaaaccagcagtagtgttctggaatcctatgtgagtgacaaacactcagaaaccagcagtagtgttctagaatcctttgtgaggcacagacgttcagacgctcgaagcagtgttctggaatcctatgtgagggacaaacactcagaacccagcagcagtgttctggaatactttatgagggacaaacactcagkacccagccactgtgttctataatactatctgagggacaaacattcagactttcgtagaagtgttctggaatcctatgtgagggacaaacactaagaaacctgaagcagtgctctggaatcctttgtgaaggacaaacaaacacaacccaacagcggtgttttggaatcctatgtgagggaaaaatattcagacacttgtagcattgtcgaggaacctaatatgagggactaacactcagaacccagtagaagtgttctggaatccttagtgagggataaacattcagacactcgcagcagtgttctggaatcctacgtgagggacaa

SEQ ID NO: 893227 - DNA, 717 bp, Homo sapiens
gtaaaagtgttctggaatcttatgagaaggaaaaacactcagaacccaacagcaatgttttggaatcctatgtgatcaacaaagattcagaagttcatagcagtgttctggaatcacatgtgaggaagaaacactcagaaaccagcagtagtgttctggaatcctatgtgagtgacaaacactcagaaaccagcagtagtgttctagaatcctttgtgaggcacagacgttcagacgctcgaagcagtgttctggaatcctatgtgagggacaaacactcagaacccagcagcagtgttctggaatactttatgagggacaaacactcaggacccagccactgtgttctataatactatctgagggacaaacattcagactttcgtagaagtgttctggaatcctatgtgagggacaaacactaagaaacctgaagcagtgctctggaatcctttgtgaaggacaaacaaacacaacccaacagcggtgttttggaatcctatgtgagggaaaaatattcagacacttgtarcattgtcgaggaacctaatatgagggactaacactcagaacccagtagaagtgttctggaatccttagtgagggataaacattcagacactcgcagcagtgttctggaatcctacgtgagggacaaacactcagaaagcagcaacatttttctggaatcctatgtgagcaaaaaacattcagaac

SEQ ID NO: 893228 - DNA, 666 bp, Homo sapiens
gcagtgttctggcatcctatgtgagtcacaaacactcagaacacagaagcagtgttctagaatcctctttgagggacaaacatgcttaccctcaaaacagtgttctggaatcctatgtgagggacaaccactcagaaccgagcagtagtgttgggcaatcctttgtgatggacaaacattcagaccgttgtagcagtgttctggaatcctatgtgagggacaaacactcagaaccctgcagcagagttctggaatcatttatgagggacaaaacttcagaccctcgaagaagtgttctggaatcrgatgtgagggacagacactcagaacccagccactgtgttctggaatcccacctgagtgataaataatcagacactcatagaagagttctggtgtcctatgtgagggacaaacactcagaacacagtagcagtcctctggattactgtatgagggacaaacactaagtacccagcagcagtgttttgtaatcctttgtgagggacaaacattcagaatctcttagtagtgttctggaatcatatgcgaaggagaaacaatcagaacccagaagcagtgttctgggatcccatgtgagggacaaacactcagaaaccagcagcagggttctggaatcctatgtgttggagaaacactcagaaa

SEQ ID NO: 893229 - DNA, 628 bp, Homo sapiens
cagacactcatagaagagttctggtgtcctatgtgagggacaaacactcagaacacagtagcagtcctctggattactgtrtgagggacaaacactaagtacccagcagcagtgttttgtaatcctttgtgagggacaaacattcagaatctcttagtagtgttctggaatcatatgcgaaggagaaacaatcagaacccagaagcagtgttctgggatcccatgtgagggacaaacactcagaaaccagcagcagggttctggaatcctatgtgttggagaaacactcagaaaccagcattaatttctggaatcctatgtgagggacaaacactaagaacccagccactgtgttctggaaccctttgtgattgacaaactttcagacactcgtagcagttttccggaattctacgtgaaggacaaacaatcagaaaccagcaatcctgttctggaatccttgtgatgggcaaacaaacagaaccccgtggcagtgttttggaatcctatgtgaaggacaaacactcagaacccagcagcagtgttctagaatcctatgtgagggacaaacactcagaacccagcatcagggttctggaaacttatctgagggataaacactcagaat

SEQ ID NO: 893230 - DNA, 628 bp, Homo sapiens
cagacactcatagaagagttctggtgtcctatgtgagggacaaacactcagaacacagtagcagtcctctggattactgtatgagggacaaacactaagtacccagcagcagtgttttgtaatcctttgtgagggacaaacattcagaatctcttagtagtgttctggaatcatatgcgaaggagaaacaatcagaacccagaagcagtgttctgggatcccatgtgagggacaaacactcagaaaccagcagcagggttctggaatcctatgtgttggagaaacactcagaaaccagcattaatttctggaatcctatgtgagggacaaacactaagaacccagccactgtgttctggaaycctttgtgattgacaaactttcagacactcgtagcagttttccggaattctacgtgaaggacaaacaatcagaaaccagcaatcctgttctggaatccttgtgatgggcaaacaaacagaaccccgtggcagtgttttggaatcctatgtgaaggacaaacactcagaacccagcagcagtgttctagaatcctatgtgagggacaaacactcagaacccagcatcagggttctggaaacttatctgagggataaacactcagaat

SEQ ID NO: 893231 - DNA, 617 bp, Homo sapiens
gaaacctatgtgtgggaaaaactctcttaaccctgcaacagtgttctggaattccttgtgaggaacaaacactcagcacccagcagccgtgttctggagtcttatgtgagtgacaaacactcagaacccagcagcagtgttctagaatactttgtgagggacaaacattcagacacccgaagcagtgttctggaatcctmtgtgaggaacaaacactaggaacccagcagcagtgttctggaatcctatgtgtggtgaaaacactcagaaccctgcagcagtgatttggaatcctgtgcaagtgacaaagattcagaacttcgtagcagtgttctgcaatcctatgtgagggacaaagactcagaactcagcagcagtgttctgtaatcctttgtgagggacaaacactcagaactcagcagcagtgtcctagaatcctaggtgagggacaaacagtcagaacccaaccactgtgatctggaatcctatcttagagacaaacattcagacactcatagaagtgttctggaatcctatgtgagggaaaaacatgtagaacccagcagctgtgctctggaatcctttgtgaggaaaaacaaacaaaaccagtagcagtg

SEQ ID NO: 893232 - DNA, 567 bp, Homo sapiens
atgttctgcaatcctttttgttggacaaacattcagaccctcgtagcagtgttccagaatcctatgtgaggaacaaacactcagaacccagcagtagtgttcgggaatcctatgggagggacaaccattccgaatccagcagcagtgttgtgtaatcctatgtgagggacaaacactcagaacccagcagctgtgttctggwaacctatgtgagggaaaatcacttagaacccagtcattgtgttctggaatcctatctgagggagaaatattcaaacactcgtagaagagttctggaatcctatgtgagggaaaaaccctcagaagccagcagcagtgctctggaatcctttgtgaggggcaaacaatcagaacccagaagcagtgttcttgaatctttcgtgagggaaaaacattcagaccctcgtaatagtattttggaatcctatctgagggacaaacactcggaacccagcagctgtgttctggaatcctatgtgtgggacaaacacttagaacccagcacaatattctggaatactacgtgagcgacaaactttcagaagt

SEQ ID NO: 893233 - DNA, 611 bp, Homo sapiens
tgtgtaatcctatgtgagggacaaacactcagaacccagcagctgtgttctggtaacctatgtgagggaaaatcacttagaacccagtcattgtgttctggaatcctatctgagggagaaatattcaaacactcgtagaagagttctggaatcctatgtgagggaaaaaccctcagaagccagcagcagtgctctggaatcctttgtgagggrcaaacaatcagaacccagaagcagtgttcttgaatctttcgtgagggaaaaacattcagaccctcgtaatagtattttggaatcctatctgagggacaaacactcggaacccagcagctgtgttctggaatcctatgtgtgggacaaacacttagaacccagcacaatattctggaatactacgtgagcgacaaactttcagaagtttgtagcagtgttctggaattctatgtgagggacaaacactgagaacccagcagcagtgttctggattcctaagtgagggacaaacattcagaacccagcagcagtgttctggtatcctatgtgagggacaaacactcagaacccagcagcagtgttctacaatcctttgtgaggaaaaaatattcagaccc

SEQ ID NO: 893234 - DNA, 538 bp, Homo sapiens
atgttctgcaatcctttttgttggacaaacattcagaccctcgtagcagtgttccagaatcctatgtgaggaacaaacactcagaacccagcagtagtgttcgggaatcctatgggagggacaaccattccgaatccagcagcagtgttgtgtaatcctatgtgagggacaaacactcagaacccagcagctgtgttctggwaacctatgtgagggaaaatcacttagaacccagtcattgtgttctggaatcctatctgagggagaaatattcaaacactcgtagaagagttctggaatcctatgtgagggaaaaaccctcagaagccagcagcagtgctctggaatcctttgtgaggggcaaacaatcagaacccagaagcagtgttcttgaatctttcgtgagggaaaaacattcagaccctcgtaatagtattttggaatcctatctgagggacaaacactcggaacccagcagctgtgttctggaatcctatgtgtgggacaaacacttagaacccagcacaatattctggaa

SEQ ID NO: 893235 - DNA, 606 bp, Homo sapiens
tgtgtaatcctatgtgagggacaaacactcagaacccagcagctgtgttctggtaacctatgtgagggaaaatcacttagaacccagtcattgtgttctggaatcctatctgagggagaaatattcaaacactcgtagaagagttctggaatcctatgtgagggaaaaaccctcagaagccagcagcagtgctctggaatcctttgtgagggrcaaacaatcagaacccagaagcagtgttcttgaatctttcgtgagggaaaaacattcagaccctcgtaatagtattttggaatcctatctgagggacaaacactcggaacccagcagctgtgttctggaatcctatgtgtgggacaaacacttagaacccagcacaatattctggaatactacgtgagcgacaaactttcagaagtttgtagcagtgttctggaattctatgtgagggacaaacactgagaacccagcagcagtgttctggattcctaagtgagggacaaacattcagaacccagcagcagtgttctggtatcctatgtgagggacaaacactcagaacccagcagcagtgttctacaatcctttgtgaggaaaaaatattca

SEQ ID NO: 893236 - DNA, 602 bp, Homo sapiens
ggacaaacactgagaacccagcagcagtgttctggattcctaagtgagggacaaacattcagaacccagcagcagtgttctggtatcctatgtgagggacaaacactcagaacccagcagcagtgttctacaatcctttgtgaggaaaaaatattcagaccctcatagcagtgttctggaatcctatgtgatagaaaaacattcataccctcatagcagtgttctgggatcctatatgagggacaaacacacagaacccaccagcagcgctcgggaaaccacactctcctaatagtgttcttgaatcccatgtgagggagaaaccttcataccctygtagcattgttctggaatccaatatgagggacaaacactcagaacccagtagcagtgttctggaacctttattgagggataaacattcagaccgtcatagcagtgtgctggaatcctatgtgagggacaaatgctccgaacccagcagcagtggtttggagtcctatgtgagggacaaacactctgagcccagcagcagtgttctggaatcctctgtgagggacaaactttcacaacttcgtagcagtgttctggaattctacgtg

SEQ ID NO: 893237 - DNA, 661 bp, Homo sapiens
gggccaaacagtcagaacccagcatcagtgttctggaatacttggtaagggacaaacattcagaaaatcttatcagttttctggaatcccaactgagggagaaacgctcagaaaatatctgcagtgttctagaattctatgtgagggacaaaccctcattaccgagctgcagtgttctggattcctaggtgagggacaaacactcagaacaaagcagcagtgttctggaatcctatgtgatggacaaaaactcagaacccagcagcagtgttctgataccctatgggagggacaaacactcagaacccagcccctgtgttctggaatcctatctgaaggacaaacattcggagacttgaagaagtcttctggaatcctatgtgaaggacaaacagtcagaaacctgtagcaatgttctggaatcatttgyaaggaacaaacactcaaaactcaaaagcagtatcctggaatcctacgtgagggccaaacactaagaacccagcagcagtattttcgaatccttaatgagtgacaaacagtcagaaacctgcagcagtgttttagattgctttgtgatatacaaacattcagaccctcgaagcagtgttctggaattctgtttgagggacaaacactcagaacccagccactgtgttctgga

SEQ ID NO: 893238 - DNA, 673 bp, Homo sapiens
gaagcagtgttctggaattctgtttgagggacaaacactcagaacccagccactgtgttctggaatgttatctgagggaaaaatattcggagcctcgtagaagtgttctggaatcctatgtgagtgacaaatactcagaaaccatcagcagtgctcyggaatcctttgtgatggataaataaacagagcccagcagcagtgttctggaatccttcgtgagggacaaacattcagaaccttgtagccgtgttctggaatcgtatgtgagggtcaaacactttgaaccagcagctgtgttctggaatcctatgtgagggacaaacactcagaacccagcaacagtgttctgtaatcctttgtgagggacaaacactaagaacccagcaacattgttctgcaatcctttgtgtgggacaaacactcagaacccagcagcagagttctggaatcccatgtgagggacaaacgttcaggcactcagaatagtgttttggaatcctatgttagggacaaacactcagaaaactgcagcagtgttctggaatcctacgtgggggacaagcattcagatcctgatagcactgttgtggaatgctctgtgaggaacaaacaatcagaccctcgtagcagtgttctgaaatcctgtgtgaggtacaaaccctcacaactcagc

SEQ ID NO: 893239 - DNA, 673 bp, Homo sapiens
gaagcagtgttctggaattctgtttgagggacaaacactcagaacccagccactgtgttctggaatgttatctgagggaaaaatattcggagcctcgtagaagtgttctggaatcctatgtgagtgacaaatactcagaaaccatcagcagtgctctggaatcctttgtgakggataaataaacagagcccagcagcagtgttctggaatccttcgtgagggacaaacattcagaaccttgtagccgtgttctggaatcgtatgtgagggtcaaacactttgaaccagcagctgtgttctggaatcctatgtgagggacaaacactcagaacccagcaacagtgttctgtaatcctttgtgagggacaaacactaagaacccagcaacattgttctgcaatcctttgtgtgggacaaacactcagaacccagcagcagagttctggaatcccatgtgagggacaaacgttcaggcactcagaatagtgttttggaatcctatgttagggacaaacactcagaaaactgcagcagtgttctggaatcctacgtgggggacaagcattcagatcctgatagcactgttgtggaatgctctgtgaggaacaaacaatcagaccctcgtagcagtgttctgaaatcctgtgtgaggtacaaaccctcacaactcagc

SEQ ID NO: 893240 - DNA, 549 bp, Homo sapiens
gctgctgggtacttagtgtttgtcgctcacataggattccagaacactgctactgatttctgcgtgtttttcctcacatatgattccagaacactgctgcaggtttctgagtgtttgtccctcacttacgattacagaacactgctatgagtgtctgaatgtttgtccctaacaaaggattccagaacaatgcttwgaggatatgaatatttgtccgtcacaaatgattccacaacactgctgctgggttcttagtgtttgtccctcacttaggattgcagaacactgctacgaaattctgaatgtttgtccctaagaaaggattccagaacagtgctgctgtgttctgagtgtttgtcactcctgaatgattccagatcactgctgctggtatccgagtgtttgtccctcacataggattacagaacacttctacgagtgtttgaatgtttgtccctcagacaggattctggaacacagtggctgggttctgagtgtttgtcccttgcataggattccaaaacactgctgctgggctctgagtgtttg

SEQ ID NO: 893241 - DNA, 721 bp, Homo sapiens
gctgctgagttcagagtgattttccctcacataggattccagaaaactggtgcttggatctgagagcttgtctctgtcaacgagttccagaacactgctgctgtgttcagagcgtttgtccctcacataggattgcagaatactgctgctagtttctgagggtttgtccctcactagaattctagaactctcctgctgtgttctgagggtttctccaacacatgggattctgaaacactgctacargggtcagtaagtttgtcggtcacaacggattccagagcaccgctagtgggttctcaatgtttgtccctcacatcggattgcagaacacagttgctatgttctgagtgtttgtcccaaacataggattccagaactctgcttggagggtctgaaagttttttcctcaccaaggattccggaacactgctgggttctgaatggttgtccctcacctacgattccagaacaatgctgggatggtctcaaagtttgttcctcagaaggcattctgtattactgctacgagtgtctgaatccttgtctctcacataggattccagagcactgatactgggttctgagtgtttgtccttcacataggattccagaacactgctccgagagtctgaatgtttgtccctcacataggattccaaaacactgctgctggtttgtgagtgtttgtccctcacataggattccagaacaattctgc

SEQ ID NO: 893242 - DNA, 693 bp, Homo sapiens
tccagagcaccgctagtgggttctcaatgtttgtccctcacatcggattgcagaacacagttgctatgttctgagtgtttgtcccaaacataggattccagaactctgcttggagggtctgaaagttttttcctcaccaaggattccggaacactgctgggttctgaatggttgtccctcacctacgattccagaacaatgctgggatggtctcaaagtttgttcctcagaaggcattctgtattactgctacgagtgtctgaatccttgtctctcacataggattccagagcactgatactgggttctgagtgtttgtccttcacataggattccagaacactgctccgagagtctgaatgtttgtccctcacataggattccaaaacactgctgctggtttgtgagtgtttgtccctcacataggattccagaacaattctgctgggttctgaawgtttgtccctcatataggaagccagaacactgctgctgggttttttgtgtttgtccctcacatagcattccagaacactgctgcagggttctgagtattggtccctcacatgggattccagaatactgctgctagtttctgagggtttgtccctcacatagaattcaagaacactgctgctgagttctgagggtttgtgcctcacataggattacagaatactgctacgagggtct

SEQ ID NO: 893243 - DNA, 693 bp, Homo sapiens
tccagagcaccgctagtgggttctcaatgtttgtccctcacatcggattgcagaacacagttgctatgttctgagtgtttgtcccaaacataggattccagaactctgcttggagggtctgaaagttttttcctcaccaaggattccggaacactgctgggttctgaatggttgtccctcacctacgattccagaacaatgctgggatggtctcaaagtttgttcctcagaaggcattctgtattactgctacgagtgtctgaatccttgtctctcacataggattccagagcactgatactgggttctgagtgtttgtccttcacataggattccagaacactgctccgagagtctgaatgtttgtccctcacataggattccaaaacactgctgctggtttgtgagtgtttgtccctcacataggattccagaacaattctgctgggttctgaatgtttgtccctcatataggaarccagaacactgctgctgggttttttgtgtttgtccctcacatagcattccagaacactgctgcagggttctgagtattggtccctcacatgggattccagaatactgctgctagtttctgagggtttgtccctcacatagaattcaagaacactgctgctgagttctgagggtttgtgcctcacataggattacagaatactgctacgagggtct

SEQ ID NO: 893244 - DNA, 730 bp, Homo sapiens
tgaatccagaacactgttgcagggttccgagtgtttgtccctcacgtaggattccagaacacagctgcggatttcggagtgtttgtccctcacatgggactcaaaaacactgctgctgctcggttcacagttgtcccttacatatgattgctgaacactgctatgaggttctgaatgcttgtccctcacaaaggattccagaacactgctgctgggttctgagtgtttgacactcacatagcattccagaacactgctgctgggttctgagtgtttgtccttcacataggattgaagaacactgcagctgggttctgagtgtttgtccctcacattggattccagaacactcctaagaacttctgaatgtttgtccctcacataggattccagaacattgctkctgggttctgagtgtttgtccctcacataggattccagaacaatgttgctgggttctgagtgtttttccctcacataggactccagaacactgcttcgaaggtctgaatgtttttccctcacaaaggattcaagaacactgctgctgggttctgtgtgtttgtccctcacaaaggattagagaggattgttgctgggttctgactgtttgtcctttacataggattccagaacaatgttgacgggttctgagtgtttgtcactcacataggattccacaacactgctgctgggttctgagtgtttgtccctcacataggattccaga

SEQ ID NO: 893245 - DNA, 730 bp, Homo sapiens
tgaatccagaacactgttgcagggttccgagtgtttgtccctcacgtaggattccagaacacagctgcggatttcggagtgtttgtccctcacatgggactcaaaaacactgctgctgctcggttcacagttgtcccttacatatgattgctgaacactgctatgaggttctgaatgcttgtccctcacaaaggattccagaacactgctgctgggttctgagtgtttgacactcacatagcattccagaacactgctgctgggttctgagtgtttgtccttcacataggattgaagaacactgcagctgggttctgagtgtttgtccctcacattggattccagaacactcctaagaacttctgaatgtttgtccctcacataggattccagaacattgctgctgggttctgagtgtttgtccctcacataggattccagaacaatgttgctgggttctgagtgtttttccctcacataggactccagaacactgcttcgaaggtctgaatgtttttccctcacaaaggattcaagaacactgctgctgggttctgtgtgtttgtccctcacaaaggattasagaggattgttgctgggttctgactgtttgtcctttacataggattccagaacaatgttgacgggttctgagtgtttgtcactcacataggattccacaacactgctgctgggttctgagtgtttgtccctcacataggattccaga

SEQ ID NO: 893246 - DNA, 585 bp, Homo sapiens
tgttctgagtgtttgtccctcactgaggattccagaaaactgctgctgggttctgagtgttagtcccacacgtaggatgccagaacactgcgactgagttcttagtgtttgtcccttacataggattccagaacagtgcttcgagtgtctgaaagtttgtccctcacaaaggattcttgtacactgttgctgggttctgagtgtttgtccctcacatgggattccagaacaatgctcttaggttctgagtgcttgttcctcacataggataccagaacactcctacgagggtcagaatgtttttccctcacaaaggattccaggacactgctgctgggttctgttggtttgtccctcagaaaagattccagagcacttctgctggtttctcaatgtttctcacatagrattccagaacacttctaagagtgtctgaatgtgtgtccctcaggtagtattccagaacacagtggttgggttctgattgtttctccctcacataggaatccagaacactgctgctgggttttgagtgtttgaccctcacgtaggattccagaacactgattcaagggtctgaatgtt

SEQ ID NO: 893247 - DNA, 639 bp, Homo sapiens
aggactacagaaaactgctgctgttttctgaatgtttgtccctcacataggatttcggaacactgctacgagggtctgaatgtttctccctcacatagcattatagaacagtgctatgagtgtctgactgtttgttccccacaaagtattccacaacattgctgctgggttctgagggtttgttcctcacatggaattcctgaacattgctgctgggtactgggtatttgtccctcacataggatttcagaacacgactgctgggttctgagtttttgtcccacacctaggatttcagarcagtgctacaagggtctgaatgtttgtccctcgcatagcattccagaacactgctgctggtttccaaatgttttcactcacataagattccagaacacttctgatgggttctgtgtgtttgtacatcatttagaatacaaaacactactgctgggtttttagtgtttgtccctcacataggattccagagcactgctgcagggttctgagtgtttgtccttcacataacaatccagaacactgctgctgtgttccgagtgtgtgtccttcacgtagaattctagaacactgctgctgggttctgagggattgtacctcacataggattctagaacactg

SEQ ID NO: 893248 - DNA, 730 bp, Homo sapiens; identical to SEQ ID NO: 893244

SEQ ID NO: 893249 - DNA, 730 bp, Homo sapiens; identical to SEQ ID NO: 893245

SEQ ID NO: 893250 - DNA, 585 bp, Homo sapiens; identical to SEQ ID NO: 893246

SEQ ID NO: 893251 - DNA, 612 bp, Homo sapiens
ttttgagagtttgttcttcacataggattccagaacactgcagctgggttaagagtgtttgtctctcacataggattccagaacactgttacgaggttgtgaatgtttgtccctcacaaaggattccagaacactgctgctggtttctaagtcttagtcactcacgtaggattccagaacactgctgttgggttctgtttgtttgtccctcaagaaggattacagagaactgctgctgggttctgagtgtatctccctcacataggtttccagaacactgcttcgagtgtctgaaaatttctccttcacaaaggattctagaacactgctgctgggatctgagtgtttgcccttatattggattccagaacactgcttcaaagatatgaatgtttgtccctcacaaaggattccagaacrccgctgctgggttctgagtgtttgtcactcacataggattccaggacaccgctgtggggttttgagagcttgttcctcacatgggattccagaacactgctgctgggttaagagtgtttgtccctcacataggattccagaacactgctatgagattctgaatgtttgtccctcacaaagctttccagaaca

SEQ ID NO: 893252 - DNA, 512 bp, Homo sapiens
tttcagaacactgttggtcggttctgagagtttttccctcacatagaattccagaacactgctgggagcctctgaatgttttccctcacaaaggattcgagaaaacccctgctaagttctgtgtgtttgtccctcacaaaggattccagagcaccgctgctgctttctgggtgtttttccctcacgtatgattcyaaagcacttcctcgagtgtcttaaagtttttccctcacataggatttcataacacagtgtctgtgttctgagtggggtacctcacaggtgattccagaccactgctgctgggttctgagaatttgtccctgacataggattccagaacactgccagtttgttctgagtgtttttcccttacttaggattccacaacactgctatgagggtctgaatgtttgtctaacactaaggattccagaacactgctgctgggttctgagtttttgtccctcacataggattccagaacatttttttgaatgtctgaaagtttt

SEQ ID NO: 893253 - DNA, 512 bp, Homo sapiens
tttcagaacactgttggtcggttctgagagtttttccctcacatagaattccagaacactgctgggagcctctgaatgttttccctcacaaaggattcgagaaaacccctgctaagttctgtgtgtttgtccctcacaaaggattccagagcaccgctgctgctttctgggtgtttttccctcacgtatgattctaaagcacttcctcgagtgtcttamagtttttccctcacataggatttcataacacagtgtctgtgttctgagtggggtacctcacaggtgattccagaccactgctgctgggttctgagaatttgtccctgacataggattccagaacactgccagtttgttctgagtgtttttcccttacttaggattccacaacactgctatgagggtctgaatgtttgtctaacactaaggattccagaacactgctgctgggttctgagtttttgtccctcacataggattccagaacatttttttgaatgtctgaaagtttt

SEQ ID NO: 893254 - DNA, 544 bp, Homo sapiens
ctacgaggatatgaatatttgtcacttgcataggattctagaacactgctatgagggactgaatatttgtccctcacaaaggtttccagaacactgcttctggtttctgagtgtttgaccctcacataggattccagaacattgctacgagggtctgaatatttgtccctcaaaaaggattccagaatactactgctgsgttctgagtgtttgttccccacatacgattccagaacactgcagtgagggtatgaaggtttgtccctcacataggattccagcacactgctgctgggttctgaatgtttgtccctcacataggattccagaaccctgctacgacggtctgaatgtttgtccttcacagattccagaaatctgctgctgggttttgggtgtttgtccctcacataggtttccacaacatagctgctgggttctgcatgtttgtcccttacataggattccagaacaccactgctggcttctgtgtgtttgtccctcacataggattccagagcactgctatgagggtctaaaagta

SEQ ID NO: 893255 - DNA, 642 bp, Homo sapiens
tgatgtgttccagtgtagatcctcaatccaatggccagaagatgagagagcagaagagatggaagagaaatcttaagaaattctgctgagaatatgcgccctttcttcataacactgtgtttcttgtgttgagagcagctgtgcattttgggtatttagagagaaactttctcaggggagtattttctggtcgacttggctaatattatatgtagtctgaatttctctttcagatgcttttaacctcgtaatacaattttattcagactgagagctgtttttctcttcaatgctttcagtgtctgtcttcagaagggacacccaaaagtgtctcatggtgtttctgagtgagttgggctgtcacaatgagaactctttgrcactctatcgagacccatgctgggaatccagcagtatttttttgtcaccattataaatagaaacttaggctgaaacattgctcccatttccattattgcaaaagtgcaatcctacccaggagtcctgcaggttctcctcctgcagttcagggacgctgctccataatgtgacactggagtgcagctgtggcagttggagtccatgtggaatgtgggctgccagctgtgtgctgtgagctgcgcctcggtggtagatggtagg

SEQ ID NO: 893256 - DNA, 549 bp, Homo sapiens; identical to SEQ ID NO: 893240

SEQ ID NO: 893257 - DNA, 721 bp, Homo sapiens; identical to SEQ ID NO: 893241

SEQ ID NO: 893258 - DNA, 693 bp, Homo sapiens; identical to SEQ ID NO: 893242

SEQ ID NO: 893259 - DNA, 693 bp, Homo sapiens; identical to SEQ ID NO: 893243

SEQ ID NO: 893260 - DNA, 622 bp, Homo sapiens
tttggtcataaaaagtaatctatcaatttcaatttttaaagatttagtaagtttttatttttatcatggcctaacaggcagtttatcaaagagaatatatgtgagctattgagaatggttgtaccctgctattgttaaggggtgttgttaggcataatattgttttatacttctttttttgtatatttttttctttttgagatggagtcttgctctgtcrccgaggctagattgcagtgacgcaatctcgattcattgcaaaccccacttccctggttcaagcaattctcctgtcttagcctcctgagtagctgggattacaggcgcctgctaccgcatctggctatttttagtagagatggggatttgccatgttggccaggctggtctcaaactccttacctcaggtaatctgtcttcattggcctcccaaagtgctggaattacaagcatgagccacttgttcccatctgtactgctttcagtttctcttttccatttttttttttttttttttttttgagacagagtcttgctctcacccaggctggagtacagtggtgcgatctcgtctcactgcaagctccacctcctgggttcatgccattctcctgcctcagcc

SEQ ID NO: 893261 - DNA, 670 bp, Homo sapiens
gctgggattacaggcgcctgctaccgcatctggctatttttagtagagatggggatttgccatgttggccaggctggtctcaaactccttacctcaggtaatctgtcttcattggcctcccaaagtgctggaattacaagcatgagccacttgttcccatctgtactgctttcagtttctcttttccatttttttttttttttttttttttgagacagagtcttrctctcacccaggctggagtacagtggtgcgatctcgtctcactgcaagctccacctcctgggttcatgccattctcctgcctcagcctcctgaacacctgggattacaggcacctgccaacatgccctgctaatttttttgtattttcagtagagaccgggtttcatcgtgttagccaggatggtctccatctcctgaccccgtgatcgcctgccttggcctctcaaagtgctgggatgacaggcgtgagccaccgtacctggaccccttttccattattaatattgttttgttttattgttcgttgcagaaattgaagtattaaaatatcttattataattatattgctctctatttgttgctttcattcggtcaatttttgctttgtatttttggaaacctaatgtgagaaatacacatacacacgcaaacatataaatatat

SEQ ID NO: 893262 - DNA, 670 bp, Homo sapiens
gctgggattacaggcgcctgctaccgcatctggctatttttagtagagatggggatttgccatgttggccaggctggtctcaaactccttacctcaggtaatctgtcttcattggcctcccaaagtgctggaattacaagcatgagccacttgttcccatctgtactgctttcagtttctcttttccatttttttttttttttttttttttgagacagagtcttgctctcacccaggctggagtacagtggtgcgatctcgtctcactgcaagctccrcctcctgggttcatgccattctcctgcctcagcctcctgaacacctgggattacaggcacctgccaacatgccctgctaatttttttgtattttcagtagagaccgggtttcatcgtgttagccaggatggtctccatctcctgaccccgtgatcgcctgccttggcctctcaaagtgctgggatgacaggcgtgagccaccgtacctggaccccttttccattattaatattgttttgttttattgttcgttgcagaaattgaagtattaaaatatcttattataattatattgctctctatttgttgctttcattcggtcaatttttgctttgtatttttggaaacctaatgtgagaaatacacatacacacgcaaacatataaatatat

SEQ ID NO: 893263 - DNA, 670 bp, Homo sapiens
gctgggattacaggcgcctgctaccgcatctggctatttttagtagagatggggatttgccatgttggccaggctggtctcaaactccttacctcaggtaatctgtcttcattggcctcccaaagtgctggaattacaagcatgagccacttgttcccatctgtactgctttcagtttctcttttccatttttttttttttttttttttttgagacagagtcttgctctcacccaggctggagtacagtggtgcgatctcgtctcactgcaagctccacctcctgggttcatgccattctcctgcctcagcctcctgaayacctgggattacaggcacctgccaacatgccctgctaatttttttgtattttcagtagagaccgggtttcatcgtgttagccaggatggtctccatctcctgaccccgtgatcgcctgccttggcctctcaaagtgctgggatgacaggcgtgagccaccgtacctggaccccttttccattattaatattgttttgttttattgttcgttgcagaaattgaagtattaaaatatcttattataattatattgctctctatttgttgctttcattcggtcaatttttgctttgtatttttggaaacctaatgtgagaaatacacatacacacgcaaacatataaatatat

SEQ ID NO: 893264 - DNA, 602 bp, Homo sapiens
tacaaccttattttcttacttttgagaatttctcaggtattcttaattttttgagagagtgtcttgctctgtcacccaggtttgagtacagtggcatgattgcagcttactgcagccttggattccctaggcttacgtggtcctcctaactcagcctcctgtttactgggaccacaggtgtgtgccaatacacctgactaattttaatttttatagaagagaagtattgccatgtttcccagtttaaacttgaactcccaaggttcaagtgatctgcctgcctcaaactccaaagtgctgggactacagacatgagccactacagctggcctcagtcaatatttctatttctattttctacttctataatttctattatatttttcatcttttccttgatattatatwttttcctgattttatttagttacctgtgttcccatgtaagttaaatttttaaaattaaagtgtatgccttcattttcatggttgtcttctgacagttttgagggtttttttctgtttttttttttttacttaggccatgtcactgtaatattttgtatgtattgtactctttggttgagatttggacattaaca

SEQ ID NO: 893265 - DNA, 621 bp, Homo sapiens
agggtcaaacatgaggaattcaaaatacattcatgagagttgagttcaaactttactccaaagggagatcacagagcctgctatggttggatttggtagggacaagtttgtgtggcccatattcccattgctgtagcagaaattgtggcatctgtggcaggaaaagagaaagataaattttgatcttcatggaggagctcactgtmcttgaatctcacctgttataaacaacataaatgggtggacattttctgcatgcctggatctttctacctgtgtttgtggtggtagcaagtgaagggattgtgctgattcctttaaaggcatattcccaagatgcaggtgtgacttgtccagagaatatcacctgagaagaaattctagagaaggatgatgaagagaaaaatggctttttttctgtgaagacacaggtgactgtgtcttcagatagggagcagtgttcactctgcctcctggaatgccatatgtttagaacttacaaacctgtacttcttgattttatgctgtttctccctataagtttgtttaaacattttttcttctcatgatagtcaaggaactctgaaaaaaactttttttctacatactagagccttcttg

SEQ ID NO: 893266 - DNA, 621 bp, Homo sapiens
agggtcaaacatgaggaattcaaaatacattcatgagagttgagttcaaactttactccaaagggagatcacagagcctgctatggttggatttggtagggacaagtttgtgtggcccatattcccattgctgtagcagaaattgtggcatctgtggcaggaaaagagaaagataaattttgatcttcatggaggagctcactgtccttgaatctcacctgttataaacaacataaatgggtggacattttctgcatgcctggatctttctacctgtgtttgtggtggtagcargtgaagggattgtgctgattcctttaaaggcatattcccaagatgcaggtgtgacttgtccagagaatatcacctgagaagaaattctagagaaggatgatgaagagaaaaatggctttttttctgtgaagacacaggtgactgtgtcttcagatagggagcagtgttcactctgcctcctggaatgccatatgtttagaacttacaaacctgtacttcttgattttatgctgtttctccctataagtttgtttaaacattttttcttctcatgatagtcaaggaactctgaaaaaaactttttttctacatactagagccttcttg

SEQ ID NO: 893267 - DNA, 477 bp, Homo sapiens
aaatgagtcagctataattctacagaaagtattccaaaaaatcaaagtgggactccttcctaattaattctatcatatcagtctcatcttgatatattaatcaggtaaagacacacacaaaaaattacaggccaatatccctgatgaatacagacacaaaaattattcatgaaatgcttgcaaactgagtcaggaaatcraagttatttcactgcaactatgtggacattattctgtgaatgcaggaatgttttaacatgtgcaatctataaatgtgattcaacatataaaaataatttaaaaacaaaaccacattacctcaatagatgtggaaatagcaattaataaaatgtaatatctatttatgaaaagaattctcaaaaaactaggcattgaaggaacatacctcaaaataataacagccacatgagacaaatcctcagccaacatcatactgaacaggcgaaagattaatgc

SEQ ID NO: 893268 - DNA, 623 bp, Homo sapiens
tcaaactttactccaaagggagatcacagagcctgctatggttggatttggtagggacaagtttgtgtggcccatattcccattgctgtagcagaaattgtggcatctgtggcaggaaaagagaaagataaattttgatcttcatggaggagctcactgtccttgaatctcacctgttataaacaacataaatgggtggacattttctgcatgcctggatctttctacctgtgtttgtggtggtagcaagtgaagggattgtgctgattcctttaaaggcatattcccaagatgcaggtgtgacttgtccagagaatatcacctgagaagaaattytagagaaggatgatgaagagaaaaatggctttttttctgtgaagacacaggtgactgtgtcttcagatagggagcagtgttcactctgcctcctggaatgccatatgtttagaacttacaaacctgtacttcttgattttatgctgtttctccctataagtttgtttaaacattttttcttctcatgatagtcaaggaactctgaaaaaaactttttttctacatactagagccttcttgacattctctttatcttggcttcttctctgtcatgcagaattctcacc

SEQ ID NO: 893269 - DNA, 629 bp, Homo sapiens
aaagtatcacatgtaatctggaagttctcttttcttcttagattctctttgcatatgtctttctttaaaaagtgaagtctctcatctttgtttactggtcataaaaacccaggctctgccacataatgaatgtttgacaaaatatttatcttggaccagaaagattggtgtcacttgggagcttgttagaaattcagaaactcaggttttacctcaggtttcttgaaacaaaatctgcataaaaagatctccagtttattgttgtacacattaaaatttgagaggtactttataactaagcctgaattttttatctgagaaatatacagaacttatactgtatgattaaatcaagcactcaaaaatgtacatgtctatgttcctgttgttaattttgtactttatcattcaaaaaatatcatcaatacactayactggtattgtgaatcttatgctctcttttctcagagatagagaatacaacagaatattttttgttgtgagttattttataggacattttcagtcgtataagtcagaatcagttctcttcactcattttatcttgagtcaatttaagaattctgtccatggccacttgaagtgtgtgtgtgtgttttcagggactg

SEQ ID NO: 893270 - DNA, 605 bp, Homo sapiens
ttatttttcaggctaaataatattctattgtttatttatgccagcttttctttattcagcatccacaaacatttaggttttttatatcttggcaattgtgaataatgctgcaacaaatatggtggtacagatatgtcttcaagttacttatttcatttccttttgttatatacacagaagtgggattgctagattgtgtagtagttctgtatttmaaataacctctattggtttttataatgactccatcaatttataactctccaaaaatgtacagaattttttttcttcaaagtgctgtcaacacttgttatgtttcttctttttacattatccattctaacatgttttaaatgatactcatcttggttttgatttgcagttgcctgatatttggtgatattgagtactttatggcttatctgttggccatttgtatgtcttcattggacaaatatcagtttagttttttgcctattttgaactgggttactgttgtttttgcttttaatctgcttgcatttcttatatattttgtatataaatcttttatcagatgtatggtttgcaaataatttttcccattctacaattttttttatttt

SEQ ID NO: 893271 - DNA, 400 bp, Homo sapiens
ttttattttattgttcccttttctgtgcagaaggtttttagtttgatgcagtccagcttgtttatatttgcttttgttgctgtacttttggtattatgtctaacaaattattgttaagaccatatcatgagggttttccatgtattttttttcaggttttttaaggattcatatttaagtctgtaatttaacttttagcatggtgtaagaaaaataagctaattttattmttttgcctggttcttttttcagaacaaatattaaaaagactatactttgttcattgtgtatttttggtgcacttgtcaaaaattagtaaactttataagcctgggtttatttctgggctctagtctgttccatatgtttcttgtgtccatattttgcatgtatcatcttg

SEQ ID NO: 893272 - DNA, 590 bp, Homo sapiens
gaggacatatgtcacctcaggaccctgtgataactgcgttaactgcacagattgtagagcctgtgtgtttgaacaatatgaaatctggacaccttgaaaaaagaacaggataacagcaattgttcagggaataagagagataaccttagactctgaccactggtgatccaagtggaacagaaccatatttctcttctttcaaaagcaaatgggagaaatatcaytgaattatttttctcagcaaggaacatccctgagaaagagaatgcacccctgagggtgggactacaaatggcccccttgggtgtaaccatcttctatggtcaaaactttagggatgaaataaaccccagtctcctgtagaactctcaagcttattaggaagaggaaattcctgcctaataaattttggtcagacaggttgctctcaaaccctgtctcctgataagatgttgtcaatgacaatggtgtctgaaacttcattagcaattttaattttgccctggtcctgtggtcctgtgatcttgccctgcctccatttgccttgtgatattctattaccttgtgaagtatgtgatctttatgatcca

SEQ ID NO: 893273 - DNA, 590 bp, Homo sapiens
gaggacatatgtcacctcaggaccctgtgataactgcgttaactgcacagattgtagagcctgtgtgtttgaacaatatgaaatctggacaccttgaaaaaagaacaggataacagcaattgttcagggaataagagagataaccttagactctgaccactggtgatccaagtggaacagaaccatatttctcttctttcaaaagcaaatgggagaaatatcactgaattatttttctcagcaaggaacatccctgagaaagagaatgcacccctgagggtgggactacaaatggcccccttgggtgtaaccatcttctatggtcaaaactttagggatgaaataaaccccagtctcctgtagaactcycaagcttattaggaagaggaaattcctgcctaataaattttggtcagacaggttgctctcaaaccctgtctcctgataagatgttgtcaatgacaatggtgtctgaaacttcattagcaattttaattttgccctggtcctgtggtcctgtgatcttgccctgcctccatttgccttgtgatattctattaccttgtgaagtatgtgatctttatgatcca

SEQ ID NO: 893274 - DNA, 603 bp, Homo sapiens
aaggcttaccagaagctttattttacattatttctaccaaaaattcatattctcaaatattaaaagtggtattctgtattaccatttttcaagtaatgtagtctgcatttattagtacctttcaatgtattttttttttacatggggtaaggttattaaaatgycttgcagttgattttctaggtaacaacggaatctgttttctcaaacagtagcatgagaattcttgatataccaccttcagaggtactgaaaacaaccatatacttttgctgaaatttggattttttcataacctcttcagaggctgagtcatggcaacatatgacagcttaatttattcttcttctctaaatgttgtggagccacatccacctgtgtaaataacactaactgggtaaaagcttttttatactaagccagaaatcattatacctggtggttttattttaaatgtatgaacagtattctataacattcaaataagtaatagaaatttaattctatatatatggaaagaaaagttatacaggcacactgagaataaattggaatctggaactgaatgctgattagcatggcctataaaatcaaaaccaagtt

SEQ ID NO: 893275 - DNA, 603 bp, Homo sapiens
aaggcttaccagaagctttattttacattatttctaccaaaaattcatattctcaaatattaaaagtggtattctgtattaccatttttcaagtaatgtagtctgcatttattagtacctttcaatgtattttttttttacatggggtaaggttattaaaatgtcttgcagttgattttctaggtaacaacggaatctgttttctcaaacagtagcatgagaattcttgatataccaccttcagaggtactgaaaacaaccatatacttttgctgaaatttggattttttcataacctcttcakaggctgagtcatggcaacatatgacagcttaatttattcttcttctctaaatgttgtggagccacatccacctgtgtaaataacactaactgggtaaaagcttttttatactaagccagaaatcattatacctggtggttttattttaaatgtatgaacagtattctataacattcaaataagtaatagaaatttaattctatatatatggaaagaaaagttatacaggcacactgagaataaattggaatctggaactgaatgctgattagcatggcctataaaatcaaaaccaagtt

SEQ ID NO: 893276 - DNA, 645 bp, Homo sapiens
gttcattattcctagaattttgaagcttattaagacattccctatcctatgtcatactctagagcactctagtcagaatcctgatagaatacactctttttttttgttttttaaagtgtacatttcagtgatttttaataattttttttatactttaagttctagggtacatgtgcacaacgtgaaggtttgttacatatgtatacatgggccatgtttgtgtgctgcacccattaactactcatttacattaggtatatctcctattgctatccctcccttcttcccccaccccacaacagggcctggtgtgtgatattccccttcctgtgtccaagtgttcccattgttcaattctcacctatgagtgaggacatacagtgtttggttttttgttcttrcgatagtttgctgagaatgatggtttccagcttcatttgtgtccctacaaaggacatgaactcatcctttttcatggctgcatagcattccatggtgtatatgtgccacattttcttaatccagtctatcattgatggacattttttgttggttccaagtctttgctattgtgaatagtgccgcagtaaacatatgggtgcatgtgcctttatagcagcatgatttgtaatcctttcggtatat

SEQ ID NO: 893277 - DNA, 645 bp, Homo sapiens
gttcattattcctagaattttgaagcttattaagacattccctatcctatgtcatactctagagcactctagtcagaatcctgatagaatacactctttttttttgttttttaaagtgtacatttcagtgatttttaataattttttttatactttaagttctagggtacatgtgcacaacgtgaaggtttgttacatatgtatacatgggccatgtttgtgtgctgcacccattaactactcatttacattaggtatatctcctattgctatccctcccttcttcccccaccccacaacagggcctggtgtgtgatattccccttcctgtgtccaagtgttcccattgttcaattctcacctatgagtgaggacatacagtgtttggttttttgttcttacgatagtttgctgagaatgatggtttccagcttcatttgtgtccctmcaaaggacatgaactcatcctttttcatggctgcatagcattccatggtgtatatgtgccacattttcttaatccagtctatcattgatggacattttttgttggttccaagtctttgctattgtgaatagtgccgcagtaaacatatgggtgcatgtgcctttatagcagcatgatttgtaatcctttcggtatat

SEQ ID NO: 893278 - DNA, 596 bp, Homo sapiens
atttctctgatgaccagtgatgatgagcattttttcatggtctgttggctgcataaatttcttcttttgaaaagtgtctgttcatatccttcacccactttgtgatgggattgtttgtttttttcttgtaaatttgtttgagtcctttgtagattctggatattagccctttatcagatgagtagattgcaaaaatcttctcccattctgtaggttgcctgttccttctgatggtagtttcttttgctgtgcagatgctctttagttaattagatcccatttgtcarttttggcttttgttgccattgcttttggtattttagacatgaaatccttgcccatgcctatgtcctcaatggcattgcctaggttttcttctagggtctttatggttttagatctaacatttaagtctttgatccatcttgagttaatttttgtataaggtgtaagaaagggatccagtttcagctttctacctatggctagccagttttcccagcaccatttattaaatagggaatcctttccccatttcttgttgttgtcaggtttgtcaaagatcagatggttgcagatgtgtggtattatttctg

SEQ ID NO: 893279 - DNA, 532 bp, Homo sapiens
tactaggctcacggaaaattcccccgagggatgtatagctacactgaggaatgaagaatgaaaaggaagcagttgagcaaacaaggaaggaaagcactttagccagtctgtggcatgtgctgaaactctagtgtagtctgcctctagccaagggagagcaacaggtatgatttttcttcttagctaaaataactaaaatcaaaacacacaaaatacattaaacaattttttagacactgtacattaggcaaagaagataataatccctgaaaaacagaaaaaaaaacacgaaagaaagcaaaccttatgaatgtttcagcttcctgcsttgacagagattccgagacatgacacaggaagaaaaaactgaggtgggatctaccagactctcctggttacattgatgaagcttagagtctggtaaaaccaaagcagacagatattacagaacaaacactgaggaggagagagagatacagaatcaacggcaagaaaccccctgtcagtagttagcaaaattttgaaaattgca

SEQ ID NO: 893280 - DNA, 682 bp, Homo sapiens
gatttcttcttggataccagaaatatcaatcacatcaaaagtatacctaacaactctaaaataattcttttgaacagattaccactgaagaacttgtaagttaaatccagtagacttttgagtaattttactgcttgaaattctcacatttaaaagaaattggtaacatcactttctcagactcctctcctacatttctttaaccactgctcagcctcctttaccaagtcctttgactcttgtaaaatgttgatattcccagggttttctcaatggctttctttttattctacatcttctgcctcatggataagctcattgagatctatggctwtgcctaataattataataaaagtattctaagcctgcattttcaaccagagttctatctccagctagaaatgcatataatccaattgcctactgaatgtatcccccatgaatgtttcattgaactcaacatgtgaagaaaactattggtctgtcccatgactgtttgcacttctctgttaacctgacaaattcctactccttccccatgagcattgtaaatccttgtgcacaatctgaaaacttatgagtgacctgagattttatctatcccctagctttttaaactcaattatcactaagccatattaactgcacctcttttctgcctttgctttatctttccagtgc

SEQ ID NO: 893281 - DNA, 682 bp, Homo sapiens
gatttcttcttggataccagaaatatcaatcacatcaaaagtatacctaacaactctaaaataattcttttgaacagattaccactgaagaacttgtaagttaaatccagtagacttttgagtaattttactgcttgaaattctcacatttaaaagaaattggtaacatcactttctcagactcctctcctacatttctttaaccactgctcagcctcctttaccaagtcctttgactcttgtaaaatgttgatattcccagggttttctcaatggctttctttttattctacatcttctgcctcatggataagctcattgagatctatggctatgcctaataattataataaaagwattctaagcctgcattttcaaccagagttctatctccagctagaaatgcatataatccaattgcctactgaatgtatcccccatgaatgtttcattgaactcaacatgtgaagaaaactattggtctgtcccatgactgtttgcacttctctgttaacctgacaaattcctactccttccccatgagcattgtaaatccttgtgcacaatctgaaaacttatgagtgacctgagattttatctatcccctagctttttaaactcaattatcactaagccatattaactgcacctcttttctgcctttgctttatctttccagtgc

SEQ ID NO: 893282 - DNA, 475 bp, Homo sapiens
aaatgagtcagctataattctacagaaagtattccaaaaaatcaaagtgggactccttcctaattaattctatcatatcagtctcatcttgatatattaatcaggtaaagacacacacaaaaaattacaggccaatatccctgatgaatacagacacaaaaattattcatgaaatgcttgcaaactgagtcaggaaatcraagttatttcactgcaactatgtggacattattctgtgaatgcaggaatgttttaacatgtgcaatctataaatgtgattcaacatataaaaataatttaaaaacaaaaccacattacctcaatagatgtggaaatagcaattaataaaatgtaatatctatttatgaaaagaattctcaaaaaactaggcattgaaggaacatacctcaaaataataacagccacatgagacaaatcctcagccaacatcatactgaacaggcgaaagattaat

SEQ ID NO: 893283 - DNA, 568 bp, Homo sapiens
tagcttccaggtcactaaccagtgtcagagagcagcccatgcaactacaaattcaaaagatgtcgaacacagggtcaagcctagaataagaagtcttagctaattaagtatgcttttttccccaaattcatattaacaaaacttggatatgtcagagaatgcattctaagttcactcaacctaggagggagaaacataattttaaattaagagctgaatyattcttgtcctatcagaaagcaaggaaaacgaaatatcacaccacaggagggatttcacaaattagtgtcaacatcaaaaccttaaaacagtcaaggagaatgcagattcacaatgaactcttgtacttgttttgttcagagaagagatggttctgagagaatgacagtgaactaaccccagctggtttagttggtgctttcaaatgctgcttctgataaactcctttagctagaataaattgatgaggattttggcatgcggtattagagatggttattaattttgtcctcttatttgcattgttcaatatagtaaatactagctgtatacggctacttcaattcaa

SEQ ID NO: 893284 - DNA, 611 bp, Homo sapiens
taagaataagcaagagtggtaaaaaattgagaatctacatgtagatgaaaaattaatatatgaaaataaacaattcaaagaaaacaaaattggaccctcaatttacactgaaggctttgaagtgatacataaaatgatttttaaaatgatttaaatacgtacataaatggagagaggaagggtgggagagaagcgggagagagagaaaatagaagactaaagacgggaacacctatgtggaaaaagataacacttaatgacaaaatatgttttatgtgaatatcagttatacataataaatattggggacattgcgttgtgggttacagyaaagcattaagaaacagagtaagtgaacaaaaaaaggaaagaaaactaccaaattccatgtatgataacccgttttgaaattccataaattaaacatgtgtacacataagaaaatttaaaacattaaaattttgttaacaaaatggatttgataacacgaaggccattgatgaccttacccacagcagctttgttcaaatggggattaaggatggagcaaaatttattagaacactttgaataatgaattagcaaactacaataaactgaaatcttatcta

SEQ ID NO: 893285 - DNA, 587 bp, Homo sapiens
tcatccagataaagcccatgtgtgcttctgtcacatctttttctatatttttctaatttttttctaaacttttctaattttttcttaatttttatagaattgtggatacctaataatgtagtctcaaaataaataaagccaaaattagaattggaaacagcaataaaaaaaatctacacagtgagagattttaacatttcatttttagtaattgaataaataaaaatraaattagtaaggctaatcaacagttaaagaatttctattcttttcaagcacacttggagtatttacaaaaattgaccagatattagacctaaaggtagtatcaaatgtttacagtggtataacaaatgtgtaataacactattagaaatcaataacaaaaacttatccaaaagtaatccatgaattttagaaactacaaacagcttccaaatgattcatggaagcaagaagaaattataataaaaattagaacatgcttaaaattgaattaaaatgaaaacattaccgatcaatatatatgtaaaataaccgaagcagtacttagagtgaaatttaccagaagcaattcacattcatgg

SEQ ID NO: 893286 - DNA, 602 bp, Homo sapiens
agttaggaaaagatgaagtcaaattgtccctgtttgcagatgacatgtttgcatatttagaaaaccccaccgtctcagcccaaaatctccttaagctgataagcaacttcagcaaagtctcaggatacaaaatcaatgtgcaaaaatcacaagcattcctatacaccattaatagacaaacagagagccaaatcatgagtgaactcccattcacaattgctacaaagagaataaaatacctaggaatccaacttacaagggacgtgaaggacctcttccaagagaactacaaaccactgcttaacgaattaaaagaggacacaaacaaatgcaagagtattccacgctcatggatargaagaatcaatatcatgaaaatggccatactgcacaaagtaatttatagattcaataccatccccatcaagctactaatgactttcttcacagaattggaaaaaaaactactttaaatttcatatggaaccaaagaagagcctgcattgccaagataatcctaagcaaaaagaacaaaactggaggcatcacactacctgacttcaaactatactacaaggctacagtaaccaaaacagcatggt

SEQ ID NO: 893287 - DNA, 616 bp, Homo sapiens
acttggttctattacttaacatattatttattcaggtagtcaccaaaaccagaatttaaaatctattcagttaacccatttaaagttgatgtgttttactccttttttttttctttttgtagtgatctttttaactgaattactggacatcatggggagttctactcctcctatwtggaaacttaggctatcttaccaagttcaatattcaaagtttttctttctgccattaagtttgtttaattttatattaagctcagtttgtattatgatatcaaattcagcctgagggattactttaaactttcctagggtatttgcagatttaatttgttcttacagtatgtaaataccaagagagcattccatttaatattatttttattaaattaactttggagtaaaaagtccaagaaaagccctgtactgaaatcacatgtttactaaatcctggattttctgtacagtccctacatatttctactttaaaattcttctgtcttgtgaaataattcattaaaagcagcaggcagatgatgacaggtaaactttttaatgatgttctaatgttgacaattgcagttttattttgcttggatcataatggcgtgtaagc

SEQ ID NO: 893288 - DNA, 607 bp, Homo sapiens
agttaggaaaagatgaagtcaaattgtccctgtttgcagatgacatgtttgcatatttagaaaaccccaccgtctcagcccaaaatctccttaagctgataagcaacttcagcaaagtctcaggatacaaaatcaatgtgcaaaaatcacaagcattcctatacaccattaatagacaaacagagagccaaatcatgagtgaackcccattcacaattgctacaaagagaataaaatacctaggaatccaacttacaagggacgtgaaggacctcttccaagagaactacaaaccactgcttaacgaattaaaagaggacacaaacaaatgcaagagtattccacgctcatggataggaagaatcaatatcatgaaaatggccatactgcacaaagtaatttatagattcaataccatccccatcaagctactaatgactttcttcacagaattggaaaaaaaactactttaaatttcatatggaaccaaagaagagcctgcattgccaagataatcctaagcaaaaagaacaaaactggaggcatcacactacctgacttcaaactatactacaaggctacagtaaccaaaacagcatggtactgg

SEQ ID NO: 893289 - DNA, 607 bp, Homo sapiens
agttaggaaaagatgaagtcaaattgtccctgtttgcagatgacatgtttgcatatttagaaaaccccaccgtctcagcccaaaatctccttaagctgataagcaacttcagcaaagtctcaggatacaaaatcaatgtgcaaaaatcacaagcattcctatacaccattaatagacaaacagagagccaaatcatgagtgaacgcccattcacaattgctacaaagagaataaaatacctaggaatccaacttacaagggacgtgaaggacctcttccaagagaactacaaaccactgcttaacgaattaaaagaggacacaaacaaatgcaagagtattccacgctcatggatargaagaatcaatatcatgaaaatggccatactgcacaaagtaatttatagattcaataccatccccatcaagctactaatgactttcttcacagaattggaaaaaaaactactttaaatttcatatggaaccaaagaagagcctgcattgccaagataatcctaagcaaaaagaacaaaactggaggcatcacactacctgacttcaaactatactacaaggctacagtaaccaaaacagcatggtactgg

SEQ ID NO: 893290 - DNA, 347 bp, Homo sapiens
accaaaggcaaaaataaaatcttaaataatctagacagagaaagagagattaatcataattgaataaacaatagagcagattctcaattcttatcagcaacaatagaagatggaagataattaaataaagtcttcaaagtacagagataaataaaacattcaatgttgaattctgcagtcagttmactttcactcgaacaaaagacaaatgaaagatattgtcaaacaaacacatttaagaacatatgccattttttaccagggaaaaatctactgaaagatatgctttagaaatatgacacagaaccaaaaaagatggaacaatgtgcaaagaaattggtaaaatt

SEQ ID NO: 893291 - DNA, 658 bp, Homo sapiens
atgaagtctacttgatcatggtggataagctttttgatgtgctgctagattcagtttgccagcatttaattgaggatttttacatcaatgttcatcaaggatattgatcaaaaattctcttttttggttgtgtctctgccaggctttggtatcaggatgatgctggcctcataagatgagttagggaggattccctctttttctattcattggaatagtttcagaaggaatggtaccagctcctccttgtacctctggtagaattcggctgtgaatccatctggtcctggactgttttaggttgataagctattgattattgccacaatttcagagcctgatattggtctattcagagattcaactacttcctggtttagtcttgggagggtgtatgtgtcraggaatttatccatttcttctggattttctagtttatttgcatagaggtgtttgtagtattctctgatggtagattgtatttctgtggcatcagtggtggtatcccctttatcatttttttattgtgtctatttgattcttctctcttttcttctttattagtcttgctagcagtttatcaattttgttgatcttttcaaaaaaccagctcctgaatttataaattttttgaagggttttttgtgtctctatttcc

SEQ ID NO: 893292 - DNA, 658 bp, Homo sapiens
atgaagtctacttgatcatggtggataagctttttgatgtgctgctagattcagtttgccagcatttaattgaggatttttacatcaatgttcatcaaggatattgatcaaaaattctcttttttggttgtgtctctgccaggctttggtatcaggatgatgctggcctcataagatgagttagggaggattccctctttttctattcattggaatagtttcagaaggaatggtaccagctcctccttgtacctctggtagaattcggctgtgaatccatctggtcctggactgttttaggttgataagctattgattattgccacaatttcagagcctgatattggtctattcagagattcaactacttcctggtttagtcttgggagggtgtatgtgtcaaggaatttatccatttcttctrgattttctagtttatttgcatagaggtgtttgtagtattctctgatggtagattgtatttctgtggcatcagtggtggtatcccctttatcatttttttattgtgtctatttgattcttctctcttttcttctttattagtcttgctagcagtttatcaattttgttgatcttttcaaaaaaccagctcctgaatttataaattttttgaagggttttttgtgtctctatttcc

SEQ ID NO: 893293 - DNA, 433 bp, Homo sapiens
ccctacaaacaagaagacagtgggggccaatattcaacattcttaaagaaaagaattttcaactcagaatttcatatccagccaaactaagcttcataagtgaaggagaaataaactcctttatagacaagcaaatgctgagagattttgtcaccaccaggcctgccttacaagagctcctgaaggaagcactaaacatggaaaggaataaccagtaccagccacacaaaaacatgccaaattgtaaagatcctaggaaraaactgcatcaactaatgagcaaaataaccagttaacatcataatgacaggatcaaattcacacataacaatattaaccttaaatgtaaatgagctaaatgtcccaattaaaagacacagactggcaaactggataaagagtcacgacccatcagtgtgctgtattcaggaga

SEQ ID NO: 893294 - DNA, 697 bp, Homo sapiens
ctattaccaataatgtttcaacaaacacctttggacatctcttctgcaaatgtgtgtgtattctcttggagaaggtttaccttgtggaacttctagtgtgtatgtgtatgtgtgtgggtatatatatatacacatatgtatatattttcaactttactatatatttccaaaaaactcttcaaagtggcagatttaaactccccttcaccgtatataaattcacggttcctaaagcccttggcatagttttgtgtttttatagaaaagggcataaagtcttattgctgttgaattgtaccttgctcttttcaattgtcttttcacaataattcactatttatcatctgttgtgaatattgtgtagtrgttcttaatcattttttctactatattatttattttatatcattaatttgtagaaatcctctttatataatggatattatacttttcaattatatattttgtaaatattttacccaattttctggcttgcatttaacctttatttaggatgcctaggatttttcattttaatacagtctaatttatttttcttttcttttcttcttcatgcattctggcatttgattaataagccatttgttgcccaacgtcattagttctctgtatatacttttaaatatcttaaacatgtaatattcataagtaatttcacaagtagtttaagatttga

SEQ ID NO: 893295 - DNA, 689 bp, Homo sapiens
acctttggacatctcttctgcaaatgtgtgtgtattctcttggagaaggtttaccttgtggaacttctagtgtgtatgtgtatgtgtgtgggtatatatatatacacatatgtatatattttcaactttactatatatttccaaaaaactcttcaaagtggcagatttaaactccccttcaccgtatataaattcacggttcctaaagcccttggcatagttttgtgtttttatagaaaagggcataaagtcttattgctgttgaattgtaccttgctcttttcaattgtcttttcacaataattcactatttatcatctgttgtgaatattgtgtagtagttcttaatcattttttctactatattatttattttatatcatkaatttgtagaaatcctctttatataatggatattatacttttcaattatatattttgtaaatattttacccaattttctggcttgcatttaacctttatttaggatgcctaggatttttcattttaatacagtctaatttatttttcttttcttttcttcttcatgcattctggcatttgattaataagccatttgttgcccaacgtcattagttctctgtatatacttttaaatatcttaaacatgtaatattcataagtaatttcacaagtagtttaagatttgagtctttaacctaaataga

SEQ ID NO: 893296 - DNA, 679 bp, Homo sapiens
aatgtggatggattctaataaagggactacttacagcacagcaggaaagtcacaaagaaaccagacagaagagtgtaagtagtaaggggccaagcagtcacctgactagagacagtgccagcttgccaagaaggcaccagacagaagctgtgatcttcagcaaagggacacagtctgcctgtgctgaccctgcaggggcagaggtgggggataaacacactcttctctcacctatcttctgccaccccctccattagctgaaccccaataaaagcatgagggtaagggagatctctgaagtatccaattcaggtgagcctcctaaggaacaaagcagaatgcagaaaaattaagagtgggtctagggaataaaatagagatatgcaccagagtatgatgatgtgtctgggaaagaatatacaaatacttttaaaattactagacaataaacctgagatgacactaatacaggtaaatctcatttaatggtaatatattccaagaaatgcatcattaggtgattytgtggctgtgcagacaccaaagagtgtactttatacaaacctagacagcgtagcctactacatacctaggctatatcgtacagcctattgctcctgggctacacacctgtgcagcatgtcactgtgctgaatacagtaggccaatggtccgcaac

SEQ ID NO: 893297 - DNA, 600 bp, Homo sapiens
atattaatagttgccaaggtttctggagaaagaggacagagattaatgagaagagaggatttttagggaagtgaacattttctttatgagaccataagggtgaacataatgttttaaatatttcaaaattcatatatatgtataacagaaagaatgaacattatgcaaatgtagacttcagataataatgtgtcaatattttctcattattctagcaaatgtaccacagtaatgtaagatgttactaataggtgaaattaggaagtgagggtgaggagacagaataatatgggaacttcgtgtattatatactcaatttttatttatgtatttatttatttatttatttattttgagatgragtttcactcttgtcacccaggctggagtgcaatggcatgatcttggctcactgcaacctctgcctcctgggttcaagcgattctcctgcctcagcctcctgagtagctgggattacaggcgcctgccaccacacccggctaatttttttggatttttagtagagatggggtttcaccatgttggccaggctggtctccaactcctgacctcagatgatccgcctgccttggcctccta

SEQ ID NO: 893298 - DNA, 623 bp, Homo sapiens
aattcagtatgatagtttttttttagacaaagttttgctcttgttgcctaggctgaagtacaatggcatgatctcggctcaccacaacctccacctcccgggttcaagcgattctcttgtctcagcctcccgagtagctgaggttacaggcatgcaccaccacacatggctaattttgtatttttagtagagacagagtttctctatgttggtcaggctggtcttgaactcctgacctcaggtgatccacccacctcagcctcccaaagtgctgggattacaggcatgagccaccrtgccccacccagtatactagcatttttagagtttttgcatcaatgatcagaggcatattgatctgttgttttattttcttacagtgtttttggctttggtatcagggtaatgctggcctcatagaaagagttaagaggtattcactcctcttccactctttggaaatgcttgaaaagaatcagtgttagttcttctttaaacgtttggcagaactcaccagtaaagctatcaggtccaggacttttctttgtcatgagattgtcttattactgactcaattcccttactagattaggtctattctgactttctgtttctttataatt

SEQ ID NO: 893299 - DNA, 642 bp, Homo sapiens
actcggttatttgttgaatgaacttcttgggaaagccttcttaggaaagtattagaagtagattctgctaaaacaggggctaccctcagaggtctcaggacaagggatagaaagtcaaacactgatgtttaagaagggatgcctatgacacatgaatcccacagccatctctccaraagagcaactattttgactgcgcatgcgggaagatggcgggccgggcgacttgagatccgcgggtctccctgctccttttccgtctgcgtcgggagctcccgggcacgtgaggccgtgccgcgtttactggcgggagggacggcctagccgggcgacgcctcggaggaggccgcggaccccttaggtgctgggcccttggaaatcggcgcgtggggggcggtgctcgagctgagcgcgagagggcgggagagctcgtggggtgcgaggggagcaggacgcccggccgggcagcatgagtcagcagcggccggcgaggagattacccagtctcctcctgcacccgacggaggagaccccatcaacgtggagggcctgctgccatcaaaaataaggattaatttagaagataatgtacaatatgtgtccatgagaaatctgctcccgggggtattcttgacttaaaca

SEQ ID NO: 893300 - DNA, 644 bp, Homo sapiens
aaagcacttgataaaattcaacatcctttcatgattaaaaaaaacaacaaactgagcaaattaggtgcagaaggaatgtacctcaacataatgaagaccacatgtaacatactcaacagtgaaagactgaacgtttttcctcraagatgaagaacaagacaagaattcctactctcaccatttctcctcaaaataggactggaagtcctagccagaacaattaagcaagtaaagaaataagaatggaagtaaaatggtctccatagatgacatatttttatgtatagaaaactgtaaagacttcactaaaagactgttagaagtaataaattcaataaagtagcaagatacagagtcaacatccaaaaatcagttgcatttctatgcatagatggactggagggcattatgttaagtaaaataagccagacacagaaagtgaaatattgtacaatctcacttatgtgtggaacctaaagacgtcaaactcagaagaagagaacagaatggtggttgctgggagctggggaagagaaggaaatgggaagttgatggttaaagtgtacaaatttcagttatgcaagataagtaagttctggagagctatacagcatagtacccacagaaaatgatactatattctt

SEQ ID NO: 893301 - DNA, 626 bp, Homo sapiens
ttctggccttttctatctcctagaagttgcttcagtctggtaagggcttgcagcagtggagtggggagttgtgagcaataatggctgccggcctctgtgtttgcccttccataatcaaaagtagcaatcaacaaccagaacgcagatgctaacacttggaggacagagtgcttatygcccatgattgttcccacaagcttggtacaagctgcttcaggaacacatgcaaagcttcttgccgtgaagctggggcatggggattgggtagccactgctgagctaagagctgaaattgaccaaaattaagtaaaaattatagtttaagccttcatttggaggttacaagcctcctttgatagagtctagagttccaaaatagttatatcaggcagattctgccagtgtgattattttctaggtggggagatgaattcccagtgcttcctactccactttcttcccagaaccctctcttgtaatagttttttacttaaaatctattttgtctatactttttttccatatatttactttttattgaatttgttaacgttacagagttcttgcactgccaaaccatgcctgagaattcaaacaaatggtacaatggacagcctcatccaccc

SEQ ID NO: 893302 - DNA, 626 bp, Homo sapiens; identical to SEQ ID NO: 893301

SEQ ID NO: 893303 - DNA, 669 bp, Homo sapiens
gccagcagcccacctgtgacaggagcctggctctgctcctagctggccgtgtgaccttgggcaagtcactggcttcttctgtgcttctgtttattgtgaaatgaggatgttaatgctaacgtatcccagaggatggtttcaaggattaaagaaaataaagcactagagagaggtctggcacttagtagggccatttcctcaatttggcttccttgacctctcaaagtatgtccccacagtcactttcctatcacccagttttcttcacagagcttggcagtgtgaagtaaccttggttattcaactttttttttttcccccaagacggagtcttcctctgtcacccaggctggagtgtagtggcaagatctcggctcactgcaacctctgcctcccgggttcaagcgattctcctgcctcagcctcctgagtagcagagattacaggcgcccgccaccacgcctggctaattttttgtatttttagtagagacygagtttcaccacgttggccaggctggtctcgaactcgtgacctcgtgatccacccgcctcggtctcccaaagtgctgggattacaggcgtgagcccccgcgcctggtcaactattttatgcaatcagtatttattatgctcctactatgtgccaggcactggttgtaactgccat

SEQ ID NO: 893304 - DNA, 670 bp, Homo sapiens
gccagcagcccacctgtgacaggagcctggctctgctcctagctggccgtgtgaccttgggcaagtcactggcttcttctgtgcttctgtttattgtgaaatgaggatgttaatgctaacgtatcccagaggatggtttcaaggrttaaagaaaataaagcactagagagaggtctggcacttagtagggccatttcctcaatttggcttccttgacctctcaaagtatgtccccacagtcactttcctatcacccagttttcttcacagagcttggcagtgtgaagtaaccttggttattcaactttttttttttcccccaagacggagtcttcctctgtcacccaggctggagtgtagtggcaagatctcggctcactgcaacctctgcctcccgggttcaagcgattctcctgcctcagcctcctgagtagcagagattacaggcgcccgccaccacgcctggctaattttttgtatttttagtagagaccgagtttcaccacgttggccaggctggtctcgaactcgtgaccgcgtgatccacccgcctcggtctcccaaagtgctgggattacaggcgtgagcccccgcgcctggtcaactattttatgcaatcagtatttattatgctcctactatgtgccaggcactggttgtaactgccatc

SEQ ID NO: 893305 - DNA, 670 bp, Homo sapiens
gccagcagcccacctgtgacaggagcctggctctgctcctagctggccgtgtgaccttgggcaagtcactggcttcttctgtgcttctgtttattgtgaaatgaggatgttaatgctaacgtatcccagaggatggtttcaagggttaaagaaaataaagcactagagagaggtctggcacttagtagggccatttcctcaatttggcttccttgacctctcaaagtatgtccccacagtcactttcctatcacccagttttcttcacagagcttggcagtgtgaagtaaccttggttattcaactttttttttttcccccaagacggagtcttcctctgtcacccaggctggagtgtagtggcaagatctcggctcactgcaacctctgcctcccgggttcaagcgattctcctgcctcagcctcctgagtagcagagattacaggcgcccgccaccacgcctggctaattttttgtatttttagtagagacygagtttcaccacgttggccaggctggtctcgaactcgtgaccgcgtgatccacccgcctcggtctcccaaagtgctgggattacaggcgtgagcccccgcgcctggtcaactattttatgcaatcagtatttattatgctcctactatgtgccaggcactggttgtaactgccatc

SEQ ID NO: 893306 - DNA, 568 bp, Homo sapiens
tgttataaaaaatactcagactgggtaatttataaagaaaataggtttaattttctcacagtttcacatggctggggaggcctcaggaaacttacaatcatggcagaaggcacctcttcacagtgcggcaggagagagaatgagtgcaagcagaggaaatgccagatgcttaaaaaaccatcagatctcatgagactcagtcattattatgaaaacagcatgggggaaactgcccccatgattcaatcatctccacctggtcccacccttgacatgtggggattatggggattacaattcaaggtgatatttgggtggggacacaaagccaaaccatattatttggcacttggtccctcccamatcacatgccctcacatttcaaaatacaactgtgtgccctttcaacagttccccaaagtcttaactcattccagtattaattcaacatccaagtctaaagtcttatctgaggcaaggtaatttctttcctcctatgagcctgtaaaatcaaaagcaagttattaatagttacttcctagatacaatgggggcatagacattaggc

SEQ ID NO: 893307 - DNA, 613 bp, Homo sapiens
acccaactacgtgagaaactccaataagtaaaatgtctctcagtttgtgcatatttgtttgtctgtgacatattagaataatcattgcaggtaaaaattttttgaataaattaatttataattgcatatgttattctccagttcagcaattttattttctcaggatttatagatatacagattttatatataaaaaattttcggcttctccaaattttttttgaaatttgagttataaatatcaatatatactatattataaattaaaactgtgaaattcaagaactrtttattatttaaaatagcagaaataaattcattgcatgttaacaaaaattgcacaattttataaaaatagctatattttcaaaacaaaataaaatgtaaatgattatattgttttacatttttacaaattaatgtaatgtccaaattcaagaaaagatggggattatcatatctgcttttttatgtaatctattgtgataccacatgtctataaagcctttgaaaatattcactgtatgctcatgaggaaaagactagaaagagcaaataatgtcataatattataattaatgtggttttgagtccatgggcttccaaaagtata

SEQ ID NO: 893308 - DNA, 596 bp, Homo sapiens
gtggtggctcacgcctgtaatactagcactttgggattacctagccaaggtgggtggatgatgtgaggtcaagagtttgagaacagcttggccaacatggcgaaaccctgcctctattaaaaacacaaaatttttctggctgtggtagcacgcmtctgtaatcccagctactcaggaggctgaggcaggagaattgcttgaacccaggaggtgcaggtctcagtgagccaagattgtgccgttgcactccagcctgggcaacagcagtaactccgcctcaaaaaaaaaaaaaaaagaaaagaaaagaaaaacaaaacaaagagccccatgagcttccagttcaaaggtaatataataagtaactttatactctgttagactacctataggtactaaaactaactaatcattagtatgtatatattctattatttattactatatattaatttaattattactataaatcactttatttttaactataatgtgaaaaaacttccatgcagaaagaattttcccattcgtttaataatttactatagaatcacttcctatatttcaatatctacctttgactgcagtagtatggctac

SEQ ID NO: 893309 - DNA, 608 bp, Homo sapiens
accaagctacagatatgacccaaatttcaatagacagatgagtggacagagaaaacataatgtacatgtaccatgaaatattatccagttttttaaaataaagaagaaaatcctacaacttgggaaaacatagacctggaggacatctactaagtgaaataagccagtcacagaagtacaaatactgcatgatttcatttatatgagttctaaaaatagtcagacttctagaggcagagaatagaatagtggatgtcaagggctaggaggaaggaaagataggaattgttacacaatggatataaagttttagttatgcaagatgagtaagttctagaaatctgctaaacaacattgtgcctatagttaacaattcactattgtatacttaaaatttacraagaaggtagagctcatgttaagtgttctaaccacacacaaacacatacacatttgaaacacatcagcacacacaccgcctccccaaagaaatacatggaaacttttaggaatgatgagtatatttattatccttattgtggtgattttatggctacaggcatatgcactaaattgtgtacatgaaacatgtacagatatttttgtta

SEQ ID NO: 893310 - DNA, 608 bp, Homo sapiens
catcagcacacacaccgcctccccaaagaaatacatggaaacttttaggaatgatgagtatatttattatccttattgtggtgattttatggctacaggcatatgcactaaattgtgtacatgaaacatgtacagatatttttgttaagaaaaaaaaaaactgtaagctctactagaccccaggtaaggacccatgattacctttgactgtaatggctatgtttgctgagtgtgtcattaataattgattcaattaatggattaatttgtttccccaggaacctaaaggttagtcatcttttctttctcataattttatttctcataattcaaccactgtaagaaaattcaaaattatggtccttcttggggtttttcaagtgtggggagttaatgacactcacggcattaagagggttattctagtcattaaccagtcatctccrctgcgatgctatgaattacttgtgtttgtagaaatctttttcatgttcctaagactacttctaatggcaaaactgtaatcatatcattggcattcctgcatgttaaagtttattactttatggcaaatattgagataggcatatgcttcacttttcttaatt

SEQ ID NO: 893311 - DNA, 558 bp, Homo sapiens
catctctccagcactgtacactgtatccaatgtgtagtctcttatcactcaacacccccatccttttcccgagtccccacagtccattgtgtcatttttatgtctttgcatcctcataacgtagctcccacttatgagtgagaacatacgatatttggttttgcattcctgagttacatcacttagaataatggtctccaatcccatctaggttgctgcaaatgccattattttattcctttttatggctgagtagtattccatagtgtgtgtgtgtgtatgtgtatgtgtatatatatatgtgtgtgtgtgtgtgtgtgtgtgtgtgtgtgtatctccccactcattgattgatgggcatttgggctggttctatatttttgcaattgtaaattgtgctgctataaacatatgygtgcaagtatcttttgtataatgtcttcttttcctcttggtagatactcagtagtgatactgttggatcaaatggtagttctacttttagttctttaaggaatattccatactgttttccacagtgtttgtactcatttacat

SEQ ID NO: 893312 - DNA, 682 bp, Homo sapiens
ggccttcaggagtttaatacttcagtggaaaaatgaactacagatgtggtggaaagaacaagagaactagaatcagaaatgaagcctgaaaaagtgactgaattgctgccatctcataataaagcccgaacaatgagtagttgcttcttgtggatgaacaaagaaagtggtctactgagatggaaccttctctcagtgaagatgctgtgacaayattgttgaattgacaacgcagtacttacaatatgacataaactctgttgataaagtttaattttaatttagtttaatttgatacagtgtaaattgattgtctctaatatttttaacttttaagctcagggctacatgtgctggcttattatataagtaaacccttgtcatgcgggtttgtcgtacagattatttcgtcacccaagtattaagcctagtgcctgttagttatttttcctgatcctctccctcctctcaccctccaccttccagtagaccccagtgtctgttgtcccctctatgtgtctgctgttctcatcatttagctcccacttatcagtgagaacacgcagcatttggttttttgttcctgcattagtttgctaaggataatggcctccaacttcatccatgtttctggaaaggacatgatctttttcatttttatggctgcatagcattccatggt

SEQ ID NO: 893313 - DNA, 682 bp, Homo sapiens
ggccttcaggagtttaatacttcagtggaaaaatgaactacagatgtggtggaaagaacaagagaactagaatcagaaatgaagcctgaaaaagtgactgaattgctgccatctcataataaagcccgaacaatgagtagttgcttcttgtggatgaacaaagaaagtggtctactgagatggaaccttctctcagtgaagatgctgtgacaacattgttgaattgacaacgcagtacttacaatatgacataaactctgttgataaagtttaattttaatttagtttaatttgatacagtgtaaattgattgtctctaatatttttaacttttaagctcagggctacatgtgctgscttattatataagtaaacccttgtcatgcgggtttgtcgtacagattatttcgtcacccaagtattaagcctagtgcctgttagttatttttcctgatcctctccctcctctcaccctccaccttccagtagaccccagtgtctgttgtcccctctatgtgtctgctgttctcatcatttagctcccacttatcagtgagaacacgcagcatttggttttttgttcctgcattagtttgctaaggataatggcctccaacttcatccatgtttctggaaaggacatgatctttttcatttttatggctgcatagcattccatggt

SEQ ID NO: 893314 - DNA, 593 bp, Homo sapiens
caaattgctttgggaagtatggccattttaatgatattgattcttctgatccatgagcatggactgtgttttcatttgtttgtgtaatctttaatttatttgagcagtgttttgtagttctccttgtagagatatttcacctccctggtttgctgtattcctaggtattttattctttttgtggcaattgtgaatgrgattgcatttctgatttggctctcagcttgactcttgtttgtgtataggaatgctcgtgattttagcacactgattttgtatcctgagacttggctgaagttgtgtatcaacttgggctaagattatggagttttctagatatataatcatgtcatctgcaaacaggaatagcttgacttcctctctttctatttggatgccctttatttctttctcttgtctgattgttctgaccaggactttcaatactacattgaataggagcagtgaaagaggacatgcttgtcttgtgctggttttctaggggaatgctcccaacttttgccccttcagcatgatgtttgctgtgggtttgtcatagatggctcttattttgaaagaaattctactgtgga

SEQ ID NO: 893315 - DNA, 593 bp, Homo sapiens
caaattgctttgggaagtatggccattttaatgatattgattcttctgatccatgagcatggactgtgttttcatttgtttgtgtaatctttaatttatttgagcagtgttttgtagttctccttgtagagatatttcacctccctggtttgctgtattcctaggtattttattctttttgtggcaattgtgaatgggattgcatttctgatttggctctcagcttgactcttgtttgtgtataggaatgctcgtgattttagcacactgattttgtatcctgagacttggctgaagttgtgtatcaacttgggctaagattatggmgttttctagatatataatcatgtcatctgcaaacaggaatagcttgacttcctctctttctatttggatgccctttatttctttctcttgtctgattgttctgaccaggactttcaatactacattgaataggagcagtgaaagaggacatgcttgtcttgtgctggttttctaggggaatgctcccaacttttgccccttcagcatgatgtttgctgtgggtttgtcatagatggctcttattttgaaagaaattctactgtgga

SEQ ID NO: 893316 - DNA, 668 bp, Homo sapiens
tttctctttgagatcatctggcatgatcacatggccatcctgaaattgttagaggtttgttttgtaactcgtatttagatatttttccattaatttttatattctggaactgttgctgactttccacagcttctttgaaattttgaaaatgtgtasttttaaggtagtgtagaagctaggacttcagtgagagatgcctatttgacataataatcaactaaggtattttcttattctccatgttaactccctgcaactgcccaatgattttcttcatattagccactttctttggaagtgttaatagctttacagttttttagtctgctaaatattcttggttgtgcttcttgttgaagtaaagagattccttcttttaaaagcattccgaaatccttatttaccccaaaatacatattatctgttgattttgaggaatctctcataaatgaactaagttacaagtctgataattgttcttattatgagttgagacacattattgtgtatttagctaataatttctcattttggtcatatgatagtatctgttaatttattaaaaaatgggaaaatcagattttctagatgtccaatatgtttggtgcttcaatagctctcagagagtggctaacagttataaattttataacagtattttaagtatt

SEQ ID NO: 893317 - DNA, 633 bp, Homo sapiens
ccactgcctggaagggctgtgcagcgctcagagtgggagaggcagacctctgagacaaatgacttcagcatcactacagctgtggctagaatgagaacagcctcaaatttcactaatgaagagattttctgagttccatgtgagcaacgccgcttccttcccatccccgagtgattccccttgtcaaagaaaaaagacacaaccaaaagggagagctgccatcctttcaggtcccttcttgttcttcgtctcactgaattcacccctaaatgctttgaagtattctccatgactgtttcatcaactgaggaaaggaggcccagaatggcttagaaacttgctaactggtttagaagaagaactgagattcaaatgctttgcagtgtaggtctgcttctgccacaaaatggcagccaggggaggaaggagaaagtgaggaaagggggaaaattarcgctcgggctttgtcagatctcaggagaggcggacgctggctaagccccatcgccttatctttattttgtgagaagcaaactgtggggtttggttgcaagagaagatcttactagggaccagttgcagggtgtattaatcaggggtttccagagaaacagaactaataggatctatctg

SEQ ID NO: 893318 - DNA, 633 bp, Homo sapiens
ccactgcctggaagggctgtgcagcgctcagagtgggagaggcagacctctgagacaaatgacttcagcatcactacagctgtggctagaatgagaacagcctcaaatttcactaatgaagagattttctgagttccatgtgagcaacgccgcttccttcccatccccgagtgattccccttgtcaaagaaaaaagacacaaccaaaagggagagctgccatcctttcaggtcccttcttgttcttcgtctcactgaattcacccctaaatgctttgaagtattctccatgactgtttcatcaactgaggaaaggaggcccagaatggcttagaaacttgctaactggtttagaagaagaactgagattcaaatgctttgcagtgtaggtctgcttctgccacaaaatggcagccaggggaggaaggagaaagtgaggaaagggggaaaattagcrctcgggctttgtcagatctcaggagaggcggacgctggctaagccccatcgccttatctttattttgtgagaagcaaactgtggggtttggttgcaagagaagatcttactagggaccagttgcagggtgtattaatcaggggtttccagagaaacagaactaataggatctatctg

SEQ ID NO: 893319 - DNA, 569 bp, Homo sapiens
gaaaattttcttactctgaaattccttcctcagcttggtttattcttctgttaatacttgtgactatattctgatattcttgaaataagtttttcagctctatcggctcactttggtccttctgtaaaatggccatttgtcttttgtcccatatatcattttactgtattccttagaatccttggaatgggtttcaactcatttaaagtgtcaatcrtcttcattcctatccatattctaaattttatttctgacatttcagtcatttcagcctgaatcatttcttgggaactggtgcagctgtttggaagtaagaaggcactcttgctttcttgagttgccagagttcttgcactgtttctcatctgtgtgggctgatgtttcttcaatccttgaagttgctgtcctttgaatgtgtgtgtgtgtgtgtgtgtgtgtgtgtgtgtgtgtgtgtgtgtgtgtgtgtgtgttgcttttaccttctttggtattcttgggggttttgtgatggtataaggtgtgttcaatcaactgactttgtttctgttagatttctgtggaatcaaggc

SEQ ID NO: 893320 - DNA, 569 bp, Homo sapiens
gaaaattttcttactctgaaattccttcctcagcttggtttattcttctgttaatacttgtgactatattctgatattcttgaaataagtttttcagctctatcggctcactttggtccttctgtaaaatggccatttgtcttttgtcccatatatcattttactgtattccttagaatccttggaatgggtttcaactcatttaaagtgtcaatcgtcttcattcctatccatattctaaattttatttctgacatttcagtcatttcagcctgaatcatttcttgggaactggtgcagctgtttggaagtaaraaggcactcttgctttcttgagttgccagagttcttgcactgtttctcatctgtgtgggctgatgtttcttcaatccttgaagttgctgtcctttgaatgtgtgtgtgtgtgtgtgtgtgtgtgtgtgtgtgtgtgtgtgtgtgtgtgtgtgtgttgcttttaccttctttggtattcttgggggttttgtgatggtataaggtgtgttcaatcaactgactttgtttctgttagatttctgtggaatcaaggc

SEQ ID NO: 893321 - DNA, 569 bp, Homo sapiens
gaaaattttcttactctgaaattccttcctcagcttggtttattcttctgttaatacttgtgactatattctgatattcttgaaataagtttttcagctctatcggctcactttggtccttctgtaaaatggccatttgtcttttgtcccatatatcattttactgtattccttagaatccttggaatgggtttcaactcatttaaagtgtcaatcgtcttcattcctatccatattctaaattttatttctgacatttcagtcatttcagcctgaatcatttcttgggaactggtgcagctgtttggaagtaagaaggcactcttgctttcttgagttgccagagttcttgcactgttkctcatctgtgtgggctgatgtttcttcaatccttgaagttgctgtcctttgaatgtgtgtgtgtgtgtgtgtgtgtgtgtgtgtgtgtgtgtgtgtgtgtgtgtgtgtgttgcttttaccttctttggtattcttgggggttttgtgatggtataaggtgtgttcaatcaactgactttgtttctgttagatttctgtggaatcaaggc

SEQ ID NO: 893322 - DNA, 614 bp, Homo sapiens
cagtgatttgatcacagttccttgcagccttgaattctgggctcaggtgatcctcctacctcagcctcctgggtaaatgggacaataggcacatgccaccatgcctggtgatatggtttggctgtgtccccacccaaatctcatcttgaattgtagctcccataattcctacatgttgtgggacgggcccagtaggagataatcgaatcatgggggcagtttcccccctactgttctcgtggtagtaaatgagtctcatgagatctgacggttttataaggggaaacccctttcacttggttctcattctcttctgtctgccrccatgtaagatgtgccttttgccttccaccatgattgtgaggcctccccagccacatggaactgtgagtccattaaacctctttttctttataaattacccagtcttgggtatgtctttgtcagcagtatgaaaatgtattaatacaactggcaaattttctgtttatttatttttattatttatttttattttttatttttatttttttgtagagacagggttttgccatgttgcccagactggtctcaaactcctgggctaaaatgatccacctgccttgccctcctaa

SEQ ID NO: 893323 - DNA, 614 bp, Homo sapiens
cagtgatttgatcacagttccttgcagccttgaattctgggctcaggtgatcctcctacctcagcctcctgggtaaatgggacaataggcacatgccaccatgcctggtgatatggtttggctgtgtccccacccaaatctcatcttgaattgtagctcccataattcctacatgttgtgggacgggcccagtaggagataatcgaatcatgggggcagtttcccccctactgttctcgtggtagtaaatgagtctcatgagatctgacggttttataaggggaaacccctttcacttggttctcattctcttctgtctgccgccatgtaagatgtgccttttgccttccaccatgattgtgaggcctcyccagccacatggaactgtgagtccattaaacctctttttctttataaattacccagtcttgggtatgtctttgtcagcagtatgaaaatgtattaatacaactggcaaattttctgtttatttatttttattatttatttttattttttatttttatttttttgtagagacagggttttgccatgttgcccagactggtctcaaactcctgggctaaaatgatccacctgccttgccctcctaa

SEQ ID NO: 893324 - DNA, 614 bp, Homo sapiens
cagtgatttgatcacagttccttgcagccttgaattctgggctcaggtgatcctcctacctcagcctcctgggtaaatgggacaataggcacatgccaccatgcctggtgatatggtttggctgtgtccccacccaaatctcatcttgaattgtagctcccataattcctacatgttgtgggacgggcccagtaggagataatcgaatcatgggggcagtttcccccctactgttctcgtggtagtaaatgagtctcatgagatctgacggttttataaggggaaacccctttcacttggttctcattctcttctgtctgccgccatgtaagatgtgccttttgccttccaccatgattgtgaggcctccccagccacatggaactgtgagtccattaaacctctttttctttataaattacccagtcttgggtatgtctttgtcagcagtatgwaaatgtattaatacaactggcaaattttctgtttatttatttttattatttatttttattttttatttttatttttttgtagagacagggttttgccatgttgcccagactggtctcaaactcctgggctaaaatgatccacctgccttgccctcctaa

SEQ ID NO: 893325 - DNA, 637 bp, Homo sapiens
tctggccaatttctccctcttggaatgtgaacatttacccaatgcctgtacccccattgtatcttggaagtaactaacttgtttttgatttacaggctcataggcagaaaaggacttgccttatctcagatgagactttgaacttggactttggggttaattctggaataagttaagactttgtgtgactgttaggaaggcatgattggttttgaaatgtgagaaggacatgagatttgggaggtgccaagggcagaatgatatggtttggccctgtrgccccacctaaatctcatcttgaattataatccccacatgttgaggaaggggcctggtggggggtgattggatcatggggggtggtttctaccatgctgatcttgtgatagtgaggaacttctcatgagatctgatggttttgcaagtagtaggttcccttgtgtgctctctctctctcctgccgccatgtaagatgtgccttgcttcccttttaccttctgctatgattgtaagtttcctgaggcctcttcagccatgcaaaactgagtcaattaaatcttttttctttataaattacccaatctcaggtagtatctttaaggcagtatgaaaacagactaatacaatatgttttcaa

SEQ ID NO: 893326 - DNA, 637 bp, Homo sapiens
aaaataataaaactttcttgttttgactatcagctagaaatggtacctttatataataaccggggcaattgtggtataagttcagagtccccatcattgagttttgatcatttgtttgtgagcactctattatactgctatctatctgtgatcaatctatctttgagttattttctaaatttgcatgtttactagttttggtaggcagaataatggctcctaaaagatgttcaaattctaaattctggaatttgtaaatatgttccttcacatggcaaagaagaattaaagttacagatgaaattaagcttgctaaaacagggtgagtatcttggattacccagccgaacccaatgtaattgtaagtatgaagtgggaggtaaaggcagaaaagtaggtctaagcgatccactatgaaaatgattggactcaccactgctgtctttggagasagaggaatgggaccatgaaccaaaaaatgtaggtggcctctagaacatccatctccaaactttttggtaccagggtcaggtttcctgaaagagtttttccacagattggagcaggtggggagggatggtttggggatgattcaagcacattccatttattgtgcactttatttctattattatta

SEQ ID NO: 893327 - DNA, 637 bp, Homo sapiens
tctggccaatttctccctcttggaatgtgaacatttacccaatgcctgtacccccattgtatcttggaagtaactaacttgtttttgatttacaggctcataggcagaaaaggacttgccttatctcagatgagactttgaacttggactttggggttaattctggaataagttaagactttgtgtgactgttaggaaggcatgattggttttgaaatgtgagaaggacatgagatttgggaggtgccaagggcagaatgatatggtttggccctgtggccccacctaaatctcatcttgaattataatccccacatgttgaggaaggggcctggtggggggtgattggatcatggggggtggtttctaccatgctgatcttgtgatagtgaggaacttctcatgagatctgatggttttgcaagtagtaggttcccttgtgtgctctctctctctcctgccrccatgtaagatgtgccttgcttcccttttaccttctgctatgattgtaagtttcctgaggcctcttcagccatgcaaaactgagtcaattaaatcttttttctttataaattacccaatctcaggtagtatctttaaggcagtatgaaaacagactaatacaatatgttttcaa

SEQ ID NO: 893328 - DNA, 619 bp, Homo sapiens
aatatctgtgattgttgaccatctacatcagtaggactcagcatcctagccctcttggaagtatatgattgaacacggacaaattaatcttgacctaggacccttcctaaatctgacaggagatatatcttgaatttcaatttttgtgccaatgctcaggatcatttctgttatcatctttctaaaatccttctctcattattttcccagaactcttccactcaaatatatttcaaatagttacaatattttaaataagcttatttctttggcatgaattctggcattccattttattttgttaatacaatacacttaggctgggcatgatggctcacacctgtaatcccagcactttgggagacygaggctggcggatcactttaggtcaagagtttgaggccatcctggccaacacagtgaaaacccatttctactaaaaatacaaaaattagcaaggcctggtgtgcacctataatcccagctactcaggaggctgaggcaggcgaatcacttgaatctgagagacggaggttgtagtcagctgagatcatgccactacactccagcctgggcaacaaagtgggactctgtgtcaaaaaataaataaataaataag

SEQ ID NO: 893329 - DNA, 682 bp, Homo sapiens
tcagctcaagtggccaggcaaaaagaaaaaggggcaaattcctccttcctctgccgtttgttctattatggccctcgatagttgggatgaagcttatccaggttggaaaaggcagtctactgaatccattgatttaaatgctaatctcatccagaaacactgtcacagatacatccagaaatgttttaccagatacctgggcatcctctgattcagtcaagttgacacaaaatattaactatcacaatcattctaactaaaactacagttcgtgtataattctgttgatatgtgtgttatttatattacatcctccaggacctagcataaaccgtggcacatggcaggtccaaataaacacttatttaaatgaatttgctttyttgtacttgaaatataaactctttgagtaggtgattttcaccatgaaatatttggtagaaacagctgaagaggttcatagtaaaatgttcatataatgaactaaattgaaatgttgggacgaagggtaaagcctgtgatatcagctacaaagcttcagaatgaagaaacacagttcacagtccattttaccactgctggtagatactaaaaaagctgagttctctgttgtagagcacatagaatgagtcatacaaattgaagaaagatcttggaaggcccaagagataataaaacagaa

SEQ ID NO: 893330 - DNA, 616 bp, Homo sapiens
tatgaaagttacaaattgaatactggagtgaaggtcaagtaaatgttaaaaagttagtgcacaaacacaatcaccatgctaagtgagctgcaggtaaaactgactttctaatttggaggattagtacaatcaaaagggtcaaataagttgtacatgatgccataatcttgatgttcatcgcttaaatctttattgagattaggttgccatttctttcaagtcttttgtcattaatatggatttttttttgccaaagactgaaccttttataaagcaagaaaagtattaaagaaaattaataaataaatgagtatttctctacatcgtataaaatcaatttgtttgatcatttgcttggattaatttattttcaatgatacagacttagttttaaaatagcattccatgctgctcctgagtattagwtacacatttgctttacttgttttaaatattatggtcttttaatattttctaccactaagaataagaaaaaaaaaactgtccataccaacaaaatactcccataaagaacctgactatgatatgctcctcaaatgaaaaaaatccatcagaagaataatgtcctttcaataactccgtcacatcacatctc

SEQ ID NO: 893331 - DNA, 629 bp, Homo sapiens
aaaggataaaaagattttctaagataaatagtaggggtccaaatttgaatttaagtggattcagacatgcctagtcatgtcagacaaactggtgaaacaggcttctcttgctactttgaaagttgactgagaaacattgcagaggacrgttctatctgtgtttactgttggtgttccaagatgcctggccacgggtgatgaacttgtaaaacaagcctgaaaggaacggaagaattttttgggtgagaaaaaattcctagagaaaagagagccaggctccttgaacttgactgagaaatgaagccagagttgacagcccagaaggtttcttatcagtaaagcctcctgtgtattattctcatgtgactttgtgtcatcatccattcacgacaagccatatagactgttaagagcctctaatagggtgcaacaaaaaaatcagaaagcatccctccggcttatcccaatttttctttcttttaattttttttaatttttttacttttgtggggacatagtaggtacatatatttatgagttacatgagatattttggtagaggctttcaaagtgtaataatcacatcatgggaaatggggtagccctgtcctcaagcatttatcctttgt

SEQ ID NO: 893332 - DNA, 677 bp, Homo sapiens
actggtcttcctaggttttttgttttccttgcaatttactaaaagttaacagaaatgatcagattcgggaaaaatagaacacaactaatttgtattcagacatgttcttctgtttctgctttcattgcagaaagtttaacagagttttgacagatacagttatatgcctgtggttgaagtcacagtagctctgtctgctaagcaaatttatgtatgtcaaatgtcttatcctgcccagctcaatacatgcaataacatcctgaaatgaatttagtcatttcatttcaaatgagaatttctgaatcatatctattctcctgaggttgtttcagaatcttcctcttatttgaaattacttttttattatactttaagttctggggtacatgtgcagaatgtacaggtttgttacctaggtatacacatgccacagtggtttgctgcaccyatcaacctgtcactacattaggtatttctcctaatgctatccctcccctagcccccccacccccaattaggccccggggtgtgatgtcccctttcctgtgtccatgtgttctcattgttcaactcccacttatgagtgagaacacgcagtgtttggttttctgttcttgtgttagtttgctgagaatgatggtttccagtgtcatccatgtccatacgaaggatataaa

SEQ ID NO: 893333 - DNA, 588 bp, Homo sapiens
gctgcaaattttccaaacttttatgctgtatttcccttttaaaactgaatgcctttaacagcacccaagtcacctcttgaatgctttgctgcttagaaatttcttctgccagataccctaaatcatctctctcaatttcaaagttccacagatctctagggcaggggaagaaatgcttccagtctctttgctaaaacataacaagagtcacctctgctctagttcccattaagttcctattctccatctgaggccacctcagcctggaccttattgtccatatcactatcagcatttttgtcaaagtcattcaacaagtctctaggacattccaaactgtcctacattttcctgtcttcttctgaatcctccaaactgttccamcctctgcctgttacccaattccaaagtcacttccacatttttgggtatcttttcagcaacgcccctctctactggtaccaatttactgtattagtccattttcacattgctgatagagacatacctgcgactgggcaactgtacaaaaaaaagaggtttaattggacttacagttccacatggctggggaaacctcataatcac

SEQ ID NO: 893334 - DNA, 509 bp, Homo sapiens
tatagattatctcatttaattctcccaacaacccgatgagacagatattttttatccttctcctataagggaaactgagactcagagaagttaattaatttgtccaaggtcacacagcagtcagatggcagagctaagaattacgtctaggcagtctgattttcrcattcacagcctgaaacattatgctttgcagcttcccagttcttactcagtggacccgatgtggtgcccaggcatctgtgtgattaacaagctctgtgggtgattctgatgctcaggaactgggcagttgctgctctccaggtctttctgtctgttccacccatttggtactgagtggctgaataatgactccctgtgtaggctcctgccctagagagctggtcccctcctcagggacaggggcttctcttacatatccctcagcatggagcatgggaccagttgtggaatttacctcctattactttggagaaagcagaaatagcctaggtgactgggctggg

SEQ ID NO: 893335 - DNA, 534 bp, Homo sapiens
tttcttgtttttcaaatgtgcagacactaatgcactgcctaaaaatcaagatcaagaacaatcagagaaaaatgataccaccaaaggaaaaaaaaaataaccaatagctgaacctaaaaaaataatagtttatgaactgtctcataatgaatttaaaataattgtcattgaatagcttggtgagctctaagacaacccagatagatgactaaaaataatcagaaaaataatacatattcataactcagaaggaaatcattgtgaagcctgaagtattggatctaatctatataaatagaggaataagcctggagggagtaaaatcaggarggacagctgggcttggatcatttagtaggtaggtacaatggaatgagctgagattataggaatagtgatttcctttttatcttgatgctctcccgtcacctcatgttttcaaatatttattgctcaaatctatctccgcagcactgacctctcatctaacctccagatattaatattttgttgcctctttgacatctactcttg

SEQ ID NO: 893336 - DNA, 605 bp, Homo sapiens
tttcctgctttctcttgtgggcatttagtgctataaatttctctctacacactgctttgaatgtgtcccagagattctggtatgttgtgtctttgttctcgttggtttcaaagaaaatctttatttctgccttcattttgttatgtacccagtagtcattcaggaacaggttgttcagtttccatgttgttgagcggttttgaatgagtttcttaatcctgagttctagtttgactgcactgtggtctgagagacagtttgttataatttctgttcttttacatttgctgaggagagctttacttccaagtatgtggtcagttttggaataggtgtagtgtggtgctgaaaaaaatgtatagtctgttgatttggggyggagagttctctggatgtctattaggtccacttggtgcagagctgagttcaattcctgggtatcgttgttaactttctgtctcactgatctgtctaatgttgacagtggggtgttaaagtctcccattattattgtgtgggagtctaagtctctttgtaggtcactcaggacttgctttatgaatctgggtgctcctgcattgggtgcatatatatttaggatagtt

SEQ ID NO: 893337 - DNA, 596 bp, Homo sapiens
gtgctagcaatcagtgagtctccatgggtgtaggaccctctgagccacgtgcgggatataatctcctggtgcaccgttttttaagcctgttggaaaagtgccgtattagggtgggagtcacccaattttccaggtgccatctgtcacccctttctttgactgggaaagggaactccctgaccccttgctcttcctgagtgaggcaatgcctcrccctgcttcggctcgtgcatggtgcgctgcatccactgtcctgcacccactgtctggcactccccagtgagatgaacactgtacctcagatggaaatgcagaaatcacctgtcttctgcatcgctcacactggaagctgtagaccagagctgttcctatttggccatcttggctgccagacctgtgaaatcaatttttcttacaaaagtatagtgactcctactcttcttagtttctattgtcacaaaataactttctccttccctttattttcagtctatgtggatctgtataggtgaagtgtgtttcttataggcaatagagcaatgggtcttgtttttaaatccattcagccactctatgtcttttgattggagagttta

SEQ ID NO: 893338 - DNA, 596 bp, Homo sapiens
gtgctagcaatcagtgagtctccatgggtgtaggaccctctgagccacgtgcgggatataatctcctggtgcaccgttttttaagcctgttggaaaagtgccgtattagggtgggagtcacccaattttccaggtgccatctgtcacccctttctttgactgggaaagggaactccctgaccccttgctcttcctgagtgaggcaatgcctcgccctgcttcggctcgtgcatggtgcgctgcawccactgtcctgcacccactgtctggcactccccagtgagatgaacactgtacctcagatggaaatgcagaaatcacctgtcttctgcatcgctcacactggaagctgtagaccagagctgttcctatttggccatcttggctgccagacctgtgaaatcaatttttcttacaaaagtatagtgactcctactcttcttagtttctattgtcacaaaataactttctccttccctttattttcagtctatgtggatctgtataggtgaagtgtgtttcttataggcaatagagcaatgggtcttgtttttaaatccattcagccactctatgtcttttgattggagagttta

SEQ ID NO: 893339 - DNA, 628 bp, Homo sapiens
gatgttctttgaaatcaatgagaacaaggaaacaatgtaccagaagctctgggacacatttaaagtagtgtgtggagggaaatttatagcaccaaatgtccacaagagaaagtaggaaagatctaaagtcaacaccctaacatcacaactaaaagaactagagaagcaagaggaaacaaattcaaaagctagcagaagggaagaaataactaagatcagcgcagaactgaaggagacagtgacccaaaaaaccgttcaaaaaaatcaatgaatctaggagctggttttttgaaatgatcaacaaaattgatagaacgccagcaagaaaagagagaagaatcaaacagatgcaataaaaaatsaaaaaggggatatcaccaccaatcctacaaatagaaactaccatcagagaatactataaacacctctatgcaaataaaatacaaaatctagaagaaatccatatattgctggaaccatacaccctcccaagactaaaccaggaagaagttgtatctctgaattgaccaataacaggttctcaaattgaggcaataattaatagcctaccaacaaaaaaagtccaggaccagagggattcacagccgaatgctacaagaagtacaaa

SEQ ID NO: 893340 - DNA, 670 bp, Homo sapiens
gaccttcatttctatgactaatttatttcctaggtgatttggattgtgaaacctgtaccataacacggagtggactgactggtcttgttattggtggtctataccctgttttcttggctatacctgtaaatggtggtctagcagccaggtaggaaatraaaaactttttataatatgtgattacctataaaactcacaacttaaagcagcaaatatattttgtttttaaggcatttagaccaaaggcaatgttaccctcttgattagaagttagcaagacctgttttttcttataatgaaattctacttatcaagaatttcaaacagttatacttggtgtgtagttaggctattaaccttaatttgtgtactgaatactaaactaactacaaagctgcaaacagtattatgcatgaaacttctatcatataaacaattatcttggatgagtttgaacacttgcactaaaggaaaattccatcagaaaatgtctagctgttatattagccttctattctaaaataattctggctattctctgttgaactcttgcatcagcaatctatgctatagccttgaagcaaactggataaagaaacaaaagtttttaggattaatagacactgaagacctttactttaatattcagttttatcttaagacttctagg

SEQ ID NO: 893341 - DNA, 585 bp, Homo sapiens
ttccctgctgtgaggtctgtgggatgacacatgccacccaggaccccctgccccggagaaggaaggtttcctagttgttgcttatctttggagtctgggatcttttgggaaatgagtccctggatcttgggttctgagttgtgtcaccattgcgggggaagggtgggttatcatttctaaactcagtgctggttgacacttgcagaggagaaaggagtttggaaagcctccagggttgtcaaaacttcctgcctctcgcccttggcatgatcaccaaagcagaaatcaggatgttggattccaacccgggggagtggtgtggttacgaatgtggcctctgcaagcagacagcctgggttcaattcccagcttggccattttctagccgtgtaatcttargcaagatactaaaccgctctgtgcctcagtttccccatctcgtggtcttgctttgacaattaaatcatactgaataaatgtcagccattactgctgagctgtgccagatttgtgacgggtgctcgacgtgccttggggcctcccctttccctatcagagcagtgggaagcatcacaacatccttcc

SEQ ID NO: 893342 - DNA, 632 bp, Homo sapiens
gttacagaacacacattcttcttatcagtacatggaatactcttcagggtagaccatatgttagccaacaaaacaagtctcaataaattttaaaaagttaaaatcatatccaatatcttctcagaccacagtagaataaaaccagaaatcaaaaacaagaggaactttggaaactatacaaacacacggaaattaaatgacatactctggaataatcastgggtcaagaaagaaattaaaaagtgaaattcagaatgtcttgaaataaatgaaaattaaaacacaacacattaaagactaagagatacagcaaaagttttgctaaagtgaagtttatagcaataaatgcttatttcaaataaggtttcaaataaacaatatcacagtgtacctcaaggaacctgaaaaggaggaataaatcgagccccaaaattaatagcaagaaagaaataataaagattggaaaagaaccaaacaatatagagactttttaaaaagcacaaagcctaatgaaatgaaagattggtgttttgaaaagacaaacaaaatggacaaactgctagctacacaaccaagaaaagaaaagacacaaaatccaaataaataaaattagaaatgaaaaaggagacatt

SEQ ID NO: 893343 - DNA, 658 bp, Homo sapiens
acattcagagagcaaatttataatgtgactaacagctttttattgcgtagttttatactcttttaacttgtgttttagtttattcctacactataggtcgtcagcaaagaacaaaataagtctaacaacaaaagaagaaaacattaaaaattcagtatctcagggaacacaggatcacttacaatgaagaatgatctgatcgtttaaatacattaaaaagaaaagtagcacttttgattatgataaattcccatagactagcaaaagacttgtaaaatattttgcttaaaataacagggtcatagttatgatgagtaataccaacattaatgagtaaaatggggaaaayaggcactgtcatacactggtaataagatgctatattaatggagcctttttggagggcaatgtggaagtagctatcaaaacttaaaatatacatgtcccttgacccagcaattccaattctaggagtctattctaaagaaatactcactcatgtccaaaaggatcttcaatgcagcattgcctgtaatagtgaaaaattggaaacaacctaaatgtcaatcagtaagtgagtggttaaataaactgaggtatatccacactatggagtactgtgtggccattaacaagcaaaagggatactatatctacg

SEQ ID NO: 893344 - DNA, 565 bp, Homo sapiens
tcttaacacttctttagctgcatcccagggattctgggacatttcctctttgttctcattagtttcaaagaacttcttgatttctgccttaatttcattatttacccaggagtcattaaggatcaggttgttcaatttccatgtagttttgtggtttttagtgagcttcttaatcttgagttctaatttaattgcastgtggtctgagagactgtttgttatggtttcagttcttttgcatttgctgaggggtgttttacttccaattatgtgatcaattttagagtaagtgtcatgtggcaccacgaagaatgtatatgctgttgtttttaattgaagtgttctgtaggtatctatcaggtccacttgattcagacctgagttcaaattctgaatatctttattttctctcaatgatctctctaatattgacagtggggtgttaaagtgtcccactattattgtgtaggagtctaagtctctttgtaggtatctaagaacttgttttatgaatctgggtgctcctgtattagatgcatatgtatttaacatagttagctcttct

SEQ ID NO: 893345 - DNA, 565 bp, Homo sapiens
tcttaacacttctttagctgcatcccagggattctgggacatttcctctttgttctcattagtttcaaagaacttcttgatttctgccttaatttcattatttacccaggagtcattaaggatcaggttgttcaatttccatgtagttttgtggtttttagtgagcttcttaatcttgagttctaatttaattgcackgtggtctgagagactgtttgttatggtttcagttcttttgcatttgctgaggggtgttttacttccaattatgtgatcaattttagagtaagtgtcatgtggcaccacgaagaatgtatatgctgttgtttttaattgaagtgttctgtaggtatctatcaggtccacttgattcagacctgagttcaaattctgaatatctttattttctctcaatgatctctctaatattgacagtggggtgttaaagtgtcccactattattgtgtaggagtctaagtctctttgtaggtatctaagaacttgttttatgaatctgggtgctcctgtattagatgcatatgtatttaacatagttagctcttct

SEQ ID NO: 893346 - DNA, 677 bp, Homo sapiens
tttcagcaaagtctcagaatacaaaatcaaggtgcaaaaattacaagtattcctgtacaccaacaacagacaagcagagagccaaatcatgaatgaactcccattcacaattgctacaaagagaataaaatacctakgaatacaactaacgagggatgtgaaggacctcttaaaggagaactacaagccactgctcaagaaaataagagagggtgcaaacaaatggtaaaacattccatgctcatagataggaagaatcaatatcatgaaaatggccatactgcccaaggtaatttatagattcaatgctatccctttgaactaccattgacattcttcacagaaacagaaaaaactatttcaaattttacatggtgccaaaatgagccgtatagccaagacaatcctaagcaaaaagaacaaagctggaggcctcaccctacatgacttcaaactatactacaaggttacagtaacaaaaacagcatggtacttgtataagaactgacacataaatcaatggaacagaatagagaactcagaaatcagactgcacatctacaaccatgtgatcttcaacaaacctgacaaaagcaagcagtggggaaaggattccccatctaataaatgctgctgggagaactggttagccataagcagaaaattgaaactggatc

SEQ ID NO: 893347 - DNA, 625 bp, Homo sapiens
accctacatgacttcaaactatactacaaggttacagtaacaaaaacagcatggtacttgtataagaactgacacataaatcaatggaacagaatagagaactcagaaatcagactgcacatctacaaccatgtgatcttcaacaaacctgacaaaagcaagcagtggggaaaggattccccatctaataaatgctgctgggagaactggttagccataagcagaaaattgaaactggatcccattcttacacctcatacaaaaactaactcaagatggattgaagagttaaatgtaaaacccaaagctataaaaascctagaagaaaatctaggcaacactattcaggacataggcacaggcaaagattttatgatgaaaatgtcaaaagcaattgcaacaaaagcaaaaattgacagatgtgatctaattagactaaagagcttctgcacagcaaaagaaactatcatgagagtggacaacctacagaatgggaaaacacttttgcaacctattcatcggacaaaggtctagtatctagagtctacaaggaatttaaacaaatttacaaggaaaaaaaaacaacctcattaaaaagcgggcaaaggacatgaacagacagttc

SEQ ID NO: 893348 - DNA, 634 bp, Homo sapiens
tcaacagcctttggaagcagatcttccatctctattcatgcttcagatgatagccccagcatacagcttgactgctacctcaggagagacctgtaccagaaccacccagctaagttgctctctgattcctgactcttagaaagcatatgtggtaataaatgttaattaattttgaggtaattcattattcagaataataaccatggccaggcatggtggttcacacctgtaatcccagcactttgggaggctgaggtgggtggatcatttgaggtcacaagttcaagaccagcytgagcaacatggtgaaacccggtctctactaaaaaatacaaaaattagctgggcgtggtggcggatacctgtagtcccagctacttgggaggccgaggcaggagactcacttgaatctgggaggcgaaggttgcagtgagccaaaaatgggccactgtaccccaccctgggtgacagagcgagacactatctcaaaaaaaaaaaattagataaccaatacagattgtacagagatcgtacgagcattctcattgtagttattcatagttttaaatctatgatcattaatgtccaaggtagcaaggaaatttgagctggttatcaaaaattgtaatctgga

SEQ ID NO: 893349 - DNA, 594 bp, Homo sapiens
cctgtctcagcctcccaactcactgagattacaggcaggagccaccatgccccactgaaattaattctaatatatttcatttaatctaatatatccaaattatatcaacatataattaatataaaaattattattttatatctttttcatactaaatctttgaaatcaagtgtgtattttacacttacagagcatctcaattcagaggagtcacatttcacattcttagtagctgcctacagatagtggctatggttttgaaaatgtatctctaggcaatactttcttgttttttaagaaactrggtcttgctctgtcattcaggctgaagtgcagtagtgcaatcatagcttacaggcaggggcaaccacgtgcagcctgacaatattttttcccccatctaacagcaatgcggttcagagaacattttcttagtttcgtggtaaggagattaggtcaaaccagaattggaagtcaggctgtatcatgtctgaggatactcatttcacatatcagtgaaatgagtatggccttatttcactgaggccatactgctatataattaaacatgactgatatgatgagacgtaataa

SEQ ID NO: 893350 - DNA, 616 bp, Homo sapiens
gaccgtttttggttggtaagctattaattattgcctcaatttcagagcctatcattggtctattcagagattcagcttcctggtttagtcttgggagggtgtatgtgtccaggaacttatccatttcttctagattttctagtttatttgmatagaggtgtttatactattctctgatggtagtttgtatttctgtgggatcagttgtgatatcccctttatcatttttttttgcatctatttgattcttctctcttttcttctttgttagtcttgctagcggtctatcaatcagttttgttgatcttttcaaaaaaccagctcctggattcattgattttttgaagggttttttgtgtctctatttccttcagttctgctctgatcttagttatttcttgccttctgctagcttttgaatgtgtttgctcttgcttctctagttcttttaattgtgatgttagggtgtcaattttagatctttcctgctttttaaaaaaaatatgaatgcctgagcctcatcccccaagattctgatttagtgtgcctgatttaatggggttgggtcttggcattgggatttttcagagctgcccagaagattccaaaatgaatt

SEQ ID NO: 893351 - DNA, 616 bp, Homo sapiens
gaccgtttttggttggtaagctattaattattgcctcaatttcagagcctatcattggtctattcagagattcagcttcctggtttagtcttgggagggtgtatgtgtccaggaacttatccatttcttctagattttctagtttatttgaatagaggtgtttatastattctctgatggtagtttgtatttctgtgggatcagttgtgatatcccctttatcatttttttttgcatctatttgattcttctctcttttcttctttgttagtcttgctagcggtctatcaatcagttttgttgatcttttcaaaaaaccagctcctggattcattgattttttgaagggttttttgtgtctctatttccttcagttctgctctgatcttagttatttcttgccttctgctagcttttgaatgtgtttgctcttgcttctctagttcttttaattgtgatgttagggtgtcaattttagatctttcctgctttttaaaaaaaatatgaatgcctgagcctcatcccccaagattctgatttagtgtgcctgatttaatggggttgggtcttggcattgggatttttcagagctgcccagaagattccaaaatgaatt

SEQ ID NO: 893352 - DNA, 616 bp, Homo sapiens
gaccgtttttggttggtaagctattaattattgcctcaatttcagagcctatcattggtctattcagagattcagcttcctggtttagtcttgggagggtgtatgtgtccaggaacttatccatttcttctagattttctagtttatttgaatagaggtgtttatactattctctgatggtagtttgtatttctgtgggatcagttgtgatatcccctttatcatttttttttgcatctatttgattcttctctcttttcttctttgttagtcttgctagcggtctatcaatcagttttgttgatcttttcaaaaaaccagctcctggattcattgattttttgaakggttttttgtgtctctatttccttcagttctgctctgatcttagttatttcttgccttctgctagcttttgaatgtgtttgctcttgcttctctagttcttttaattgtgatgttagggtgtcaattttagatctttcctgctttttaaaaaaaatatgaatgcctgagcctcatcccccaagattctgatttagtgtgcctgatttaatggggttgggtcttggcattgggatttttcagagctgcccagaagattccaaaatgaatt

SEQ ID NO: 893353 - DNA, 616 bp, Homo sapiens
gaccgtttttggttggtaagctattaattattgcctcaatttcagagcctatcattggtctattcagagattcagcttcctggtttagtcttgggagggtgtatgtgtccaggaacttatccatttcttctagattttctagtttatttgaatagaggtgtttatactattctctgatggtagtttgtatttctgtgggatcagttgtgatatcccctttatcatttttttttgcatctatttgattcttctctcttttcttctttgttagtcttgctagcggtctatcaatcagttttgttgatcttttcaaaaaaccagctcctggattcattgattttttgaagggttttttgtgtctctatttccttcagttctgctctgatcttagttatttcttgccttctgctagcttttgaatgtgtttgctsttgcttctctagttcttttaattgtgatgttagggtgtcaattttagatctttcctgctttttaaaaaaaatatgaatgcctgagcctcatcccccaagattctgatttagtgtgcctgatttaatggggttgggtcttggcattgggatttttcagagctgcccagaagattccaaaatgaatt

SEQ ID NO: 893354 - DNA, 685 bp, Homo sapiens
ccatttcaaatactgaatccaattaattagtgggatgttagtacggtcacacgctcacactgttatagcctaggaggaataggctatattatatagcttaggtagtagtacactatatcaactggagcttcgtgtgaaagatttctgaagctgtatctgacctcagaaagacaagtgtgccatgtccccatggggtggactggggctggagatgcggccatgctggttcctgcattctatttgttccatgcattgtaactcccttccttgtactagattaggagctcatcaagatatgaattctgttctttcatctttatatccctggcacccagctcaaggcctttaaaataatagatgttcaaaaatgttgaaggatccaatggaggaacgaaagaacaaccatcatgtagctctaaaactctacragtcttcaggatataggttgtttcttttaatgcctgcattttctttgtataacgcaacacttggcctcctacagttctcaataacagtaatgtgaatgtttcggtgattggaataattctacagcaaaaaggtataaagaaggggtaattacatggtttctggagtcaaagtgcttgtgttcaaatcccaaacctgctgtttgaagttatctttcggcaggtttcttcattttactaaccaacaatttcctcatctg

SEQ ID NO: 893355 - DNA, 633 bp, Homo sapiens
accacaatgagataccatctcacgccagttagaatggtgatcattaaaaagtaaggaaacaacagatgctggagaggatgtggagaaataggaacacttttacacggttgatgggagtgtaaattagttcaaccattgtggaagacagtgtggggattcctcaaggatctagaaccataaatatcatttgacccagtaatcccattactgggtatatacccaaaggattataaatcattctactataaagacacatgcacacatatgtttattgcagcaatattcacaatagcaaagacttgtaaccaacccaaatgcccatcaatgatagaatggataaagaaaatgtgacatatatacaccatggaatactatgcagtgataaaaagggatgagttcatgtccttggcagggacatggatgaagctggaaaccatcattstcagcaaactaacagaagatcagaaaaccaaacaccgcatgttctcactcataagtgggagttgaacaatgagaacacatggacacagggaggggagcatcacacaccggggcctgtcgggggttggggacaaggggagggatagcattaggagaattacctaatgtagctgatgggttgatgggtgcagc

SEQ ID NO: 893356 - DNA, 633 bp, Homo sapiens
accacaatgagataccatctcacgccagttagaatggtgatcattaaaaagtaaggaaacaacagatgctggagaggatgtggagaaataggaacacttttacacggttgatgggagtgtaaattagttcaaccattgtggaagacagtgtggggattcctcaaggatctagaaccataaatatcatttgacccagtaatcccattactgggtatatacccaaaggattataaatcattctactataaagacacatgcacacatatgtttattgcagcaatattcacaatagcaaagacttgtaaccaacccaaatgcccatcaatgatagaatggataaagaaaatgtgacatatatacaccatggaatactatgcagtgataaaaagggatgagttcatgtccttggcagggacatggatgaagctggaaaccatcattctcagcaaactaacagaagatcagaaaaccaaacaccgcatgttctcactcataagtgggagttgaacaatgagaacacatggacacagggaggggagcatcacacaccggggcctgtcgggggtkggggacaaggggagggatagcattaggagaattacctaatgtagctgatgggttgatgggtgcagc

SEQ ID NO: 893357 - DNA, 596 bp, Homo sapiens
ccattagtgggtatatacccaaaggattataaatcatgctgctataaagacacatccacacgtatgtttattgcagcactattcacaatagcaaagacttggaaccaacccaaatgtccatcaatgatagactggattaagaaaatgtggcacatatacaccatggagtactatgcagccataaaaaaggatgagttcatgtcctttgcagggacatggatgaagctggaaaccatcattctgggcaaactatcacaaggacagaaaacccaacaccacatgttctcactcataggtgggaattgaacaatgagaacacatggacacagggtggtggacwtcacacaccagggcctgtcatgagctgggggtatgggggagggatagcattaggagaaatacctaatgtaaatggtgagttaatgggtgcagcacatgaacatggcacatgtatacatatgtaacaaacctgcatgttgtggacatgtaccctagaacttaaaatataatataaaagctctatcaaagaaaaaaataaaaataaaaataactgtagaagcagatcaagttaataagccctacatcaatccataaac

SEQ ID NO: 893358 - DNA, 613 bp, Homo sapiens
atgttgaacggtaattattagaatagataggctttacttatttctgatgaagtggtagatattcagtttttaccattaagcatgatattagttatataatatttgtctgtttttattaatgcctttttttaatgtatatgttaagcatcttatctttagaattacttttgttgttgttggggtggagatttgctctttgttgcacaggcaggagtgcmatggtatgatctcaactcactgcaacctcagcctcccgggttcaagcgattcccctgcctcagcctccagagtagctgggattacaggcatgcgctaccaagcccgctaattttgtatttttagtagagacgaggttttgccatattagtcaggctggtcttgaactctggacctcaggtgatctacccaccttggcctcccaaagtgctgggattacaggcgtgagccactgcatccggccctagagttactattttttttaactgctttatttaggtatgataagcacgtaaaaagttgtagatatttaatgtatatatctccatgagtttgaagataagtatacacccatgaaactatcactaccatcacggctataggtttatccaccacc

SEQ ID NO: 893359 - DNA, 623 bp, Homo sapiens
gaattgtaatccaaattataatccacatgtgttgagggagggacctcgtgggaggtgattagatcacgggggcagttccccatgcttttcttgtggtagtaagttctcatgagatctgatgattttatgaggggctttccctgccttcacactgcacttttctctcctgctgctatatgaagagggatgtgtttgcttccactcccaacatgaattgtaagtttcctgaagcctcccccgcctttcagaactgagtcagttaaatttctttcctttatagattacccagcctcaagtatttcttcatagtagcatgaaaatgaactaatacagatttggttataatatattaaaaaggaacagtggatagataagaggtcctaccgtttatacaggamagaaaagatctgaatagtctgtaaagacatattaaatctatactatacgatggcatctattgatatttttgaattttttttattttcaaaaaaaaaaaaaaaagcctgcagcacccagtcttcacaagtggtctctcatccaagtactaatcaggcccaatcctgcttagtttctgagatcagatgagattgggcacattcaatgtgttttggctgtagactgat

SEQ ID NO: 893360 - DNA, 371 bp, Homo sapiens; identical to SEQ ID NO: 890304

SEQ ID NO: 893361 - DNA, 622 bp, Homo sapiens
agcatatattagctgtgtgattctggacaagtcatttcatcattcctgggcttgattctttttcaattaaatggaaataataacaataatatctacttatctttggttttaccaggaaaatttaggttgtacctaaataatttgtaggttgtagtttttgttgttgtataagaaactgtaaattctaatctatctgaatccctcagtggaagctagataaaactaaagtggaagtttggaatttcaaatgcytcatttattcacacaaataagtaaattaggggttttctttttaaatttgttattgtcttgtttttctgctatttggagtagaatgtacttcaagtaagaagtgagaagagtcttggattagacagaattgagtttgaatattgcctctgacacacagttatgtgatccaggtcatgttccttatcccttctcagcagagttacttcaaataaaaattgtttggatgataccaccaaatccacagtattattgtgaaaacaaatgaaatagcatgtgttaaagcatctgtacacagtgtatgatacataccacgttcccatcatgttttcttttttctcattttagtaaagctgtgattattagcttttaa

SEQ ID NO: 893362 - DNA, 550 bp, Homo sapiens
gtcccacttgtcagtttttgtttttgttgcaattgcttttggagtcttcatcatgaaacctttggcaaagcctatgtccagaacagtatttccaaggtttttggctaaggttctttttatagttttaggttttacatttaagtctttaatctrtcttgagttaattgttatacagtgaaagaaaggggtccaatttcaatcttcttcatatgtctagccagtttttccagcatcatttatagtgagtccctttcccattgctggttattgttaactttgtcgaaggtcagatggtggtagatgtgcaactttattcctggattctctaacctgttccattggtctatgtgtctgtttttgtaccatgctgttatggttactgtaaccttatagtatagtttgaagtcaagtagtgtgatgcctccaggtttgttctttgtgcttaaggttgcttttaccattcagactctttttttgttccatatgaatttataatagttttttttctaattctataaatataacattggtactttgatgggaatagcat

SEQ ID NO: 893363 - DNA, 598 bp, Homo sapiens
ggttcccaaacctaaattattgtcttctttgcacctgtaagaccaacaccaggtggaagctgccaaggctgggggcttgtgccctgtgaaacagcatcctgaggccccttttagccacagctggagtggctgtgatgyggagctccaagtatctaggctgcacacagcagggggactctgggtctggcctatgaaaccatttcttcctcctaggcctctgggactatgatgagaggggctactgcaaaggtttctgacaagtcctggggacattttctccatttccttggtaattaacattcagctcctttttacttatgcaagtttctgcagcaggcttggatttcttcccagaaaatgaggttttcttttctattgcatcatcacgctgcaaattttccaagcttttatgctctgctttctcttgaacactttgtcacttagaattttcttccaccagataccccaaatcatttatctcaagttcaaagtcccacagatctctagggcaggggcaaaaagccactagtctctttgctaaagcacagcaagagtcgcctttgcttcaatttccaacaagttccccatctccatttca

SEQ ID NO: 893364 - DNA, 704 bp, Homo sapiens
ggtgtatatgtgccacattttcttaatccaatctatcattgatggacatttgggttggttccaagtctttgctattgtgaatagtgctgcaataaacatacgtgtgcatgtgtctttatagcagcatgatttataatcctttgggtatataccccgtaatgggatggctgggtcgaatggtatttctagttctagatccttgaggaatcgccccactgtcttctacaatggttgaactagtttacagtcccaccaacagtgtaaaagtgttcctaattctccacatcctctccagcacctttatgcagccaacagacacatgaaaaaatgctcatcatcactggccatcagagaaatgcaaatcaaaaccacaatgagataccatctcacaccagttagaatggtgatcattaaaaagtcaggaagcaccgtttctttyaaaaatataaaatatgcagattgtcttcccctacatttttctgtctttaggaaaggccataattaattttgcaaccaactactcaccctgggcattgttttcccatgacaactaagccagccacacttgtgtgaacacagttccattttatattcctatctttcaactcaaactgtttcttttccctatttatatattttttaaaaagcaattacataggagatacaaggtttggtctgcacccacagtcaactcattcaaattt

SEQ ID NO: 893365 - DNA, 666 bp, Homo sapiens
taaaagtgaaattaaactgacatgtacttcagtatgtcttacttaacttttatattttttcagcttctcaaaggataaaatgctatcatatgtaattcagtaatatatttttcattaacaaaaatggcactctaactttattagggaaagtcaaggattgaaatcctaacccaaatctagtgaaggtcaaatatatgacagttgaaaagagggtatataaccaagcaatatgaagacagtttctgaagaaatcattaaaaatacaaataattatatttttattgttcttgaggaaaggaatgcagaaatatcttttcattctatttttattctatctacttttcattgcagctatgaatgagactactgactttcaggtagtattaataatatattaataacagcacgaaaatccaccttgatatcactttatagaataaaggaactttgacaatttctgaawataaacacttcataaataagttatatattcattgttataattggaactacaacaatctggcagagcatttaatttagttttcaaactaatgcagcaattaaatgtaatctgcctatttcctagggtccatgttattttttttggttttaaactcaggcccatggcatatctcaatgtactacaacttgtttctaataacgaag

SEQ ID NO: 893366 - DNA, 620 bp, Homo sapiens
tgttcaatgagtaacctacagtgcaataacttaaattcacagtttgttgcaaatatatccttggaatctgatttttcaccctttgaaataattctcatttaagtagtaggatgaacccaggcaaatttgagtacaaatactgattaatagtcttgctagttgagggactttggacaagtaaatttaatttccttattatcaaattgagataaaaatacctgccctaaaagacagttgttcaatgcttctatcatttcctaccatgggtgccttgaaatttttgctcgttttaaatgagacctaaaacccatcactccagaaaatataaattaaatgacattgtcacagaataataaattcatgtgtatcggttacatttctctakaaaagtatttaggaataacatgaaaaagagaagtagagtaagtcacttttaaacttttaattttttagcttcaagacacagaagaaatatattttaaatggtaacccacaggctatttatggctatgtgtaactaaggtgaaatttacaaaatacctaacctatgatgtaatacatgttgatatttatattttactctagtctattttaatgtattctctattaaattctgattt

SEQ ID NO: 893367 - DNA, 586 bp, Homo sapiens
gagaaaacaaaagcgatgaggttaaatgacatgccccctaactcacattgttagctaatggtagagtcaaggtgagaacagccaggtgctgcctggtagtcttccaagctggtttgtgtaatcacactcaaaggtataatgagatatgaaactattttctgtcagataactcttatccatttgggaagcttttctaatgaaaagttcaatgtacatcctccaaagtacttggcacacttcctggaaaatggtatttagtgctacctgggcttttaaaacacacacagaataaagtgtttcactctgtgtagctttggattaaaaaaatgaactggccattgcctgatgaagtatgaggccctgagatatccacgagggcagactaatatccagaaaaaawgttttttttatgagtgactacctgtattacctaaggaatatgtctttaaaaacactgccaacagacacccattgatttcttctcagtcatgatcacttgagtggcaggaagaagcccaataaaacagccagccaacagataccctgcgagtgccaccaaggtgatagcatgtgttacttcacagtg

SEQ ID NO: 893368 - DNA, 490 bp, Homo sapiens
gttactaagttacagtgccaaacaggctactgaaacaaggaagactaggaagtttggtttattagatgaaaatagtttatgacaaagcttctgattttcacacttctacattaagtaaaaaatcctaaccctggggttgcagtactgaccaagctctcataaattagtcaccctggtctagtctacaaaataagaccgtgacatctaaatcctgaaaggaaacacttycatattatttagcatttctgttttcattaggacatgtgaacgtatttaaattcaacattgaataaatataattcagtatgtatttatttgacctccatgtactcaaaactatggcaactgctatgaacaatgtcaaagaaatttaatatcactgctatggtctgaatatcctctccaaaacacatgttgaaatttgcccttgtggtggtgttaacaggtgggactttgggaggtgatggggccatcagggctctcccatcat

SEQ ID NO: 893369 - DNA, 490 bp, Homo sapiens
gttactaagttacagtgccaaacaggctactgaaacaaggaagactaggaagtttggtttattagatgaaaatagtttatgacaaagcttctgattttcacacttctacattaagtaaaaaatcctaaccctggggttgcagtactgaccaagctctcataaattagtcaccctggtctagtctacaaaataagaccgtgacatctaaatcctgaaaggaaacacttccatattatttagcatttctgttttcattaggacatgtgaacgtatttaaattcaacattgartaaatataattcagtatgtatttatttgacctccatgtactcaaaactatggcaactgctatgaacaatgtcaaagaaatttaatatcactgctatggtctgaatatcctctccaaaacacatgttgaaatttgcccttgtggtggtgttaacaggtgggactttgggaggtgatggggccatcagggctctcccatcat

SEQ ID NO: 893370 - DNA, 617 bp, Homo sapiens
gacctcaaacatgtgagagcgtgcaatgcagatcaacaaaattgcctttccaacccacagctaattgcaatcacataattgagcccagctgaaaccctcaacattacccagctgactattattgttagcaataaaaaatgccttcaggatggagtccagtataaacatactcatccctctcactttagtctctaacttcccttctcccaaatcagatactattgcttaaacttcaaaagcaaaaaaaaaaaaataacatgcatcaatattctggaaattcgattatgaaataaaacagaatatatgctgtgggcaagaaagaatatttaaaatgcttkgcctatacttctgtggctagagatgtgatagttcccttaaagtctgaatgtttcaaatagttaagcgcttgaatatatttcattattatattctttaccttgatctagttcaacttcattaagaaaagtaattattgtattgtgttttatacaaaaaaaaattttatattgtacttcctgggtgattgacaagatttcacacttcactagttttcctgactttagttgaaaatctacagcatatccacagggcctattagagtgcccatcatataatat

SEQ ID NO: 893371 - DNA, 668 bp, Homo sapiens
tgtttatttttgaagttttgtagtttttgttagtgaagggatcttccgcatctatttctttttgtatttttggatttcatcacaggtttttaattgttaaaaattccaatagtcattgttgctggtacatataaaaaaactgaattttttatttgacagttgggtcctgtaaacttgctaagtttcttattctaaccatagttatgtctgtagattctttagggttttctgaaacactatcatgttacctacaagaaagggtagctcattaattcgaaagatataggagtgttttagtttttctttgtacatttcaggaaggttgtcctttccctgcattttgcctaatgcatcttagctgtcaactttaytgaaataatgtatttcacaatcatacttttctaaccttttaaagtctaaaggctctgtggaatgattatttgttttataatttatgatactggcaatttgaatttatctttgttttctcttgaacattcttgttaacagtttatcagtttcattataaaaggaccaattttgggccattttaattttctctattttatgttttacattttattggtttctgatctgaaatttatgtccttttgtttacctaccttggcttttttttactcttcttattctagcttcttaaggtgaag

SEQ ID NO: 893372 - DNA, 600 bp, Homo sapiens
ttacaagtacacaattaaattgccaaatagaattatcctgttgaattctaattttgataatgaaaggggaaaaagacactaaaccttgcagcaagtaaggtgtgaaaaaataatagacttggctacagactacattattcccctgtgttcttcagtaggtgtgtctctatcagtctatagcttcaatatgacagaactctggaatcagctggaagtggtaatgtgaaggagacatgtggaatgttcagcaaagttggtgtttagaggaaactcaaactctctgcacacatcctcctctactcccagatgtgtataaatggaatcatcctatctacatttgaggtgtagtaatgctacagttttcctaccagtgaattatcagaaagtttgggtttgtatctctacttgtcccmttgttctctgtaatttaagtttgctctttaccatcagatctagagactttgagaaatccaatgtgtttttttcttccgagttttcttttttcttttctttctttcccttttttttgttgttttttttttgtttgtttgttttgtttgttttgttttgtttattaggatttggtctgtgtttgtttgg

SEQ ID NO: 893373 - DNA, 573 bp, Homo sapiens
acagagagtcagaccaagtaattcctatagggaacaatgtaattaataatatcacagcaatttttacagttcagagtcctgtgtaatgaaagacgagtgaagactgaacatccttcaaggcatgaaggaatgaagtctaacagtagaaggcagtagaagtacagattgagatatttcagaagatgttattcttggtgctacacagatcatatcataaagataccacaaatacaaacacaaaggactaaatctatgtcaaattatttatttagagtttattgccactaccataaggtaagtttcctgagaccaagaacctgttgcttattcatcatagctgacttctgtgccaagaaatatgttttaaataagaagttatagggaggagccaagatggcygaataggaacagctctggtctacagctcccagcgtgagcgacacagaagatgggtgatttctgcatttccatctgaggtaccgggttcatctcactagtgagtgccagacagtgggcgcaggtcagtgggtgcgcgcaccgtgcgggagccgaagcagggcgaggcattgcctc

SEQ ID NO: 893374 - DNA, 678 bp, Homo sapiens
tacacagtgtcacaagaaacaggttgaactttcaatattgcacttgaaaattttaactgaatccacctgttgacttaagtacactgtctgttttctacattactagaggtagcaatatcaccaaaccttcctttctggcactagataaggagtcaytttttttcttttttctcctatttacttctgtcttttcagcatgtacttacttacactgtccaggagacccttctaggtgtcatgtagcttctggtattaaagtctgtgctacatgttttggatcgttgttatggaaacaccacacttacaggtgccattttattctggtcatctcttcctgcattgtacaagactccacagtttttgtgacttaaaacaatcaccattttattttaactttaaattttatgggctaggaattcaggcagttgctggctgggtatttcttctgcttcatgtggcatggactgaagtcactcagtgttattcagctgatagctgggtcatctgtagggtccagggaagcttacattgtatttctaataacttttaagtgatgacaggaagagatccactgagtacttcctctggtccatttagatgaaggaccacaaggtctctccaacaggatagtcaggctttttacatggcactaagagatccacaggttagaaagtagaa

SEQ ID NO: 893375 - DNA, 610 bp, Homo sapiens
attagagaaaatcaaaacagtcaaaagttgttacttttataataaaattgataaacttctagaaagaatgatcaagaaagagaaaagaaatagaaattcaagttaccaacatcagaaattttaaacaatcatcttcaaatagatcctttagactttaaagtgatagaaaagaattgttatgaaaaacattattttaattaatttgacagcttagataaaagggtaaaatgtggggaaaacctgaccttctgaaaatgaccccaaaacaaattgaaaagttaaacgctcctctatccctcaaartaatgaactattcttgtttgtagataacaggatagtgtctcataaaacactaaagaatctacagagatgacaagaaataagtggtagatttatcatgtttataggactcaaatgccaaatgaaaaaatcaactgcatttataaatactaaaagcaataacgattgaagtttttttaattaaaaacctgtgaaatcatctggacacaaaaataactaggaccagatgagtgtgatcctacaataataactacaaaatttttcaaacataaatatttaaaacgccaaatagatgtatgtattcaagaat

SEQ ID NO: 893376 - DNA, 610 bp, Homo sapiens
attagagaaaatcaaaacagtcaaaagttgttacttttataataaaattgataaacttctagaaagaatgatcaagaaagagaaaagaaatagaaattcaagttaccaacatcagaaattttaaacaatcatcttcaaatagatcctttagactttaaagtgatagaaaagaattgttatgaaaaacattattttaattaatttgacagcttagataaaagggtaaaatgtggggaaaacctgaccttctgaaaatgaccccaaaacaaattgaaaagttaaacgctcctctatccctcaaaataatgaactattcttgtttgtagataacaggatagtgtctcataaaacactaaagaatctacagagatgacaagaaataagtggtagatttatcatgtttataggactcaaatgccaaatgaaaaaatcaactgcatttataaatactaamagcaataacgattgaagtttttttaattaaaaacctgtgaaatcatctggacacaaaaataactaggaccagatgagtgtgatcctacaataataactacaaaatttttcaaacataaatatttaaaacgccaaatagatgtatgtattcaagaat

SEQ ID NO: 893377 - DNA, 613 bp, Homo sapiens
tctatattatgtttaagcatctttatattttggtcatctgctttggatagtgccatacttctctaacaactgagataatgagaagtctatgtggaactgtggaaactgtagccactaggaactaattccatatgcgtggatcagccatccatttcatgtgttttatgatcacacatagttgcatgaggtatctacaataacgttcagtgagagaagcattgcttttctggaccacgatgtgagtatttgaagccactgaaaacagatattcattgaaaattcctgtgatatgttgaaatgtagctaatgtcttaaatctatatgattttcttgaaggaattctaactgggaaagataagctagcaagcatgaaaatttttcagaatatrgaatgtatatttggttttaatatatagcctatttttttctttttccgtttgccaaataagaagaaaaacatgtcccatattacatgtatagtaaaccaatagatttataataataagcttagtttatggaaagttatttttatatgatacattagtaaaagtgtacaattactttcagatatatttgattagagagtttaaaattgcagatcatgtcaagtgtg

SEQ ID NO: 893378 - DNA, 604 bp, Homo sapiens
cgtaacaaattttaatgttggtaaatttttgttttacttgtgttacaaattaggggattttccaggttaatttccactaattaggtgaatttttgcatagttatgaaaagacagtgtctttgtttttctatgaagaatttttccagcaggtaagaatatttaactacttttctacattgtttcagcttcttcatatttcgatcatctgctttggatggtgccaagcagctctaatgactaagataatgagaagcctgtgtgtaactgtggaaactgtagtctctaggcactatttctatccatrgatcagcaatccatatccatgtgatttaggatcacatatacatgcctgaggtagcttcattaacatttagtgaaagaagctttgcttttctggaccacgatgtgagtatttgaaaccactgacaagagatattcattgaaaattcatgtgacatgttgaaatgtggctaatgtcttaaataccatatgattttgttgaaggtattctaattgggaaagttaagctagcaacatgaaaattttttggaatatacaatttatagttggttttaatatatggcttatattttccttttctctt

SEQ ID NO: 893379 - DNA, 604 bp, Homo sapiens
cgtaacaaattttaatgttggtaaatttttgttttacttgtgttacaaattaggggattttccaggttaatttccactaattaggtgaatttttgcatagttatgaaaagacagtgtctttgtttttctatgaagaatttttccagcaggtaagaatatttaactacttttctacattgtttcagcttcttcatatttcgatcatctgctttggatggtgccaagcagctctaatgactaagataatgagaagcctgtgtgtaactgtggaaactgtagtctctaggcactatttctatccatagatcagcmatccatatccatgtgatttaggatcacatatacatgcctgaggtagcttcattaacatttagtgaaagaagctttgcttttctggaccacgatgtgagtatttgaaaccactgacaagagatattcattgaaaattcatgtgacatgttgaaatgtggctaatgtcttaaataccatatgattttgttgaaggtattctaattgggaaagttaagctagcaacatgaaaattttttggaatatacaatttatagttggttttaatatatggcttatattttccttttctctt

SEQ ID NO: 893380 - DNA, 604 bp, Homo sapiens
cgtaacaaattttaatgttggtaaatttttgttttacttgtgttacaaattaggggattttccaggttaatttccactaattaggtgaatttttgcatagttatgaaaagacagtgtctttgtttttctatgaagaatttttccagcaggtaagaatatttaactacttttctacattgtttcagcttcttcatatttcgatcatctgctttggatggtgccaagcagctctaatgactaagataatgagaagcctgtgtgtaactgtggaaactgtagtctctaggcactatttctatccatagatcagcaatccatatccatgtgwtttaggatcacatatacatgcctgaggtagcttcattaacatttagtgaaagaagctttgcttttctggaccacgatgtgagtatttgaaaccactgacaagagatattcattgaaaattcatgtgacatgttgaaatgtggctaatgtcttaaataccatatgattttgttgaaggtattctaattgggaaagttaagctagcaacatgaaaattttttggaatatacaatttatagttggttttaatatatggcttatattttccttttctctt

SEQ ID NO: 893381 - DNA, 640 bp, Homo sapiens
aggtcaattacctctgccacagttgtgggaagagcgctctctaaatcaatacagataacaacccttcttgtgataggagagccagatttaatccaatattgtgacttatgggacaaaacaaagaaaagccttctttaaaaacataattgatccattttatcaactcaccttgaatattttcataatattgaaaaatgaaattatgttagcctatcaatattcttatatttcacaaaagtttgaattcagtgttctatcatttgaaccaaaaacatgctaacagaaacagtgcatttttaaatgtatttatggaatggttttaacttatatgtacttttatttagttatctttatatttcaaacagcaccatagtattttagtcgttatacaattgtaatctgtcttattcagaatgattcactagtctttcaaaattttaattacaaatcttatatcyttgggcttccagttcaacttttaggattaaaggaatatccagaatagtttccttttatgtggaaagaaatacaacatatgtttgccattttgcccaaatatatatacttagtataatgccataatttggtgaaatgaaacttagatgtgaacataatcaaaataaattaattcattactttg

SEQ ID NO: 893382 - DNA, 629 bp, Homo sapiens
gcccccacataaccgtggttgtcctcttttttgttccctgtattttcatatatgttagacctgtttcaacctttcctattgataaattcatgactgtgttttatacagttatcacacccatgttgaatcctttaatatacacgttgagaaattcagagatgagaaactctatagaaaatctcttgtgtaaaaaagctatctgtagttagaataagagtgtccctcctcatgtagatagggaggtgtgtagacaaggtcttcccagtatgatttcctccacatgcccagcacagaacggagattcgaaggaatatgtaagcaaaatagtttctcctgttcagaagggaaggctatggtgctgcctttagtgtaatttatttaaagactttgtagaatatacaagcaccatactcacaaatatctttgaaacttcccyttctcagacttgggctgaaactctatgttagttcagtaagataatactcttaacaatcttagaattatattggtttagtttaaattgcttatgagacatactattaaatttttctgaagtctttcaaagtgacttatccacaactttgaaataacatttattttcatgacctttcttacttttagagtactta

SEQ ID NO: 893383 - DNA, 671 bp, Homo sapiens
ttctttcttagaggtcctgggaagatgatgtgagattctgattcaaagtgctgagcaaatgtctgttttggtaccagtaccatgctgttttggttgctgtagccttgtagtatagtttaaagtcaggtagggtgatgtcaccagctttgttctttttgcttaggattgtcttgactatacaggctctctgttggttccatatgaaatttaaagtagatttttttctaattctaggaagaatatcaatggtagtttgatgggtatagcattgaatccatgaattactttaggcagtatgaccattttcacgatattgattcttcctacccatgaggatggaacgtttstccatttgtttgtatcctctcttatttccttgagcagtggtttgtagttctccttgaaaaggtccttcacatcccttgttagctgtattcctaggtattttattctctttgtagcaatggtgactgggagttcattcatgatttggctctctgctgtctattgttggtgtaaagaaatggttgtgatttttgcacattgattttgtatcctgagactttgctgaagttgcttataagtttaaggagttttggggcggagatgatggggttttctaaatataaaatcatgtcatctgcagatagagacaatttgacttcctctct

SEQ ID NO: 893384 - DNA, 671 bp, Homo sapiens
ttctttcttagaggtcctgggaagatgatgtgagattctgattcaaagtgctgagcaaatgtctgttttggtaccagtaccatgctgttttggttgctgtagccttgtagtatagtttaaagtcaggtagggtgatgtcaccagctttgttctttttgcttaggattgtcttgactatacaggctctctgttggttccatatgaaatttaaagtagatttttttctaattctaggaagaatatcaatggtagtttgatgggtatagcattgaatccatgaattactttaggcagtatgaccattttcacgatattgattcttcctacccatgaggatggaacgtttgtccatttgtttgtatcctcycttatttccttgagcagtggtttgtagttctccttgaaaaggtccttcacatcccttgttagctgtattcctaggtattttattctctttgtagcaatggtgactgggagttcattcatgatttggctctctgctgtctattgttggtgtaaagaaatggttgtgatttttgcacattgattttgtatcctgagactttgctgaagttgcttataagtttaaggagttttggggcggagatgatggggttttctaaatataaaatcatgtcatctgcagatagagacaatttgacttcctctct

SEQ ID NO: 893385 - DNA, 552 bp, Homo sapiens
tggtaaattaactttgatgtttgatttggtttgctagtgttttgttgagaatttttgtgtctgtgtttatcagagatattgtcctatagttttcctttctcatggtatctcttacaggttttggtatcaggtgatactggcttcagaaaacgagttagggaggagtctttccttctcgattttttgaaatagtttcagtagaattggtaccagctctactttgtgcatctggtagaatttagctgtgaatctctctggccagggctttctttttggttggtaagttttttattactaattccatttggaacccartattggtctgttcagtgctttagttttttcctgatttaaacttgggacattgtgtgttttcaggaatttattcatttcctctagatattgtagtttgtgtgtgtagaggtgttcacaatagttatctaaggatctttcatatttctgtgggatcagttgtgatgtcaccttgtcatttctgtttgtgtttatttggatcttctctctttttttctttgttaatgtagctagcagtct

SEQ ID NO: 893386 - DNA, 552 bp, Homo sapiens
tggtaaattaactttgatgtttgatttggtttgctagtgttttgttgagaatttttgtgtctgtgtttatcagagatattgtcctatagttttcctttctcatggtatctcttacaggttttggtatcaggtgatactggcttcagaaaacgagttagggaggagtctttccttctcgattttttgaaatagtttcagtagaattggtaccagctctactttgtgcatctggtagaatttagctgtgaatctctctggccagggctttctttttggttggtaagttttttattactaattccatttggaacccagtattggtctgytcagtgctttagttttttcctgatttaaacttgggacattgtgtgttttcaggaatttattcatttcctctagatattgtagtttgtgtgtgtagaggtgttcacaatagttatctaaggatctttcatatttctgtgggatcagttgtgatgtcaccttgtcatttctgtttgtgtttatttggatcttctctctttttttctttgttaatgtagctagcagtct

SEQ ID NO: 893387 - DNA, 612 bp, Homo sapiens
agatgctctatggcaataggccctcactgaagttacattaagcctaatttagcctacttgagattaccatgctctcctttccattgtttactaaattagaactaaaaggggaggcaggcaatctaaggaagagaaaatagcaacaggcaataaatgcatgaggatgttcagccttacacatgaggagtaacacaggacattcaaaataaaactaaaatgggatgttattttatctaaaaagaccggtacaaattaaaaacttgtatagcataaaatmgtggtgcatatatgaggaaactgatattgttttacactgttagtgaaaatgtaaatttgtacagccactttgcaggttatctttggcaatatctcttaaaattttaagtatgtatactcagtgacctaataattataattctaggtataagaagacttacctacatactgaaggatgtgtgtctaaggatgttcattgcatcattcctaaaatctgtgaaaacttagaagcaatctaaatatttaaataggaaataggtagaaatgtggtatagccaaaccacttaataagcatgtattcagtcacatataatgtggtaaatccaaatatggcca

SEQ ID NO: 893388 - DNA, 661 bp, Homo sapiens
caaagtagccacagagtacctcctctaacttctatggcttacactcatcttaaaatagcttttctaggaactcagcttcctacgttgtataaggtattgcttttcttatctgacactttgcaatcatgatgcctgtcactcattgagaaccccactgtatgcagcagacttagtgctaaaggcacaaaaaattaccttctatcttcaaggttaacatagttaaatattactggagaagaaagagatgtaaacgagatataacagaagtctatgaaaatggtaatggtggtacaagacagtggcagttcaggaacttggagtacatagattataattagtgatgacagtctggagaacctaccaaccacaaaaaccatgtaaatgtgaaaagcctattttttttttgtgggggttggaataaaaaacttgaacacttcctctaaaatatttcatcataaaaatcatgtgaaatgtatattatccccattttaaatcccaakgctcaggtaaacaattggcctgtatgtatatataatatatataaaatacatatatacatgttatatataagtccatttgtttacaagtatgttacatatacaaataaataaaaagtagtacaagtgaaatctgcatagcaaactttgctctctcccaacca

SEQ ID NO: 893389 - DNA, 661 bp, Homo sapiens
caaagtagccacagagtacctcctctaacttctatggcttacactcatcttaaaatagcttttctaggaactcagcttcctacgttgtataaggtattgcttttcttatctgacactttgcaatcatgatgcctgtcactcattgagaaccccactgtatgcagcagacttagtgctaaaggcacaaaaaattaccttctatcttcaaggttaacatagttaaatattactggagaagaaagagatgtaaacgagatataacagaagtctatgaaaatggtaatggtggtacaagacagtggcagttcaggaacttggagtacatagattataattagtgatgacagtctggagaacctaccaaccacaaaaaccatgtaaatgtgaaaagcctattttttttttgtgggggttggaataaaaaacttgaacacttcctctaaaatatttcatcataaaaatcatgtgaaatgtatattatccccattttaaatcccaaggctcaggtaaacaattkgcctgtatgtatatataatatatataaaatacatatatacatgttatatataagtccatttgtttacaagtatgttacatatacaaataaataaaaagtagtacaagtgaaatctgcatagcaaactttgctctctcccaacca

SEQ ID NO: 893390 - DNA, 672 bp, Homo sapiens
atgaccttcatttctatgactaatttatttcctaggtgatttggattgtgaaacctgtaccataacacggagtggactgactggtcttgttattggtggtctataccctgttttcttggctatacctgtaaatggtggtctagcagccaggtaggaaatraaaaactttttataatatgtgattacctataaaactcacaacttaaagcagcaaatatattttgtttttaaggcatttagaccaaaggcaatgttaccctcttgattagaagttagcaagacctgttttttcttataatgaaattctacttatcaagaatttcaaacagttatacttggtgtgtagttaggctattaaccttaatttgtgtactgaatactaaactaactacaaagctgcaaacagtattatgcatgaaacttctatcatataaacaattatcttggatgagtttgaacacttgcactaaaggaaaattccatcagaaaatgtctagctgttatattagccttctattctaaaataattctggctattctctgttgaactcttgcatcagcaatctatgctatagccttgaagcaaactggataaagaaacaaaagtttttaggattaatagacactgaagacctttactttaatattcagttttatcttaagacttctagg

SEQ ID NO: 893391 - DNA, 605 bp, Homo sapiens
tcccattctgtaggtcgtctctttactctgctgtagttcctttgctgtgaagaagctctttattttaattagctcccacttatcaatttctggttattttctcccattctgtaggttgtctctttactctgttgtagttcctttgctgtaaagaagctctttattttaattatctcccacttgtcaatttctggttttgttgcaattgcttttaaagtctttgtcctttagtcattgtcttggctgagcccagaatggtattccccagattttatcctagggtttttatatttttacattttacattttgctcgttaatccatcctgagttgcttttcgtacrtggtgaaaggtaggggtccagttttattcttctgcatatgtttacccagttatcccagcagcatttattgaacaaggagtactttccctattgcttgtttttgttggctttgtcaaagatcagatggttgtagtgtgcagctttatttatgggttctttaatctgttccattggtctatgtgtttgtttttgaaccagccatgctgttttatttactgtagccttacagtacagtttgaagtcaggtagtgtgatgccttca

SEQ ID NO: 893392 - DNA, 616 bp, Homo sapiens
ctaccttgctagaatttggtcccaaatttgacccaagtataccagaaatgttttaaaatagtgttgtggattgtgtctgtgtatgtgtgtatgtatgtgtgtgtgtgtttgcgtgtatacatatatatatacacactatatatttgtacataataatgagagagcgttgaatgcaatggcaattgatagaaagtgcagtacaatttttaaaatgtaaaaatgtttctgaaaggaaattaaatcaaaatttgtccttgatataacaagtattaattcaaaaaggaagtattggaagtgsaagtgatgtccagacagaggaaacagcatacccaaacattcaaagtgaagaaggccatgatgcttgtggagaatctacttctacatttctttgttccagtcttctgttacacacagctcatggaaactgctaaacacactgagatccagtttagaggcatttcttgtttacacatttttaaaaatttcaccttaaaaattctgaaaatatagagaggtacagtgtgctttcagactatttccaaacttctaaagaaaaacagagaaaaactaggttaacaaaattaaaattcatgaacaatatttacaacaacactgg

SEQ ID NO: 893393 - DNA, 607 bp, Homo sapiens
agaaactatcacgagaacagcatgggaaagacctgcccctgtgattcaattacctcccaccagttccctcccacaacatgtgggaattcaagatgagatttgggtaagggcagagccagactatatcattccaaacctggcccctcccaaatctcaggtcctcacatttcaaaaccactcatgccttcccaacagtcccccaaagtcttaactcacttcagcattaacccaaaagtccacagtccaaaatcttacctgagacaaagcaagtcccttctgcctataagcctgtaaaatcaaaagcaagttagttacctccttgatacagtgggggtacaggcatyggaataaatacacctattcaaaatgggagaaattggccgaaatgaaggggttaaagggcccatgtaaatctgaaattcagtgggacagtcaaatcttaaagctccaaaataatctctttgactccatgtctcacatccaggccatgctaatgcaagaggtgggttcctatggtcttgggcagctccaacactatggctttgcagggtatagcctccctcccagctgctttcacaggctggcattgagtatctggggcttttcc

SEQ ID NO: 893394 - DNA, 607 bp, Homo sapiens
agaaactatcacgagaacagcatgggaaagacctgcccctgtgattcaattacctcccaccagttccctcccacaacatgtgggaattcaagatgagatttgggtaagggcagagccagactatatcattccaaacctggcccctcccaaatctcaggtcctcacatttcaaaaccactcatgccttcccaacagtcccccaaagtcttaactcacttcagcattaacccaaaagtccacagtccaaaatcttacctgagacaaagcaagtcccttctgcctataagcctgtaaaatcaaaagcaagttagttacctccttgatacagtgggggtacaggcatcggaataaatacacctattcaaaatgggagaaattggccraaatgaaggggttaaagggcccatgtaaatctgaaattcagtgggacagtcaaatcttaaagctccaaaataatctctttgactccatgtctcacatccaggccatgctaatgcaagaggtgggttcctatggtcttgggcagctccaacactatggctttgcagggtatagcctccctcccagctgctttcacaggctggcattgagtatctggggcttttcc

SEQ ID NO: 893395 - DNA, 644 bp, Homo sapiens
cagtccaaaatcttacctgagacaaagcaagtcccttctgcctataagcctgtaaaatcaaaagcaagttagttacctccttgatacagtgggggtacaggcatcggaataaatacacctattcaaaatgggagaaattggccgaaatgaaggggttaaagggcccatgtaaatctgaaattcagtgggacagtcaaatcttaaagctccaaaataatctctttgactccatgtctcacatccaggccatgctaatgcaagaggtgggttcctatggtcttgggcagctccaacactatggctttgcagggtatagcctccctcccagctgctttcacaggctggcattgagtatctggggcttttccagacacacagtgcaagctgtcagtggatctaccattctggggtctggaggacagaggccctcttctcatacctccactaggcagtgccccagtggggactctgttgrggggctttaatcccacatttcctttccgcactgccgtagcagaggttcttcattagggccccacccctgcagcaaatttctgcctgcccatccagatatttccatacatcctctgaaatccaggcagagattcccaatcctcaattcttgacttctgtgtacctgcaga

SEQ ID NO: 893396 - DNA, 647 bp, Homo sapiens
ggctttctgaaataaggcattcatacaaaaatagagaaaaatgaatgaaatggaatgaacagaacctctgagaaatacaggattatggaaagaaaccaaatctatgactcactggtgtgtccctgaaagagatggccagaatggaagcaacttggaaaacatatcttaggatatcatacataagaacttccccaacctagctagagaggccaacattcaaattcatgaaatgcagagatccccacgaaaaggtcattcccgagacacgtaatcatcagattattcaaggtcaaaatgaaaaaaaawatgttaaagacagaaagatctggtcacctacaaaggggagctcattagcctaatagtggacctctcagcagaaatcatacatgccagaaaagattaggggccaatattcaacattcttaaagaaaagaaatttcaaccaaaaatttcacatttggccaaactaagcttcacaagcagaggagaagtaagatctttttcagatgagcaaatgctgagagaattcatcaccaccttacttgccttataagagctcctgaaagcactaaatatggaaaggaaacaccattgccaggcattacaaaaacacatataactatacagactagtgacattggaaagca

SEQ ID NO: 893397 - DNA, 581 bp, Homo sapiens
aaattgattcaaagtagtctccacaaactgttgcttctcttactaatttatatgaactatgtttttccatttttacttaacaaattcagttaattcaacagatactattatcttgccataactttttttgtttcttgactacaaacagtagctgttcatgttctgtttgtaacaaaactgtacaaatgaaaaatacatcatgccagatatgttatttgctggatactggtgaacctaatataagatactcagttttctgatatttattccagtgtgatattaatttcrtgatgatataaatcattgagataggaaacagtctagagagatgctctttccttgcatgggaagaagatatgtatgcctaccacattccatatgttgtaagaaatatttacatatatatgatgttgttacatcttcacctcaattctaagaagtataaatgattatcctcattttgcataaaagaaaatggaaaccagaaatttaacttgaatcaaattatgtagttaatactacaattgggatttgaaactagttctgccctatttcaaacacaaatctctgtcttcttctca

SEQ ID NO: 893398 - DNA, 603 bp, Homo sapiens
aagtgtcattctaggatctgccttcctgctactactttggacactaaatgtcacattttgggttcaaagggaaacagactcttagactctgagatttgcatgcagcaggtttattagagagtgattagagggttatctctggaataaatatgtgagtgagtgaggaaagcaggactgggcagagggaaaggttgatctacaagctttcatatcagtgacctcagtcaatcctatggggagctctagagctggaacagccctatagaattgttctmtatcaaggcaaggacctgcacctttttactgccccatcaatcacttattgcatgatgatggctttcccagcaaaagattcaaaattaatgcatcagcaggcactgcccttgaaaggtgaaaaatggagtcactcagtcctgaagtggtatttgggtggctctcttcaacatccactaccaacaggtaatcaaaatgtcattaatttaggaatcaattttcataatactatatctctcatatttgtttataagaagggtttggcaccttaaactaatgaggctttaaaacaatatttcgtgttaagaactcaaagatctttaccttact

SEQ ID NO: 893399 - DNA, 650 bp, Homo sapiens
ttgatgcataaagatctgtgggtatggtaggtagatgtaggagaaggaaaacactctataatattttgattaagtctcagtctttcagtggacctgtgtccctgagttataatcttcacaggtgtttcttagcatattaccccccccccaccacccccattttcatgctgctattaaagacatacccaagattgggtaatttataaaggaaagattttaattgactcagttcagcatggctgggaaggcctcaggaagcttacaatcatggtggaaggggaagcaaagaggtccttcttcagatggtggcaggaagagaagtgatagcaaagtgggggaaaatcccctgataacaccatcagatatrgtgagaactcactatcatgagaacagcgtggaggtaactgcccacataattcagttacctcccaatgagtccctcccacctcaagtggggattatgggaactacaattcaagatgatatttgggtggatacccagccaaaccatctcattctgtccctggcccctcccaaatctcatgtcctcacatttcaaaacacattcatgcctaggcatgcattcatttatatgaaatatccagaataggtaaatacagcatagaagcagaaaacagattagtggtgac

SEQ ID NO: 893400 - DNA, 650 bp, Homo sapiens
ttgatgcataaagatctgtgggtatggtaggtagatgtaggagaaggaaaacactctataatattttgattaagtctcagtctttcagtggacctgtgtccctgagttataatcttcacaggtgtttcttagcatattaccccccccccaccacccccattttcatgctgctattaaagacatacccaagattgggtaatttataaaggaaagattttaattgactcagttcagcatggctgggaaggcctcaggaagcttacaatcatggtggaaggggaagcaaagaggtccttcttcagatggtggcaggaagagaagtgatagcaaagtgggggaaaatcccctgataacaccatcagatatagtgagaactcactatcatgagaacagcrtggaggtaactgcccacataattcagttacctcccaatgagtccctcccacctcaagtggggattatgggaactacaattcaagatgatatttgggtggatacccagccaaaccatctcattctgtccctggcccctcccaaatctcatgtcctcacatttcaaaacacattcatgcctaggcatgcattcatttatatgaaatatccagaataggtaaatacagcatagaagcagaaaacagattagtggtgac

SEQ ID NO: 893401 - DNA, 610 bp, Homo sapiens
gttctcatttttaaattaagtcattgcatattgtttaaagtcaactttatttcatttttatttatttatttatttgtttgtttgtttattatagagatgggcatcttgctgcattgcccaggcaggtctcaaactcttggcctcaagtgcttctcccaccttagcctcccaaagtgttgggattacaggtgtgagccatcatgcccagcctctacttaccttaaatagcaaaaaatttttcattgcaggttactaattcatagggaaattattttttttccattgggaaaatgaggaaagctttcactttcattttgtggaataagtcaaagtacagacttcaagctttaaaaacactgattgagatggatgtatattgagccctttkgtctactcagcttggaacattctcagcctcctgatacatacaattatcccaagtacaatgtatttatgtgtgtgtatgtatacatatgtacatatatgaataatatgtctacaccaagtacttgattttttttaatatttccagaattggaacagcaagtgaaaaggttggaaatatgccagaagtctagaactgttatttcatctagaaaagaagaaaacg

SEQ ID NO: 893402 - DNA, 639 bp, Homo sapiens
tttcttaagcttattgttttcagattctacataatttccttcaagagtcgtaatttcaaatatcatgaagaggtaggcaagaccacagaggtgggtctgggttagacctttagcaagaatgaccagttaggtaaggtttaagcttgttttcctgtcattttactatctaaacagtgtacaaggaatgcaaataatgtatataaggccaagaatacaagcaaatgtaccatcatttttactgttccctagttctaaacagtgtgccaatggagttcagtggttttagccacttggtcagaggaagccagaactttgacttaaatttaagacctgaaactgtgaaactactcgaagaaaacaatggggaaaatctctaggacatttttctgggcaaaaatttcctgagtaaaataccctacaagcacctacargaacaggcaatcaaagcaaaaatggataagtgggatcacatcaagttaaaaagtttttctgcgcagcaaaagaaacaatcaacaaagcaaacagataacccacataatggaagaaaatccttgcaaactacccatctgacaagggtttaataaccagaatatataaggagctcaaactactctatagggaaaaaacctaataatctga

SEQ ID NO: 893403 - DNA, 614 bp, Homo sapiens
caaaattgcagctcaacaaagccaagggagctgctacctctaccaggatttgcagacccaagaaactgctgctgtggccactagctctagaacaagccacctctgccataattgggtggctgccaaatcagggtcaagtgctttattgagaagtggtcagctctggaactacacagcttgttgatatatatcgtcaaaatagaaattttctgcactctgcctctcttcccaaataatttagtacttttagaggcttatataagcaatattattggtggatcctaaatcatatatgggatgccagttatacagtggagcagaaaattcagctttttaaagcacgctaatctgtcttttccaccgagaatggaatgccaaaaagtgttgaacacagaatctgacgtatgccccttcattgtgcccactargaatttatgtgtggcactcaccccctgcagcagataaggattataatattattgcagcatgtctgtgatttttaatcagctatatcagcagggcctatctcacagtactgttataatctcaaataaataaatacataaaaatacttcaaagtgtaatccacacattaaaaactctaaaataactgt

SEQ ID NO: 893404 - DNA, 614 bp, Homo sapiens
caaaattgcagctcaacaaagccaagggagctgctacctctaccaggatttgcagacccaagaaactgctgctgtggccactagctctagaacaagccacctctgccataattgggtggctgccaaatcagggtcaagtgctttattgagaagtggtcagctctggaactacacagcttgttgatatatatcgtcaaaatagaaattttctgcactctgcctctcttcccaaataatttagtacttttagaggcttatataagcaatattattggtggatcctaaatcatatatgggatgccagttatacagtggagcagaaaattcagctttttaaagcacgctaatctgtcttttccaccgagaatggaatgccaaaaagtgttgaacacagaatctgacgtatgccccttcattgtgcccactaggaatttatgtgtggcactcaccccctgcagcagataargattataatattattgcagcatgtctgtgatttttaatcagctatatcagcagggcctatctcacagtactgttataatctcaaataaataaatacataaaaatacttcaaagtgtaatccacacattaaaaactctaaaataactgt

SEQ ID NO: 893405 - DNA, 622 bp, Homo sapiens
ttttctgcataaggctagccagttttcccaacaccatttattaaataggggatcctttccccattgcttgtttttgtcaggtttgtcaaacatcaggtggttgcagatttgtggtgttatttctgaggcctctgttctgttccattggtctatatatatttgttttgatatgagtaccatgctgttttggttactatagcttgatggggatagcattgaatctacaaattactttgggcagtatggccattttcacagtattgattcttcttattcatgagcatggaatgttttcctatttgtgtcctctcttatttgtttgagcagtggtttgtagttctccttgaagagttccctcacatcccttgtaaggctggttcaacatatgcaaatcaataaatgtaatccatcacataaataraaccaatgacaaaaaccacatgactatctcaatagatgcagaaaaggccttcgatgaaattcaacacccctttacgctaaaaactctcaataaactaggtattgatggaaagtatctcaaaataatgagagctatttatgagaaacccacagccaatatcatacttaatggtcaaaaactggcaacattccatttgaaatc

SEQ ID NO: 893406 - DNA, 553 bp, Homo sapiens
ttcccttcggcctgttgccttggctcccatacatctcttgggcagagattttttttggaatttcataatacactaatttccttctcacaaaagggggaaatatagttaaatttggaatagaaggagcaaatggaacaactacagactaagaatgaaaacactaaaattataaaaaatatagttcaaacaattttttttctgaactgggactaatgaatgacattgatggcttattgcaagctttgccagaccacttttcatcccaatcttctactyactttggtaaaatatattaatccaccctcagtaaagtagaagtaaaccttattaaacctttaccagacaatatcctctaaggcctagagcaattgaaggaatcagacccataataaaagatatatttaaaatggtctaattatttcttgcaccagccaatgtaatactctgatcctttctgtaaggaagccaaacaggaggggctggacttttgtataacatttgagaactgtcaagaacattgtgatcccaagacatctggtggtaccaaaagccc

SEQ ID NO: 893407 - DNA, 524 bp, Homo sapiens
taaggaagaaagtcactgcaaaattaatagaacactcattaagatacaggagcaagagcgtaaggaaacaagaactgaatatagaaggctcaatttactttaactttgtaagtgtggcttttgaataggactttggtattagctgcattgtcccatacttgaggcaaagtaactgttkgtggtgccattcgtggactgaagaaaatagaatgggttgtatgctggagccacagaaactaatttgactactgccattttgttttcaactttcctatcattaattatttttcaaatgatataatatctgaggttgaacagacaagataatggttatttatgcaaattctcatctttactacaagtttttattttgttcagtgagataaaaaggattatcaaatgggagtcagtttgatatagggttgcagtaatgtaccatagtttgttaatacctccatggatccacattctcagctggtcatacccacactgatgaggctgacaatatactgacttggtttagt

SEQ ID NO: 893408 - DNA, 600 bp, Homo sapiens
caattacagttagccaagtgacagatttttctaaccaggggccttatgaagccctttaaattgtatcatagttctatttattcaacctgtatgtgaagattacattttactcattcccagtgaaaatccttgtaaacaatcacaaggagaacagatgcaaattttccattgtcttctgtgaaaatcttggagcactgattttcratatcaagtaagtcccctctataaaactgactcaggcactagagctctttcaagattgtaacaactagtattcatttaggcctcactatgtcccctaagcactaatagcactaagtactaccactgtggtaagaccttactaaatgcctgccatatattcattctctttttccccccttttctaattttgttttgcaagaacaatggactaatttaaaactacttatctggttgaatccatcacagataatggtgggctggctatgtgcacggttctggtcaaggaacagtataaatgatttccggagaaagcatttccctttctgattcaggctctctttttcttatattcttcctttcctcctttgcaaaagatgtagagctatagtcattttg

SEQ ID NO: 893409 - DNA, 603 bp, Homo sapiens
atgcattttcctatttaattttgcctttgcttgtacacttacaaaggttttgccatactaagataagtaatggatattaacatcaaaacacaatatctaattaaaggattatatgtgctaagaaatctgggcaccagcaatatgccgtgactgagaatctacatagttaacattagaatttctgaacaaggtcacaaaacacatttgattatttaatattgkcgtgcatgaaaacaatgtatcaataaaaacatatgccaatgtctgttgaacagtaaaactaaaagaacatgctaataggaaataaggattaggccaaatgtcaaaggatatgctttgaaagattcataaatagtgattaaaaatgtagattaaaataaaactatctgagtgtaatgttcctgtgttaaattatccaagaaaatttggtcaccattactctctacaatttaaattgattgttgtcaacatgtttgcataacattagaatacccacaaaatgttgaattactctgttttagaggttagtgtttcagttccttttctctaagaacatgcattaaaagacttaagtttttattgtttctgaatgactaattttta

SEQ ID NO: 893410 - DNA, 603 bp, Homo sapiens
aataaattcttccagattctaaggacttcaactaacactttcaaatgaatatgaatataatccacaagagagaggtgggaggtcatgattttatgtccataatgctttgttttaatgcctaagcatatggtttctttcagcatttcttgaaaaatatatactctctgattcttaaacagaaatactttatttgttgatttacagtgttttccttttcttccatactcttccctactttttcctaatatgcaaaaaaagtgtgtgtgtgtgcgtgtgtgtgtatctccttcattgtaatacttcatggcacaataatctcaggacattacatttctgttgcttcatttcactaagcgtgtttgggaaaagacaatactaaaatcttggccaggtgtggtggctcacacctgtaatcccagtactytgggagactgagggaggaggatcgcttgagcccatgggtttgagaccagcctgggcaacaaagtgagacctcatctccacagaaaattaaaaaattagctgggcatggtggtacatccctgtggtcccagctacatggaaagttgagacagaaggattgcttgaaccccaggagttcaa

SEQ ID NO: 893411 - DNA, 694 bp, Homo sapiens
ttcccctggcccccccataacctactttctttttcttttccttttttttttttgagatggagtttctctctgtcgcccaggctggaatgcagtggtgcgatcttggctcactccacctcccgggttcaagcgattctcctgcctcagcctcccgagtagctgggactacaggcgcccaccaccaygcccagttaattttttgtatttttagtagagacagggtgtcactgtgttagccagggtggtcttgaaatcctgacctcgtgttcggcccgcctcagcctcccaaagtgctggaattacaggtgtgagtcactgcgcccagcctctactttctttctctatagattttcctctatagattttctggatattttgtataaatagaatcatataatatgtggacttctgtgactggcttttttcacttagcataatgtttttgaggttcattcaagtggcatgtatcaatacttcatttctttatatgaccgaatattctgttatatggatataccacattctgtttatacatttgtctgtggattccttaagattttctttaaaaaaaaaaaaatgttttaccaaatacccagacttcaaggaggaggattttccatatgtaagactgtgttatctgtgaacagagatattttcatttcttcctttccaatctggataccttctattgctt

SEQ ID NO: 893412 - DNA, 694 bp, Homo sapiens
ttcccctggcccccccataacctactttctttttcttttccttttttttttttgagatggagtttctctctgtcgcccaggctggaatgcagtggtgcgatcttggctcactccacctcccgggttcaagcgattctcctgcctcagcctcccgagtagctgggactacaggcgcccaccaccacgcccagttaattttttgtatttttagtagagacagggtgtcactgtgttagccagggtggtcttgaaatcctgacctcgtgwtcggcccgcctcagcctcccaaagtgctggaattacaggtgtgagtcactgcgcccagcctctactttctttctctatagattttcctctatagattttctggatattttgtataaatagaatcatataatatgtggacttctgtgactggcttttttcacttagcataatgtttttgaggttcattcaagtggcatgtatcaatacttcatttctttatatgaccgaatattctgttatatggatataccacattctgtttatacatttgtctgtggattccttaagattttctttaaaaaaaaaaaaatgttttaccaaatacccagacttcaaggaggaggattttccatatgtaagactgtgttatctgtgaacagagatattttcatttcttcctttccaatctggataccttctattgctt

SEQ ID NO: 893413 - DNA, 694 bp, Homo sapiens
ttcccctggcccccccataacctactttctttttcttttccttttttttttttgagatggagtttctctctgtcgcccaggctggaatgcagtggtgcgatcttggctcactccacctcccgggttcaagcgattctcctgcctcagcctcccgagtagctgggactacaggcgcccaccaccacgcccagttaattttttgtatttttagtagagacagggtgtcactgtgttagccagggtggtcttgaaatcctgacctcgtgttcggccsgcctcagcctcccaaagtgctggaattacaggtgtgagtcactgcgcccagcctctactttctttctctatagattttcctctatagattttctggatattttgtataaatagaatcatataatatgtggacttctgtgactggcttttttcacttagcataatgtttttgaggttcattcaagtggcatgtatcaatacttcatttctttatatgaccgaatattctgttatatggatataccacattctgtttatacatttgtctgtggattccttaagattttctttaaaaaaaaaaaaatgttttaccaaatacccagacttcaaggaggaggattttccatatgtaagactgtgttatctgtgaacagagatattttcatttcttcctttccaatctggataccttctattgctt

SEQ ID NO: 893414 - DNA, 659 bp, Homo sapiens
acttatatatttaagagattagttgattttcatgacagttggaatgagtgaatcactcctttcctttttcctgttcccttgcctgagagctaaaaaaagacttcctaattaagatttcactagtaattgatttcttaattatgaagctggtggtctggtatttttaaaataagagctgtaagtgtccttgaaattggcaccttaaaaaataattcccaaagtaggcaagactaagaaacaccatttggcctatggcttcagaactttaaattaattctacctttttttgctcctgcacccttgtgccygtatgtccaaataattttacatcaatttttgattctagaattgccgtttatttaactacttgctcgatcataagaaattatgagttatttatatcaatttttaaagtttttttaatgcaaccattggaaatagctattgtgtatttcatattcctttatccacctttttacacatttgacatattcagtcctaaaataaagatggtatggatgtttttaacatatgttttgttctaaaacaatgttacaattactacaagaaaaaaagaaccaatttctgtgtgaaaaattaaaacagagcattggattaaaattttatgcttctatcccttagaaatcttagtcccttgg

SEQ ID NO: 893415 - DNA, 459 bp, Homo sapiens
agtcctccagtaacaaagttaagtgaatccagaaaaacaagttctcctatcttaagactaaaaatcttaaacttgagggctaggcgcggtggcttgcgcctgtaatcccagcactttgggaggctgaggcaggcggatcacaaggtcaggagatcgagaccatcctggctaacacagtgaaaccccgtctctactaaaaatacaaaaaattagctgggtgtggtggcgggcgcctgtagtcccagctactcgggaggctgaggcaggagaatggcgtgaacccaggaggcggagcttgcagtgagccgagatggcgccartgcactccagcctgggcgacagagccagactccgtctaaaaaaaaaaaaaaagaaaaagaaaaaatcttaaacttgaaactacagagctctgtataggaagaagaaacagtcactcacaaaaatgaagagaagatattt

SEQ ID NO: 893416 - DNA, 686 bp, Homo sapiens
ctgtgggtgcagaccaaaccttgtatctcctatgtaattgctttttaaaaaatatataaatagggaaaagaaacagtttgagttgaaagataggaatataaaatggaactgtgttcacacaagtgtggctggcttagttgtcatgggaaaacaatgcccagggtgagtagttggttgcaaaattaattatggcctttcctaaagacagaaaaatgtaggggaagacaatctgcatattttatatttttraaagaaacggtgcttcctgactttttaatgatcaccattctaactggtgtgagatggtatctcattgtggttttgatttgcatttctctgatggccagtgatgatgagcattttttcatgtgtctgttggctgcataaaggtgctggagaggatgtggagaattaggaacacttttacactgttggtgggactgtaaactagttcaaccattgtagaagacagtggggcgattcctcaaggatctagaactagaaataccattcgacccagccatcccattacggggtatatacccaaaggattataaatcatgctgctataaagacacatgcacacgtatgtttattgcagcactattcacaatagcaaagacttggaaccaacccaaatgtccatcaatgatagattggattaagaaaatgtggcacatatacac

SEQ ID NO: 893417 - DNA, 603 bp, Homo sapiens
cccagccatcccattacggggtatatacccaaaggattataaatcatgctgctataaagacacatgcacacgtatgtttattgcagcactattcacaatagcaaagacttggaaccaacccaaatgtccatcaatgatagattggattaagaaaatgtggcacatatacaccatggaatactatgcagccataaaaaatgatgagtttgtgtcctttgcacggacatggatgaagctggaaaccatcattctcagcaaactatcacaaggacaaaaaccaacactgtatgttctgactcataggtggtaattgaacaatgagaacacttggacacaggaaggggaacatcacacacctgggcctgccgtggggtgggggaggggggagggatagcattaggagttatacctaatgtaaatgacgagttaatgggtgcagcacaccaacatggcgcatgtatacwtatgtaacaaacctgcacgctgtgcacatgtaccctaaaccttaaagtattataaaaaaaaaaaaaagaaacggtgcaactagactaaaaataatgatcgtctgtttagagttctgtagaatagcttaggaaggatcaa

SEQ ID NO: 893418 - DNA, 687 bp, Homo sapiens
ggtgtatatgtgccacattttcttaatccaatctatcattgatggacatttgggttggttccaagtctttgctattgtgaatagtgctgcaataaacatacgtgtgcatgtgtctttatagcagcatgatttataatcctttgggtatataccccgtaatgggatggctgggtcgaatggtatttctagttctagatccttgaggaatcgccccactgtcttctacaatggttgaactagtttacagtcccaccaacagtgtaaaagtgttcctaattctccacatcctctccagcacctttatgcagccaacagacacatgaaaaaatgctcatcatcactggccatcagagaaatgcaaatcaaaaccacaatgagataccatctcacaccagttagaatggtgatcattaaaaagtcaggaagcaccgtttctttyaaaaatataaaatatgcagattgtcttcccctacatttttctgtctttaggaaaggccataattaattttgcaaccaactactcaccctgggcattgttttcccatgacaactaagccagccacacttgtgtgaacacagttccattttatattcctatctttcaactcaaactgtttcttttccctatttatatattttttaaaaagcaattacataggagatacaaggtttggtctgcacccacag

SEQ ID NO: 893419 - DNA, 611 bp, Homo sapiens
agcactacatctgcagtgctgcagtgaaccatatggagaatttactgcagccaaaggagtcaagtaaaaactctctccacagatggattcagcacttcaaaggttgaggcaactgttcaataggttacactgcctatttctcagcaataccaaaattcaaaaaggcatttgtcctaaaagactagatacacaggtcctgagctgtcacttgaagtgggtaggcaaaggggctgctgtaaatagaactccaacagaaatccgcaaacctgaattggcaaacacastctacctatcagagtcgtctggtcttcatttgaatccagttcatcaccagtgttatagaatgctactagtttataaatttataattttttcctttagctcttgaaaaatatgaaggcttgtttcataagaattatttaacttgtgaaaattgaatggatgaatggtaaatcacaaattgagaagttaattcttgatgggtctggagttacagttgatatgagcagataatggttccaatttgtagaccacccatatatgctatacctttatctaagtgtttatatacattatttgattttattttttaacattcctacaaaaataag

SEQ ID NO: 893420 - DNA, 541 bp, Homo sapiens
gtggattcatctacctttggtctttgatgttggtgacttcggatggggtttttttgtggacgtccctttttattgatgttgatgctattcttttctgcttgttagttttctttctaacagtcagtcccctctgctgcaggtctgctggagtttgctggaggttcactccagaccctgtctgcctgggtatcaccagtggaggcagcagaacagcgaaaattgccgcctgttccttcctctggaagctttgtcccagaggggcacccaccagatgccaggtggagctctcctttatgaggtttctgtygatcctgctgggagatgtctccaagtcaggaagcatgggtctcagggacccacttgaagaggcagtctgtcccttagcagagctcgagcgctgttctgggggatccattgctgtcttcagagctggcaggcaggaatgtttaagtcggctgaagctgtgcccacagccaccccttcccccaggtgctctgtctcagggagataggatttttatccataagcccctgaccgaggc

SEQ ID NO: 893421 - DNA, 603 bp, Homo sapiens
agcagatttgtaaaggagtagaagatttagaaggctcaattctccctactcaactacacagaagcattataaaagaaagaatacatgtatacccaaccctcaaaatgttcaataaaattcactgaattgaaaatatgtttaccaagatcatgaatagggagcccacagaacacccaagaaagactttttagagtcaaaggaatctttacttccttagagtctcagcaggcacaggacttctctagtacagaggaaagttaagagcaaaggctgcaataatatcaatattaaaccagttctctttcaaatacrtaagggagaagtacaaaaaaaaggaattatttcagagttcctcaacaagagtgctattagtgttttgattggaacagttctagaatgtacaaaattgtctagaactttataagatgttttacatacctgagctttggtcactaaatgccagtaatgtcccattgagacaatcagaaatgccccttaaaatttccacaagttttcctaaacagttagtactattaagccagttgagaaaatcaagaattctcagcataaaaggggccagacaggcgttactgtatccccatg

SEQ ID NO: 893422 - DNA, 602 bp, Homo sapiens
aatatcacttttcctagatgcccatctttctgagatcatttcatttgttccagcgaggagtagtagttctagaatagataatcttaagggtcaaagattcatctcaagctttctatttaccacatattcatctcaatttccttaagaaaaagaaaatgttaaaaaatatcacagataaggtgatacaccactgcttgtgtactttttagctttgcaggttgttgaatgatatgttctttagttgagaaaagtgagaaattcttctttatctctgagwttattccacaaaagtaatcagttattgttgtaactgctacctgcccattaaagtgaattttattgtcacatttatcaatcagaatgattactagtaagaatgattagataattgaacctttctatgattcagatttatttaaaaaatcaagccttatgcttttcactacatgatttagaagcaacagatattctacagactccaaactaaccaacatgcaattaaaaactaattatttataaattgttttattccatgtgacgttacccacattgtttgtgggaatatagaaattgttttttctttagaagcaatttaatatacc

SEQ ID NO: 893423 - DNA, 602 bp, Homo sapiens
aatatcacttttcctagatgcccatctttctgagatcatttcatttgttccagcgaggagtagtagttctagaatagataatcttaagggtcaaagattcatctcaagctttctatttaccacatattcatctcaatttccttaagaaaaagaaaatgttaaaaaatatcacagataaggtgatacaccactgcttgtgtactttttagctttgcaggttgttgaatgatatgttctttagttgagaaaagtgagaaattcttctttatctctgagattattccacaaaagtaatcagttattgttgtaactgctacctgcccattaaagtgaattttattgtcacatttatcaatcagaatgattactagtaagaatgattagataattgaacctttctatgattcagatttatttaaaaaatcaagccttatgcttttcactacatgatttagaagcaayagatattctacagactccaaactaaccaacatgcaattaaaaactaattatttataaattgttttattccatgtgacgttacccacattgtttgtgggaatatagaaattgttttttctttagaagcaatttaatatacc

SEQ ID NO: 893424 - DNA, 568 bp, Homo sapiens
aagaaaatattgcaatttaagacaaaatggtcatgatgacttataattttcttgatgagatcaagagctctcatttattttaatttatagtacagaccctgtcaggattttttttaacctgtcacatgaaatatgttattaagtgtttyattcatgtaaaataaagcagaaatagcatcttcacaattagatgaggtaatatggcacagtaataacctaaaatgacagctcagtataatgtgacttgctgtgtggctagcttcagggtgtgaacagcttcacaggaaacacaacccgtgagtaggaagggttatatcgttttactaaattaagcagttgtgaacttgtaggtgttatttcatttttcatgaattagttctctgaaagcaaatgaatgaaataggtaaaattacatcagtattttcatttttaattgaaggtttgaccttcaaaacatattttctaagccattatgtttaacaatacaaatatacagatcacaaggaagcaaacttatcttcataactaattatttttaatagttatacattagaaatattaaacaaca

SEQ ID NO: 893425 - DNA, 568 bp, Homo sapiens
aagaaaatattgcaatttaagacaaaatggtcatgatgacttataattttcttgatgagatcaagagctctcatttattttaatttatagtacagaccctgtcaggattttttttaacctgtcacatgaaatatgttattaagtgttttattcatgtaaaataaagcagaaatagcatcttcacaattagatgaggtaatatggcacagtaataacctaaaatgacagctcagtataaygtgacttgctgtgtggctagcttcagggtgtgaacagcttcacaggaaacacaacccgtgagtaggaagggttatatcgttttactaaattaagcagttgtgaacttgtaggtgttatttcatttttcatgaattagttctctgaaagcaaatgaatgaaataggtaaaattacatcagtattttcatttttaattgaaggtttgaccttcaaaacatattttctaagccattatgtttaacaatacaaatatacagatcacaaggaagcaaacttatcttcataactaattatttttaatagttatacattagaaatattaaacaaca

SEQ ID NO: 893426 - DNA, 669 bp, Homo sapiens
ccttgtattctcgtcatgtagttaccatttgtaatgagaacacacagtctttggttttcttttcctgcattaatttgataaggataatggcctctagttcaatccatgttcctgcaaggacatgatctcattcttttttatggctgcacaatacacaatatgtaccacattttcttcatccagcctaccaatggtgggcagttaggcttattccatgtcttagctattgtsaatagtgctgcaatgaacatacacatacatgtgtctttatgatagaatgatttatgttcctttgggtacatacccagtaatgggattgctgtgttgaatggtagttctgtttttagctctttgaagaattgtcacactgctttccacaatggttgaactaatttacatttccaccagcagtgtataagcattcccttttctccactacctcgccagtatctcttattttttaactttttaataattgtaattctgactggcatgagatggtatcttattgtggttttgatctgcatttctctaatgatcagtgataatgagctttttttcatatgcttgttggccacatgtatgtcttcttctgaaaagtgtctgttcagtgtcctttgtctatttttttgtaaattttcttttcttgtttaaattcataatacattc

SEQ ID NO: 893427 - DNA, 669 bp, Homo sapiens
ccttgtattctcgtcatgtagttaccatttgtaatgagaacacacagtctttggttttcttttcctgcattaatttgataaggataatggcctctagttcaatccatgttcctgcaaggacatgatctcattcttttttatggctgcacaatacacaatatgtaccacattttcttcatccagcctaccaatggtgggcagttaggcttattccatgtcttagctattgtcaatagtgctgcaatgaacatacacatacatgtgtctttatgatagaatgatttatgttcctttgggtacatacccagtaatgggattgctgtgttgaatggtagttctgtttttagctctttgaagaattgtcacactgctttccacaatggttgaactaatttacatttccaccagcagtgtataagcattccyttttctccactacctcgccagtatctcttattttttaactttttaataattgtaattctgactggcatgagatggtatcttattgtggttttgatctgcatttctctaatgatcagtgataatgagctttttttcatatgcttgttggccacatgtatgtcttcttctgaaaagtgtctgttcagtgtcctttgtctatttttttgtaaattttcttttcttgtttaaattcataatacattc

SEQ ID NO: 893428 - DNA, 669 bp, Homo sapiens
ccttgtattctcgtcatgtagttaccatttgtaatgagaacacacagtctttggttttcttttcctgcattaatttgataaggataatggcctctagttcaatccatgttcctgcaaggacatgatctcattcttttttatggctgcacaatacacaatatgtaccacattttcttcatccagcctaccaatggtgggcagttaggcttattccatgtcttagctattgtcaatagtgctgcaatgaacatacacatacatgtgtctttatgatagaatgatttatgttcctttgggtacatacccagtaatgggattgctgtgttgaatggtagttctgtttttagctctttgaagaattgtcacactgctttccacaatggttgaactaatttacatttccaccagcagtgtataagcattcccttttctccactacctcgccagtatctcttattttttaactttttaataattgtaattctgactggcatgagatggtatcttattgtggttttgatytgcatttctctaatgatcagtgataatgagctttttttcatatgcttgttggccacatgtatgtcttcttctgaaaagtgtctgttcagtgtcctttgtctatttttttgtaaattttcttttcttgtttaaattcataatacattc

SEQ ID NO: 893429 - DNA, 607 bp, Homo sapiens
ctgataggcttattgttgatttaatttcagaactcattattctgttcagggatccaatttatttctggttctgtcttgggagggtgtatgtgtgcaagcatgtattcatttcttccagattttctgatttctgtacatagaggtgttcatcatagtatctgatggttgtatttctgtggggtcagtggtaacatccctttttttgttttaattgtgtttatttsaatcttctctcttttcttccttcatagtctacctagcagttcatctgttttattaatttttttcaaaaaagcaactcctggattgattgatctttggaatgttatttttgtctcaaagtccttcatttcagctttcattcggattactgaatgtttagtgctataaatttccctcttaacacttccttagctgtgtctcaaagaatcttctgtgttgtatcttagttctcattagttttaaagaacttcttaatttctgtcttaattttattatttaccaaaaagtcattcaggagcagattattctgtttccatgtaattttataattttgagctattctcttagtcttgaattctattttaattgttctgtgatctgagag

SEQ ID NO: 893430 - DNA, 539 bp, Homo sapiens
acatagtggttaagtgtctgagctttagggcgatattaccaggtttaattaccagttcctcgtgccaatggctttgtagctttagcaagttttataattttagtcaagatttgtaatatttctgtgtttcagttttctcctcttaaaaatgggcttcataaacatttctgctttctatgattattgtggggattaaatggcatgatccatataaagtatttattacactrtaagtcagtcttcaatgttaggtgttattaatattgcaatttcctattttttactgaacaatttttttcatcactgaacatgcaaataatagatttaacattatgttatatgtataaaatagagttttttaccttgaggagtacgtcttaagctctttcaaatatttgctgttctctttttctgtctggatccacatccactcttcttgctctttcaaacttctgtctctcctttaggagtctcttcaattccaggtccctacttcataaatgcctgtgaaattaccacaaaacatagatatttttggt

SEQ ID NO: 893431 - DNA, 598 bp, Homo sapiens
gcttgctcccttgtgtcttttagttcgtggttcaaatgtcacaccttcagagacatctgcctgactaccctatgtaaaataataccactttgcaatctctaagcacttaagctgcttaattttttgtatcacatgttgtcatgtatttatttgtgaacaagaactttctttaccactggactactggcatctagagtatcatctgacrcataggaataattaacaaatatttaattgatagagtgaataaatagatttgtttaacagaataatagttcattagtaagaacttgcttaagtctttataaggcatccagaagagtatttgatattttgcataattatctcatttaatctatatatcaactctatgaagtaggcactatgatcatctatttttattaagaagaaaaaataactgacactcgtggagtttaaaaatacctataaccccatgggggggaaaaaagatacagcatacatttaaacctaaatgagtgtaatttcaaagcatttggtctttttactatatgattctaccacatacaaagcacatcagccaggttcaggctttctgaaaaaaaatacatcaagcttc

SEQ ID NO: 893432 - DNA, 601 bp, Homo sapiens
gttaagtgaaataagccagacacagaaagaaaaacatcacatattctcacttatttgcaggatctaaaaatcaaaacaattaaactcatggagatagagagtagaaagatggtaaccacagtctgagaagggtagcgctggggtcggggattgatgagaatggttaatgggtaagaaaagttagaaagaatgaataagatcaagtatttgatagcacaaggtgattatagtaaaaataaattatttgtacatttaaaaataactaaaagagtataactggattgtttgtaacacaaaggataaatgttagaagaaatggatattctattttccatgatgtgattattgcacatttcattaytgtatcaaaatatctcacaaactccataaatacatatacctactatacctactatgtacccacaaaaattaaacattaaaaaaggcatttgattatcttgtttatattctatgctctgcaggaagaactgcaatttattttatctcattttattttatttcattctatttgagatgaaggtcttgatatgctgcccaggctagcctcaaactgctggactcaagcaatcctcctgcctca

SEQ ID NO: 893433 - DNA, 686 bp, Homo sapiens
aatctatgtttcattaggtttatgagtaataaataacagaatatctaggttacatttattataagaaataataccctccataatatgtagagataaatgtattgacgaataggtttaaattttttttaacattgctgattaagttatatgtgagtcaacagaagagtctgccataatttttaatatatatcaaatgttttttagaaagcatactcattaaccattttatttttacttgacttgcaaataaacaaaaatgagtaatttgatttcattatctatgcaaactgtccycattttttaaaagtcaaggatctttaataaatatcaatgcatacccttagtattctatggcctcaatctctaaggaaaacacaacaaaagattatttacactcttataatattttaaccaagacttattggtcacctaatatgtgccagatgctctgataggcactaggttataaaataaggatatagtcactattctgaaggaatctgcaatcgaggtagatatacaagcaagaaggtaaagtcataataacagttattttagagtttttaatgtgtggattacactttgaagtatttttatgtatttatttatttgagattataacagtactgtgagataggccctgctgatatagctgattaaaaatcacagacatgctgcaataatat

SEQ ID NO: 893434 - DNA, 686 bp, Homo sapiens
aatctatgtttcattaggtttatgagtaataaataacagaatatctaggttacatttattataagaaataataccctccataatatgtagagataaatgtattgacgaataggtttaaattttttttaacattgctgattaagttatatgtgagtcaacagaagagtctgccataatttttaatatatatcaaatgttttttagaaagcatactcattaaccattttatttttacttgacttgcaaataaacaaaaatgagtaatttgatttcattatctatgcaaactgtccccattttttaaaagtcaaggatctttaataaataycaatgcatacccttagtattctatggcctcaatctctaaggaaaacacaacaaaagattatttacactcttataatattttaaccaagacttattggtcacctaatatgtgccagatgctctgataggcactaggttataaaataaggatatagtcactattctgaaggaatctgcaatcgaggtagatatacaagcaagaaggtaaagtcataataacagttattttagagtttttaatgtgtggattacactttgaagtatttttatgtatttatttatttgagattataacagtactgtgagataggccctgctgatatagctgattaaaaatcacagacatgctgcaataatat

SEQ ID NO: 893435 - DNA, 686 bp, Homo sapiens
aatctatgtttcattaggtttatgagtaataaataacagaatatctaggttacatttattataagaaataataccctccataatatgtagagataaatgtattgacgaataggtttaaattttttttaacattgctgattaagttatatgtgagtcaacagaagagtctgccataatttttaatatatatcaaatgttttttagaaagcatactcattaaccattttatttttacttgacttgcaaataaacaaaaatgagtaatttgatttcattatctatgcaaactgtccccattttttaaaagtcaaggatctttaataaatatcaatgcatacccttagtattctatggcctcaatctctaaggaaaacacaacaaaagattatttacactcttataatattttaaccaagacttattggtcacctaatatgtgccagatgctctgataggcactaggttataaaataaggatatagtcactattctgaaggaatctgcaatcgaggtagatatacaagcaagaargtaaagtcataataacagttattttagagtttttaatgtgtggattacactttgaagtatttttatgtatttatttatttgagattataacagtactgtgagataggccctgctgatatagctgattaaaaatcacagacatgctgcaataatat

SEQ ID NO: 893436 - DNA, 636 bp, Homo sapiens
aagcaaagtgcaatttttatcacatcatatcaaggatatatactattaacatgagttaccacatttaatgttgacattcatcaactctctgaggtagtgtttcccaggtttctgctctctaaagttactcttccccactctatttcatagtgtataattcttatctggggcagtagtttgtacataggttttcagctgaaaatacagattagggtgcatggcagctgagtggttcttttacaaactcaactgcatgtgaagtgattgattctggcataagcattgaatgattcaatgatctaaatacatcawgatctcaaatgatccttttaaaagcctggtgtactaaggatggaatcttacaaggtgaggagtctttctctgttatgtgagagaagcgttcccattataatctgtgaaaatacactctaagccatatcttaaccaattcataatatacaaactgaggtttttaatagtggtttcacttatacagtagtttcagatatactttcccaatagcttgtaaaagtaaaatatttaaaagtaaaattgatcttctgatattaattgctaccttcaagcatgtttaataattagcattgctttagcaactcatgcccctggcccactgtt

SEQ ID NO: 893437 - DNA, 636 bp, Homo sapiens
aagcaaagtgcaatttttatcacatcatatcaaggatatatactattaacatgagttaccacatttaatgttgacattcatcaactctctgaggtagtgtttcccaggtttctgctctctaaagttactcttccccactctatttcatagtgtataattcttatctggggcagtagtttgtacataggttttcagctgaaaatacagattagggtgcatggcagctgagtggttcttttacaaactcaactgcatgtgaagtgattgattctggcataagcattgaatgattcaatgatctaaatacatcaagatctcaaatgatccttttaaaagcctggtgtactaaggatggaatcttacaaggtgaggagtctttctctgttatgtgagagaagcgttcccattataatctgtgaaaatacactctaarccatatcttaaccaattcataatatacaaactgaggtttttaatagtggtttcacttatacagtagtttcagatatactttcccaatagcttgtaaaagtaaaatatttaaaagtaaaattgatcttctgatattaattgctaccttcaagcatgtttaataattagcattgctttagcaactcatgcccctggcccactgtt

SEQ ID NO: 893438 - DNA, 639 bp, Homo sapiens
gagtatatacccagaagaggaattgatggattatacataattctgtgtttacattcttgaggaatcatcataaaataataacttattattaacaagaattagaccacctgagaaacatacactataatattaaaagaggttaaaagaaagataacattttaaaaaactcttcacttaatgttcttttggcaaaagagaattgtaactaaatattatagaagaaatttaaaaggaagaataaagcactttaataaaggaagattataaagtagacatrcaagaacacagagtagataaggcacaagaaagatgaaaataaaatatgagtttataaattgaaagatagcatcttatatcaaaaataattgatccataattgtaaaaacagaaacaaatcttattactttttatggaactttgaaaataatgaaaaaatatttgcacctcttcttaggtaaaacaaatctaagtaatttataagtagcatgataacaatatatcaaaatttcatggaaaagttttagtacataaatgtctaaaattaatataaattatgttttttaaattccgtatgtcctcatcttgataacaaacccattgttcatccaagcaattgaaaaaaaaatcagattggccttg

SEQ ID NO: 893439 - DNA, 686 bp, Homo sapiens
caccttgtgctccgaattaaacagataaattaaatagatgaaattactttttatggagatactttatttttacatggacaaatatgcatgagaaaactagctatgctttatgctgttaataaaggaaagggtgaaaatagagtagatattactacataagtaactactgccttttatagctgaaaaaattcatgtagcctattagagagaaaaaaaagagagagaaaagaacaagacagagagagagaacaagcaaaagggcaagcacaagaacaagagcatatccaatatcaaattcaacataaataaaactgatagactcaataccaatataagaataatttacatactatacattatatcaaaatatcagttatttaatagaaattaactygattgttcaagtttgaattaccatttttacattttaattttaataaagtccagtttatcaagttttttttcatgtattccatctttagtattgtttctacaaagtcatcattatacccaagatcatttaggttttttcctgggttatcttctagaagttttgtagttttgcattttcgttaggtctgtaatccagttttatgtaacttttctgaggggtgtaagatctatctacgtttatatttttgtatgtagatgtccagttgttccagcaccactcgttgaaaaaatta

SEQ ID NO: 893440 - DNA, 655 bp, Homo sapiens
ctgctcttcaaatactggagcacagaataaagatgtctctgcatgaatcaagaattattttgttgtttttgttgcttgttgtttgtcttttaatctaactttttcaagcaatcattgtatttagccgaccactaaatctaaagcctacatttgtgacttgtgtttagaaagatgatttgaataatgattttctagaaaataacaaggtgagaaaaatgttaaggctatagaaactattggaaacatcttttctttctttctattctaagactaaatatttaccatcaagaaaaaataagatggaagaagaaatctttggtatggtrtaaaccaaagtatgaatccatatgaggaaatcaagaccaatgtaaatgacttcctctttccagtgttcatgaataaaatttcatctaccttctatacatgatggttctatctggctagtgtccaaggacaaagaccatcatttttactactgatgtttgtatagtggcaggaagataaatgagtaaagttatctgtttcttgtgaaatgatgaagtattgtgaacaatatgcatgcccaaattaacaaaaacatgttacataaaaataaatgaaatgaatggaaatccagacaagagcatggactcaagaaaagggtagggttatattt

SEQ ID NO: 893441 - DNA, 590 bp, Homo sapiens
gcttttggtggtgtctttagggttttctgcataaagaatcatatgattaatgaagagagataatttgacttcctcttttcctatctggattccttttgtttctttctcttgcccagttgctctggtgaggcttccagtactgtgatgaataagagtggtgagagtaaatatccttgtctttttccagttcttaggggaaatgattccagcttttccccattcagtatgatattggctgtgggtttgttacagayggttgttattattttgaagtatgttctttgaggcctaattttttgagggtctttattatgaatggattttgaattttatagaatgtttcttctgtgtgtactgagatgatcatgtggtttttgttttcaatattatttatttggtgaatcacatttatcgacttgtatatgttgaaccaaccttctatcccaggaatgaagcttactttatctagataaattaattatttggattgctggtggattctgtttcctagtattctgttagggatttttgcaactatgtttatgataaatattggcatgtaattttcatattttgttgtgtctttgcta

SEQ ID NO: 893442 - DNA, 654 bp, Homo sapiens
cagaaattatctttaacaggtgggaattgctcagtgatcaagcacagctcatcaaaatgttaataacatgacaagaggtaaatgtattcatgagaatattaaaaatgtgaaacaatagcatttttacatgcagctcaatgtttacatccaaataagcctaatcatatgttaaatattgtaaaatatatttaagtaatagatatatgaacattaaaaagtgagataatgtcagaaattggcaaataacctgatcatatagagataataaaccagggtaagtctgagagatatttagaaagcagtccatagtccaatctgatttctactttttggaggctcagtttgtcaactttctgggtattgacagaaaagggggagagtagaattcaggagggcagacagaagaccactggactagacaacaggcaatcttgcttaaatttaggattgcaggtggagaaaaatggttggatygaaaatatgactttgaatatagaactttctgataggttaaatactgggatttataccacagtattagaaaaagaaaggtgtcatgatagaatcataggtttttggttttagccacagggtcaactgatggtatcagttgctgaaacagaaaataccaaagaacaagacagattggggaga

SEQ ID NO: 893443 - DNA, 651 bp, Homo sapiens
tctgactggattaataacacatctcattataattttgatttgtgtttcttcattgatgttgaaaattttctcatatacctgctgtccatttgtatgtattcttttgagaaataccatttcatgtcttgtctccaatttttaatgagattatttatattttcctgttgagttgtttgaattcctcatacattctggatattagtctcccattggatgaatagtttgcaaatatttcttccattcaataggctgtcactttactctgttgattgtttcctttgctgtgcagaagrtttttggcttaaaatagttccatttgtctattttgtttttgttgcctatgattttggggtctgggtcataaattctttcctagaccaaggtccatgatagtttgcactaggttttttcttctagtagttttatagtttttggtcttaaatgtaagttgtttatcaattttgaattgatttttgtgtacggtaagagataggggtccagtttcattcttctccatgtgactatctaattttctcatcactgtttattaaagaagggtttatttctccaatgtaagtttttgtcagctttgtcaagatcagttgagtgtaaatatatgactttatttctgggttctttattctttttaat

SEQ ID NO: 893444 - DNA, 653 bp, Homo sapiens
tatcatgcagtatttgtccttctgttgctggcttatttctcttaccataatgtccctgatgtacattcatgttgtcacagatcacagaatttctttcttttaaggctgaatagtattctatttgatgtatacaccataatttctttatgcaattatcagtccataggcattttaatcttttccacagcttgactattgtaattaatgctgaaatgaatatggaaatgaaaatatatcttcaagatcctggtatcaatctctttgaatgtatacccagatgtaggattgctgggttataaggttattctattattaatgttttaagagaatttcatactactttttgtagtatccataccgttttacatttcaamgacaaaaaaaaaacatttaattgctccacaaacccaccaatatttatttatttagataattattttaacaatatgagatgacgtctcattgtgaattggatttttatttccctagttatcagtgatgttgatcaatattcatataactggtggccatatgtctgtcttatttggagaaatggtgatttaagtctttggcccattatttaattgggttacttaagtggatttggtggttattctttgcttttattatgttttgctgttgaattatagggg

SEQ ID NO: 893445 - DNA, 572 bp, Homo sapiens
ttacccacatgccagtgtaaatttttctctttttatatctaaaatgattatttgtgcattgaggtgaacaaattattttagtagttggaaccagagcttctcttaagaaggatttgcctttaattgagaagaaatatcatcttaggctgcttttagtgaggaagacgagtgaaaaagaaagtatgagcttgtgaatgtaaataaacacaaggaggaaaaatgtgagaagaaaaagaagaaaggrttgagagaaatgacaggaagaaagagagagagaaagcacactttgagtgagacgtaaaaaggcagtcagcaaaggaagacaaagagaccaataaaagaagaaagaaacataaaaagagaggtggggaatggaaaagcagccccacaacatggcaggaagctggttagcagaggaagatggccagtaagacctcccaaggatgagatgaggaaggacttctcaatcaaaggagtctaacattgcattctgcattatttgcattgctttgaacttcctcagatacacaatacagtctgattatcttgttaagtcttgtgtagtagatgtg

SEQ ID NO: 893446 - DNA, 572 bp, Homo sapiens
ttacccacatgccagtgtaaatttttctctttttatatctaaaatgattatttgtgcattgaggtgaacaaattattttagtagttggaaccagagcttctcttaagaaggatttgcctttaattgagaagaaatatcatcttaggctgcttttagtgaggaagacgagtgaaaaagaaagtatgagcttgtgaatgtaaataaacacaaggaggaaaaatgtgagaagaaaaagaagaaaggattgagagaaatgacaggaagaaagagagagagaaagcacactttgagtgagacrtaaaaaggcagtcagcaaaggaagacaaagagaccaataaaagaagaaagaaacataaaaagagaggtggggaatggaaaagcagccccacaacatggcaggaagctggttagcagaggaagatggccagtaagacctcccaaggatgagatgaggaaggacttctcaatcaaaggagtctaacattgcattctgcattatttgcattgctttgaacttcctcagatacacaatacagtctgattatcttgttaagtcttgtgtagtagatgtg

SEQ ID NO: 893447 - DNA, 646 bp, Homo sapiens
agactattacaattagtagtaacaaaagtagactttagttacaatttccattctcatcgactacacatgtaactctctcccaccattgaactctgccacccgagttcaagcaattctcatgtctcaggctcccacgaagctggaattacagtcatgtgccaccacgcctggctaatttttgtatttttagtagagatggggtttcgccatgttggccaggatgatttcaaattcccatctcaacagaaaagaaccatttttaatgttcagccaggcagagatcttatgaattcaaggacaggtccaatttgtttggccttcaaggtctttgttgtgagacaggggcagaaaagaagcctcttraaaaagaccacgaccacttcaagatttaggttcttgtgaatggtacatgttacacttccaaagagacaaaaaataacaaagctgtagagggcttgtttatttttttaatgtaatcttttttttttttttttgagacgatgtctctctctgttgccccggctggagtgtggtggcacgatctcagcttgaattgatctccgattgcttgaactctgccactggagttcaagcaattctaatgtctcagactccaatgaagctggaattacaggtatgcgccaac

SEQ ID NO: 893448 - DNA, 638 bp, Homo sapiens
aaatttatacattcatttgttttagtgctttcatttattttctaatgttacataggaaactaaaattttttctaaagatcataaaaatttgaacctcctccgcttattgaaagtatactaaatgtgtgttgaattttagagagattattgtttatttatttgtttgtttgtttatttttgtagggatgggatctctctctgtgttgctcaggctgatctcaaactcttggcctcaaacaatcctcccactttagccttccaaaacgctaagattacagatgtgagccaccgcatgtggcctagagagattatattttaatcttttctacttaacatttaaattatgtaggaatatatgttgtgtttattatcttccttaggaaaaaatacaatgcatrtaaataaatgacaagatttgttataaggaagcatactagtaaaacaataaaactttatactggccagaaagctctacccatacaaatgttttgaaatctgatggttataaatttgccttcataagccaggcaagcaaatgagataataataatcatatccttacacacttaacttgtactttttgctcaggagcaaatgaatgaaaaagaagcattacggggtaaatcagtataaatagc

SEQ ID NO: 893449 - DNA, 598 bp, Homo sapiens
tttttaccagatgactatatcagagatagcttcaaatgagattttgtctatcaaaccattttataagaaatgacattattttaggatgcttttgttgtaaatacaagatgtttcaacttactacaaacacattattaatattctgaagcattcttcaagaaaagaacattttaatggcctttttaaggtaacatatagggtacrgcagttaaagtagaaaagaaggaaagaaacccctagcagtctttaagatatgtcctacagtcacatagattttgcaatataaacttatattgaatctattttctttatgaactgtttaaaatagacttagcctactactataaattctagttattagcaaatatgacataacgtaacagatgttaagtttaatccttaatcttaataaactttactatttaataacaagtgtataatttccaaatgtagcagtgtgtctttattccaaaacatcattttttttccatatactttattcatgttccacattcacctatgatggcataaaactaccagcttgtttaactcatataagaagtctagacttagtacacagggttacagctgatagagt

SEQ ID NO: 893450 - DNA, 630 bp, Homo sapiens
gacacatacttacatattgagaggaagacactgtaatattctttactaggtatagttcatgttgaagacagtccagaaattccatttcaataacacagttcatcagaagttgcagtcattgtgctcattttatttccttattttcatatgaaaattaatattttctttcttcatatggtaattattttagaattaaaaaattaaggaaccatctgttcaactaataaaaggtaagcacattttttttaggggagttcctatatcttttacatttcaggaycttgtctgcttctatcacatctctccacagctcttaaaaattatttttaccttgtatctgatcaaaatttttctgttcagaaatttgagttcaagcctttgcagttctctcagcttgctggtgattattgctcaatagcattcacttttctccatctcttgttgaatatagcttctattttctcttcaagaaaaggttataaatttctgcaatctgttttgccctacgtgaatcacatcaaacatgcccttgagagattatggttcatcctttctgacatctggggaagcagcccaaagctcagaagaaaaattcaacactgagctctttgagtaaggggcttgaaaatt

SEQ ID NO: 893451 - DNA, 630 bp, Homo sapiens
gacacatacttacatattgagaggaagacactgtaatattctttactaggtatagttcatgttgaagacagtccagaaattccatttcaataacacagttcatcagaagttgcagtcattgtgctcattttatttccttattttcatatgaaaattaatattttctttcttcatatggtaattattttagaattaaaaaattaaggaaccatctgttcaactaataaaaggtaagcacattttttttaggggagttcctatatcttttacatttcaggaccttgtctgcttctatcacatctctccacagctcttaaaaattatttttaccttgtatctgatcaaaatttttctgttcagaaatttgagttcaagcctttgcagttctctcagcttgctggtgattattgctcaatagcattcacttttctccatctcttgttgaatatagcttctattttctcttcaaraaaaggttataaatttctgcaatctgttttgccctacgtgaatcacatcaaacatgcccttgagagattatggttcatcctttctgacatctggggaagcagcccaaagctcagaagaaaaattcaacactgagctctttgagtaaggggcttgaaaatt

SEQ ID NO: 893452 - DNA, 652 bp, Homo sapiens
caatactggctttataaaattagtagagaaatactcttttttgaaatttctggaattatttgttagaattggtataattttttccatgcatgtttgctagacatgcaaacatctacagataaggccatccgggcctggagctttatgtgtgggaaggttttgtcaaaaacgaggtaggggctgagattttagccaacatgcaagccaacaatttagcctgccacagttttgtgaatrcagaaagaggacacaagacaacttgactactcacagcacaggaagcatcataagtattaccatatttgtgtcatttcccttttcacttaagttcatatgttatcctgttggacccggatagctgcctgcatatgcaatgagctgtgttatttgagaggaacctttagttaatgaaactcacatatttttttcccgtggtctgtagacactttgttgccatcctgaacagtaggtgagcctgtattttcctctagaggcagatactatctctgtcctctgagactgtaaggaaacattctctaacctcccaaggctgacattgcctctatcttccaagactgtttgctctttaaacattgttaaaaatgttatctgaaacaaagggcagttagtacctctctgctcaaaagatatg

SEQ ID NO: 893453 - DNA, 652 bp, Homo sapiens
caatactggctttataaaattagtagagaaatactcttttttgaaatttctggaattatttgttagaattggtataattttttccatgcatgtttgctagacatgcaaacatctacagataaggccatccgggcctggagctttatgtgtgggaaggttttgtcaaaaacgaggtaggggctgagattttagccaacatgcaagccaacaatttagcctgccacagttttgtgaatgcagaaagaggacacaagacaacttgactactcacagcacaggaagcatcataagtattaccatatttgtgtcatttcccttttcacttaagttcatatgttatcctgttggacccggatagctgcctgcatatgcaatgagctgtgttatttgagaggaacctttagttaatgaaactcacatatttttttcccgtggtctgtagacactttgttgccatcctgaacagtaggtgagcctgtmttttcctctagaggcagatactatctctgtcctctgagactgtaaggaaacattctctaacctcccaaggctgacattgcctctatcttccaagactgtttgctctttaaacattgttaaaaatgttatctgaaacaaagggcagttagtacctctctgctcaaaagatatg

SEQ ID NO: 893454 - DNA, 656 bp, Homo sapiens
ttttagccaacatgcaagccaacaatttagcctgccacagttttgtgaatgcagaaagaggacacaagacaacttgactactcacagcacaggaagcatcataagtattaccatatttgtgtcatttcccttttcacttaagttcatatgttatcctgttggacccggatagctgcctgcatatgcaatgagctgtgttatttgagaggaacctttagttaatgaaactcacatatttttttcccgtggtctgtagacactttgttgccatcctgaacagtaggtgagcctgtattttcctctagaggcagatactatctctgtcctctgagactgtaaggaaacattctctaacctcccaaggctgacattgcctctatcttccaagactgtttgctctttaaacattgttaaaaatgttatctgaaacaaagggcagttagtrcctctctgctcaaaagatatgcagatatgaagaaacccatagaaaattctctcttacagggtgttaaatacaaattcaattcctttaataatataaagctcttcaggtgttatattccttcttgagtgtgctttggaatgcaatttttctatttcatctaatttgttgaacacatttacataaagtttttcataacattcttttactatcc

SEQ ID NO: 893455 - DNA, 612 bp, Homo sapiens
gatatgaagaaacccatagaaaattctctcttacagggtgttaaatacaaattcaattcctttaataatataaagctcttcaggtgttatattccttcttgagtgtgctttggaatgcaatttttctatttcatctaatttgttgaacacatttacataaagtttttcataacattcttttactatccttttactgtctgttgaatccgtcacctttggtaaccttagaactactctatattttcatatctatacagagcaagagacagagagagagagagagagagagagagasagacagacagacagacagatggtaataaatgctgcttcctttaataaagtatgtgtttgtatatatgcatatatgtgtgttcatgtgtatggtgtttggcaagacccccttgatgataagcaatagaaatctaaatttataattctaaatattttaggcaaacttagagggggttttcagaagtgtaatgggatatactgacaattaaacccagggtagggccgggtgcagtggctcctggctgtaattccagcactttgcgaggctaaggcggacagattacttgaggtcaggagtttgaaaccagcctggtcaac

SEQ ID NO: 893456 - DNA, 641 bp, Homo sapiens
cttcctgggctactgtgtgcaggctccaaactcttcctggatgacctgctgattaggagtaaacacctgggtccttccgagggattcctggcagatctaccaagtccccagtctccttacaatgaggaagggaaagagagaacacaaawgagggtgtaacacataggaatggccagatatgaatgtaaaggaggaaagattattagaatttatttcctccaacaaacttcaaattaggcgagggaatttgtcaataaaattgtattcacaagtcttaaacttctaatgtctatgtatgcagttgagaagagtcttttatgatactgtatctgaagtaattttataagattgctggtgagttgcaaaaaaactatagcactgagtaatgcttatcaattcgttacagccccaaacttttaataattttataccacgatcagggacaacaataaaatatatccctccctaccttgtacacaacaatgctttcacaggtaactgctggtgaatttcaactacgacatgtattctgatgatttttactttaatactgaaaagaatttcacttaaaatagataaataattacacattgaaaaaggagaaaaaaaaagagctaattctctcatcaaaagtccatgat

SEQ ID NO: 893457 - DNA, 485 bp, Homo sapiens
atggactatgtgcccaagatgccatgtgcctacaggagttcactagagcagggcttcccagagggggttccatggaatggaatattacacaggttactgggtggggtaaagagttctgaggtcaaattggataatgctctagtaatcgaataagcagctttctttattctaagacttcttggagcctttaatatattgatattcaktgtgactttctacaataagaatataggatgcaacgttttccaaacttatttgactgcaggagcttcttcttgaggacctcatagaactactatttcacaaggttcactttcagaagtatggtttgtgattataagacctattttaaacccttcctggaacaaagtatggtataaataaagagaatgtaaaattttttagggcagatgatatatctcatctctgtgaattaacacaaagtccagcatccaccaggtactgagtaaagtttattgaattta

SEQ ID NO: 893458 - DNA, 627 bp, Homo sapiens
tggaaatggttgatggagatcttgcatgccttgcaaaatcaggtgactctgtggtcaaccacaggaaaagatacccatttcctgctccacaggcaattctgttctttccttgtcccaggcatcctgcacaaagggaatggggagaaccagtttgtgtctcagcagcctcctgtcattgggagcatcatgggcaatgggcgccggagaagcatctcctgccccagctgcaacggccttgctgacggcaacaagctcctggccccagtggccctcacctgtggctctgacgggagcctctatgtgggtgatttcaactacattagaaggatcttcccctctggaaatgtcaccaacatcctagagctgaggtatgtaaggtgatgctttcttcatagttcctaataatatgcctttgccatcctttgggccccgccacattacctgctgagcccagggaagtgggataggacagagccttgccygtcaggctctgagacttttcacctcccagctcaagcaggtgctgcttccccagtgcactacagtgaagacaagctacccaggacagggagatgtccctggcatccagagtacatctgtgacatagaaggctgctagcagccaaaa

SEQ ID NO: 893459 - DNA, 652 bp, Homo sapiens
ttctcaaagtgctgatgggtggcaagtacagggtaaatttttctgcacagatttagtcaaagcgtaaactttcatgcattctagcaatacagatatggtatttataacacctgacagctattctagtaatctttctccaacatccattacctttcgtatttacatctttcttttggcaattccaaactggaggaaaartatgcagagggtaatgccatctgtatgagacatgaaatctagtgtgagatgtgttgattcaaatactaaaaatgatatactcttccaattcattttatctgatttttgcaactgatacatgagagtatgagatataaatgcagccattcctgcaaaaaatagtcttcaaagatgaatttaaaacatagctctcttttctgtgggtgaaagaaaatgtttgcatagtaagactgagggaaaaaggaaagatgagggcaataggaagataactccttttgaaagatgaatcctctatggggaaaccattttaatcatttcttttaaatacttcttaaatgttcatttaaatgttattcttatttaattttaaagttattatctacatgaacttgctttttttgagacagggtcttgctgtgttacccagactagagtacagtagccattcacaggt

SEQ ID NO: 893460 - DNA, 703 bp, Homo sapiens
tgccggaggagccccctgagaaatgtgcctggcgggcatgcctgctgagtttaatatgctggttatctgtcacttactctgacttaaaggtaagggcttctgtaatttgttgctgccaagaattggtaccttgttctctttctaaggcttcccactaattggctcttgagggaagattggaatgagagttagtgctcgacttctgtagcttctcctgttagatctctgkttttttttttttaatatgtgaaggaaaaataaccttggctattttttgactattggtggaatgtctattcacttgttttcaaagaaaaacaacataaaacaccctttgattcatgatgtttattttaatttaaaacttttcctggactagtaaagaaatgtagtgtatgtgtagtcaatcttttcaatgatttctgtaaactgtgggaataggagttgtgatcttatcccaagataagaatattttactttaacagattgcatttttaccgattgaaaattacagtgcattttatttagtaatcagagtgaggaaagttagagactatttaaatgaagtacaatagtaacatttacattaattggtcagttactgtagtgtgggaatacacatgttgataaatatacattactaattatgcttcttgttttctgtatacttagaggaaagttttgtgtctgtgcagaattgaaa

SEQ ID NO: 893461 - DNA, 596 bp, Homo sapiens
attttttccttgaaaaaaataattgaatatttttaactgtgttctctcttctaggctgaatcccaaagtacaaggagttggccagaggaacatggaaggcaagttttaacaggacaggaagcagaacacacaaagatccagggcaataaagaaaatcatgtgttggagaatttgcatgcttttctgaatggctggagcaccaatggtgagaaaagttttgcaaatctccaaaatccagtctagctctgaaatcttctgattttggtgatcagagtagattggaattttatctgtggctcaggcctaggaaagcagaaataacttttggccacyagaatacaatgtgtatttagaccaactctcttcgtccagaggaaggaggcacacactatatatctgtaaggcaaagacagagactctgggctcctctttccaactgagtttctaactagctagtgttcctcccctctacatcctgaagcacagagctgggctccaaagctgagggttatgaattagataccatcccaaacattaaaaatgtgatctataacattcttaccctgtcttctctctacactccttgctgggcttga

SEQ ID NO: 893462 - DNA, 575 bp, Homo sapiens
actgggtatatacccaaaggattataaatcattctactataaagatacatgcacacatgtgttattgcagcactgttcacaatagcaaagacctggaaccaacccaatgcccatgaatgatagactgtataaagaaaatgtggcacatatacaccatggaatactatgcagccataaaaaaaggatgagttcatgtccttttcagggaaatggatgatgctggaaaccagcattctcagcaaactaacacaagaatagaaaaccaaacatcgcatgttctcactcataagtgggagttgaataatgagaasacatggacacagggaggggaatatcacataccggggcctgtcggggggtggcgggctaggggaggaacagcattaggagaaatacctaatgtagatggcaggttgatgggtgcagcaaaccaccatggcacatgtatacctatgtaacaaacctgcacattctgcatatgtaccccagaacttaaagtataataaaaaagaatgtatatcacacaaattcctagataatgtcaatgctgctgctctgggaccaccctttgggag

SEQ ID NO: 893463 - DNA, 590 bp, Homo sapiens
tggttttttgaaaagatcaagaaaattgatagaccgctaggaagactaaaaaagaagaaaagagagaagaatcaaatagacgcaataaaaaatgataaaggggatatcaccaacaatcccacagaaacacaaactacaatcagagaatagtctaaatgcctctgtgcaaataaactagaaaatctagaagaaatggataaattcctcgacacatatgcactcccaagactaaaccaagaagaagttcaatctctgaatagaccaataacrggctctgaaattgaggcaataattaatagcttaccaaccaaataaagtccaggaccagactgattcacagccgaatttttgcagaggtacaaagaggagctggtaccattccttctgaaactattccaatcaatataagaagaaggaatcctcccgaactcattttatgagcccagcatcatcctgatactgaaggctggcagagacacaatcaaaaaaagagaattttacaccaatatccctgatgaacatcgatgcaaaaatcatcagtaaaatactggcaaaccgaatccagcagcacatcaaaaatcttattcacc

SEQ ID NO: 893464 - DNA, 590 bp, Homo sapiens
tggttttttgaaaagatcaagaaaattgatagaccgctaggaagactaaaaaagaagaaaagagagaagaatcaaatagacgcaataaaaaatgataaaggggatatcaccaacaatcccacagaaacacaaactacaatcagagaatagtctaaatgcctctgtgcaaataaactagaaaatctagaagaaatggataaattcctcgacacatatgcactcccaagactaaaccaagaagaagttcaatctctgaatagaccaataacggrctctgaaattgaggcaataattaatagcttaccaaccaaataaagtccaggaccagactgattcacagccgaatttttgcagaggtacaaagaggagctggtaccattccttctgaaactattccaatcaatataagaagaaggaatcctcccgaactcattttatgagcccagcatcatcctgatactgaaggctggcagagacacaatcaaaaaaagagaattttacaccaatatccctgatgaacatcgatgcaaaaatcatcagtaaaatactggcaaaccgaatccagcagcacatcaaaaatcttattcacc

SEQ ID NO: 893465 - DNA, 709 bp, Homo sapiens
tccaaagaaatgtttggccccatgagatgaatgcccacatcacaaagcagtttctcagaaagcttctttctgttttttatctgaagatattttctttttcacctaggctccaatgcccaacaaagtatccactttcagattctgccaaaacagttgttccacactgttgaatgaaaagaaagctttaactctgtgagakgaatgcacacatcacaaacaggtttctcagatagctttcttctagttatcatcctgagatattcactatttcaccttcagcctcaatgacctctcaaatgtccattcgcagaatggacaaaaacagtgtttccaaactgctgaatccaaacaaaggttttaactctgtgagatgaatgcacacatcacaaagcagtttctcagaaatctttctagtttttatctcaggatatttcctttttactttaggcctaaaagtgctcccaaatatccctttgcagattctacaaaaacagtgtttccaaactgctgaatgaaaagaaaggtttaactctgcaagaagaatgcacacatcacaaaacagtttctcagatagcttccttctagtttgtatccaaggatattcactttttcgcctatggccccaatgagctatttaatatcccttcgcagattctacaaaaacagtatttccaaactgctgaatccaaagaaatgtttgccactttga

SEQ ID NO: 893466 - DNA, 570 bp, Homo sapiens
aggggcacccgccattgccaagccttgagtaggtaaacaaagcggcctggaagcttgaactaggtggaacccaccgcagctcaaggaggcctgcctgtgtctctagacaccacctctgggggcagagcattgccaaataaaaggcagcagaatcctctgcagatttaaatgtctctgtctgacagctttgaaggagtagtggttctcccagcatgcagctggagatctaagaacagacagactgcctcctcaatgagtccctgaccctcgagtagcctaactgggaggcayccccaaatagaggcagactgacacctcacacggccgggtactcctctgagacaaaacttccagaggaatgatcaggcagcagcacttgctgttcaccaaaatccactgttctgcagcctccgctgctgatacccaggtaaacagggtctggagtggacctccagcaaactccaacacacctgcagctgagggacctgactgttaaaaggaaaactaacaaatacaaaggacatcgaaaccaaaacaccaactgaatgtcaccatcatcaatgatctaat

SEQ ID NO: 893467 - DNA, 563 bp, Homo sapiens
gacatatctcaaaataataagagccatatatgacagacccacagccaatatcatactgaatgggcaaaaactggaagcattcccttggaaaactggcacaagacaggcatgccttctctcaccactcctattcaacatagtgttggaagwtctggccaggacaatcagacaggagaaggaaataaagtgtattcaactaggaaaagaggaagtcaaattgtccctgtttgcagatgacatggttgtatatatagaaaactccattgtctcagcccaaaatctctttaaactgatgagcaacttcagcaaagtctcaggatacaaaatcaatgaacaaaaatcacaagcattcttatacaccaataacagacaaacagagagccaaatcatgagtgaattcccattcacaattgcttcaaagagaagaaaatacctaggaatccaacttacaagggatgtgaaggacctcttcaaggagaactacaaaccactgctcaatgaaataaaagaggatacaaacaaatggaagaaaattccatgctcatgggtaggaagaatcaata

SEQ ID NO: 893468 - DNA, 563 bp, Homo sapiens
gacatatctcaaaataataagagccatatatgacagacccacagccaatatcatactgaatgggcaaaaactggaagcattcccttggaaaactggcacaagacaggcatgccttctctcaccactcctattcaacatagtgttggaagttctggccaggrcaatcagacaggagaaggaaataaagtgtattcaactaggaaaagaggaagtcaaattgtccctgtttgcagatgacatggttgtatatatagaaaactccattgtctcagcccaaaatctctttaaactgatgagcaacttcagcaaagtctcaggatacaaaatcaatgaacaaaaatcacaagcattcttatacaccaataacagacaaacagagagccaaatcatgagtgaattcccattcacaattgcttcaaagagaagaaaatacctaggaatccaacttacaagggatgtgaaggacctcttcaaggagaactacaaaccactgctcaatgaaataaaagaggatacaaacaaatggaagaaaattccatgctcatgggtaggaagaatcaata

SEQ ID NO: 893469 - DNA, 688 bp, Homo sapiens
cactcatcacagaagtcaaaactagaatttcttggcaagtctcaccactgtgggctaaagtgctctgggctcttaggtaaacttcaaaggcagcctaggacacaaggcctgcaattcctaggcaagtcctagtgctgggttggacttagagccagtgcaataggggagcacatgacctatggagacaccagccagggctgccaaggaagtgcttgtgccacccctcccctgaccccaggcagtgcagcttgcagcaacaaaagtgactccttccttctgcttgaggagaggagagtgaattgtgaagagtaaagagggctttgtcttgcatcctggatgcaactaactgaccacagtaggataggggactgggaagagttatgaagcccacatcctaggccctagctcccttctatgtgaagtagcaagcttctgtacatagataaaatcacacacatatatttacatttraagattattacctgaaacatcttaagaaacagataatagtgacttcctctgatgaagagaactaggagactgcactcagatatggacaagagatttatttctcattttatattattttgtacagtttccatttttgctatttatgattatccatttggctttcaatttttcttttaaaaggtagaaatattacattaaaaatctgtatacagtacaa

SEQ ID NO: 893470 - DNA, 664 bp, Homo sapiens
tgatgaagaagatagataatagatagacaaccattttatgagaaatatctaaaccagtaaataaatttttctaacacttgctgtaagatatcaaatgctaatcagtactctgtgtcatattttgtaaatgaaatcatcatataagtttattgagtttttttgagtacctaatgacttaataaaaaaaatatgggagcatatgtagtaccatgcttgtatcaatacggataaagtatctggaagtctttgctgagaatctttttgtgctgctgagattattccactgatgtggatggtccatggctgttatgtgaccgtctgtactacatgaccatcgtgaatcaatataggtgtagccatctcactggaatggcatgtactgaaagctttatccaggcacagtttagatcctctccccagtctgacttcctttctatgaccccaatgtcatagctcattcatgtgtgacttaaacacttttttgaaactcctctgcatgggtactactaatacaattsgtttctttgttgctgccaatggtgggttcaactacctgttaaacatcattttcttgatggtttcttaagtggccatcctatgtactttgaaaactcacagcttggaggaaagatgctaaagttctctacctgcatctctcacacca

SEQ ID NO: 893471 - DNA, 650 bp, Homo sapiens
gctgaattcccttttttcagaagagctcagtattttttcacttgaagccttcaactgattggatgaggacttcccatattatgcgggataatttgctttaatcaaagtctactgatttaaatgttaattttctctaaaaaaatgcattcgtagaaacatctaagtgtttggcccaatatgtgggtaccatggcctagccaaggtgacacactgaattaactatcaaagtgatcaatgtaattttaggttctggttcatctcacaggggtccaatgggttgcagaatccttgtgtttatttccctggttccagagtatgcagttggaatagacataacctgtcaactgacaaaatccacgcatttgctccttgacctgtggagtgaggcttattatggaaggaaaaggccaagtggaagtcattcctggagctagtaaactagaagcactcytacattcctgaaaggactgcagttaatgccatcatcaaggacttgaaagagtcagggatagtgattcccacaatatcttcatgcagcttgcctatttagcctgtgaaaaaacagatggatcagggagaataaccatggattatcacaagtttaaccatattatgactccacttgcagttgctcttttagatgcaatttt

SEQ ID NO: 893472 - DNA, 650 bp, Homo sapiens
atactttacagacaagcaaatgctgagagattttgtcaccaccaggcctgccctaaaagaactcctgaaggaggcactaaacatggataggaacaactggtaccagccactgcaaaaacatgccaaagtgtaaagaccctcaaggctaggaagaaactgcatcaactaatgagcaaaataaacagctaacatcataatgacaagatcaaagatcaaattcacacataacaatattaaccttacatgtaaatgggctaaattctccaattaaaagacacagactggcaaattggataaggagtcaagacccatcagtgtgctgyattcaggaaacccagctcacgtgcagagacacaaattgacttttcaaaatatcctgaaatctccacaaatgcattgccaacaaacaaaaaagaggtacttagcctgggctcacatagagtgtactcagtatcttaacccgagatttcagaatgggatttgtttatattcagagataaatttgacaaagtagcagaaaaagaaatctttatagaggaatcacttgctcaaaagtgcccatatgccagtgctcctgaaaaccttgtgtagaataacttacactgaagaccctataggaaaaatagaattgaaggaataggatcagaagt

SEQ ID NO: 893473 - DNA, 599 bp, Homo sapiens
ttccactgtttatgaattatatcagaataatattcctcaaaatagttgtctgcattttaaggttatgcatagctttatcccatacataagaataacgaacagccacaagaaataagaaaagttcattggatgaaaggaaaaatcctttctgctcaatctaataaatccccaaattcttttagacagggaccttgggttattacattttcttcttcagatagctcctttgtgcagccttgargaagggaaataaatcagttaactgaatgggtatttaatctctttctaagttcaagaaaaagaggagattaggattcatggttacttcactgaaaagctcttggccatataaatttgtaatttcctggggatggtgccatttaggtattattagatgaaaataggtaagtcaactaataaaaggtggctttaaaaacttttaatttcagaagcgaaatactatcttcattaaatttcttatttcagttattaattaagcaaaaattatactacataaaataagtgtattttttctcagtttattagttttcttctaccactaatttaccagcagttcaatcacaccagaggaaaggtgg

SEQ ID NO: 893474 - DNA, 649 bp, Homo sapiens
taactttttgtttcaggtacataagaaaagtgtagaaacttattgcctcatcctattcttttctccctaaaatcataacacctttaaatgctttacattatctttctgggggagattcaaaatgaaatttttcccactgtgcatttacatttttcaatacacacacgtacgtatgcatatacacrgatatacacgtatcaccaccacacagtaacaacagaaattcaatcttttcctggcattttaaagcttttagtgtccatatgacttttcaaggtaggaagcatctctgtgagggagagagatggctctgggaccaacttctgctgctgccaatcagtgccttatcagatacaggcagattttctgaaatccacaaagtcagcttccgtagactcctagttcttctcttctggagacaccttattagtttaagtcacttctatgttttctacagaaacattcccagtgtatgtgaaatgtacaattttaaaagcaagcagaaaaagaaaggttccacatcgctgtctctaaagagggggagggaatagaagaacatgagcttataatcatatgatttagacacaacccttgacaaacccaagtgactacttcaaggcactggaagagaaagtccaggggcaacatg

SEQ ID NO: 893475 - DNA, 649 bp, Homo sapiens
taactttttgtttcaggtacataagaaaagtgtagaaacttattgcctcatcctattcttttctccctaaaatcataacacctttaaatgctttacattatctttctgggggagattcaaaatgaaatttttcccactgtgcatttacatttttcaatacacacacgtacgtatgcatatacacggatatacacgtatcaccaccacacagtaacaacagaaattcaatcttttcctggcattttaaagcttttagtgtccatatgacttttcaaggtaggaagcatctctgtgagggagagagatggctctgggaccaacttctgctgctgccaatcagtgccttatcagatacaggcagattttctgaaatccacaaagtcagcttccgtagactcctagttcttctcttctggagacaccttattagtttaagtcacttcyatgttttctacagaaacattcccagtgtatgtgaaatgtacaattttaaaagcaagcagaaaaagaaaggttccacatcgctgtctctaaagagggggagggaatagaagaacatgagcttataatcatatgatttagacacaacccttgacaaacccaagtgactacttcaaggcactggaagagaaagtccaggggcaacatg

SEQ ID NO: 893476 - DNA, 685 bp, Homo sapiens
tacccctagatgcgacttgcttccataggagactttagcctaggagaactgtcatacctgatatctgcagggtgtcttgctcatcagacaggtttggtcagacctgaacaccccttgatctgctggcctcctctgactagcagagagctccagtggggcagcccctgcagccaccagcccacctgctccctccccatattgcagctttttttcaggcccacggaaactccccctttgctggcactgtctgcagggcaagttgttgtttttcttgccctgccagcatgtaggagtgcagtgcgctcccccaactccccaccactggcaattgtcatcgcagacaaagtcttggtgggcasagagccagccagccctccccctgccagtgccctgcccttgcgctaaaactgtgcagagaacagcagatcctcccctgccctgagcaaacactccagctagcaggacacagagaagggacccaggcctgtgcccacaagtaccccacccccaagccgacaacctccagcctgactgcacagagttgccatcaggggccccccacctcacccagctgcagtgccttcaccactatggcagctgacacaactcggctcccccagcacagtaggttcctgatgtcaaggagccagaggacaaagttggggcccaatagaggtcccccaga

SEQ ID NO: 893477 - DNA, 685 bp, Homo sapiens
tacccctagatgcgacttgcttccataggagactttagcctaggagaactgtcatacctgatatctgcagggtgtcttgctcatcagacaggtttggtcagacctgaacaccccttgatctgctggcctcctctgactagcagagagctccagtggggcagcccctgcagccaccagcccacctgctccctccccatattgcagctttttttcaggcccacggaaactccccctttgctggcactgtctgcagggcaagttgttgtttttcttgccctgccagcatgtaggagtgcagtgcgctcccccaactccccaccactggcaattgtcatcgcagacaaagtcttggtgggcacagagccagccagccctscccctgccagtgccctgcccttgcgctaaaactgtgcagagaacagcagatcctcccctgccctgagcaaacactccagctagcaggacacagagaagggacccaggcctgtgcccacaagtaccccacccccaagccgacaacctccagcctgactgcacagagttgccatcaggggccccccacctcacccagctgcagtgccttcaccactatggcagctgacacaactcggctcccccagcacagtaggttcctgatgtcaaggagccagaggacaaagttggggcccaatagaggtcccccaga

SEQ ID NO: 893478 - DNA, 685 bp, Homo sapiens
tacccctagatgcgacttgcttccataggagactttagcctaggagaactgtcatacctgatatctgcagggtgtcttgctcatcagacaggtttggtcagacctgaacaccccttgatctgctggcctcctctgactagcagagagctccagtggggcagcccctgcagccaccagcccacctgctccctccccatattgcagctttttttcaggcccacggaaactccccctttgctggcactgtctgcagggcaagttgttgtttttcttgccctgccagcatgtaggagtgcagtgcgctcccccaactccccaccactggcaattgtcatcgcagacaaagtcttggtgggcacagagccagccagccctccccctgccagtgccctgcccttgcgctaaaactgtgcagagaacagcagatcctcccctgccctgagcaaacactccagctagcaggacacagagaagggacccaggcctgtgcccacaagtaccccacccccaagccracaacctccagcctgactgcacagagttgccatcaggggccccccacctcacccagctgcagtgccttcaccactatggcagctgacacaactcggctcccccagcacagtaggttcctgatgtcaaggagccagaggacaaagttggggcccaatagaggtcccccaga

SEQ ID NO: 893479 - DNA, 614 bp, Homo sapiens
taaagaaatagatttatagttgtacaatttgcagttgtactgtttcctgcttaaggcattgattgaaaatcagtgacttttttttttttttggctaaagaaacatcacatttctttcagtcactgggttgagagagccaaaatatacacacagaaaaactgagtctttggtttgccaaaattcaatgtcagttgaatttacagccttgccatgtgtctgatacaaagtttgggcattgatgttatcctcagcmaactaacacaggaacagaaaaccaaatgcctcatgttctgccttgtaagtgggagctgaacaatgagaacacatggacagagggaggggaacaatgaacactggggcctgtgggtcagaggaacaacggggacagggagagcatcaggataaatagctaatgcttgtggggcttaatagctaatgcatgtgggtgcagcaaatcaccatggcacacgttaacctatgtaacaaacctgcacgtcctgcacatgtatcctggaactcaaaatcaaattaaattaaaaaaaatctattactttgtcttgtttaaaaaaatgagttacaagttacatacaataaaatatgcccttttgaatgtg

SEQ ID NO: 893480 - DNA, 693 bp, Homo sapiens
acaccacaaaaatataactgtgctataataaaatttatgtgaatgtgggctctctttgtctgtcctttaaaatataattgtttacattattattatttattgttaatctgttattgtgtctaatttataaattgaattttatcaaaggtatgtatgcataggaaaaaacatactatcatggtctacatagggttcagtactatctgcggtttcaggcatccagtgagagtcttgcaacatattacctgaagataaggggaaactactgtaaatgaaaatatctgtattgcttccccctgaacaatactgtatgtttctctttaaatgcttgccttttttaggcccaagatggaatctgtgttttagtgttttttttttttyccatttactatttgtcaggttgaacaatttcgtagctatttgtatttatttatttttgaatttcctattcctgttttgatgtaaatctacaaaatttgaacatggaggaaagacattccagcaggaggaaatgatatgagcaaagacacagaggtgggaccccctaaagtgtgctgtggaatgctgttgatcctagatgagggtggccatgttcatgtaaatgtgcacacaagctgagatacataagaacatccaatgattttgagttaaaatgtagtcttgtgtctggtggttgatcagtagcattgatga

SEQ ID NO: 893481 - DNA, 675 bp, Homo sapiens
ctcagcatccataatcgttagggaaatgcaaattaaatccacaaagagatatcaccttacatctgttaaaaataccttttatcaaaaagataaaagataagcattagtgaagatgaggagaaaagggggaacccttgcaggttgctggtgggaatgtaaattaatacaaccattgtgggaaatggtatgggggttcctcaaaaaattaaaaatagaactaccatatggtccagtcatcccacttctgggtatatattcaaaggagttgaaatcaatatgttgaagggatacttatactgccatacttatttcagcattattcacaataaccaagatatggatctgttgttgatcaaagattacaaagtttcagatagacaggaggaataatcttttagatcttgtgcactgtagggtgactctagtcaataataatgtatattttaaaataattcagagagtaarttttaaatgtcttagaataaaaaatgataggtaagttaagtggtggattggttaattagcttgattcaatcattccacattatatacatatatacaatatataaaacattatattgcagtccacaaatgtatgcaattatgatttatcaattaaaaataaaattaattataagtaaaggtgagaaaaataaaataaaatattgatatcca

SEQ ID NO: 893482 - DNA, 693 bp, Homo sapiens
atatgggtttcaaggagatgaaagcactgtcaagaatcaagtgtttcattattttaatttgcatttaaagacccaaacttttattatacattacactctaatatttaataacaactttatactaggttatctcaccacctgttcacaaacttctcagtgagtctaatttrctttccatttctactactactacctcagtttagcctatcattttatccttagtttattgagggggtggagttgggggaaggacagtagaggaagaaaggcaagatctccaacattctggcccctaacctaacttttcaacttttgttttccaagtgttcccttatatgaacacttcacataagcctcaacacagttcctaaattctgtatattgactcattcaaacccacagcgagttttcccgtcttccagattcccatttatatgatgcctggtatcattttgtgaaagagaagataaacctcataaaagtggtttatcttctctttcactaatttaattataaaagaagtgttctatcttaatgactaattcaaatcaggtgcccaataaatgttgattgataaacatactatttctatatattactcagcctattatacatttaatgatattatgaactatttttgaaccataaccaccttaaaatgtgttttggcatcctggatatatgccagtccta

SEQ ID NO: 893483 - DNA, 594 bp, Homo sapiens
cacatgtatgtttattgcagcattgttcacaatagcaaagacttggaaccaacccaaatgcccatcaatgatagactgaataaagaaaatgtggcacatatataccatggaatactatgcagccataaaaaaaggatgggttcatgtcctttgcagggacatggatgacgctggaaaccatcattctcagcaaactaacacaggaacagaaaaccaaacaccacgtgttctcactcataagcaggagttgaacagtgagaacacatggacacagggatgggagcatcacacatgggcctgttgtggggtgggggactagggaacggatagcattaggagaaatacctaatgtagatgacaagttgatgggtgcagcaraccaccatggcacatgtatacctatgtaacaaacctgcctgttctgcacatgtatcccagaacttaaagtataataaagaaataattaatttttttaaaaaaactttcggctctttggaagtcatatttactagtacagaaagacaaaccacagactgggagaaaatatttgcagtgattatatctgataaaggatttgtatcagaacatacaaag

SEQ ID NO: 893484 - DNA, 658 bp, Homo sapiens
cgcaaaaattataacagtgagaaaattatgccagtaaaagagatctgacctaactgactccaccttgcttctaacctcccagctacccttgttcattttggggtgtaagaactaattttgggagatagttatagtttaactttgaaaccaaggtaacaatagccctttcccaaagaaacttccttttgcctggggaccagactgcctttgtaggactaataaattagccacmagattagaaattatggtttagaagtcagctgggagcggtggctcctgccagtaatgccagcactttggatggctgaagtaggtggactgcttgagggcatgagtttgaaaccaccctggccaacatggtgtaaccctgtctctgctaaaaatacaaaaagcacccaagcgtgttgccacacgcctgtagtcccagctactcaggaggctgaggcaggagaatcacttgaacccaggaggtggaggttgcagtgagccaagatcatgccactgcattccagcctgggcaacagagcaagaccctgtctcaaaaaaaaaaagaaaaagaaatttatggtttaggagacatgtagccagaggctacaagattctacacctccccagttactcctagggataacatcactattgtaaaacctaagactgg

SEQ ID NO: 893485 - DNA, 531 bp, Homo sapiens
aggtgcaggtgatggaaagggatttctcagatgacagctgtatgctagacaggcaggcagtccagaataaagcagtgtgatagagagagatacagagagacatatgttgagtgccttctgtattctacactcttgcacctgatactatatgagtagtaagtccccttagccttgcatggaccatgtgctgatgttctgctctccccttcccgmcctgctacctggataaccaaagacattcattttaccccacagaagagtattgctttgaactgcccctgagagctgaagattggccatggtaagtaagtttagaagcagaaaacagatagcaccctacccccactgatcatattcctgtcatatttcagtacctggcccacactgccagaagccttcactgtgttgaggcctatgtttcttgggactcattcttgccttcctcaaatgggggctatgataaactctgaaaagctgaagccagactgtgactcttttaagctcatcttctcttgagaaccctcatcaaac

SEQ ID NO: 893486 - DNA, 596 bp, Homo sapiens
tagtaggcacaggtaatctgtgctcagactcctgaccctcatgatactctgagattaccattgtgtgctgttttaaggtgctaagtgtgtggtaatattattatgtagcaatggataactatattctgcaacaataaaagagaatgataaagagtttgtatgaggtagagtgaaaacaagtgtggtgttccaaaatgtcaaaggaggagagsatatcaagatgaaaaaaaaaatagtgaactatgttacaaatcacacagggcacccaagttaagataagcctatgtggtatcaagagggaataagaaatattaatttaaaaaatgaacattagcaaggaacagtattattaatgtggttggggaaaaagccagaagagaatatgttgaaagtcagaaagtacaaatggtataaagaccaagtcaaatgataatatttatagtgtattctcaacccttggccttatttacagctaagatggcaagtgattaattttaggccagttgcattcaaataataccgttccagctaattttatgtaaatatttaaaactatcacaaatgttatattttattatatttagatattatgtaat

SEQ ID NO: 893487 - DNA, 596 bp, Homo sapiens
tagtaggcacaggtaatctgtgctcagactcctgaccctcatgatactctgagattaccattgtgtgctgttttaaggtgctaagtgtgtggtaatattattatgtagcaatggataactatattctgcaacaataaaagagaatgataaagagtttgtatgaggtagagtgaaaacaagtgtggtgttccaaaatgtcaaaggaggagaggatatcaagatgaaaaaaaaaatagtgaactrtgttacaaatcacacagggcacccaagttaagataagcctatgtggtatcaagagggaataagaaatattaatttaaaaaatgaacattagcaaggaacagtattattaatgtggttggggaaaaagccagaagagaatatgttgaaagtcagaaagtacaaatggtataaagaccaagtcaaatgataatatttatagtgtattctcaacccttggccttatttacagctaagatggcaagtgattaattttaggccagttgcattcaaataataccgttccagctaattttatgtaaatatttaaaactatcacaaatgttatattttattatatttagatattatgtaat

SEQ ID NO: 893488 - DNA, 596 bp, Homo sapiens
tagtaggcacaggtaatctgtgctcagactcctgaccctcatgatactctgagattaccattgtgtgctgttttaaggtgctaagtgtgtggtaatattattatgtagcaatggataactatattctgcaacaataaaagagaatgataaagagtttgtatgaggtagagtgaaaacaagtgtggtgttccaaaatgtcaaaggaggagaggatatcaagatgaaaaaaaaaatagtgaactatgttacaaatcacacagggcacccaagttaagataagcctatgtggtatcaagagggaataagaaatattaatttaaaaaatgaacattagcaaggaacagtattattaatgtggttkgggaaaaagccagaagagaatatgttgaaagtcagaaagtacaaatggtataaagaccaagtcaaatgataatatttatagtgtattctcaacccttggccttatttacagctaagatggcaagtgattaattttaggccagttgcattcaaataataccgttccagctaattttatgtaaatatttaaaactatcacaaatgttatattttattatatttagatattatgtaat

SEQ ID NO: 893489 - DNA, 635 bp, Homo sapiens
tattggaaggatcaccatctaagcttacacttttattctctctgtttaagagtatttctctgctcccctgacttcctaaataatttttggaaaaataacaaccaaacgcacacacacaaaacctgtcttcattgtacacccagtagtttgggttaggcaattctgccccctcctcttcccttgtctctggaccttgctatataactctgcacacttatcagattcattttcctgtgagtttgcttgcttgtgtcacatgtcaaatcactgtataattattgggtcatatccccttcttggcagcattacattataaaaatagtatggacttggcttatacacaacagacagttttatgaagttgtgyctatttaactggagctgggcactgctatcattagagattagcattaggtacagcaggataatgctgtgcaacaagtcttaatgaaagttagaacacctgtatttgagttccggctctaccagttcatctataaaatggaaattatgctaacttcactttctgtttcacagtatttctgtgtgaaacacatgaaccgatgaaaaagcccttttaattgcaaagcagcacatcattatcttagcatttaatgagtaagtgcataggcttt

SEQ ID NO: 893490 - DNA, 655 bp, Homo sapiens
cgtacaatacttaaaagcaaccgctaaaaaagctatgtgaagtgatatactcaaaaaactatagacaagtcaaaataaaattttaaaagatgtctaaataactcacagaaaagcaaggaaaggaaaaaataaatagaacacaaaaaagaatgaaatgagtttcatttatataaccccttctcaaaatgacaacattatagagatraacacattagtagttgacagcatttagggatggctggagggagtagcatgaaggaagtcttggtggtgtgatagagtaggtctgtatcttgattgaggtgataattacacaaatctacacacgtgataaaatggcaaagaactatacacagttgggggaactggataaagaatgcatggaatctcttggtaaaatctctgcaatttcctaagaatctataattatttcaaatttaaaagttttaaaaaccagtaaatattagaatgaaaataagacattaggtttttagctctctttccctgtgttacatggctagtgaaacaggtagtagtaaaatattaaggatatggggaaagtaccatacatcttaaatactaatttatttatttatttttaaattacctgacaattttgtcagcattcctgtacctattaatatctgtggttgca

SEQ ID NO: 893491 - DNA, 623 bp, Homo sapiens
taaacaagaactactatatatctgccctaacaaagcctaaaaacaagactttccaggacaaaactgatcaggcagtgaaataactactttctaaaacaaaattcaacactttacaggaagacaaacaaacaaagtgcagattcttagcattgcagtatcaatgtcctgcaaacaacaaattactatctatatgaagaataaggaaatgtgtcccaagattaggagaaaaaagttaatataaagagactcagatataacacagacatttaaaagagtaaacataactttaaaataactattataaatatattaaaggaycccatagacaaagtgtgtgaattgtaggactgtccacagagacatatatggaaattgaaaattgagtgaaatagtctgaatactaccaaaggatgaaaaaaaagtattaaagagcaaactaatccaaaatgtgtgaaggaggaaaatggcaaagataagagtagagattaatgaagaagaaaatgaatgaactgtagaaaatatcaacaaaagcaaaagttgagccattaaaaagatcaacaaaattgacaagtttccagctagctgaatcatgaaaaaatgagaaaacaaacaaatttggtaat

SEQ ID NO: 893492 - DNA, 595 bp, Homo sapiens
cctttctttgcatattcactagcatctgttatttgtctttttaatggtagcatttaactgaggtgagatatttcattgtgcctttcatttgtgtttctttgatgattagtgatgttgaacatttttttcatatgactgttgacaatctgtatgtcttcttctgagaaatgtctattcagatacttgctcattttaaattcagattattattatttgccattgagtttgaattccttatatattctggttattaactccttgtcagatggttagtttacaaatattttctcccattctgtaggatatcttttcactctgttgattrtctcttttgttgtatagaagatttttggcttgatattatctcatttgtctatttttttgttgttgttgcctgtgcttttgaagttttacctcaaaaatctttgcccagatcaatatcctgtactatttctccatttacttttcagtagtttcatagtttcaggtggtatgtttttatttgatttttagatattgtgaaagatagggacctagtttcattattttgtatatggatatccagttttaccagaactatttattgaagagactg

SEQ ID NO: 893493 - DNA, 650 bp, Homo sapiens
  misc_feature 1, 2, 3, 4, 5, 6: n = A,T,C or G
nnnnnnctttttctctctcatattcccttctattaaactgactttaggcaattccaattctttcccctctcaccaatttagaggctatgtgctctatttctaatattttcatggttactttttaacatgcatgtttaatttatgaaaatcgaatattaattgatacctttatttttacccatgaaaatgcaaaggaattagaatactttatcatccctcctgatatatgtatttttgtattttattttttatctttttaactttatagacaaaattgtatgtatttatcaagtaaaacatgatgtttgaaatatacagtttactgaaatatacattacattgtattatggctaaagtaagctaattaacatatgctttatttcatgcaatgaaaacacttaaaatctactctcttagacacygtgttctacctcagatctcttgaaattattcctcctagcaaactcaaattttgtaatctttgagtaacatcttcccaactcccttaatgaccatcacgtccactcctggtgaccatcattcttcttccttcttctatgagatcaacatttttacatgtcacatatgagtgagatcatgaggtatttgtcttcctaagcctaacataatatccttgaggttcatccatt

SEQ ID NO: 893494 - DNA, 582 bp, Homo sapiens
aactcacatcactaagaaagttcagagctccaaggctaaggaacagatcctaaaaactttcagaagagaaaaacaattcatactgatacaaatcagaaatcaaaatggcaacagatatttcagcaataaacatggaaactttaatattattgagctatgagttcaaaaactcaaagggaaatgatttcccactagaattctctatccagccaacctatcaatcaaatgactaagatctcagcaattttacttccaaagtgycttttctcaggaagctattaaagatttgttctaccaaatcaggagtataattatagaggaaggaaggcagagaatccaggaaacaaaagttctaatacaaacttttggcagaggaaggcccccgtaagagaagtacaaaccagacttaaagaggcagtaagttgtatgggagcaggaagatatagatttgcaggaggggctctccagggaaataaagaaactgattattttgtctgtcagagcatttaaaaaaaaaattctgaacaggcattctataaacctgagaaaattaccaataggtatatagaaaatcagtaaatg

SEQ ID NO: 893495 - DNA, 576 bp, Homo sapiens
ctaaggacttgctttatgaatctgggtgctcctgtattgggtgcatgtatatttaggctagttagctcttcctgttgaattgatccctttaccattatgtaatggccttctttgtctcttttgatctctgttggtttaaagtctgttttatcagagactaggattgcaacccctgccattttttgttttccatttgcctggtagatctccctccatccctttattttgagcctatgtgtgtctctgcacatgagatgggtttcctgaatacaggacactgatgggtcttgcctctttatccaatttgccagtctgtgtcttttaattggagcatttagtccatttacatttaargttaatattgttatgtgtgaatttgatcctgtcattatgatgttagctggatattttgcttgttagttgatgcagtttcttcctagcatggatggtctttactatttggcatgtttttgcagtggctggtactggttgttccttcaggagctcttttagggcaggcctggtggtgacaaaatctctcagcatttgcttgttctataaggtattttatttctc

SEQ ID NO: 893496 - DNA, 506 bp, Homo sapiens
tggatgctgttcatatcattctattgtcagtttgctctagctaggattttcagtactatgttgaataacagtggtgaaactgggcatccttgtcctgttccacatcttaaaggaaaggctttcaggtcttctccctattcagcatgatggcagctgtgggtctgtcatatatggcttttatcatgttgaagtatgttccttctagccccagttttttgagagttgttattatgaaaggatgttgaattttatcaaatgacttttcagcatcaattgaaatgatcatatggtttttgtccttcattctgttgacatgatgtattccattgattgagttttgtatgttaaaccatscttgcatcacagggatgaatcccatttggccatgatgaatgatttttttaatgtattgtggaatttggttggctaatattttatggagaatgtttgcatcaatattcatcagggttattggctgatagttttctttttttgatgtgtatttg

SEQ ID NO: 893497 - DNA, 542 bp, Homo sapiens
agcctcggtcaggggcttatggataaaaatcctatctccctgagacagagcacctgggggaaggggtggctgtgggcacagcttcagccgacttaaacattcctgcctgccagctctgaagacagcaatggatcccccagaacagcgctcgagctctgctaagggacagactgcctcttcaagtgggtccctgagacccatgcttcctgacttggagacatctcccagcaggatcracagaaacctcataaaggagagctccacctggcatctggtgggtgcccctctgggacaaagcttccagaggaaggaacaggcggcaattttcgctgttctgctgcctccactggtgatacccaggcagacagggtctggagtgaacctccagcaaactccagcagacctgcagcagaggggactgactgttagaaagaaaactaacaagcagaaaagaatagcatcaacatcaataaaaagggacgtccacaaaaaaaccccatccgaagtcaccaacatcaaagaccaaaggtagatgaatccac

SEQ ID NO: 893498 - DNA, 653 bp, Homo sapiens
tcaatcagaaccaagaaggctttcaagtctcatcacctgttacactcatccacacactctaattttctactaacctgaactactatttagtgtttcttcattaaattgaactccatctctctctgccatgcatttgcataggttattctctgaaatatgttgctcccgaaatgttctttttcccctactcacattactgtggaacttaaattgaggctttaagatgcaattcgatcatttctttccctttgaaaccttctcaagaatttcttggaaagattcattgttcatacattctttccatcaatacctattaagtaacctctatatgtcaggtattgttctcactgccaggaatacagatgaactagacaaagttcctaccctcatttattttacmttctagtgtaggtcaatataacaaaaataataaatatgtaatatataattcaaagtagtgaagagtgtattacgaataataaatcaggatatataaaactattttggttgggaagtgaacttttgatatctttttcaactacaaacagcatattctactttgggaaatgacttgtttcacatgtcttgtccttcattatagctccttgaggtgataaatgctattacctttgtcatctttaatcttcttcaaa

SEQ ID NO: 893499 - DNA, 556 bp, Homo sapiens
cacggatgaagcccacttgatcttggtggatacactttttgatgtgctgctgggttcggtttgccagtattttattgaggatttttgcattggtgttcatgagggatactggtctaaaattctctttatttgttgtgtctctgccaggctttggtatcaggatgatgctggcctcataaaatgagtyaggaagatttccctctttttctattgattggaatagtttcagaagaatggtaccagctcctccttgtagctctggtagaattcggctgtgaatccgtctggtcctggactttttttggttggtaggctattgattattgcctcaatttcaaagcctgttattggtctattcagggattcaacttttttctggtttagtcttgggagggagtatgtgtccaggaatttatccatttcttctagattttccagtttgtttgtgtagaggtgtttatagtattctctgatggtagtttgtatttctgtgagaccggtggtgatatccccttcatcattttttattccatgtatttgattcttctctcttttg

SEQ ID NO: 893500 - DNA, 556 bp, Homo sapiens
cacggatgaagcccacttgatcttggtggatacactttttgatgtgctgctgggttcggtttgccagtattttattgaggatttttgcattggtgttcatgagggatactggtctaaaattctctttatttgttgtgtctctgccaggctttggtatcaggatgatgctggcctcataaaatgagttaggaagatttccctctttttctattgattggaatagtttcagaagaatggtaccagctcctccttgtagctctggtagaattcggctgtgaatccgtctggtcctggactttttttggttggtaggctaytgattattgcctcaatttcaaagcctgttattggtctattcagggattcaacttttttctggtttagtcttgggagggagtatgtgtccaggaatttatccatttcttctagattttccagtttgtttgtgtagaggtgtttatagtattctctgatggtagtttgtatttctgtgagaccggtggtgatatccccttcatcattttttattccatgtatttgattcttctctcttttg

SEQ ID NO: 893501 - DNA, 605 bp, Homo sapiens
tgctgtcctccaggccccaaaatggtagatccactgacagcatgcaccatgtgcctggaaaagccacagacaatgccagcccatgaaatcagctgggagggaggctgtaccctccaaagccacagggtcagagctgcccaagaccatgggaacccacctcttgcatcagcatgacctggatgtgagacatggagtcaaagaagatcactttggagctttaagctttgactgccctgcaagatttcayactcacatgggtcctgtagcccctttgttttggccaatatctcccatttggaatggctgtatttacccaatgcctgtacccccattgtacctatgaagtaactgaaccagcttttggttttacaggctcataggtggaagggacttgcctcatctcgaatgggactttggattgtggacttctgagttattctgaaatgagttaagactttgagggactgttgggaaggcatgattgattttgaaatataaggacatgagatttgggaggggctaggggcagaatgatatggtttggctgtgtccacatccaaatctcatcttgaattcccatgttttgtggaagggacccagtggga

SEQ ID NO: 893502 - DNA, 605 bp, Homo sapiens
tgctgtcctccaggccccaaaatggtagatccactgacagcatgcaccatgtgcctggaaaagccacagacaatgccagcccatgaaatcagctgggagggaggctgtaccctccaaagccacagggtcagagctgcccaagaccatgggaacccacctcttgcatcagcatgacctggatgtgagacatggagtcaaagaagatcactttggagctttaagctttgactgccctgcaagatttcacactcacatgggtcctgtagcccctttgttttggccaatatctcccatttgsaatggctgtatttacccaatgcctgtacccccattgtacctatgaagtaactgaaccagcttttggttttacaggctcataggtggaagggacttgcctcatctcgaatgggactttggattgtggacttctgagttattctgaaatgagttaagactttgagggactgttgggaaggcatgattgattttgaaatataaggacatgagatttgggaggggctaggggcagaatgatatggtttggctgtgtccacatccaaatctcatcttgaattcccatgttttgtggaagggacccagtggga

SEQ ID NO: 893503 - DNA, 605 bp, Homo sapiens
tgctgtcctccaggccccaaaatggtagatccactgacagcatgcaccatgtgcctggaaaagccacagacaatgccagcccatgaaatcagctgggagggaggctgtaccctccaaagccacagggtcagagctgcccaagaccatgggaacccacctcttgcatcagcatgacctggatgtgagacatggagtcaaagaagatcactttggagctttaagctttgactgccctgcaagatttcacactcacatgggtcctgtagcccctttgttttggccaatatctcccatttggaatggctgtatttacccaatgcctgtacccccattgtacctatgaagtaactgaaccagcttttggttttacaggctcataggtggaagggacttgcctcatctygaatgggactttggattgtggacttctgagttattctgaaatgagttaagactttgagggactgttgggaaggcatgattgattttgaaatataaggacatgagatttgggaggggctaggggcagaatgatatggtttggctgtgtccacatccaaatctcatcttgaattcccatgttttgtggaagggacccagtggga

SEQ ID NO: 893504 - DNA, 641 bp, Homo sapiens
acatagaggcaaacatcctcaacaaaatactagcaaactgaatccagcagcacatagaaaagttaattcacctcaatcaaattggtttcattcctgggatccaagcctggttcaacacatgcaagtcaataaatgtgattcaccacaagaacagaactaaaagcaaaactatatgatcatctcaatgcagaaaaagcctttgataaaaatacaacatccctttatgataaaaagcctcaacagactaagcaccaagggaatacaccccaaaacaatgaaagccatctatgaagaacccacagctgacatcatactgaataggcaaaagctggaaccattccccttgagaactggaacaatacaaagatggcaactctcaccactcttattcaacatagcactggaagtcctayccagagcaatcaagcaagagaaataaataaaagacatgcacataacaaaagaaaaacaaactttctgtctttgctgacaatatgattctatacttagaaaatcctaaagactcttccaaaaagctcctagaacttattaacaactttagtaaagtttcagtatacaaaatcaatgtacgaaaatcagtagcatttctatacaccaataatgttcaagccgaaagtcaa

SEQ ID NO: 893505 - DNA, 667 bp, Homo sapiens
ctgtaaacactactttgtgtcatatttatatagttgtatcagctttctttgggatagtatttgcctagtataattttctatcctttaaaatttttttctgtgtcattataattacatgaatctcttataatctgcatgtagcagtattttaatttcaatttgataatttatgtattttttaatctttagttttagttttagggtacatgtgcaggatgtgcaggtttgttacataggtagatgtgtgccatagtggtttgctgtacctatcaacctatcacctaggtattaagcccagcatgcattagctatttttcctgatactctccctccccacaccccaccccaaacaggccccagtgtgtgtttttcscctccctgtgtccatgtgatctcattgttcagctctcactcataagtgagaacatgcagtgtttgattttctgttcttgcattagttttctgaagataatggcttccagcttcatccatgtccctgcaaaggacattatctcattccttttcatggctgcatagtattctatggtgtatatgtaccacatactacattttctttatccagtctaccactgatggacatttgggttgattctgtgtccttgcagttgtgaattatgctacaatgaacatacacatgcatgtatct

SEQ ID NO: 893506 - DNA, 416 bp, Homo sapiens
catcttccacaacggttaaactaatttacattctcaccaacagtgtaaaagcactcctgtttctctgcaatctcactatcatctgttgtttcttggctttttaataatggccattctggctggcatgagatggtatctcattgtggttttgatttgcatttctctaacgatcagtgatgttgagctttttttcatatgtttkttggccacatgaatgtcttcttttgagaagtgtctgttcatgtcctttgcccactttttaatggggttgtttttttttcttgtaaatttgtgttccttgtatattccggatattagaactttgtcagatggataaattgcaaagatatttctcctactctgtaggttgcctgttcactctaatgttagtttcttttgctgtgcagaagctcttt

SEQ ID NO: 893507 - DNA, 648 bp, Homo sapiens
ggtggcactagaggaattaaagacacacacacagaaatatttaggtgtggagtgggaaatcaggggtctcacagccttcagagctgagagcctcgaacagagatttacccacatatttgttgacagcaaaccaatgataagcattgtttctatagattacagattaactaaaagtataactaaaagtattccttaygggaaacaaaaggatgggccgaaataaagagatgggtttgactagttatccgcagcaggagcatgtccttaaggcacagatcgctcatgcttttgtttgtggtttaagaatgcctttaagcagtcttcctccctgggtgggtcaggtgttccttgccctcattctggcaaacccacaaccttccagtgtgggcgtcatggccatcatgaacatgtcaccgtgctgcagagattttgtttatggccagtttgggggccagtttacggccagattttgggggcctattcccaataaaagtctatcttgtcagaaactaggattacaacccctacttttttctgttttaaatttgcttggtaaaatttccttcatccttttattttgatcttatgtgtgtccttgcatgtgagataggtctcttgaatacagtacaccaatggattttgactctt

SEQ ID NO: 893508 - DNA, 648 bp, Homo sapiens
ggtggcactagaggaattaaagacacacacacagaaatatttaggtgtggagtgggaaatcaggggtctcacagccttcagagctgagagcctcgaacagagatttacccacatatttgttgacagcaaaccaatgataagcattgtttctatagattacagattaactaaaagtataactaaaagtattccttacgggaaacaaaaggatgggccgaaataaagagatgggtttgactagttatccgcagcaggagcatgtccttaaggcacagatcgctcatgcttttgtttgtggtttaagaatgcctttaagcagtcttcctccctgggtgggtcaggtgttccttgccctcattctggcaaacccacaaccttccagtgtgggygtcatggccatcatgaacatgtcaccgtgctgcagagattttgtttatggccagtttgggggccagtttacggccagattttgggggcctattcccaataaaagtctatcttgtcagaaactaggattacaacccctacttttttctgttttaaatttgcttggtaaaatttccttcatccttttattttgatcttatgtgtgtccttgcatgtgagataggtctcttgaatacagtacaccaatggattttgactctt

SEQ ID NO: 893509 - DNA, 584 bp, Homo sapiens
tgtttctatagattacagattaactaaaagtataactaaaagtattccttacgggaaacaaaaggatgggccgaaataaagagatgggtttgactagttatccgcagcaggagcatgtccttaaggcacagatcgctcatgcttttgtttgtggtttaagaatgcctttaagcagtcttcctccctgggtgggtcaggtgttccttgccctcattctggcaaacccacaaccttccagtgtgggcgtcatggccatcatgaacatgtcaccgtgctgcagagattttgtttatggccagtttgggggccagtttacggccagattttgggggcctattcccaataaaagtctatcttgtcagaaactaggattacaacccctacttttttctgttttaaatttgcttggtaaaatttccttcatccttttattttgaycttatgtgtgtccttgcatgtgagataggtctcttgaatacagtacaccaatggattttgactctttatctagcttgccactctgtgtcttttacttggggcatttagcccatttacgtttaaggttaatattgttatgtgtgaat

SEQ ID NO: 893510 - DNA, 700 bp, Homo sapiens
attattaatattgtttaaacagttaatgcttattttataaatttccatgtttgtcaatatttttgcttcacaatttttcattttgggtttaattttctccttcctgaaagaggaaaagtatgcatttttgtaaatttatcacatgaagtaaactctgtagaatcatttccagtgagtatctattagtggtaaactaattcagtttgtgtttatctgaaaatgtgtttattttgaccttgcacttaaagtgtagagttttaggctgatggttatttatctcagcacatagaaaatcttttgcagtcttaatttctaacactgctgttgaaaaagctggctgacaaacaaactttaattctttcttaggtaatcaatctttctckgattgcatttaggatttgtcagtatttgtcagtttgacaatatacatcaaggtgaggatatctttctctgacttttgcttggaaatttttcttatattttctgagaattcacctattttataaattctggacaaagtctttaccatgatttaaaatatttcttctttcccattctcactttattctatttctgaaatccctattaaacaaatattgagccttcttattctatccttgatgtcatgtatcttctttcattttccatttctttctccctgatagacatgttctgagaaatttgctgagatcagtttttt

SEQ ID NO: 893511 - DNA, 526 bp, Homo sapiens
gaaggtttcacagctccatgctgaggcacacctctgggcacttggtggccacccagtggtttctcccttgcaaacggcactattaatggcagtcccttgcctgccattaggggacatgtaggtgagccttcctggtttggacaagcacatctttccccctaccctccagagttaatcaggcacttcagaaaactgtgtactccacaaatcagctcattccctgaggcagcagagagaatctcctaayaaaccaggatcaagtagctacccagtatgttagctgtaactgtctcttacccatagcacaaactacaggcctgtaggtcaaactgaacagcccaatttaaaacctgttgacagaaaaacataggtctatagaagaacagacaaaaaattctactcaatattctctacagtcatacaccctgggtggagaacaagaaaaggaaaattaaaaacaaaacaataatattgtaggaaaacgaagagaaaaccctaatgcacaaattacaaatattagaaatcc

SEQ ID NO: 893512 - DNA, 437 bp, Homo sapiens; identical to SEQ ID NO: 874652

SEQ ID NO: 893513 - DNA, 345 bp, Homo sapiens; identical to SEQ ID NO: 874649

SEQ ID NO: 893514 - DNA, 633 bp, Homo sapiens
ccattcagtaacccataagggctattcactattttctatcagtaaaggtaaggtcctcaagatattttatatattttataagtaattcagatataatggaacaagctgaccctagaaagatagatgatttgaggacatctttgttattgccatatgtggtacaatatatttaactttatgtatatgaagtatttactcttgggtcatcattttctcaagccctttagctgacaagagatagataggcaagtagatagatagatagatagatagatagatagatagatgaatagatggagttatagttcagcaaactgaggcacatatatactatatgagaggtccaacattacttgattgtaaatgatgaggccaggattcaaatacagacaatctgatttgagcaaaagarcttaaccaatactgtctcccataaattttctggtccaattcttagagttttcagattttaattacaggcagcatggtctgctaagactattgaactagtcttagtagtagtctacagagcaggatttagccttggccctgatattcactgagcagcaccccagaccagtgataagctttacatatatatcttttgctagagaagtcaggattttgttttgg

SEQ ID NO: 893515 - DNA, 633 bp, Homo sapiens
ccattcagtaacccataagggctattcactattttctatcagtaaaggtaaggtcctcaagatattttatatattttataagtaattcagatataatggaacaagctgaccctagaaagatagatgatttgaggacatctttgttattgccatatgtggtacaatatatttaactttatgtatatgaagtatttactcttgggtcatcattttctcaagccctttagctgacaagagatagataggcaagtagatagatagatagatagatagatagatagatagatgaatagatggagttatagttcagcaaactgaggcacatatatactatatgagaggtccaacattacttgattgtaaatgatgaggccaggattcaaatacagacaatctgatttgagcaaaagaacttaaccaatactgtctcccataaattttctggtccaattcttagarttttcagattttaattacaggcagcatggtctgctaagactattgaactagtcttagtagtagtctacagagcaggatttagccttggccctgatattcactgagcagcaccccagaccagtgataagctttacatatatatcttttgctagagaagtcaggattttgttttgg

SEQ ID NO: 893516 - DNA, 630 bp, Homo sapiens
cacaagcttcagtagctgattcgatcaagcttcagtagccgattcgattcgatgaaagaaagggtatcagcaactgaagatcaaatgaatgaaatgaagtgagaggagaagtttagagaaaaaaagagtaaaaagaaacaaacaaagcctccaagaaacatgagtctatgtgaaaagaccaaatctacatcgattggtgtacctgaaagtgatggggggaatggaaccaagctagaaaacactcttcaggatattatccaggagaacttcccaacctagtgaagaaggccaacattcaacttcaggaaatacagagaatgccacaaagatactcctcaagaagagcaactccaagacacataattgtcagattcaccaaggttgatatgaaggaaaaaatgttatgggcagccagagagaaaggtcgggttaccaacaaacrgaagcccatcagactaacagtggatctctcggcagaaactctacaagaaagaagagagtgggggccaagattcaacattcttaaagaaaagaattttcaacccagaatttcatatccagccaaactaagcttcataagtgaaggagaaacaaaatcctttacagacaagcaaatgctgagagattttg

SEQ ID NO: 893517 - DNA, 630 bp, Homo sapiens
cacaagcttcagtagctgattcgatcaagcttcagtagccgattcgattcgatgaaagaaagggtatcagcaactgaagatcaaatgaatgaaatgaagtgagaggagaagtttagagaaaaaaagagtaaaaagaaacaaacaaagcctccaagaaacatgagtctatgtgaaaagaccaaatctacatcgattggtgtacctgaaagtgatggggggaatggaaccaagctagaaaacactcttcaggatattatccaggagaacttcccaacctagtgaagaaggccaacattcaacttcaggaaatacagagaatgccacaaagatactcctcaagaagagcaactccaagacacataattgtcagattcaccaaggttgatatgaaggaaaaaatgttatgggcagccagagagaaaggtcgggttaccaacaaacggaagcccatcagactaacagtggatctctcggyagaaactctacaagaaagaagagagtgggggccaagattcaacattcttaaagaaaagaattttcaacccagaatttcatatccagccaaactaagcttcataagtgaaggagaaacaaaatcctttacagacaagcaaatgctgagagattttg

SEQ ID NO: 893518 - DNA, 589 bp, Homo sapiens
tgtgaatataaattttcaaatctgtttggtagatacctaggggcataagtgctgaatcatgtggtaagactatgttcagctttgtaagaaactgtcaaactgtcttccaaaatgggtgttacattttgcattcctaccagcaatgaatgagtgttcctgttactctacatcctcaccatcaattggcatggtcaatattttgaattcagccatcctaataggtatgtaatatattccattgttatttttatttacattttcctaataatggatggtgctgagcatcttttcatatgcttattttccatctgcatattttttcttatgagatgttcakatcttttgcccactttttagttgggttgtttgttttcttattgttgagttgtaagagttctttgtatactttggacaaaagttctttatcggttgcgtgttttgcaaatacttttcccagtttgtgacttgtgtttttattctcttagcagtgactttggcaaagcagaagtttttacttttaataaagtccaatttattaattttttctttcatttatcatgtttttcatgttgtaaggtctacaacaatt

SEQ ID NO: 893519 - DNA, 583 bp, Homo sapiens
ttgcttagctcgtttgttggaagtattaagttacaggaataaggtaaatctcttcattcacatatctatgaataccattttggctttagtgaaaaaccatcagcactattaattattagtttccttatccctcttctttagagggtgaactatttagtatttaggacaagggttattctttcagttcatatctagtacatagagtaatacttgacatcttgtagatgaccaagacatactgaaatacttgttttatgaatgtctttaatttattttattctctgtagtattttattgtaaatcttaaaaatgatccatgatctttcacatcatctagtctggccatcacacaagtacagcttctttattttaacattaagcccaccacatagcttctccatctaactygtgcttgaacactgagtgatgaggtctcactgagttttggatattgctagttttatatcaggaaaaatccaatcctaattctttaatatgttagtcctaatctgcccttccataacttgtgcctgttaataatccttcaatggagtcacattatgtatacatttaatctaaagga

SEQ ID NO: 893520 - DNA, 716 bp, Homo sapiens
tttacaaaataaaaaatacatatggataataacgtgaaaagaaatacaacttcacttatcaggtaaattaaaatacaataatcaaatcaaattactaaaatatcctttcctgaacatcagactatattactcagtgcccataagaatgaaaaaagaaaagaacacggtagctcatgcctgtggtcccagcactttgtgaggccgaggcaggaggattgcttgagcctggcagtttcaaatgagaccagcctgggcaacacagcaagaccttgtctctacaaaaaactaaaaccaagaaaaggcagctgagcatggtggtgtacccctgtagtcccagctactcaggaggctgaggtgggaggattgcttgagcccaggagttggaggctgcaatgagctatgatcatgccacagaactccagccagggtgacagagaaaaatgctgtctcaaaaaaacaaaaaaaagatgaaaaagcaaaaacagacacctgttgagaagttagtggctcaccctttkggaatataagcaatatttattaaaaatttaaatgtttatattatttgaaccaccacattctttttctgggtgttaaacctattgaaataggtttacaaatagaaacacacacacacacagagggagagacagacaagagacagagagaggagagagaattgagtgtagcactgtttaggataaaaaaacagaataaac

SEQ ID NO: 893521 - DNA, 651 bp, Homo sapiens
attctggggtttgtttcacaaccctttaaaactgtaaaaatcattcttagttcaagtgtcgtacaaaaacaagccatggactagagttcagccactggtcacactctgtactgttctaagatataaaagacaaagaatatagctgtggaatttttttaaaggaaaaagaacatattatcagactgttattttgtgctgaaaaaaaattcaagaaaacgtctcatcattacatataatgctataataaataaacttgttcctgaccatttccacatatgtggatatatctgtcagaggaattcctaaaagtggattacttgttcagagggtatatgcatttgtaatttggaagagaatgccaaattgccatctaygagacagtgccaatttacactcccaccatgcctgatagtatttgtttctccaaatcttgccatcatagtttacagtttacataagaataagatatactggctgggtgcggtggctcacacctgtaatcccagcactttgggaggccaaggcgggtggatcacttgaggtcaggagttggagaccagcctggccagtgtggtgaaaccctatctctactaaaaatccaaatattagccaggcacggtggtgcatgcctgaattcccagctacttggga

SEQ ID NO: 893522 - DNA, 651 bp, Homo sapiens
attctggggtttgtttcacaaccctttaaaactgtaaaaatcattcttagttcaagtgtcgtacaaaaacaagccatggactagagttcagccactggtcacactctgtactgttctaagatataaaagacaaagaatatagctgtggaatttttttaaaggaaaaagaacatattatcagactgttattttgtgctgaaaaaaaattcaagaaaacgtctcatcattacatataatgctataataaataaacttgttcctgaccatttccacatatgtggatatatctgtcagaggaattcctaaaagtggattacttgttcagagggtatatgcatttgtaatttggaagagaatgccaaattgccatctacgagacagtgccaatttacactcccaccakgcctgatagtatttgtttctccaaatcttgccatcatagtttacagtttacataagaataagatatactggctgggtgcggtggctcacacctgtaatcccagcactttgggaggccaaggcgggtggatcacttgaggtcaggagttggagaccagcctggccagtgtggtgaaaccctatctctactaaaaatccaaatattagccaggcacggtggtgcatgcctgaattcccagctacttggga

SEQ ID NO: 893523 - DNA, 661 bp, Homo sapiens
caaacaaaaaacaaaccctaattcccctccacttgaatgtggccagacttagtgactcacttctagtacaaagattgtgttgagaaggttacagagtgacttctgaaaccaggccataagagagtgtgctccttttcttcttgggctctgtctgtctctctcagatcagatcgattctagggaaaagccatgycctggagacactcaagcagtcctatggagaggtccacagggcaaggaacagcagcttcctgccagcagccaggaggccttgtgagccatgcaagtcaatcatcttggaagtggatcccacagccacagtcaagccttcagatgagatgggagccccagccaacatcttgactgcaacttcacaaaagacttcatgccaaaaacatctagctaagccactctcaagttcctgatccacagaaactggatcagatcatccatgtttattgttgtgttaaactgctgagttctgggatcatttgttacagtggatagctaataccggggcctgtgactaaatctggagccacaacccccaatagggcatcaaacccacagcggtggcccagtcagtgcccacagcagtgagtggggtgaggagatgagacatagggacccaggcagggcatcaacaggtcctgccatagct

SEQ ID NO: 893524 - DNA, 661 bp, Homo sapiens
caaacaaaaaacaaaccctaattcccctccacttgaatgtggccagacttagtgactcacttctagtacaaagattgtgttgagaaggttacagagtgacttctgaaaccaggccataagagagtgtgctccttttcttcttgggctctgtctgtctctctcagatcagatcgattctagggaaaagccatgccctggagacactcaagcagtcctatggagaggtccacagggcaaggaacagcagyttcctgccagcagccaggaggccttgtgagccatgcaagtcaatcatcttggaagtggatcccacagccacagtcaagccttcagatgagatgggagccccagccaacatcttgactgcaacttcacaaaagacttcatgccaaaaacatctagctaagccactctcaagttcctgatccacagaaactggatcagatcatccatgtttattgttgtgttaaactgctgagttctgggatcatttgttacagtggatagctaataccggggcctgtgactaaatctggagccacaacccccaatagggcatcaaacccacagcggtggcccagtcagtgcccacagcagtgagtggggtgaggagatgagacatagggacccaggcagggcatcaacaggtcctgccatagct

SEQ ID NO: 893525 - DNA, 661 bp, Homo sapiens
caaacaaaaaacaaaccctaattcccctccacttgaatgtggccagacttagtgactcacttctagtacaaagattgtgttgagaaggttacagagtgacttctgaaaccaggccataagagagtgtgctccttttcttcttgggctctgtctgtctctctcagatcagatcgattctagggaaaagccatgccctggagacactcaagcagtcctatggagaggtccacagggcaaggaacagcagcttcctgccagyagccaggaggccttgtgagccatgcaagtcaatcatcttggaagtggatcccacagccacagtcaagccttcagatgagatgggagccccagccaacatcttgactgcaacttcacaaaagacttcatgccaaaaacatctagctaagccactctcaagttcctgatccacagaaactggatcagatcatccatgtttattgttgtgttaaactgctgagttctgggatcatttgttacagtggatagctaataccggggcctgtgactaaatctggagccacaacccccaatagggcatcaaacccacagcggtggcccagtcagtgcccacagcagtgagtggggtgaggagatgagacatagggacccaggcagggcatcaacaggtcctgccatagct

SEQ ID NO: 893526 - DNA, 580 bp, Homo sapiens
gaacactccttctccccttcccctgcctcctgaggaaggaagggcaaagtgcccctgcctcttggcccccaatactttttcttcctcgaagccactctcccttgtcccactcatttatttctggtctaactctcctactggatggtgagctttgggggggcctagcgtgggggctggcacttgtaaaggcacatgagktctatagaagaacactaggtcctcctccccgcccctcctcaggccagggtactgcggagaggcacacatactgggaggtgctgggaggcccacgtttccaccctgacactctccccagaaaggctgcagggacatggccaacacccctctctgcttctctgccaaagctgatttgcctatagccttgaaggcacaaagccggcaagaaccctctctgaggtagcaggccctgcatgctgctgagggggccgagggggcaggagaggcagatggcctatacagcatcctcctcctcctgggagatgatgagaaggggccggtggcaaacaagaaatccttccccttcgcctactgatccacgccttccctcagaactgcttat

SEQ ID NO: 893527 - DNA, 639 bp, Homo sapiens
gtgatcttgtttttacacatgctgtgcttaaatattaacaccaattgagcaaattgccttttaactgcctttatttgctttcattaacagtataatttaaaagctcaagaatttgcatggaacctgttgtgcatgttggggggaaaactattcataaattaattaatcgtgagaacattatctttaaggaaggtcacaaaacatgagcatgatttccaaaaagcagtgacatgtttttgccgtttcttggggacgtgatgtacttttggcttaragatctgtgctgcgtgtgtgtgtgtgtgtgtgtgtgtgcacgcgcgagataacttggctggatcaagaaaaattttaatgactgggcatgttttaagttaagttgagtgaacctaattacactgtagtttccagagagctaaaggcaataataccattggtatttaagcactagtttgaaaattaaagccaacctatataattggctgtgctccttagatggtttatttctttcttccctccatttctgaaatcccccttttctttctctttcacatttaaaccaatagagagaaagagagaaactgcctagcgctgcgaaccacagacggtccttccagtggggaacataactgcatgtcctct

SEQ ID NO: 893528 - DNA, 673 bp, Homo sapiens
actaaggaatgagagctcagtcataaaccccagagacagcacgaggtgacctacaagggagctaatgccctgcagttaaaactacacttgaatcttaaaaataaaatggaagccccaaagacaaagtcatcctcagtagaaatattctcaagttctgtgacgaagagtaaaacctccccccaaaaaaacccaccccttttagtaggcagkgatctgcccgatgatgactttcattcatctcttggtgggggcacactggaaagctcatctctgtagctaccacaactcatctacagccctcaaactgataatagaaggtaagaacctcagaacattccaaatgttgcaatagtagggggaacagctctcagactctcacaaactctctgtaagatcttgcatgaaccacttatgctctctaggcctcagtttccccatctgtaaaataagatgctctttcctactgacagcctgtggacagatctgtgatctatgagctcaagagtccctcccttatgtgcacaacatctggagagactgaagccagactctgtttccacagttgcttttgggtggccccccatagagcaccctcagcccccaaacagtgggggctttaacctttgcaaaatgccgagatagtacttgaaggctcatttttaacacttctagg

SEQ ID NO: 893529 - DNA, 607 bp, Homo sapiens
tgagtcagtgataagagacataatctgaccagctgtgtaactcttaaattttgagaaaaggaaggttggaaattgacagaaaatcacaaagctagaaaacaagaccaaatatcttacctttcgaggtcagtgataaaacctaggagcttctaagaaaaaagtaagatgatacagacaggtagyagacctatctccccctattcaaggcaattgaatactcagtacagaatcccagaaagctacatgcgcagtgaggatttaaggccatccaaaatcagaaggtctatggaaaactctagtctcacactcaaccactgaaggaatgccttttaccatgcataatggccagctatgcagcttctgctggagcatctgctgaggtggagaggcagctcactccttagtgaggcaactcactctttgttggatgggtctcttggttatacaagagtcctttcttactctgaatgaactccttaattcgttacagagaataagtccactccctcttctgcctgataaccatctaaataatgatagtgacactaaggacttgaacctgactcttctaatttcaaaagactacccctgccccatcactttacag

SEQ ID NO: 893530 - DNA, 596 bp, Homo sapiens
gtaagaggaagactgcttggatgaacagcccaggttttatgacactttcaagagctcttatgttctgggtctgtgtataaggcaattgagatatgttaactgagatatttcagagaagctgacacagccctgattacagtcttttatttctgaattgggctaaaaatgtagatcaagctttgatattcacctttcagtattttactgccattaattagtaagcttggggtgggaaaaagaagaaataacctggcatggaattttattattgctaatagwcgattatcattcaaacatttaagtttatatatgcatgactcgtgaagatcatgagatggtaaactcagatagtcctggattcaaatattagctcactattttaagctgcagtatgattttcagcaaattacttcatatctttgtacctgggcttctgtatatgaaaaatgaggggcaagaatccctgtccgacagggtccttataagaattacacatgagagcttttagaatccagtaggtactcaatatttgttaattgagtctaaaaaaatctaaattttttcccctgtaaattctataccctggttctactgtt

SEQ ID NO: 893531 - DNA, 596 bp, Homo sapiens
gtaagaggaagactgcttggatgaacagcccaggttttatgacactttcaagagctcttatgttctgggtctgtgtataaggcaattgagatatgttaactgagatatttcagagaagctgacacagccctgattacagtcttttatttctgaattgggctaaaaatgtagatcaagctttgatattcacctttcagtattttactgccattaattagtaagcttggggtgggaaaaagaagaaataacctggcatggaattttattattgctaatagtcgattatcattcaaacatttaagtttatatatgcatgactcgtgaagatcatgagayggtaaactcagatagtcctggattcaaatattagctcactattttaagctgcagtatgattttcagcaaattacttcatatctttgtacctgggcttctgtatatgaaaaatgaggggcaagaatccctgtccgacagggtccttataagaattacacatgagagcttttagaatccagtaggtactcaatatttgttaattgagtctaaaaaaatctaaattttttcccctgtaaattctataccctggttctactgtt

SEQ ID NO: 893532 - DNA, 679 bp, Homo sapiens
aaattacttcatatctttgtacctgggcttctgtatatgaaaaatgaggggcaagaatccctgtccgacagggtccttataagaattacacatgagagcttttagaatccagtaggtactcaatatttgttaattgagtctaaaaaaatctaaattttttcccctgtaaattctataccctggttctactgttactcactggaatataaacaacttaagcctacctctgctatccagtagcactcttttaagtgtttatggactgacaaatgataaagctagtacggtccctagctcagcagaggtgctggataaaactcgttttactcatgagtatatgaaaaacgggagaaagacattcaagagcatctgaaatgactcctccaaatccttagtaccatcatagcagctcatcagggtaagtaatgacatttacacaccacaatatcagacagttgggcaatcactttgcctgccccaatactgagtttgttactttgcctatgatttttcagaaaactggatggaaactacaggcygtactgtagcaggagaagacctgaaattagggaacttacccttctaaatctcatatgcccgtaaagtttcccattatcacctgttgactagagatagagaggacatatggttccttactcacccaggcaaaagcattgag

SEQ ID NO: 893533 - DNA, 684 bp, Homo sapiens
aaaatcacctggaataaaattattgacataaaccagtgtattgagacagtccagttgggaactgctgccttaaaaataattattcttctctggaaagtctcagattcaagaaacagaacacagaattacactgttaatcaaagagcttagtaataattctataagcaagatgctctgttttatgttaaagaattaccctaaaatacatgtcaagaggaaataacattatttcagctcaaaaaaaaatacattcttgcaagaagacataagagctgtcatacacttgaattatggtgttcatttatcaaataattttgacttggtttaccacaggtgaaaatagatatgattctasagaggaactttttgtttttccccagcaagacttgtcccaaatttaaataaaaattaaaaagatcctatgtggaagttttgaaacgatataacattgaatctggagtgtgcctcaatgtaaagagtaagagtgcattaatcagagctaaaggagatttgaggaaatacctactgtttcttttcaaacattccattttattggtcctagcatggaaccacataaaaatcctaagagaacagtaagtgaaactgagtttagggagaattacatactaggttcccatatttccttctacttttcattttgatgttcttgaatttagaattctg

SEQ ID NO: 893534 - DNA, 683 bp, Homo sapiens
ggaagaaagagcttttggacatttaaatgtattagatcacacctggaatatcatgttcagttctaggaggaccctcccccacccccatcttaagaggggcattgagaaagtagaggttgccccgaggaagtcagaacctggatgtattcattcatgcacatacatgtgcatatggcaaacatttgtcatttgccttcataagccatcagacacagttctaggagcgaaggaaccagaaaagatccagaggaggctgagtgctcaggagttgggaaaggatggagacagatgatacaaaataaagtacagtggtgagcagtgtgtgagaggagagaccascaaaagtgtctacaaaaagccctaaggggagcagctgaaggatgtgaaggggaggtgtgttaccaaaagaacagaagaaattagagcttttccttccttctttccctttctctttccctccctcccttccttccttcctctctctctctctctctcactctgtttcatatctgaaagcctattaaatagagggagagaatttgttctatataggagataaaaaaggattcagatagtgactcaaaatgggaaacaaactaagctgtttgggcaaggaacactaaattcctactcaagactggcttttgtctgaaaggtgttcttttcacatcctcttgcgtcca

SEQ ID NO: 893535 - DNA, 688 bp, Homo sapiens
ttgctgcgtggccttggataaattgactagcctctgtgagcctccatattcccttagtggtcttcccattgtggctctacttacctaggaatagtggtgtattagtttgttttcatgctgctgctgaagaagcaagtcacattttgcatggatggcgtcaggcaaagaggaaacttagatattattttagctcctggctccatgatttttatataaaagaacaagacaaattcagcgaagatttaatatttgagtttgccaaggaaggttttcttacctagtggatgcagtcttaggtactatgccttaaattagaaggcacagttcctagttcctccttctgatgcaccattagctataaatcacaccaattaaactacaatttgtgcatccacactctggcactttcactcaacctgccaataaaatcttgagagaatcaccattggcagctaggccctaataatatctgaagtttccattttcccccacagagtttcacatttactctctcatgcatgatgccctttgtggctttatttttacagmtaagacaggaatctaattccacttttgagataaatctcagagagaggaagtagttgtgtaggcaggttgggatatttttaaaaaactgcattggtatgaattacttttgtcaccgctttctatttatactgtacaattc

SEQ ID NO: 893536 - DNA, 573 bp, Homo sapiens
cattcattcacacacacacgaacacacatacacacacatacacacacatgcacacacatacacacacacacacagtcactgggttttatccctaaaacaaaaaaagatggtaaagcataggcctagactgagtgtatggatatagaaaatagaatcatgaaggaaaataataagaatgctctttaaaatgtgatcatattgcctcagtttgttctataaataggtgagactgaattataaataagtaaaattggaataaamaatgataaactaattttgtcagcaatatcacatccttgtcaccatttcctgagcacttactatattcaggttctctcttcattttttctgttcttcactataccactatgaggcaggtaagaatgtatccaaatttacacagaggtgtgctgtgaatcaaaacagctaaaaaaaaattttgtccagttctaagactgaaacatggccaaggagctgctctgaaattcagattcagtctgccgggcccaggccccattctctccattctgccccaatctctttcttggtttaacgttttctcctgcagggagg

SEQ ID NO: 893537 - DNA, 605 bp, Homo sapiens
ttcatatgtttcaaatttattatatccaacataaacattcccaccaatgattttatcatagaaaaccaaaaaaaaaacacatgaaaaattaggtttatattactgatttccaataatatgttggaacaggcccatggtgagcaattgaaaamttctggccaacagtctaattatctgctatttgataaaaaataaatcaaaacaatggataatatcactgtcagttttctctcagacagaagtatttcaagaacccaaatgctacgaagacagtgaagtgcttgagactaatatgaaagagacattgaaataagatgaacataatttaaacagcaaccctataccatgccaaacatttggtaaataaatacagtttcatttagtcctcacaatgactctgtaagataagctctcatttttaattagatgaatcttggctaacacctatctaggctttaatttcctcatctataaaataaggatgtttttcaccctactcccttgtaggattcttgaattctctcttgagaactcgagataatgcctgtgaagtacttagcagaggacccagcacctagtagttgctatataaaagtagcttttaa

SEQ ID NO: 893538 - DNA, 665 bp, Homo sapiens
aaacctttaacattatttagcgtcatttcatgagaggacaatgcagttaatgttccccactggaaggaccgtcttgtggttcgcagcgctaggcagtttctctctttctctctattggtttaaatgtgaaagagaaagaaaagggggatttcagaaatggagggaagaaagaaataaaccatctaaggagcacagccaattatataggttggctttaattttcaaactagtgcttaaataccaatggtattattgcctttagctctctggaaactacagtgtaattaggttcactcaacttaacttaaaacatgcccagtcattaaaatttttcttgatccagccaagttatctcgcgcgtgcacacacacacacacacacacacacgcagcacagatctytaagccaaaagtacatcacgtccccaagaaacggcaaaaacatgtcactgctttttggaaatcatgctcatgttttgtgaccttccttaaagataatgttctcacgattaattaatttatgaatagttttccccccaacatgcacaacaggttccatgcaaattcttgagcttttaaattatactgttaatgaaagcaaataaaggcagttaaaaggcaatttgctcaattggtgttaatatttaagcacagcatgtgtaaaaa

SEQ ID NO: 893539 - DNA, 585 bp, Homo sapiens
ttaaagacaatgtctaagtaacccactgagaagtatattaccacatatattattgggctgaaacacaggtaaactgattccaaagtcagaattctttttatgactacttttcatgactaatggcttttctctctttccctttctgtttctctctttcaaacacacttacttatttttatttttattttacctctgtctacttctgattgggrtaattatgtaaagctagagaaaagcagagatgcttggttgaagtgtaggagggaagatgggaaatccccatggttcaggtccttccttccaaccaggagcagtctacaggatctccacagattcccttggactgaacaaagtctagtttgactaaggcaggtcattctaaatcacagtgcagcatgatatatgccaggctcctcttagatttacagggacttttccagagaatgtttagctgattttgacattttgcctaatcttatatctcctccagtctgggcccctgcatacctacagaggtatgcttatatgttgtcatgttactattaactactgccccacccagtaaataaataataaaggtcgagt

SEQ ID NO: 893540 - DNA, 599 bp, Homo sapiens
ggctgttctacttgagttttctctctgcacgtggtttattacccttggaaatccaatctcttggcttctaaaactctgaaaaggaatgatttctttgcaggaaactgatgataagaatataaatataatgtatacttaaatktgaagatgttctctaaataaattctacaagtgctttcagatcattggttctgtgctaccaaactcagttctgtgggatatttgccctatgagaagatctctgaaaacagcatcctgtagttaattgaatttgggaaacagtccatgtcgtatcctcctcttagaaagtcacacacacattcacgcattagaggatctagaaggtcctccagaaatgattttttaaatgtccttaaacttatttgattatgaagacttttattcctttaaacctagtaatatcaggtagatttaatattctgtagtccaggctttggaaaacactgctctacttgatattataatacagagaagcatgaggtttaatagaaattaggtaggattaaaggccgtgtggcttgaattctgaccccatctcactgctcatcatctgtgtgactttgaggggaccattcatt

SEQ ID NO: 893541 - DNA, 607 bp, Homo sapiens
gtgaggcctacccacattggggagggcaaccggctttcctcagtctatcaatccaaatgttaaatgttcttcttattcagaaacaccctcacaggcacacccaggcataatgtttaaccaacgatctggacatcctttggctcagtcaatttgacacataaaataaccataataaacacttttcaattgttttcaccatctgatgcagtataaggtgattaaaaaaaaagtcaggaaatgagcctgacttttgaggcaataaaagactattttgtttaaagataccctagagatttctactagcaataaggaagattagatctaaaggtctttyttcccccaaaaaaaaaaaaaaaattagatatagtgtaaattttagaaaaattttccaatacatattatacccacaagtaaataaagaaaatatctatgagctagtaagattaataataacaacagtaaagatcataataaacagtaaactgaaatcagaaaggtaagctctaaggattccaaggacaatagccttaccattactgaatcactgggactggaggacatatccataggctctatgcaatgtcaaggagctacacctgagacacag

SEQ ID NO: 893542 - DNA, 596 bp, Homo sapiens
ggtctaatatccagaatctataaggaactgaaacacatcaacaagcaaaaaacaaataacctcattaaaaaatgggcaaaggccatatattagttcattttcatactgctgtaaagaactgcctgagactgggtaatttataaaggaaaaggatttaactgactcacagttcagcatggctgggaaggcctcaggaaacttacagtcatggcagaaggcaaaggggaagcaaggcaaatttttcaagaggtggcaggaaggagaatgaatgcaggaggaactaccaaacatttataaaatgatcagatctcrggagaactcactcagtatcacaagaacggcatgggtgaaaccaccgccctgattcaattacctcctcctggtatctcccttgacacgtgtggattatagggattatggagattataattcaagatgagattttgagtggtgacacagccaaaccatatcaggataggaacaggaacttctcaaaataagatacacaagcagccaacaaacatgaaaaaaaaatgctgttatcacaatcatcagagaaatgcaaatcaaaaccacaatgagataccatctcacac

SEQ ID NO: 893543 - DNA, 648 bp, Homo sapiens
tgtaacaaacctgcacgttgtgcacacgtaccctagaacttaaagtataatctaaaaaagagattaaaaaaaagaaaaagaaggaaatttatagcactaaatgcccgcatcaaaaaggtctcatataaaacatccgaacatcacacaaaaagaactagagaaccaagagcaaacagacccaaaaagtaatagaagacaagaaataacaaggtcggagctgaattgaaagagatacagacacaaaaaaaaagcccttcaaaaaaaatcaacgaatccaggagctggttttttgaaaacattaataaaatagatagactgctagctagattaataaagaagaaaagagagaaagtcaaatagataataaagaatgataaaggggatatcatcatggaccccatggaaatacaaacaaccttgagagaatactataaacacctgtatgcaaataaactagaaatcatattagtagaagaaatggattaattyctggacacatacaccctcccaagactgaaccagtaagaagttgaatccttgaatagaacaataatgaattctgaaattgaggcagtaataaatagactaccaatcaaaaatagcccaggaccagatggatttacagctgaattctaccagaggtacaaa

SEQ ID NO: 893544 - DNA, 502 bp, Homo sapiens
tatcctatgttcatgaactgagaagctcaagtttgttaaaatggcattgattttcaaaatttatctataaattcaatatgattccattcaaaattttagcagtttattttggggaaattgacaagtcaattctaaaattcatatggaaattcaaaggatcttaaaaaatacaagaaaacttaaagacaaagttggaggatttaaacaacctgatttcaagatttactacttagcaataatttagacagcatagttttagcccaaaaatagacaaaaagrccaatggaataaaatagagagctcagaaacagaccctcacatacagtcctttgatctatggcaaagacacccataattaagtggataaatgacgttctttttaatcaatggtgctgaagcaattagatattggcatagaaaaaaatgcaccttaattcctacctcacaccgtacataaaaattaattcaggatgagtcacagatctaaattttataacaaagc

SEQ ID NO: 893545 - DNA, 613 bp, Homo sapiens
ttttctttttccagaattttcatatatatgaaatcatacaataaatggcctctgaagtctggcttctttcgcttagcaaaatacatttcagattcattgataatttttctgtgaattaatagctagttcctctttatcactgcatagtattccattgtaccacagtgtgatggttaattttatgtgtcaacttggctaggctgtatgtccagttattcaatcaaacactaatttatgtgtctctgtgaaggtattttgtagatgtgattaacatctatactcagtttactttaactaaaggtgattacctttgatcatgtgggtagcctcatctaatcagttgacggccttaaaaacaaaatctgagatttcccagagaggaagaaatttggcctcaagactatagcatcagctccttcctgagtttccagcctgttggcctgccctacaaatttcygacttgccagcccctacagtcatgtgagccaattcctttcaatctcttcctatttcaatagatagacagccaataggatatagatcctccggtttctctggagaaccccgaccgatacacaccgtttgtccattcacctattgaaggagcaggcca

SEQ ID NO: 893546 - DNA, 589 bp, Homo sapiens
ttcttggaaatgaataactttaaaccagcagagcccaaaatcttaggcacaggtagcaaaattttgtgactagcttattaggcataatagttagaatagactatcccattttaatttttgattctctgacccatgtattatagatatgggaggaataccactctctaggggttgttgattcaaagcatgtactacatcctgtaagatatagttccataagctttcaagaggttatctctcagttagtgacaattgagccttcagtaggtgattccatcattctaccaggttagctgcttctggatgatggagtatatggcaggactagagaattccgtggctgcaagtcaattgctgcacttattttgttgtgaaattagcgccttgatcagaagtgatgwcttgaggggtgccacaatggtaaataaggcattttctaagtatgttatcggtggtacttacaaaaggcaaacccatatccacaggaaatgtttatttccctaagaacaaatctttgcccacttcatactggaaagaatccagtgtaattcacgcaccatagcatgactaactagtccacctggactca

SEQ ID NO: 893547 - DNA, 585 bp, Homo sapiens
acaaccatacatccaaattttcctgggacactcccagtttatacctgttgtctcagcaccttgtctggctagtacccccctttactctcaaaattatcttggtttgggcaatgaattaaatggtcacctttggaataaatgaccagaaggttggggctgcatcatactcatcttttactttctggtcacttagcacaaggagcagtgtaattcacatatggcgggcaaaggaattagtagaaaagagactggcttgtgttggggcagggaccactttgcctgggtcatcaggaaatgctaaccagattagttttgattcctcccrgagatagtcttcctaatggcactgcccaggggctattattttcccatcagaaggttgggttccccaagggtttgataaacaatcctttccaacatgaaggctgcaggcattgtttccccctcagtggctagtgcatttagagcttcaaaggagtatacttgggcattgtgtagaatatttagttcacatgtgaaagaggcttgctttatttatttgcattcctttttatttaaaaaattaacctacagaaaagttgatag

SEQ ID NO: 893548 - DNA, 641 bp, Homo sapiens
ggggtggatttatgaactggttagaatcataggattaggtcactcctctggtctcttccaggtctgacctacacattgtacctcatcagaggaatgggctaagcagataccatcttccctgtgaaagtggaagtgtggagttaagagccccgtgggcaggcagacagcctggcttttggtgccagctccaccactgggtggctaggtgaccttgggcaagtcctatcctctctctgagctcgtcttatctgaaaaaaaatggggaaactgagatgaccttccactggaggtsgggggtagatggaagtaattcagagaagcatgtggcacaagtcagagctcaaaaactgggagctgttgatattagatagatgtcaaacccctgggcagtgggcagcagtccaacagggtggggagggttgggactgacaggaagggggacttgatggagggtcaaaacacccaggacgacaagtcaaggggtggtcagtgtcaaagccatctggtctctccttttctgagcagttttatctgtcagaaccacaaagaacaaaatagcctagcacaacccagtctccccagcatctgccatgccgaattgctcactgctaaattcttcagagaaagagagcagggattat

SEQ ID NO: 893549 - DNA, 653 bp, Homo sapiens
tgtcaatatcctggtttcaatattgcactataataatttaagatgtcactgttggtggaaattgggtgacgggtacacaggacttttctatactaccttcacaacttcccgtgaatctatcattgtttcaaaataaagagttgtcttaaaagaatcaaatagccataacttgcgacagtctatttgcagcctctctctgtggtttcattgacctctgtctatggttccttcagtaacacacagttttgatgaccaaagtctttcaatcaaacaggtgattcctcccactttattgttctttttctagatagttttagcctagtttccttacctttctgtataaattttagaataatctaatctatagaaaaaaaccttcgtgagattttgattggaattgagttgaacttataagcaaacttctatgaatctgtaattatttaaaaataaaaaaattaaaaaaaaawttaaaagacacagagaggacctggaggtagagggaggaaggagagagagcagagaggaggaaggagctgatgtccactccgaggaccgtgcagtcaggggagcaggcacagggagaagagttttctactgttttcagggtctgcagtgtgtgggggctcagtcctctaacactccacatgtttcct

SEQ ID NO: 893550 - DNA, 694 bp, Homo sapiens
gatatgggtttcaaggagatgaaagcactgtcaaggaatcaagtgtttcattattttaatttgcatttaaagacccaaacttttattatacattacactctaatatttaataacaactttatactaggttatctcaccacctgttcacaaacttctcagtgagtctaatttrctttccatttctactactactacctcagtttagcctatcattttatccttagtttattgagggggtggagttgggggaaggacagtagaggaagaaaggcaagatctccaacattctggcccctaacctaacttttcaacttttgttttccaagtgttcccttatatgaacacttcacataagcctcaacacagttcctaaattctgtatattgactcattcaaacccacagcgagttttcccgtcttccagattcccatttatatgatgcctggtatcattttgtgaaagagaagataaacctcataaaagtggtttatcttctctttcactaatttaattataaaagaagtgttctatcttaatgactaattcaaatcaggtgccccaataaatgttgattgataacatactatttctatatattactcagcctattatacacttaatgatattatgaactatttttgaaccataaccaccctaaaatgttttttggcatcctggatttatgccagtcct

SEQ ID NO: 893551 - DNA, 634 bp, Homo sapiens
acagccagatactaaatcacagaggggtcccagactaggaataacatgaacaattggccatttgagttagattaaaattatgaaaaatctttaagtaaaagaacgattaagatcaagattttggcttcagtttagagtatagtaaaaactcattgtcgatgacacttagcggtgtgtttatttttctaaaatgtaagtgatttgactctgcaagtgcacgaagtaataattttttgtaaacactctctgatggttgcttagttctaccttccgatttctctttttttttcataacctcacgagctgggcttacatgatcttaaaaaggagaactagctgggcatagggcatgtctatagtcccagctactcaggaggctgaggttggaggattgcttgagcccaggggtgaagtttgaggacagcctagggcagacagggaggcgccattaaaaaaaaaaaaarggaaagctagatttcttctaaatttgaatttaaacactacttttgtgcagtcatggcatcatccacaggtgtggaacaaaacgaagagctcattttacatgctgtggctacaaagcaaaggttgggtaacttaggaggtcatttacttttaacatttgaatgatatgctc

SEQ ID NO: 893552 - DNA, 585 bp, Homo sapiens
tagaaagatgaattagtaactgtgtgggaaaggatgaccagcacaggaggcagggaggacagtatgcaggctattgcaatggtctgggtaagaagttatcagatcctgacccagggcttaggcagtgggaataaaaataagaaactgatgaggaaggcatttaggagaattgggcaaccagctgggtggaggaggggaggaacaggaatctgtcaaaaacaactgtgaagttttggatttgtgtgacaaaaccaaaaatagtactaggaaattcaaattggcttgtgggaagacaggaaaagtgctttggatagagtcataattcaagatgaaaaargcctaataatgatcagaatcagtgattttaaaatttgtatgtttaattttaatgtaggcatctttctgcacatgaaattttaaatgggagtccaatacgtgtagcaaaataaaaggaaaatgattcttgttggggtaagattgggtgggagggtcccacatacttcctactcaggcctcctctcattacttccccaaccccaacacacacctaaggggggctcttagacggtgcatggaaagtggttt

SEQ ID NO: 893553 - DNA, 604 bp, Homo sapiens
ttatctaatgatcagtgatgatgagtcttttttcatgtttgttggagcataaatatcttcttttgagaagtgtctgttcatatcttttgctaacttttagatagggttgttttttatttgtacatttgtttaagttccttgtagattcttgatagtagaggatagattgcaaaaattttctcccattctrtaggttgtctgttcactcttatggtagtttcttttgctgaggcctagctctttaatttaattagatcccatttgtcaattttggcttttgttgcaattgcttttgttgttttagtcatgaagtctttgcccatgcctatgtcctaaatggtattgcctaggttttcttctagcgtttttaagattttacgttttatgtttaagtctttaatccaccttgagttaatttgtgtatcaggtgtaaggaaggagttcagtttcagttttcccagcactatttattaaaaaggaaatcctttccccattatttgtttttgtcaggtttgtagtagatcagatggttgtagatgtgtggtgttatttctgaggcctctgttctgttccattggtctatatatctgttttggtaccagta

SEQ ID NO: 893554 - DNA, 628 bp, Homo sapiens
cactttatcccagctaaaagatcatggaggaaatagttaaagcccatcctaaactattgctgctaaaatctggactagtgtatatacaggcatacctcataaatattgtgtgtacagatccagatcagtgcaaaaaaagcaattatcataataaagtgagtaacatgaattttggggtgttccagtatatatagaagatatgtttatactatgctgtactctattaattgcgcaattgtgtgtatcattatgtctataaaaacaatatacataccttaattaaaaaatgctttcttactaaaaagtgcaaaggatcatctgagccttcartgagtcataatctttttgctggtggagagtcttgcctggatgttgatggctgctgactgatcagggtggtagttgctgaaggttggggaggttgtggcaatttcttaacataacaatgatatttgccacatcaattgactcttcctttcatgaaagatttctctgtaacatgtgatgctattaggtagcattgtacccacagtggcactgctttcaaaatttcactcagtcctctcaaatcctgccactgctttagcaactaagtttatgtaatattctaaaccctttgctgtccttt

SEQ ID NO: 893555 - DNA, 659 bp, Homo sapiens
ccccatcatagacatacacacttaccatctgtattagtccatttttgtgctgctgataaagacatatgcaagactgggggaaaaaaagaggtttaattggacttatagttccacatggctggggaggcctcaggcactcaggtgaaaggcacttcttacatggtggcagcaagagaaaatgaggaagatgcaaaagtggaaactcctaataaagatccatcagatcttacragacttattcactaccatgagaccagtatgggggaaactgccctcatgattcaaattatctcccaccaggtccctcccacaacgtgtgggaattataggagtacaatttgagatgagatttgggtggggacactgccaaaccatatcattcccctcctggcccctccaaatctcatgtcctcacgtttcaaaaccaatcatggcttcccagcagtctcccgaaatcttaactcatttcagcattaacgcaaaagtccatagtccaaagtctcatctgagacaaggaaagtcccttccgcctatgagcctgtaaaataaaaagcaagccagttacttcctagaaacaatgggtgatacaggtattgggtaaaaacagcctttccaaatgggagaaattggccaaaacaaagggtttacagggcccatga

SEQ ID NO: 893556 - DNA, 659 bp, Homo sapiens
ccccatcatagacatacacacttaccatctgtattagtccatttttgtgctgctgataaagacatatgcaagactgggggaaaaaaagaggtttaattggacttatagttccacatggctggggaggcctcaggcactcaggtgaaaggcacttcttacatggtggcagcaagagaaaatgaggaagatgcaaaagtggaaactcctaataaagatccatcagatcttacgagacttattcactaccatgagaccagtatgggggaaactgccctcatgattcaaattatctcccaccaggtccctcccacaacgtgtgggaattataggagtacaatttgagatgagatttgggtggggacactgccaaaccatatcattcccctcctggcccctccaaatctcatgtcctcacgtttcaaaaccaatcatggcttcccagcagtctcccgaaatcttaactcatttcagcattaacscaaaagtccatagtccaaagtctcatctgagacaaggaaagtcccttccgcctatgagcctgtaaaataaaaagcaagccagttacttcctagaaacaatgggtgatacaggtattgggtaaaaacagcctttccaaatgggagaaattggccaaaacaaagggtttacagggcccatga

SEQ ID NO: 893557 - DNA, 672 bp, Homo sapiens
aggtcttgattcctaggtggcatttataaacttatcctggaccaaagggggagcctactcccctgaagggaaagacccaggcctggttgcatttaccacagctggctgaagaacccatgggctatgagtgaacattgacagtaaccagggagtacttgctgcaggcctgggacagtgatggccacaaataaagaatccttctgcttgaggagaggatatggaaaagtgggaaggactttgtcttgtggtttkggtgccaactaagccatagtaaaatagagaaccaagtaaattcttaaggtttgtgactccaggccctggctcccagatggcatttttgaaccagcatctccactgggggaaattttctgccctgaaaggaaggacaaaacactggcacaattggacacatactgactgaagagcccttgggccttgagtaaacactgttggtaaccaggtagtggtttccaagggctttgggtgagatagagtgcggtgctgggcttcagttctgaccaagtgcagtcccagtggaggtggccacagggacgctgtgtcacatatcccccagctccagacagctcagcatggagagaaaaactccatttgtttgggcacaagtaaagaaagagaacaagagtctctgcctggtaattcagggaattccct

SEQ ID NO: 893558 - DNA, 584 bp, Homo sapiens; identical to SEQ ID NO: 873822

SEQ ID NO: 893559 - DNA, 655 bp, Homo sapiens
gccacaatagagtaaatctctaaatcaatagcaagaactttagaagcttgacaaacacatgaaaattaaacatgttagtgatgaatgggtcaaagaataaattaagaaggaaattgaaaaatgatttgaaacaaatgaaaatgaacacacaacatatcaaaatctatggaatacagcaaaagtcccagtaagaggaaagttaatagcaataagcacctacatcaaaaaagtagaaaaatttcaaataaaaaacctggccaggtgcagtggcttacacctgtaatcccagcactttgagaggctgaggtgggcggatcatttaaggccaggagttcgagaccagcctgggcaacatggtgaaacccccatctctactaaaattacaaaaattagccaggtgtggtggcacatgtgtgttgttggcacatgtttgtaatcccagctacttgggacgctgaggcacaagaattgcttgaayacaggaggtggagtttgcagtgagccaagatcctgccactgcactccagtctgggtgacagagggagactcagtctcaaaaaaacaaacaaaaacaaaaaagcctgatgatgcatctagaagaactagaaaagcaagagtaaaccaaaaacaaaaattgtaaaagaaaagaaacaat

SEQ ID NO: 893560 - DNA, 668 bp, Homo sapiens
tttaaatataatccctagagcaggcaggagagctccaaacatgaaaaggctctgtctattcccatctttatataattagaagcaacctagtttccatgttagtttaatgctctgcagagtaaaatggcaatgatagaagtattttcaactagggtcataacatgaactcttttatttaaaaaagcaacttttagcttcaaggcttcaaaaaaaatgaggkcatgaaatatatttagttgtctttattcgttattttagtcccattcttaattctacttagtaaccacttggtaacatttgatttcttagaaacacacaaggatcaacaacttcaaagctaaaattcaacttcctgagaaacgaatttgggaacaatatcttaatactaacacaaaggtgaaccttacatacaatggttccctttcatccctgggggatatgttccaagatcctcattaaatgcctaaagccatagatattactgaaccttacatatactatgtttttacctatacatacatacttatggtaaagtttaatttataaattaggtgccataagagattgacaacagtaactaataaatttattattagttaagcattgttaagtaaaataagggttacttgaacacaaacactgtgatactgtgacagtggatctgataa

SEQ ID NO: 893561 - DNA, 659 bp, Homo sapiens
ctttgtaattttaagtttagagatcttgtgtagctttcactggattaatttcaaggtatttgctatttttctggtattactgtaaattgtttttcttttaattttctgctatttttgcaaatgtatgaaaatttaattgagttttgtatatgtaacttgtatctagcaaacttgcttaattcaagtrttatacctaatacatttaatatatttttaaaaatagattcttgggaattttctaccaatcatgtcattactgaataatgacaattgtatttcttattttccaatattacttgctttcacaccttattgaaataaaaaggatctccactacactgttaaataaaagtggtaacttaaatatacttgtcttatttcctatctcagggaaaagcattcaatattttatcatttaagtatgatgataactgtagagttcttgtaagcactctttaatagtttaaggaagcactcttctatttctagtttattgagaggttttttagaaattattatcatgaatggatattgaattctgtcaaatagcctcagaaataacaccacatatctacaactatctgatctttgacaaacctgacaaaaacaagcaatggggaaaggattccctatttaataaatggtgctgggaaaattgg

SEQ ID NO: 893562 - DNA, 651 bp, Homo sapiens
ttcctatttgaataccatttatttctttctcttgcctgattgccctggccaaaacttccgatactatttttaatagaaatggtgatggagggcatccttgtcttgtgccagttttcaaaggggatgcttccagtttttgcccatttagtatgatattagctgtgtgtttatcctaaataactcttactattttgagatatgtccatcagtacctatttcattgagagtttttagcatgaagcgttgttgaattttattaaactccttttctgcatatattgagataatcatgtggtttttgtcattgattctgtttatgtgatggattatgtttattgatctgcatatgttgaaccagccttgaatcccagggatgaagctgacttgatcattttggataagctttttgatgtgctgctggatttgaattgccagtattttattgaggattctcccagtgatattcaycagggatattggcctgaaattttctttttttgttgtgcctctgtcaggttttggtatcaggatgatgttggcctcttaaaatgagttagggaggagtccctctttctctaatgtttggaatagtttcagaaggaatggtaccatctcctctttgtacctctggtagaattcggctgtgaatct

SEQ ID NO: 893563 - DNA, 651 bp, Homo sapiens
ttcctatttgaataccatttatttctttctcttgcctgattgccctggccaaaacttccgatactatttttaatagaaatggtgatggagggcatccttgtcttgtgccagttttcaaaggggatgcttccagtttttgcccatttagtatgatattagctgtgtgtttatcctaaataactcttactattttgagatatgtccatcagtacctatttcattgagagtttttagcatgaagcgttgttgaattttattaaactccttttctgcatatattgagataatcatgtggtttttgtcattgattctgtttatgtgatggattatgtttattgatctgcatatgttgaaccagccttgaatcccagggatgaagctgacttgatcattttggataagctttttgatgtgctgctggatttgaattgccagtattttattgaggattctcccagtgatattcaccagggatattggcctgaaattttctttttttgttgtgcctctgycaggttttggtatcaggatgatgttggcctcttaaaatgagttagggaggagtccctctttctctaatgtttggaatagtttcagaaggaatggtaccatctcctctttgtacctctggtagaattcggctgtgaatct

SEQ ID NO: 893564 - DNA, 589 bp, Homo sapiens
ggattgcaacccctgcttttttttgctcttcatttgcttggtaaatctttctccatccctttattttgagcctatgtgtgactttgcaagtgagatgggtctcctgaatacagcacactgatgggtcttgactctttatccaatttgccagtctgtgtcttttaactggggcatttagcccatttatatttaaggttaatattgttatgtgtaaatktgatcctgttattatgatgctagctggttattttgcctgtcagttgatgcagcttcttcatagtgttgatggtctttacaatttggtatgtttttgcagaggctgtatgggttttttcctttccatattgagtgcttccttcaggatctcttgtaaggcaggcctggtggtgacaacatctctcagcatttgcttatctgtaaaggattttacttctcctttgcttataaagcttagtttggctggatatgaaattctgggttgaaaattcttgtctttaagaatgttgaatgttgaatgttggcccccactctcttctggcttgtagagtttctgctgagagatccactgttagtctgatgggcttccctt

SEQ ID NO: 893565 - DNA, 619 bp, Homo sapiens
tgcatatatatttaggatagttagctcttctttttgcattgatccctttaccattatgtaatacccttctttgtcttttttgatctttgttggtttaaagtctgtcttatcagagactaggattgcaacccctgcttttttttgctcttcatttgcttggtaaatctttctccatccctttattttgagcctatgtgtgactttgcaagtgagatgggtctcctgaatacagcacactgatgggtcttgactctttatccaatttgccagtctgtgtcttttaactggggcatttagcccatttatatttaaggttaatattgttatgtgtaaatttgatcctgttattatgatgctagctggttattttgcctgtyagttgatgcagcttcttcatagtgttgatggtctttacaatttggtatgtttttgcagaggctgtatgggttttttcctttccatattgagtgcttccttcaggatctcttgtaaggcaggcctggtggtgacaacatctctcagcatttgcttatctgtaaaggattttacttctcctttgcttataaagcttagtttggctggatatgaaattctgggttgaaaattcttgtctttaaga

SEQ ID NO: 893566 - DNA, 612 bp, Homo sapiens
tacagtgttgaaaagaagtgtcaaaattagacattcatgcctctttcttgatcatgggggaaaacatttagtctttcatcattgttgtatgatgttacttgtggatttttctaaggtaccttttgtaggattgaacctaatcctcttggttgagaaatttttattgttcattttaaatcatgaatgtgtgctaaatttttaaaaatgtttttctttgtcttttgagatgatcatgtggctttaaaaaatttattatatactatatttcattaattgatttttagatactaagtcaagctatcatttttgcaataagtcccacttagcatgggtgtatgatctgctttaaatattgttggattcagcttactaatgttttattaaagagttttgcatctatgtttatgagatatagtaatctgtatttttattccttatgtttttgggctttaatattggatgaccctaractcatgaaataagttgagaaattgtttgactttttctatattttggaagagtttgtgaagtattgacatgttttgtttttaaatatttggtagaattcacttccgaagtcacagaagcctggcttttctttgccgaagattt

SEQ ID NO: 893567 - DNA, 628 bp, Homo sapiens
ggaatgctgagttggtcatgttccatgggccctcggctccctgcatatccccctttctgtttatgaattaattgaaagaatgtaaggccaggctgggcagctctttctccgattggcagtccatccgattttacagactataaacagaagacagagacaaaacaacattattccaagaactacatataagctgttaatgtggtgccttagataggtccaagggttgaggctccccaggccttgctggaatttggtccggtcttctaaagaaggctgaaactctggagtttgcctatttaaatcaagaattttgttttgttttataattcaccaatatcaaaggtgatgttggatgtgaaagctccccgcaaatgggctttcacraggtcccatggatactcactttggttatattctaagttggctacacaaatatgggtgtgattaaaatgacaacgcaattgctgctgcaagtgcaagctttgtacttgttcctttaaccatagaatcatggatcataacgttgccacttcagtttgtaactcagtgttaattttattctgaagtagccatgcttggttagctgtatgtgtccagttctcttcgtactgagctgtttaaacagaac

SEQ ID NO: 893568 - DNA, 670 bp, Homo sapiens
tttaccacattactacagtagtatcttatgttgtatgcattgattgtcaatctcttctcctcatctccaccattttgatagcttaaggcttatcattcattctctgtgcatagaaaaaaaaaccgaaatgatgttttccagtattttgtaatctttccttcatgaattgcagaagaaaagtgtttgggttttgtcccattcatcataaagckgtacacaatagatacggttgcattttaaagcaaggctaagatggatttaagatgtatttcttgtcatgtgaaacgtcctcctcagtggtcttaaataaaatattaattagataattctgcagtgattaatatgaaaatggttacataattcttagatggtatgtattgtgttgggctaacaccacattgcttttctagaatactggtatctatgggataccatagataccccatagaatactgaatatcttatgggactgccctttcactaaaagcacaaatctttactagtggtcttgagctaactggaactgctgtagatcacttgcaaattttccactaggatgctttggtgtatttggtgcagctattcccacaatcacttagagtaggcatgcagagggagctaacccataggaaattaaggaatttgaagaatctttgaaagttcatctcat

SEQ ID NO: 893569 - DNA, 655 bp, Homo sapiens
tttttttttaattgtgcagaaagtttattaggaattactttcaggatcaacatctgtgtgggaagggaaataaacaggttactaataaagaagaggaaattgggcctcagggcaggcaccacaaaacctcagccccaccttgagaggtctgaaaatagttgtaatatcctcatattgactgatcacccgattcaagccaccccaagaatgcaacctggccttgtgagaggtcattcttttcagctgaaggagggcatccccagcatctggagtaagccctccagccctgaaggggggctttgaacagcttagcatagtccccactacrtgattttagctatacttcaaaatagtaaatttggtttagccttggctttgactatgcgggctccttttgggttccatatgaattttaggattgttttttcctagttctgtgaagaatgatggtggtattttgatgggaattgcattgaatttgtagattttttttggcagtacggccattttcacaatattgattctacccatccatgagcatgggatgtgtttccatttgtttgtgtcagctatgatttctttcagcagtgttttgtagttttccttgtagaggtctttcacctccttggttaggtatactcctaagtattattac

SEQ ID NO: 893570 - DNA, 551 bp, Homo sapiens
gcactggcctctttgctgccacggaggagacgagagcggctgccgagagcctcaagctgagcagctcaggaggagctctgcatcctgccaggcagcgctgtggatggaactcccactcagcctcctgtctggggttgggggagggtgtctcaaggcaccaggagctgagtgtggacctccactccccaaacctggccctttcagcggtcccctggtaggatggaggccgtcagtctcatccgtaacagctgcaggaagcctagggcttgcccttgacctgtctctccctcacactcactttctcaagcacctccaaggccgtctcatcccactcctcccccaagctcagtctgcactgagacagctttcctgccagtgctgcagcrgcctctgccatcccctggcctgcatccccactggtgacagccccggctcatgttatccctacctcagctttctatggcacagagtggcttaacacaacacaaagatgacagttctgtcatcagagctggacgtgggtctcatgggttccagtcaaggtgcccgca

SEQ ID NO: 893571 - DNA, 551 bp, Homo sapiens
gcactggcctctttgctgccacggaggagacgagagcggctgccgagagcctcaagctgagcagctcaggaggagctctgcatcctgccaggcagcgctgtggatggaactcccactcagcctcctgtctggggttgggggagggtgtctcaaggcaccaggagctgagtgtggacctccactccccaaacctggccctttcagcggtcccctggtaggatggaggccgtcagtctcatccgtaacagctgcaggaagcctagggcttgcccttgacctgtctctccctcacactcactttctcaagcacctccaaggccgtctcatcccactcctcccccaagctcagtctgcactgagacagctttcctgccagtgctgcagcggcctctgccatccsctggcctgcatccccactggtgacagccccggctcatgttatccctacctcagctttctatggcacagagtggcttaacacaacacaaagatgacagttctgtcatcagagctggacgtgggtctcatgggttccagtcaaggtgcccgca

SEQ ID NO: 893572 - DNA, 658 bp, Homo sapiens
cttatcactaagaggagtcccaacatcagaaatgtccttgcaaacctggaacccagcctgaacaggcaaagaaggacaaaatcccagtgagggctggcatttggtgagtgttcactctgtgccctgccttaagtgaggtgtttcatacacttatttaattcagtgtcatcttccaacccaggctgtgattactgctcccatgcttcagrtgggggaactaaggctcggagagcctaagcaacaggccagagtcaagaagctgagttgagaaagaactggagttcaaacacgaagctatccccctgctatggaccaaatgataccctccctacacccctgccaaactcatatgttgaagccctaaccccactttgtggctacatttggaattatgaggaggtagttaaggttacatgaggtcataagagtggggtcttggtctgataggattagtgtccttaggaaaagagacacctcagatctctcatgctggtcttcgcatgtgatcagtggaaaggccacatgaggacaaagcagccatctagcagccagaaggagagccctcaccagaaactgaacactgctggaatctttatcttgaactctccagcctctagaatgatgagaaaataaaggtttgttgtttaagccacccatt

SEQ ID NO: 893573 - DNA, 578 bp, Homo sapiens
aattggaattagcagtgttctcacttgtgtgtgtgtgttgggtggggttgtgcagagagagatgaagggatagagatatcaaatccatcagccaccatcttattatattttcacaccttctatctgtctttagcatttcatcttttttctttgagacccttttttagttgattacaattattttgaaattttatcatcattgagagtatttggaacatcacctcatttaacttcacctgcaaatgtagtaagtacatccttgattatctcatcttaaggcgtcaatacagactgaaatagattggattttaggacatattcctgtgtgaatgtttgataaatctctcccaatgtttgtgagacatttgctttctctgcttttggacttaagttaaataccaactcttaaagccagggtcccaatcaccatgtacagaagaggactttggtcagcaaaccctctcacagagaaaaagaccttgtgwacacagggactagcaagaaactcagaatgcttttatttttcacatagttaaatgaagatactattcctacactgctagcccagaatgattttg

SEQ ID NO: 893574 - DNA, 566 bp, Homo sapiens
tttatcatgcagatcttgttcaacaggttaaagataagcagaattgtctaaaatagaataatacacttaatagaattgttggcaatttttatagaacactatagataacatttaaaccagcaaatatccatctaagaactattaataaagagagacagggcttaattcacatacatgctggagatcatgacattttagattttgatccacaaaatttcacaaatgaaagataaaaagtgatggccaacatccaaatagcatcgatgaaaactcccagcaataacatgacttataaagayaaatatctttccctgatatctcccccacttacccaacctaaaggcttccttcttccactctttaacaaaattgtgcagcaactgacatcagggaatagctcttctttcctgagcctctctcctgactggggatccagttagagtctgttaagatatttttcttaaataaagggaaatctatttcaaacgttgacagcaaaattacgtattattattacaagggtatattagggaatttaaatgcaaggagcatagctgagtttcagt

SEQ ID NO: 893575 - DNA, 566 bp, Homo sapiens
tttatcatgcagatcttgttcaacaggttaaagataagcagaattgtctaaaatagaataatacacttaatagaattgttggcaatttttatagaacactatagataacatttaaaccagcaaatatccatctaagaactattaataaagagagacagggcttaattcacatacatgctggagatcatgacattttagattttgatccacaaaatttcacaaatgaaagataaaaagtgatggccaacatccaaatagcatcgatgaaaactcccagcaataacatgacttataaagataaatatctttccctgatatctccccyacttacccaacctaaaggcttccttcttccactctttaacaaaattgtgcagcaactgacatcagggaatagctcttctttcctgagcctctctcctgactggggatccagttagagtctgttaagatatttttcttaaataaagggaaatctatttcaaacgttgacagcaaaattacgtattattattacaagggtatattagggaatttaaatgcaaggagcatagctgagtttcagt

SEQ ID NO: 893576 - DNA, 566 bp, Homo sapiens
tttatcatgcagatcttgttcaacaggttaaagataagcagaattgtctaaaatagaataatacacttaatagaattgttggcaatttttatagaacactatagataacatttaaaccagcaaatatccatctaagaactattaataaagagagacagggcttaattcacatacatgctggagatcatgacattttagattttgatccacaaaatttcacaaatgaaagataaaaagtgatggccaacatccaaatagcatcgatgaaaactcccagcaataacatgacttataaagataaatatctttccctgatatctcccccacttaccmaacctaaaggcttccttcttccactctttaacaaaattgtgcagcaactgacatcagggaatagctcttctttcctgagcctctctcctgactggggatccagttagagtctgttaagatatttttcttaaataaagggaaatctatttcaaacgttgacagcaaaattacgtattattattacaagggtatattagggaatttaaatgcaaggagcatagctgagtttcagt

SEQ ID NO: 893577 - DNA, 640 bp, Homo sapiens
atattcaccaattggtcagtggttaaaaaaataatgctgtaccgacacaatggaatattactaagaaatgaaaaggaattaactattgttatacacaaaatacatggatcaatctcaaaataattactgtgagtgaacgaaaacagaaaaacagtacagactatattatttaagttctataaaattctagaaaatacaaagttatttataatgacagaaaggtaatctgtggttacctgggggtagaaagagttgagagyaagggattgaaaatgagaaagaggctactttggaggatgatggatatgtttgttgttttgattgtggtgatggtttcatgaaaatcaaaacttaccaattgtttgttttagacatggacaggttattgtattccaaatacctcaatttttaaaaaaagtaataaagaatgcattgtggttgtcacaatgttaagggccctcaagatgtgattttggcattccttggtcaatcttaaaagtgagatttgattgataaaagaggtaatgtggatttacattcttagctgtgactatgttgactatcattagctataagaggataggtatgcagaaatgctatcactggacatcagtggtgttagcatgattaatattgagtc

SEQ ID NO: 893578 - DNA, 636 bp, Homo sapiens
ttatttactacaatggaaaagaaatggaaaaaaacccaaagattccaaaaagaaataactcaaaacaagttaaatgtgacacatccatatgatgaaatattgtacagacaataaacataacatttataaagggtgattattgtcattggaaagtgttgttaagtcaccwgacaaaaatgcaagacataaaagtatgtaatcaatgcaatctctgttacttaaaaaaaatcacagaaaggagaggggaaggaaatgctaaaaagttaataatcacattacaatctgatcatagtcatcattttcaatttattctccttcatatgtcttcagtgttttccaagttatagtttctataatcagcaagtaatccttccaaaattagaaaaaaattcaaaacgtaaggaggtgaacatcaggttgaatatcatgtcaataaaaaagaagtgataaatgtttcactttgacatttttcagcatggaaatttgcagagttcttcctccttcttcaaatatcttcacaaggccaaaattaaatttctgctgggatatagcagccactctattgcagtctactactagactgcaatagtgatcagtggtcagtccttgcagcttcccaagaatcaaagcattcac

SEQ ID NO: 893579 - DNA, 636 bp, Homo sapiens
ttatttactacaatggaaaagaaatggaaaaaaacccaaagattccaaaaagaaataactcaaaacaagttaaatgtgacacatccatatgatgaaatattgtacagacaataaacataacatttataaagggtgattattgtcattggaaagtgttgttaagtcacctgacaaaaatgcaagacataaaagtatgtaatcaatgcaatctctgttacttaaaaaaaatcacagaaaggagaggggaaggaaatgctaaaaagttaataatcacattacaatctgatcatagtcatcattttcaatttattctccttcatatgtcttcagtgttttccaagttatagtttctataatcagcaagtaatccttccaaaaktagaaaaaaattcaaaacgtaaggaggtgaacatcaggttgaatatcatgtcaataaaaaagaagtgataaatgtttcactttgacatttttcagcatggaaatttgcagagttcttcctccttcttcaaatatcttcacaaggccaaaattaaatttctgctgggatatagcagccactctattgcagtctactactagactgcaatagtgatcagtggtcagtccttgcagcttcccaagaatcaaagcattcac

SEQ ID NO: 893580 - DNA, 590 bp, Homo sapiens; identical to SEQ ID NO: 873059

SEQ ID NO: 893581 - DNA, 605 bp, Homo sapiens
aggaagaccacagggcctcaggaaatctgagctgaaggaatcagcatctcccaaggtagaagtgaaaaggactgctttggaggtgtttccaggggtaaaatgtactgtaggaaaactgcatagaggcaaagaatgtgcagtggytaatagctgagaaatgtgattggcctacatattgtgacttaaatagtgaataaaaggatctgagtgatgcttcaattctcactatatatcagggtatgccatagcagaaaagggaacattagagctaaagagtttttttttggtctcacttatctatctgggaacacctctgccctccttgcagaaaacaggagtgtcatgtgggcaatactagggagtgtaagactcatccatgtcctcatagattttaaaacccagatatatacacaatattgacatggggctatgtttgcaaaaggcagtcataaaaggacagggttcctatgttaaaggacagattggacagtattaatgtttcaaggatgaagaataaggacatttattggagaaaaatatcagactttggaaacaaatgaagtgaagtttcagaggcaggattctatccaattaaaacaaaaaga

SEQ ID NO: 893582 - DNA, 629 bp, Homo sapiens
aagggctagcagccaaaactgatctaggaagaagcccacccatcaagctaccattcactttcttcacagaaatagaaaaaactacyttaaatttcaagtagaaccaaaaaagagcccatatacccaagacaattctaagcaaaaagaacaaagctacctaacttcaaactatactacaaggctacagtaatcaaaacagcatggtactggtaccaaaacagatatgtagacccatgaaacaaaacagaagcctcagaaataacactacacatctacaaccatctgatctttgacaaacctgacaaaaacaagcaatggggaaaggattccctgtttaataaatggtattgggaaaacaggctagccatgtgcagaaaactgaaaatggaccccttctttacaccttatacaaaacttaactcaagagggattaaagacttaaacataagacataaaaccataaaaacgctagaagaaaacctaggcaataccattcagaacataggcaacataggcatgggcaaagacttcatgactaaaacaccaaaagcaatggcaacaaaagccacaattgacaaaagggatctaattaaactaaaaagtttctgcacagcaaaagaaactatcac

SEQ ID NO: 893583 - DNA, 593 bp, Homo sapiens
aacactacacatctacaaccatctgatctttgacaaacctgacaaaaacaagcaatggggaaaggattccctgtttaataaatggtattgggaaaacaggctagccatgtgcagaaaactgaaaatggaccccttctttacaccttatacaaaacttaactcaagagggattaaagacttaaacataagacataaaaccataaaaacgctagaagaaaacctargcaataccattcagaacataggcaacataggcatgggcaaagacttcatgactaaaacaccaaaagcaatggcaacaaaagccacaattgacaaaagggatctaattaaactaaaaagtttctgcacagcaaaagaaactatcaccagaatgaacaggcaacctacagaatgggagaaaatttttgcaatctatccatctgacaaagggctaatctacaagtaacttaaacaaatttacaagaaaaaaaacaaacaaccccgtcaaaaagtgggcaaaggatatgaacagacacctcgcaaaagaagacatttatgtagccaacaaacatatgaaaaaaagctcattatcattggtcattagagaaatc

SEQ ID NO: 893584 - DNA, 621 bp, Homo sapiens
gaacttagccctccaaaactccaatgtttgaagactcagcacagaagactgagaaactagagcctggaatgaattagtaaaataaaaacagagtagaaatctgggaggccaaatgagaaaaatgtttccaggaagaagaatttatcaactgcaacacataaacatttggatctaataatatggaaaacattaagacyttccttactaagaagaaatttggtgataaacgcctgataggattgagttaaaatgtaaatggaagggaagaaagtgagaaaagatttgctgtcaataatatcaggtaatagggcagtagcttaaggagaaaatgggttcatcaaagtttattttggtttctgcttttcaaattgagagacatcactgtccgtttgtatgtcaggaggttggtgatttcttaatggagcttatcttacactacagatattattttgtctgtgtcctggctttccttgcttccccaaaagataggtaaggttctgattccattgattcactggcaggtgtattcagagatgagggcagcccttcctggtgcatcttcctatgcaggcttataggggaggcctcagtttttacagtagtattgccttaccaaagctt

SEQ ID NO: 893585 - DNA, 621 bp, Homo sapiens
gaacttagccctccaaaactccaatgtttgaagactcagcacagaagactgagaaactagagcctggaatgaattagtaaaataaaaacagagtagaaatctgggaggccaaatgagaaaaatgtttccaggaagaagaatttatcaactgcaacacataaacatttggatctaataatatggaaaacattaagaccttcyttactaagaagaaatttggtgataaacgcctgataggattgagttaaaatgtaaatggaagggaagaaagtgagaaaagatttgctgtcaataatatcaggtaatagggcagtagcttaaggagaaaatgggttcatcaaagtttattttggtttctgcttttcaaattgagagacatcactgtccgtttgtatgtcaggaggttggtgatttcttaatggagcttatcttacactacagatattattttgtctgtgtcctggctttccttgcttccccaaaagataggtaaggttctgattccattgattcactggcaggtgtattcagagatgagggcagcccttcctggtgcatcttcctatgcaggcttataggggaggcctcagtttttacagtagtattgccttaccaaagctt

SEQ ID NO: 893586 - DNA, 589 bp, Homo sapiens
cctttcttttggccaatttttcccttttgaaatgggagtgtttatccaatgcctgtaccaccattgtattgtggaataacttatttttcaattttacaggctcacggctataaggaacttgacttgagtctcagatgagacttttaacttyggaattttgagttgttgttggaaggagttaagattttgggggactatcaagaataattgtattttgcaatgtcagaaggacatgagatttggggagccagtggcagaatgacatagtttggatgattgtcccttccaaatctcatgttgaaatatgatcctcattgttgaaggtggggcctagtaggaagtgtttgggtcatggaggcggatcctccatgaatgtcttggtgccctcttcatgggtaatgagtaagttctcactttactagttcatgtgagagctgtagtgcctaaacgatcctggcaccttctcccctctctcttgcccgctctctcgccatgtgacatgccttctcccccttcatcttccactatgattgtagacttcttgaggccctcaccagcagaaggtgatggcagtatcattcttgtacag

SEQ ID NO: 893587 - DNA, 589 bp, Homo sapiens
cctttcttttggccaatttttcccttttgaaatgggagtgtttatccaatgcctgtaccaccattgtattgtggaataacttatttttcaattttacaggctcacggctataaggaacttgacttgagtctcagatgagacttttaactttggaattttgagttgttgttggaaggagttaagattttgggggactatcaagaataattgtattttgcaatgtcagaaggacatgagatttggggagccagtggcagaatgacatagtttggatgattgtcccttccaaatctcatgttgaaatatgatcctcattgttgaaggtggggcctagtaggaagtgtttgggtcatggaggcrgatcctccatgaatgtcttggtgccctcttcatgggtaatgagtaagttctcactttactagttcatgtgagagctgtagtgcctaaacgatcctggcaccttctcccctctctcttgcccgctctctcgccatgtgacatgccttctcccccttcatcttccactatgattgtagacttcttgaggccctcaccagcagaaggtgatggcagtatcattcttgtacag

SEQ ID NO: 893588 - DNA, 704 bp, Homo sapiens
gagctgtagtgcctaaacgatcctggcaccttctcccctctctcttgcccgctctctcgccatgtgacatgccttctcccccttcatcttccactatgattgtagacttcttgaggccctcaccagcagaaggtgatggcagtatcattcttgtacagttggcagaactgtgagccaaaataarcctcttttctttataaattacccaacctcaggtattcctttatagaaaggcaaaatgaacgaatacatctgataattagtgatgtttttcatttttagtatgtttgttggtcacttatatgtcttcttttgaaaaatatctgtttttgccctttgtctactttttaatggggctatttgttagattgtggatattaaccctttgtcagatgcataatttgcaaatattttttcctattctgtaggttgtcttgtttactctgttgcttttttcctttgctgtgcagaagtatttttttgtttaattaagtctcatttgtctatttttgtttttgttgcagttgcttttgaagacttggtcataaattcttttcctaggctaggtacagaagaatttttcttaggttttcttctaagaattttatagtttcagatcttacatttaggtctctaatccatcttcagttaatttatatatatggtgaaaagttttggttcagtttcattcttctgtatatggc

SEQ ID NO: 893589 - DNA, 669 bp, Homo sapiens
agttatgacaaacccaaagccaatatcatactgaatgggcaaaaactggaagcattctctttgaaaaccagcacaagacaaggatgccctctctcaccactcctattcaacatagtgttggaagttctggccacggcaatcaggcaagagaaagaaataaagggtgttcagttagaaaaaggggaaatcaaatgtctctgtttgcagatgaaattattgtatacttagaaaacccatcatctcagccaaaatctccttaagctgataagcaactttagcaaagtctcaggataaaaaattaatgtggaaaaatcacaagcattsctacacaccaataacagacaaacagagagccaaatcatgagtgaactcccatccacagttactacaaagagaataaaatacctaggaatccaacttacaagggatgtgaagaacctcctcaaggaaaactacaaaccactgctcaacaaaataaaagaggacacaagcaagtggaagaacattccatggtcatggataggaagaatcaatatcatgaaaatggtcctactgtccaaggtaatttatagattcaatgccatccccatctagctaccaatgtctttcttcacagaattggaaaaaaaactactttaaaattcacatggaaccaaaaagagaccgcat

SEQ ID NO: 893590 - DNA, 515 bp, Homo sapiens
aatttgttattattatactttaagttttagggtacatatgcacaatgtgcaggtttgttacatatgtatacatgtgccatgttggtgtgctgcactcattagcttatcatttagcattaggtatatctcctaatgctatccctcccccctcccccgaccccacaacagtccccagagtgtgatgttccccttcctgtgtccatgtgttctcattgttcaattcccacctatgagtgagaacatgcrgtgtttggttttttgtccttgcgatagtttgctgagaatgatggtttccagtccctacaaaggacatggactcatcattttttatggctgcatagtattctatggtgtatatgtgccacattttcttaatccagtctatcattgttagacatttagattggttccaagtctttgctattgtgaatagtgccacaataaacatacatgtgcatgtgtcattatagcagcatgatttataatcctttgggtatatacccagtaatgggatg

SEQ ID NO: 893591 - DNA, 515 bp, Homo sapiens
aatttgttattattatactttaagttttagggtacatatgcacaatgtgcaggtttgttacatatgtatacatgtgccatgttggtgtgctgcactcattagcttatcatttagcattaggtatatctcctaatgctatccctcccccctcccccgaccccacaacagtccccagagtgtgatgttccccttcctgtgtccatgtgttctcattgttcaattcccacctatgagtgagaacatgcagtgtttggttttttgtccttgcgatagtttgctgagaatgatggtttccagtccctacaaaggmcatggactcatcattttttatggctgcatagtattctatggtgtatatgtgccacattttcttaatccagtctatcattgttagacatttagattggttccaagtctttgctattgtgaatagtgccacaataaacatacatgtgcatgtgtcattatagcagcatgatttataatcctttgggtatatacccagtaatgggatg

SEQ ID NO: 893592 - DNA, 654 bp, Homo sapiens
attgcctcaccagagcagacacccatagagatttggtgaatgttcgaatagatgccaagaaagaaaggcagtgttcctggatctactgcaacagtagctggattgaagcagccttaagtcatgagcactgaggttatggtcccacttgtccccattatctatcttaaaactgcccattgcttcatgccttgttttaccaggattgtgggaggataggtgctgcaacacggcagagattggccagagcctcccctgggtcagtgagcrtttcatggtagctcatttggccagagcctcccctgggtcagtgagcgtttcatggtagctcattccaggtccttatctctttgtaggttgtgaaagaacaatatcaaagaaataatcctgtgttctatttttaacaggtaggggatagctgaataagtaaatagctcttggaattgaatgtatgttccaatggggaattgtatactattgtgatttcaaaaataaaaacaggagatggtgtttctgtcacctgggctggcagtggaaggggaagtaaattagaagacagaaacctgagttctttcaggcttatgcctcacttgattaaaacacttggccaagtcaggtcacctctctggaatttagattactcattgaaaagtgatg

SEQ ID NO: 893593 - DNA, 681 bp, Homo sapiens
gactgagttgataaccaatggccaacgatgttacccatgaacgtacccatcccactatcaggtaagtcttccgcaagatgactgtagcccatcctgtcacactctcacaagcctgaaaggcaggaaacattctgctagctgtttctctatcaaggaatactggagctcagatgccttccatggttgggaccaaaagtctattggcattcttaggtgctccgtgcgctgcygcaggccccaacagaaaccatctgtggtcacatgcacattcagctcaaatgggcaccccggtccatgacctgtagggcttgtgcctgctgaatagaccgcttggctgccaggaaggcggtctcagccacatcagcccaatcccggatagctcccatctttgttaacagacacaatagttttatcatttgagctaaatggggcacaaatgtctgtcaatatcacaggaggctcacaaaagtttgcagctatctcactgtggtgggccggggacatgcctgaattttgtcaatgatggcttctggtatggcctttgtcttacctgaccagataactcccaagaatctggcagataatccaggaccttggaccttggattcgttgacggcccaaccacatgctgctaaatgttgccgcaagagggacgccactgcttctaaatctgcaagagaa

SEQ ID NO: 893594 - DNA, 681 bp, Homo sapiens
gactgagttgataaccaatggccaacgatgttacccatgaacgtacccatcccactatcaggtaagtcttccgcaagatgactgtagcccatcctgtcacactctcacaagcctgaaaggcaggaaacattctgctagctgtttctctatcaaggaatactggagctcagatgccttccatggttgggaccaaaagtctattggcattcttaggtgctccgtgcgctgctgcaggccccaacagaaaccatctgtggtcacatgcacattcagctcaaatgggcaccccggtccatgacctgtagggcttgtgcctgctgaatagaccgcttggctgccaggaaggcggtctcagccacatcagcccaatcccggatagctcccwtctttgttaacagacacaatagttttatcatttgagctaaatggggcacaaatgtctgtcaatatcacaggaggctcacaaaagtttgcagctatctcactgtggtgggccggggacatgcctgaattttgtcaatgatggcttctggtatggcctttgtcttacctgaccagataactcccaagaatctggcagataatccaggaccttggaccttggattcgttgacggcccaaccacatgctgctaaatgttgccgcaagagggacgccactgcttctaaatctgcaagagaa

SEQ ID NO: 893595 - DNA, 681 bp, Homo sapiens
gactgagttgataaccaatggccaacgatgttacccatgaacgtacccatcccactatcaggtaagtcttccgcaagatgactgtagcccatcctgtcacactctcacaagcctgaaaggcaggaaacattctgctagctgtttctctatcaaggaatactggagctcagatgccttccatggttgggaccaaaagtctattggcattcttaggtgctccgtgcgctgctgcaggccccaacagaaaccatctgtggtcacatgcacattcagctcaaatgggcaccccggtccatgacctgtagggcttgtgcctgctgaatagaccgcttggctgccaggaaggcggtctcagccacatcagcccaatcccggatagctcccatctttgttaacagacamaatagttttatcatttgagctaaatggggcacaaatgtctgtcaatatcacaggaggctcacaaaagtttgcagctatctcactgtggtgggccggggacatgcctgaattttgtcaatgatggcttctggtatggcctttgtcttacctgaccagataactcccaagaatctggcagataatccaggaccttggaccttggattcgttgacggcccaaccacatgctgctaaatgttgccgcaagagggacgccactgcttctaaatctgcaagagaa

SEQ ID NO: 893596 - DNA, 670 bp, Homo sapiens
gcaggaggagataacagtcagataaaatgtgggatgagctatgcctgtgcagcccaggtatcctatcagggacacattctgaggattaacggatgtggggaaagctaggaaccagtagtagcctccatttggtgcctatggcccaggctgtgaaacagagtacattcctgaagccctggtcaaatattccttaccagaaattaggaaattctgggattattttttctaaaacaggcttttatataaagttgtgtgttatacttcatcatgtttatcttagagtgaaacatgatgtaaactgacaataaccaaaaagaattattactctacttccttccttttctttcctcctggcttttagcaagggaaccaagaactcaactcatagatcttccctgcatacttacaatggaagacacactctgcagagtcctggggtgtgctgagtggcaggagagrggaataggagagaattgtatcaattagtaagacataaccttttgacacttacaaagcctgttcacttcaacaactcccttaggtagtaggatcaatgcagatcactgatttattaaggaactgggagaatattcaaataaattaataaaataagtgagctatgaaatcaacagaaattattctgactttgagatgcaattataacaaaagc

SEQ ID NO: 893597 - DNA, 578 bp, Homo sapiens
tggccaagagcatgcttctctaatccaaacatgcaaagagctacgtgatcatctataatttccattagccattccttaaagtatatttcctacctagttattacacaccaaaactctctcataatgcgatataatttctgatagaccaaaagtcaaaaacttcagatactgcaatccaaaacagaacaaagccttaaattctgagaggaatttatcagctttcaattcctggggttccaagaggaaaacagggtttttttccaaaatggtgtctctggcgcctcctgttttccccaaggagtcccaggctgttagagcttgaatatctaattttaattaagctgactttaaaccatggtgctctacaaaaaaaattctttaaaatctcttattacccaattacacaacacaagcagctaatttttgtatttttagtagagacrgggtttcaccgttgttggccaggttggtctcaatctcctgacctcaagtgatctgcccacctcagcctcccaaagtactgagattacaggcatgaccactgtgcccagccagaatctgttttcttttgtaacagg

SEQ ID NO: 893598 - DNA, 691 bp, Homo sapiens
gaacattaattatggttaatactaaatatcttatattcaaagtgttaatctaatcctctaaaaccgggttacaggtgtgaaatagcagaaaggataaagaggccagagggaaaaagaaggccataggagaaaagactgctttaagaggggagagagaagcctaatgcagtcttcatcttattcacaattttgccttcaattgtcccttcttgaagaaacttaaaggaaactctcgaactttcctccagttttcagcactgagtcctcctcctcccagcccaccccattcaagaactgaaatataggataatatagtttagcacccatgtgttacaaagsctttggggagcttgcctggggacctaaaaacccttagagtatcagttcaagaaaaaagcttgctctggattcaaaaatcttgctctgtcatttttcaaattgagctactttatagagcacctactctgagtcagctactctggaaaataccattttacagagataaatgagatgtgacttctgctctcaaaggatttgcaggtcactagcaaacccacagttgtggttattgtaacaatcacgtcacaaatggggcttgggggtcaggtgcagagagtagtggttggtatggataggaaaacctagattaactgggtttaaaataaccaggcaccccaattaaccataatcc

SEQ ID NO: 893599 - DNA, 598 bp, Homo sapiens
ccatgcgcaatcctggctcagctggccaaagactcagatatatatcatgtaataatactttatctataaacatacaaaataggcaatttcactaaaaaaaatgcaaggcttaggtatttttattcccacaagatattcttcagacttttgtcttctactatgttatgagaatgtacgaaggcttgctctgttgtatatcttttaraaactacagaaaatccaatttccagttccctgcatgagaaataaaaaattcaccactgtcaaattttcttgacatataaaaaggtgacctcaaagggggaaaaatagtgaccaattgtatacatagtctttccaggataaaaccttttttatccatctttcctaaaatgggagtggttaatactgtacttggacctttgaaacaattcaaagaggaaaatttcactgataaaagtgttagaaatacatgaaggtaataactggcctttacttaatgtggtattatatagaaaaagaaaagactacattgaaaatcccttccaatgctttcacttactgccttagaaaaataattattaattaaattataacctggcaaaaagtagggagtctc

SEQ ID NO: 893600 - DNA, 598 bp, Homo sapiens
ccatgcgcaatcctggctcagctggccaaagactcagatatatatcatgtaataatactttatctataaacatacaaaataggcaatttcactaaaaaaaatgcaaggcttaggtatttttattcccacaagatattcttcagacttttgtcttctactatgttatgagaatgtacgaaggcttgctctgttgtatatcttttagaaactacagaaaatccaatttccagttccctgcatgaraaataaaaaattcaccactgtcaaattttcttgacatataaaaaggtgacctcaaagggggaaaaatagtgaccaattgtatacatagtctttccaggataaaaccttttttatccatctttcctaaaatgggagtggttaatactgtacttggacctttgaaacaattcaaagaggaaaatttcactgataaaagtgttagaaatacatgaaggtaataactggcctttacttaatgtggtattatatagaaaaagaaaagactacattgaaaatcccttccaatgctttcacttactgccttagaaaaataattattaattaaattataacctggcaaaaagtagggagtctc

SEQ ID NO: 893601 - DNA, 561 bp, Homo sapiens
ttccctctgagaggattcattcttttcattctttgcttctgaatggtcgctggatagactgggaacagataatgttaatccagtcagggtctgatgaacttcagtcgcggtgatggctggtctatttctgattcacctctacctctgggatgtagtcctttagggttttatcctaaattcttagttgtttacaagaacactttggctgtggaaagtgcaaattgatattttgttcctcccgcctgcgtgtaaccacttaggttttaagtcatctgcttttgtacttggcacttgcttcaaagggtcaaggaacatcagatgctgggctcaattctcttggcttctctcttctcccasgtcttggcctatagatttttatcttggtagacctttgatgttttcaaacaaattattgtaaatattgtatacagctttcctagttctttgctggcttgaaacaatttacagtggcattgctgtgagcagaactttcctagggtgttatattttaagtcagaagtcattgatttaagttacagttcttctgcttgcctgcagaag

SEQ ID NO: 893602 - DNA, 611 bp, Homo sapiens
gacagagtaatgagcactctcatcagctaataaagcatccaaaactagaattcttacagctattgtattctagttcaagagtcttcaatcagaaaaaaattgaaaatggccccaatagtccttgaaaattgttacatttttactgtagttccaaactatgaaactgtttgactgcagtttcaaactcaattcctatggttatgagatttctaacctcgcccttctccctacagcccctttccccaccatctgtttctggctactttctagtttttcttccagttgtcccctgtggcaactgtactagttttgcttgtttttctatttatggtttaaaaaaaaaaagttttatttctcagtctttcctctcatttactcttctgctacttattttattcctcctggaaaaatgacaaatttgtatcaagttttctttccaaagttgtgtcttctctgctgcttcccyggttgctggcttcttgaaacttcagcaagaatgcattatgtaaaaccatttgatgttcactgtgacatttcaggactgaatacattattcacgctatggtgataaaaattcaatgaaaagtttgcagttttataagtcatatggt

SEQ ID NO: 893603 - DNA, 630 bp, Homo sapiens
ttaataatctaagatcatatttgaaattctagttcaaaatgatgatatgtattttgagtagccataaaataggcttgtgtccaagtcctaaaaataaaattgcacagcacacctaatcaaattagacaacgatggaagatgaacatgtgtttgttctgagtgtactctacgtgtactctgtcattactctgcattgtgttttgacttttcaaagtatttgtttatagcatacagtggacaactgtcattctttttcaacaatgccatctgaatctcttttccatgttgagggttgtattagtgaaggttctccaraaaaaaggagatatatttatattaagagacttattatgaggaattggcttacttgactatggaggctgagaagtcctacaatctgctgtctgcaactagagacccaggaaatctggtggtgtaattccagtccaagggcaagaaaagactaatggcccagcttagcaagcaagcaggaggcaaaagcgggtgaattcttctttcttctgcctttttgttctattcaggccctcgatggcttgacaatgcccacccacactgggaaggggaaatgacttactgaggccaccaattcaaatgcttatctcattcaga

SEQ ID NO: 893604 - DNA, 584 bp, Homo sapiens
taaaggtgcttctgccaggtgcggtggctcacacctgtaatccctgcactttgggaggctgaggcaggtggatcacttgaggccaggagttcaagacctgcctggccaacatggtgaaacctgatctctactaaaaatacaaaaattagcctggtatggtggcatgtgcctgtaatcccagctacttgggaggctgaggtgagagaatcacttgaacccaggaggcagaggttacartgagccaagattgtggcactgcactccagccagggcgacagagcgagacctgtctcaaaaaaagaaaaaaagaaaagaaaagaaaaaaaaaaaaactgtatcctaacagcatactggggactctccagactagaggattcaaaaagaccctaagagaactaagtcagttatagaaataatatgggttagataccaaattccttttcattgttgtttcatagtcttccaaagctattaaagagcaacagatttacctctaacttctgttataaaccaattcaggtgctaattattatagcctttcttggctgtaaaaaaaatacctagcatacctgtgatgattctca

SEQ ID NO: 893605 - DNA, 621 bp, Homo sapiens
aagcattataccatttttaaaccatcaaaatctgtggtggttgaaaacaaacagagttgttatttgccatgattgtcataaaaaattatcactatgggaaaaaaaaatggtattgcgagctttctattttgctatactttgggtcaaatgtacgtctctgagaagaactgaatacgtagcatctctctcctttgtggagcctcttaacttctgaaaagaacatggcctttttaaggttatctcagggccctgaggacctcatcatatctaggaaggaaggctctgggctctctggactgtaaagacctgtgtgtaacaatttargctttcatttttgggggcatttgttccctcattaacatttctgtggatccttagaaaattgcgtaaaattgcacatttaaagattcaagaattagtcaggaaaatgtggcataataggaaaaagtgtagcaggttttagaatcaatgatatgctatatttttagtttaatcacttgtagctttatgatcttttaataggatgcttaagcatcctgagttttatcttcctcatctctaaaatggcaaaagtagtaataccagattcaaggtcctaagacagtgcctaccacagtgatt

SEQ ID NO: 893606 - DNA, 506 bp, Homo sapiens
gggatagtcccaaaattacctttactgcgatttttacaacgaagggaaacagtattgtatagtaattaagagcatgggttttgaagtcagatagttcttggtttgactccacttaacacctgagtgactttgggacagttaacgtctcaactcctcagttgtttcatccatcaaatggggataatatgaacgccatagaattatcctaaaagtgaaataagatgaagcatgtgaggcctttggcaggtttcctgacacatggtaagtgctaagtatctgagttaccgatgactggggctgaataaaggtcatccactttctaagcattagtgcttgaaagacagrcaatgtttaatgtattctcataaataggaatgctttgcttctgaaacacttgtctaggatagactgctgatgggtttgtaattggagttatagtaggcctttatctctatagatttatggagaaataaatttctgtctagaattaaagttcttaatttgtg

SEQ ID NO: 893607 - DNA, 606 bp, Homo sapiens
cacgtaaaaatgtctagcatggtcttatttgctttgaacagacccgtatcccaaccagtttgtacagcggtggtctggattggaggtgaagttatgttcaagtgcaaagaggaagttgctttcacttggatacaacaaaaggyctataggcctataggtaaatatggaactaaatatttagaaaaggaactttcaaaacctcttcattcattcataattaaattgcacttcaaaatttctcataggctgaaatgaaatactccaaatagttaacatagattaatttgagtaatacgatggctggcatttttccatcactctacttttctacatttcctacattttcgtacccagaatacatacatttaaatttttttaattaaatgagaattttgttatgaagaggtcaaatttattttaccactaatgcacaggaaactaagaagggactctcatatttggttaaataaataggatattatcttattctatctgtttttaactctcaaggttcacgttctttaatgtagtgtccattttgtgagtagaaataatatctaaaacttcctgcttttttaaaactcatttttttgtcttctagttgta

SEQ ID NO: 893608 - DNA, 648 bp, Homo sapiens
acaaacatataaccaaaaacagctgcattgaaacaggtaagaagagcagtttcactttatccacatcagtcctgttccccagctagcacagttcaaagcctgagagagctcctcatcacgtgatttctccctcaggacccagagggaatgaagctcgcatcccaagtgccccgccgttaggggagcttcctgagatacctgtttctctcacttccctcaaagcattgagaggacttagaatgatagggtaagaacaaaaatgattaaatcagcaatcaaaaacctcccaagaaaaacaaccacagaaaaaaaaaaaaaggggggcccacgatcagatgccttcatggatgaattctactaaatacttaaagaataattaataccaattatatgatttggcgctgtgtccccacccaaatctcatcttgaatggtaataatccccatgagtcaaggggtggggccagatggagataatkgaatcagggggacagtttcctccatagggttctcatgatcgtgaataagtctgagggtctataaatgggagtcccctgcacaagctctctggcctgccaccatgtaagatgtgcctttctcccccttgtcttccaccatgattatgaggcctccccagccatgtgaaact

SEQ ID NO: 893609 - DNA, 639 bp, Homo sapiens
aatttaatataatatataagctattatttattttctcttctgtctcaaatatggactttaattatattccaatatttcagaacattttaatctatgttttgagacatttgtgacttacgtgatattatgactattattctttacacttctagtgaatttttaatgtcattcaaaggctacatccttctatactctactgagaattaaaaatagttctcaaaaatattattctcagatattcagaactcattctcagaatttcaacttccaccartatcttaactctgttctctttcccttctaatgcatattttccccctgaaggcccactgttacactccttattcaccctccatttaagattcggttttatttaatgttgtatgtattcgtacacaattttatttatgtgaggcttagtcttagaatagaagatcatcctaaaaagactagtgaaagagttatgagaatttcaagagtgaatccagaaatcacgtgccagaagaattacttcaggcaagacagaattgctaaaaaaaaaaaaaaaaaaaggagtagtcatcagatctgccacattttcaagttttgtaatggaaaatggcaggtattctggagggagtttctggaggaagccaaact

SEQ ID NO: 893610 - DNA, 639 bp, Homo sapiens
aatttaatataatatataagctattatttattttctcttctgtctcaaatatggactttaattatattccaatatttcagaacattttaatctatgttttgagacatttgtgacttacgtgatattatgactattattctttacacttctagtgaatttttaatgtcattcaaaggctacatccttctatactctactgagaattaaaaatagttctcaaaaatattattctcagatattcagaactcattctcagaatttcaacttccaccagtatcttaactctgttctctttcccttctaatgcatattttccccctgaaggcccactgttacactccttattcaccctccatttaagattcggttttatttaatgttgtatgtattcgtacacarttttatttatgtgaggcttagtcttagaatagaagatcatcctaaaaagactagtgaaagagttatgagaatttcaagagtgaatccagaaatcacgtgccagaagaattacttcaggcaagacagaattgctaaaaaaaaaaaaaaaaaaaggagtagtcatcagatctgccacattttcaagttttgtaatggaaaatggcaggtattctggagggagtttctggaggaagccaaact

SEQ ID NO: 893611 - DNA, 703 bp, Homo sapiens
aaggcagaagagagacagtttattatagtctacatggtatagagtgaaggaataagagaacatttctgataagtgttttcaaaatttggagaatcattcctatctaaatcattcatttaagggactaaaatacaagtatgatgtttcttgccatctaaccctcagctagccaggctctaaaaaggacaacactggacacctcgacagtggtaaaaagcagggtttactcactcttgaatactaagaaatggtgctaaccttaggcagcagcttatctatttggttgaggttcagctttgtttcattgaacaaatctcttgggttattttcagttgtgccagtcatttaatttgttttctgaatcaaatgataagaataaatatggttttgagtgtaaacagcattcccagatatatcttacaacttggtgtgccatctgcctaattttgaacctataggatgggaataaatgcattgtgaaaaacaccaggtgatttccttaaagccaaatactcttgtccctcctacttttctyccggctttcctgctgcatgggacatggcaataaatgggagtttcctgcacacagaggtaaaattcactggttgaagatgtcagttttcttcttgaccaactcctatattggtacaaacatgtgagagaaatgcatcttctgaatcatttcaaatttgtggtctttgtt

SEQ ID NO: 893612 - DNA, 603 bp, Homo sapiens
tgagctgggacatacatcttcttctgcccgacatacatgctttggttcatgggctttaggacccatattgggacttacaccattggccttccaattctcaggtcttttacctcagactgcattataccaccatctttcctggttctccatattgcagatggcaggtgctggcactttttggccgcataactttattagcatatatatatatgtgctaaatatatatataattaaatatagaattactatatgacctagcaattccacttctggatatttattcaaaagaatcaaaatcaggatctcaaagagatactagcattcccatattcatttcagtactatttacattagccaagaagtagaaacaacctaaacgctcatggaaagatgaatgaataaaactgagatatatgcatacaatggttattatttagccttagaagaaaattctgcaaaatgcaacarcattgaatgaactttcaatgaaccttgaagacattatgctgaataaaataagctagtcacagaaggacaaatgctgcatgagttcacttaaaggaaatacctaaagcagtcaaacttagaatcacagagtagaat

SEQ ID NO: 893613 - DNA, 647 bp, Homo sapiens
tgcattcaaaagccaggagagctgacaactccagggcaaagtgtttggtgtcacggtgaacagcaaggttgaatagatgcgttcaaggaggctgttgacatccctctagcttctgatctccacgctgacaaacctacaatgtgtccctaatcttgtgacctacaggttgaaaggaaggcgtactccttcatttggacaaagctaatcttcctatctgggcttccaacccagcctccctctctttctgcttagcctttactcatgcttcagctcttgttgatctctaaactgctcactctcctctggctctttttcttcaacctatgtgaatggccagtgctttcctatcattagaaacaactccttacattgtaaatgcycctgtagccaaagtacacctctccttccctctgcaggcaaactaattataaaagcatgcacactttctatccatacccccatcctttctcaagatacctatcagtggaaattcaatcctgaacaactagtgcctttttgcataaaatgttagttgttttcatttttcatagagttgtatggattgtagaggtttgtgatctgcactcgttatgttgctttttaaaacgatttctaaaaatcttgttacagtaatacctaacacttgt

SEQ ID NO: 893614 - DNA, 671 bp, Homo sapiens
atattgttaaaatgtccatactacctaaggcaatttacagatttagtgcaatccctatcaaaatgttaatgatatttttcacagaaatagagaaaaaaatcctaaaatttatatagtaccacataagaccaagaagagccaaaaatatcctgagcaaaagaacaaaattggaggaattacattacctgaatttaaattatactatgacattataataaccaaaacagcatggtactggcacaaaactggacacatagaccaatgaaacagaatagagaacacagaaacaaatccatacatctacaataaactaatttttttaagttttatttttttgcagacagagtctcactctgttgcccaggttggagtgcagtggtgcaatctcggctcattgcaacctgcacccactgggtgcaagctattctcctgcctcagcttccagagtagctgggattacaggatgcaccaacatatccagtgattttttttttttttkgtatttttagtagaaatgagttttcaccatgttggccaggctggtctcgaactcctggcctcaagtgatccacctgcctcagcctcccaaactgctgggattacaggtttgagccactgtgcctggccatatctttgacttttgatggtttaatataatgtgtctcagtgta

SEQ ID NO: 893615 - DNA, 548 bp, Homo sapiens
actctgcacagctctaggtgaggggtgcggctctgttgctgcccctgctgtggggcctccatctagggccctaaaagtctgagtgcctcctactgggtggaaggtgtgggccatccatcccatcagaacctcatgtagattggtggagaacaaaagcacaaacaaaagactttttttgtgtgtgttccatcaatgtgctgcagttccttatgggtctcagtaaaaactgttatcaacgcagtaactttctaggttttttgtgccccgttttctctcttcctctgtattaccagtttttcaaactctgccctcactggatttctgtgcggtacagagtaggtttcaattcccctaaaccgctttgctccctccctgggttcaatgtcaygctcctccattgtcacaggacaggctaggctattggataactgatttgtgttctgttctcaaagctgtagaagaatggaaggaatgagaaacattttccctgccccatccccaaaaatgtggcaggccctgcaaatcctcaattcttagcttcttgcctc

SEQ ID NO: 893616 - DNA, 659 bp, Homo sapiens
gtttgggaggccagggtgggtggatcacctgaggtcaggagtttgagaccagcctgaccaacatggtgaaaccccgtctctactaaaagtgcaaaaattagccaggtgttgtggtgcacacctgtaatcccagctactcgggaggctgagacaggagaatcgcctgaacctgggaggtggaggttgcagtgagccgagatcacrccattgtaatccagcctgggcaatacgagcaaaactccatctcggaaaaaaaaaaaaaaaaaattgcacatcaatgtcctctccctcaaaaaatcatttccctcccaagtatcagtcaagtctcagtgctaaatatctgcccattttggcagcatttgatgcagtcgatcatggcttcttttgaaacacattcttcatttgggttctaggatgccacctctctttttcctttttaccttaatggaaactcattctcattgcttcttgcaatgagaatcccttgtttctcatatttaaatgttggatttcagaccctttctcttctctatctataatttcttcttaggtaatttttttccaactttagctttaaatccatctgtattctgatgactgccaaatttttgtttccagtcccaatctatcccctaagctctgtacttacatagtaatca

SEQ ID NO: 893617 - DNA, 611 bp, Homo sapiens
ttatttttttatgtttatttttgagacagggtctcattctgtcacccatgatggagtgcagtggcccagtcctagctcaccgcagcttctgactcctgggctcaagtgatcctcctgcctcaaccttctgagtagtcaggaacacaggggtgttagtttttaattttttgtagagatggggtctcactatgttgcctagactggtcttgaactcctggccccgagcaatcctcctgccttagcctcccaaatagctggaattacaagtgtaagccatgccacccggcttcattccattttttaaacaattatatctccccattgagaatgtgaaaaatgagatatgtggcagggctagggaaacaaagggttaagtaccttcttcttcaacagtgtkctctggggatgagaagaaccctggtcaataaacagatatattgacttgttattatttaaagttgtttaaccaggtagagataaacgaaagctttcagcagctgaactatcacacaaatcacaattaaggtggcatatgtgtttggaagacgtaaaatcaattcccgtgaagataatgttttagtctctatttgaacttgaaaacagaagtaaat

SEQ ID NO: 893618 - DNA, 648 bp, Homo sapiens
ttattttctattcctagtagctgatttgtgtgtatgtgtgtttattagtccgttttcatgctgctgataaagacataggaacaaaaagaggtttaattggacttaacagttccacatggctggggaagcctcagaatcatggcaagaggcaaaaggtatttcttacatggtggcagcaagagaaaatgaggaagaagcaaaagtggaaagccctgataaacccatcagatcttgtgagacttaatatcactatcaaamtaatagcacaggaaagactgggccccatgattcaattacctcaccctgggtctttcccagaacatacgggaattctgggagatacaattcaagatgagattgggtggggacaaagccaaataatattactctgcccctggcccctccaaatctcatgtcctcacatttcaaaaccaatcatgccttcccaacagtcccccaaagtcttaactcatttcaacattaacccaaaagtccacagtccaaagtctcatctgagacaagacaagtcccttccacctatgagcctgtaaaatcaaaagcaagctagttacttcctagatacgatgggggtacagatactgggtaaatatagtcattccaaaagggagaaattggccaaaacaaagg

SEQ ID NO: 893619 - DNA, 621 bp, Homo sapiens
tagaggatatactaataaaatctgtgaatgacctaaagctacaaggggtaataaataccagtatagtagtaatactttttaaaaaatagctaacagctaacatactacagcacttaccacatgcttggcacttttcttaaacacatcacgtgttggcatttaatttttgtagcagcccaatgaggtacttcacattgttattctcatcttacagatgaggaaactgagataaccagttgcagaactaagattcaacctcaggccatctggctccagaacctatactcgtaaccccttgctatgaaataaacatgatacaaagctatttcaatagactggagttatgggtaggacatgagatgaaactgaataggaatatgtgggaactactgtttctagaatcagaaggcattgagacaggatgggggatgagatttgtcagcwacatatctgaaacacccagaggagtttggttgtctacacctcagcctgaatccacagggtggcaaggcgggccagtccacagcctgaactccaggctccatgcttctatctgtttatttattgtttcgtttttctttttagttgccatacaattgtatatgtttatgagatacagag

SEQ ID NO: 893620 - DNA, 636 bp, Homo sapiens
gtattactgtaacaagatttttagaaatcgttttaaaaagcaacataacgagtgcagatcacaaacctctacaatccatacaactctatgaaaaatgaaaacaactaacattttatgcaaaaaggcactagttgttcaggattgaatttccactgataggtatcttgagaaaggatgggggtatggatagaaagtgtgcatgcttttataattagtttgcctgcagagggaaggagaggtgtactttggctacaggrgcatttacaatgtaaggagttgtttctaatgataggaaagcactggccattcacataggttgaagaaaaagagccagaggagagtgagcagtttagagatcaacaagagctgaagcatgagtaaaggctaagcagaaagagagggaggctgggttggaagcccagataggaagattagctttgtccaaatgaaggagtacgccttcctttcaacctgtaggtcacaagattagggacacactgtaggtttgtcagcgtggagatcagaagctagagggatgtcaacagcctccttgaacgcatctattcaaccttgctgttcaccgtgacaccaaacactttgccctggagttgtcagctctcctggcttttgaatgca

SEQ ID NO: 893621 - DNA, 558 bp, Homo sapiens
tttacagaggtaatcaagttaaaacgaagttactcgtgtggacactgatatattatggcttatatccttattaaaaggaacaacttggacacagatgcatctaggaagagggccatgtgaagatgaaggcagagatcagggtaatatatttacaagtcaagcaatgccagtgattaccagcaaaccatcagcatctaggggaaagacgtggaatggattctccctcagactcttgaaaggaaccaaccctgctgattccttgatctcagacatctagcctccagagaagtgaggagataaatttctgttatttaaatcacacagttttgagtatttcagtattaatatgaatttatcacttttcttctgttayggttagggcttttcttgtcctggcaaagctttgtctttctcaatattactaagatttactcttaaactttcttgtagatcaatattatttttgaatgttatgtagccatattccatacatttttcctgcttacttggtttcatgtttgaatgtttaatgcctgaggaagctcttgtttcttgtat

SEQ ID NO: 893622 - DNA, 545 bp, Homo sapiens
ctctgaggcaagaagctaagaattgaggatttgcagggcctgccacatttttggggatggggcagggaaaatgtttctcattccttccattcttctacagctttgagaacagaacacaaatcagttatccaatagcctagcctgtcctgtgacaatggaggagcrtgacattgaacccagggagggagcaaagcggtttaggggaattgaaacctactctgtaccgcacagaaatccagtgagggcagagtttgaaaaactggtaatacagaggaagagagaaaacggggcacaaaaaacctagaaagttactgcgttgataacagtttttactgagacccataaggaactgcagcacattgatggaacacacacaaaaaaagtcttttgtttgtgcttttgttctccaccaatctacatgaggttctgatgggatggatggcccacaccttccacccagtaggaggcactcagacttttagggccctagatggaggccccacagcaggggcagcaacagagccgcacccctcacctagagctgt

SEQ ID NO: 893623 - DNA, 615 bp, Homo sapiens
aaatcttcggcaaagaaaagccaggcttctgtgacttcggaagtgaattctaccaaatatttaaaaacaaaacatgtcaatacttcacaaactcttccaaaatatagaaaaagtcaaacaatttctcaacttatttcatgagtytagggtcatccaatattaaagcccaaaaacataaggaataaaaatacagattactatatctcataaacatagatgcaaaactctttaataaaacattagtaagctgaatccaacaatatttaaagcagatcatacacccatgctaagtgggacttattgcaaaaatgatagcttgacttagtatctaaaaatcaattaatgaaatatagtatataataaattttttaaagccacatgatcatctcaaaagacaaagaaaaacatttttaaaaatttagcacacattcatgatttaaaatgaacaataaaaatttctcaaccaagaggattaggttcaatcctacaaaaggtaccttagaaaaatccacaagtaacatcatacaacaatgatgaaagactaaatgttttcccccatgatcaagaaagaggcatgaatgtctaattttgacacttcttttcaacactgtatta

SEQ ID NO: 893624 - DNA, 630 bp, Homo sapiens
tccagattacaatttttgataaccagctcaaatttccttgctaccttggacattaatgatcatagatttaaaactatgaataactacaatgagaatgctcgtacgatctctgtacaatctgtatatggttatctaattttttttttttgagatagtgtctcgctctgtcacccaggttggggtacagtggcccatttttggctcactgcaaccttcgcctcccagattcaagtgagtctcctgcctcggcctcccaagtagctgggactacaggtatccgccaccacgcccagctaatttttgtattttttagtagagaccgggtttcaccatgttgctcargctggtcttgaacttgtgacctcaaatgatccacccacctcagcctcccaaagtgctgggattacaggtgtgaaccaccatgcctggccatggttattattctgaataatgaattacctcaaaattaattaacatttattaccacatatgctttctaagagtcaggaatcagagagcaacttagctgggtggttctggtacaggtctctcctgaggtagcagtcaagctgtatgctggggctatcatctgaagcatgaatagagatggaagatctgcttccaaaggct

SEQ ID NO: 893625 - DNA, 607 bp, Homo sapiens
gaagggattgaggtcctattgttagcctcctgaaacaaaacaattatcggccaagaattttgtatccagtgaaacaaagttttataaatgaaagatacagtcttttccagacaaacaaatgatgacagaatttgccactaccaagccagcactacaagaactgctaaaaggagctcaaatcttgaaacagatccttgaaatatgccaaaacagaacctccttaaagcatcaatttcacaggatctgtatatcaataatacagtgagaaaaacacaaggtattcaggcaacagatagcatgatgaatagaatagtgcctcaaatctcartactaacgttgaatatgaatgacctaaattctctacttaaaagacatcgaatggcagagtggatgggaattcaccaatcaagtttctgctgtcttcaggagaccctgctagagtgcttttctggcagccgccattggggggttcccaatttgcttctagcaaattgggaacaccttggcacctcaagcatagcaggtgcttgaccttgaggggccaaaaacaaagctgcagacctggtcccagcaccccatagttggagcatgaagctcaggagtgctg

SEQ ID NO: 893626 - DNA, 513 bp, Homo sapiens
ttaggaaaatgcaggcatgaaaatgagtgtcttatcttctcagaacacctgctagttgtgctggctatgatagactcttggctcaaacctcatctatacatctttgagatgagaactgatctcatactattttttaaccacatttgacagagtcatagacagtgaactgtaatatgaagtgtaataaagaattcagagttattccttttaaaaaaattatcttgttgacaacatgtagtattttccagctattacattgatattttgaatgggcacaagagatataaagacctaagcttagaatgcatttatttattttttgtttatttatttatttttgrgacagggtcttgctctgtcacccaggctggtgtacagtggtgcaatcacaactcactgcagcctcaaacccctggcctcaagcaatgccccaccttagcctttcaagtatttgggactacaggcacacaccaccacactcagttattttcttttgtaaaggtggggtcccac

SEQ ID NO: 893627 - DNA, 714 bp, Homo sapiens
ttggtgctatttttatgacagtgagtgagttctcgttaagtctggttatttgaaagtgtatggcacctaccccccaacacaccgtgtcctgctctttccatgtaacataactgttcctgctttgctttctgccatgagtaaaagctccctgaggccttcccagatgctgatgctgccatgcttcctgcatagcctgtggaaccctgagccaattaagccttttttttgtttataaattaccaagtcttaggtatttcttcatagtagtgcaagaacagactaatacaccaggatcacgtcatggcccaagagagctgctaaaactttaactatcagagctgtattcctggtaacagggaagaatgagagggaaaggcaaaaggagtgcctcaggtgtctgtctccattttaaggcgcttttctagaagtcctgtctatcaattttcacttacctattttatgacttcttcatgtttataatgctagcagctggaatagtttctagtacaatgaatggrtggatggaaatgagtgaatattagacttaaacttattgtaaggctgaggcttgcttaagacaacttctctattaaaaatatgttaggtttctagactttctgtatatgctttattttaaatttatctaccagatcgctctctctgtctctgtacctgtgtcatttgatgttctctttgcctgagatatgcttctac

SEQ ID NO: 893628 - DNA, 500 bp, Homo sapiens
cagagcgaatgctttcaacttttcccttttcagtattatattggctgtgggtttgtcatagatggcttttattactttgaggtatgttccttgtatgctgatgttgctgagagttttagacacaaaggggtgctagattttgttgaatcatttttttctgcatctattgagatgattgtgtgatttttgtttttaattctgtttatgtggtgtatcacatttattgatgtgtatatgttaaatggtccctgcatccytggtatgaaacccacttgattattatggattatctttttgatatgttgttggattcagttagctagtattttgttaaggattttagcatctatgttcatcagggatattgatctgtacttttcttttttggttgtgtcatttcctggttttggcattagggtaaggctggcttcacagaatgaattagggagggttccttttttctctgtcttgtggaagtgtgtcagaaggattgctaccaa

SEQ ID NO: 893629 - DNA, 575 bp, Homo sapiens
aacttagaactatatatatacacacacacacacacacacatatgtatactaatagttcatatatgtgtgtgtgtgtatatatacacatacgtgtgtgtgtgtatatatatgtgtatatatgtgtatatatgtgtatatatatgtatatatgtgtatatgtatatgtatacgtatatatatgtatatatatgtatatatgtatatgtatacgtatatatatgtatatgtatatacatatatatayatatatatatatatatatatatatatatatatagtattagtctgtttgcatgctgctatgaagaaatacccgaggctgagtaatttgtaaaggaaagaggtttaattgactcaaggttccacagggctggggaggcctcaggaaatttacaatcatgatggaaagaacctcttcacagtaaagcatgagagagaatgagagtgctgagcaaaggggaaagctccttataaaacattcagatctcatgagaactccctcactaccacaataacaacatgggggggaagctgctcctatgattcaattatctccacctggtcctgcccttggt

SEQ ID NO: 893630 - DNA, 575 bp, Homo sapiens
aacttagaactatatatatacacacacacacacacacacatatgtatactaatagttcatatatgtgtgtgtgtgtatatatacacatacgtgtgtgtgtgtatatatatgtgtatatatgtgtatatatgtgtatatatatgtatatatgtgtatatgtatatgtatacgtatatatatgtatatatatgtatatatgtatatgtatacgtatatatatgtatatgtatatacatatatatacatatatatatatatatatatatatatatatatagtattagtctgtttgcatgctgctatgaaraaatacccgaggctgagtaatttgtaaaggaaagaggtttaattgactcaaggttccacagggctggggaggcctcaggaaatttacaatcatgatggaaagaacctcttcacagtaaagcatgagagagaatgagagtgctgagcaaaggggaaagctccttataaaacattcagatctcatgagaactccctcactaccacaataacaacatgggggggaagctgctcctatgattcaattatctccacctggtcctgcccttggt

SEQ ID NO: 893631 - DNA, 599 bp, Homo sapiens
ggattgataacattcccaattacttaatattttcaaaattatttttttatttttcaattgttattttcatagtttctttttatatttctttagatttaagattttaatacatgcacctaagtttaaatattaccatttaatccctgcttagttgcattgctcaaatttcaatttgtagatgttattcattattcaacaataattgcaacaacaacaaaaaacaactctactttcctataggacaaaaagagagaagagtttctatatttatgatagtgttactttttccccctttcacctttgcatgattttgacattttactgaggcttccttaatcctcactgtgtcactgtgggctgcattaagctctgtgtgctggctttatgcttatttaaaaaggtgattgaaatacactatcatctagggtcaggccttctctaattaggcagaaacatctggtctycctcaagtgtctatgttaaatggtttattattaattttgtatgttaatgatttggaaccctttaattttatgaagccaggaggattattatttttgccaatgacccacattacatgaaaaaaagctataaattat

SEQ ID NO: 893632 - DNA, 558 bp, Homo sapiens
atgttagcaaagtatgtgttttatatagtgttttctgtataaaaaactataatttctatttactaagttgaatctatatggaatagtccataaaataaaccttacataccaactagttggatgtagtagtgaaaatcattcatggatatttcactctagtttgatatataaatctcttggattttcaacatagagtggggaagaaatcctaattacagttctcttcccattttaatttctcctctttttttttttttttttttttttttggctgtttttctcaactgtcagtggaattattgtcttcctgtctccatatttaggtagtgtcagtggctgagtatcaccgcaggatcgatgctctaaatactgaaraactgcgcacactctgcagacgcctccaggtgcccccttcagtagtttaaacccctccagagactaaatactccctgtttttagtgttctttgtcatggcaaatctcatttgaagaatttgctttgactgcagcactaaaattaaattcctttttgtattaaaggttatagtattgccgtgaa

SEQ ID NO: 893633 - DNA, 623 bp, Homo sapiens
tattagcctgaaattattataattttcatgttgcctcccaagaccataagcggatttttttttgtcttgtgcatagggtccaattccaactgcccaccatgtatggaacttttggcctcaagtatcatgcctatgargcataaagccccagttcttgggtatataccagacatgctattcctaaaagtagccctgcttcgccttctacttacagtgaggattctctctgttttcaacatttaaggatttcatttttgtcccttttaacttattattacaattatatatatatatatattttatttctaagtgtttggagtgagagtgcagagttcttgcatcagcttagtctaccatttagatcagaatcttggattcactataccttggtcccaattccaaatatcaggaggggagaatgattggctcagattatatctgaccactcttggatgaatcaattatagtggtgcaacattatgtaatagaaacatgtctgttaggggccacctatgtgtgtgaaagggcatcctacattacaaggttgctaggcagatactcctataaatatttaccatagaaatcctaagaaatatttttactcattttttattctctgctta

SEQ ID NO: 893634 - DNA, 648 bp, Homo sapiens
ctactatcttgctaactatcattcatttaacatgtatgttaagtgctttctccgggcttatcacaaagaggaaaaggttgtttagacaaatgttgccctcaaaaagctgccagtccactttctgaggcaagactgagatcctggggccaatgaagagatcatacaaaacagagttgacaaataagatcttgagggagaggttcatagaaggaaaaaatcaatgtgcaccaaggaggctggaggtgcatgcactgttttatgagtgtgctcaataaacagactggatgaataaatgatttaattaacacctagggatgagatgagatttcatctgggctttaattatgacttgccccaacacctctagtccttccattgtcataggaaggkagtgaaggctcattctgaccccagtgggcttctcccctgcatagctccctcctgccaccactccccagagggctgggtttgcattcctagagaaaagaccttcagctgggaaccctaattctttcgcaggtggcacggtgccttccagctccccacgtgactgtctcctaagatcctccctaaaagctgacgatgtttaagttatggaaattaaggagcaggcacattcctcaattcccggcatggcacaatggccat

SEQ ID NO: 893635 - DNA, 648 bp, Homo sapiens
ctactatcttgctaactatcattcatttaacatgtatgttaagtgctttctccgggcttatcacaaagaggaaaaggttgtttagacaaatgttgccctcaaaaagctgccagtccactttctgaggcaagactgagatcctggggccaatgaagagatcatacaaaacagagttgacaaataagatcttgagggagaggttcatagaaggaaaaaatcaatgtgcaccaaggaggctggaggtgcatgcactgttttatgagtgtgctcaataaacagactggatgaataaatgatttaattaacacctagggatgagatgagatttcatctgggctttaattatgacttgccccaacacctctagtccttccattgtcataggaagggwgtgaaggctcattctgaccccagtgggcttctcccctgcatagctccctcctgccaccactccccagagggctgggtttgcattcctagagaaaagaccttcagctgggaaccctaattctttcgcaggtggcacggtgccttccagctccccacgtgactgtctcctaagatcctccctaaaagctgacgatgtttaagttatggaaattaaggagcaggcacattcctcaattcccggcatggcacaatggccat

SEQ ID NO: 893636 - DNA, 652 bp, Homo sapiens
ctcttccagaaacactcttacagacaccctcagaaatgttttaccagccacctgggcatcccctagctcagtcaagttaacccatgaaattaaccatcacagctccctcctcccttcccctcagtgccgctgcctgcatgggctgggtctttgtgctgtgaccatccttctatcaccaggggggatgttggccctgtagttgctgcctacatgtgcaatgacctcagacccccagctctgcccctacattgtattctcagagccagacttcctccccatcccaggagaagtgggtctgagctttctctcccgattcactaccctgctgatgctccacatgccccacatggaacttctaacctgtgtcccacttgctgcaacagargacccctgggctcccatcctgccctggctgaagccagagtctaatcagcctttctgtacagggtaggaaccagctgccccagacccatttgagtgaagctttaatcctaccctgtggccctcagagagtttgctttactaggagctcctctaaattcctctatggcccatttgggtactctgcccttcagaaaaggaaggcccatgtttaacatttcacttttctgaatgttaaacagaatgtgagagagccttgtccatttgggct

SEQ ID NO: 893637 - DNA, 602 bp, Homo sapiens
cctggaaaaggcattctgattgggatgacaaggatgcagagtctagagctgacagcagggtgtgattgctgaaacacaagaaagagagaagaactttgcccccttctcccagtgccagcagcccagaggtagcaggatcctgttgaaggtaggaaaagtttcaatactaaagaaaatgaagaattgtgattattgctgaatgttccacagttctgatggaagactgtgtttacaacttaaaatgccagtaggccaggcagggtgattcacgcctgtaatcccagcactttgggaggctgaggcgggcagatcatgaggtcaggagatcgagaccaacctggctaacacggtgaaaccgygtcactactaaaaatacaaaaattagcctggcgtggtggtgggcaccggtggtgccagctacttgggaggctgtgaggcaggagaatcgcttgaacctgggaggcagaggttgcattgagccgagatcgctccactatactccagtctgggtgacagagtgagacaccatcacaaaaacaaaaaaacaaaaaagtgccggtaggattttctatatatttatttattttttgagacgagtctcc

SEQ ID NO: 893638 - DNA, 631 bp, Homo sapiens
ctctctctgtgccttaatttctcccacatattaaagttcagataaaaatatctgggccacctagttcaaaaaggtcattattagtctcaactgaaataatgataggaaagcacagcagtgaattaaccagcagcacagagataacagggtattattattagggactggtattcataagtctctccaccatcctggtacacccacagtcccttgccacggaccatgtacactcaattgaaatgagacaccagatagcaaaggatgcttatttkggtccacaaaaatactggtagaattaattcacttccaagagagaatttaaaactgacttgttcatatttgaccaggaaattcaacctgaattcctttatttttttaatagaaagctccccctctactccacccaatgcttgcttaatgcactctacaacatctccatcaagagtctcccagactccacttaaaacctctagtcaaaggaaactcagctgtaaagcagcctgttttccattttggacagctctgactctgagaaagctcttgcttatcttccctaacccccagactaggtcggtttccctagttgccagcttctcatagcactctatccttttccttcagaggatgtatt

SEQ ID NO: 893639 - DNA, 631 bp, Homo sapiens
ctctctctgtgccttaatttctcccacatattaaagttcagataaaaatatctgggccacctagttcaaaaaggtcattattagtctcaactgaaataatgataggaaagcacagcagtgaattaaccagcagcacagagataacagggtattattattagggactggtattcataagtctctccaccatcctggtacacccacagtcccttgccacggaccatgtacactcaattgaaatgagacaccagatagcaaaggatgcttatttgggtccacaaaaatactggtagaattaattcacttccaagagagaatttaaaactgacttgttcatatttgaccaggaaattcaacctgaattcctttattttyttaatagaaagctccccctctactccacccaatgcttgcttaatgcactctacaacatctccatcaagagtctcccagactccacttaaaacctctagtcaaaggaaactcagctgtaaagcagcctgttttccattttggacagctctgactctgagaaagctcttgcttatcttccctaacccccagactaggtcggtttccctagttgccagcttctcatagcactctatccttttccttcagaggatgtatt

SEQ ID NO: 893640 - DNA, 631 bp, Homo sapiens
ctctctctgtgccttaatttctcccacatattaaagttcagataaaaatatctgggccacctagttcaaaaaggtcattattagtctcaactgaaataatgataggaaagcacagcagtgaattaaccagcagcacagagataacagggtattattattagggactggtattcataagtctctccaccatcctggtacacccacagtcccttgccacggaccatgtacactcaattgaaatgagacaccagatagcaaaggatgcttatttgggtccacaaaaatactggtagaattaattcacttccaagagagaatttaaaactgacttgttcatatttgaccaggaaattcaacctgaattcctttatttttttaatasaaagctccccctctactccacccaatgcttgcttaatgcactctacaacatctccatcaagagtctcccagactccacttaaaacctctagtcaaaggaaactcagctgtaaagcagcctgttttccattttggacagctctgactctgagaaagctcttgcttatcttccctaacccccagactaggtcggtttccctagttgccagcttctcatagcactctatccttttccttcagaggatgtatt

SEQ ID NO: 893641 - DNA, 631 bp, Homo sapiens
ctctctctgtgccttaatttctcccacatattaaagttcagataaaaatatctgggccacctagttcaaaaaggtcattattagtctcaactgaaataatgataggaaagcacagcagtgaattaaccagcagcacagagataacagggtattattattagggactggtattcataagtctctccaccatcctggtacacccacagtcccttgccacggaccatgtacactcaattgaaatgagacaccagatagcaaaggatgcttatttgggtccacaaaaatactggtagaattaattcacttccaagagagaatttaaaactgacttgttcatatttgaccaggaaattcaacctgaattcctttatttttttaatagaaagctccccctctactccacccaatgcttgcttaatgcactctacaacatctccatcaagagtctcccagactccacttaaamcctctagtcaaaggaaactcagctgtaaagcagcctgttttccattttggacagctctgactctgagaaagctcttgcttatcttccctaacccccagactaggtcggtttccctagttgccagcttctcatagcactctatccttttccttcagaggatgtatt

SEQ ID NO: 893642 - DNA, 603 bp, Homo sapiens; identical to SEQ ID NO: 893410

SEQ ID NO: 893643 - DNA, 670 bp, Homo sapiens
acacccttccaggttgcagacggccatcttctcattgtaacctcacatggcagaaagcagagagagaaagcaagctgtcctcttttttaaaaagcactaatcccattcatgaggaccccacccccatgcctcccaataccattacactaggggctaggatttcaacctatgaatttagggggtacacaaatattcagtccatgacaaggagttggtgtggatgcatacattgttcaaggtcaccgagttggcagtagcagagctgaggataaaatccaaatttccccagtttcagagtctgtgttcttgacactaaagaacactgtcaatttgtggacagctcacgggcagaaattgtgcattactcatctgtatatctgtagcatttaatatgacacttggtacatagtagatgcttagtaagtctgtgttgaacagatgagtaagtgagtgagccagttaaactattcccartgaaaagccagcgctgagctagactctgtcttgctattttgtgacaaatgatactccggagagagggaggaatgaggtcaaataagagtgaggagcagtggagtcacagttcctgctgaggactggggtgatctgtctgagagctgtctgccctcccttgcccatgagcagggaagatggcagagaccccattaag

SEQ ID NO: 893644 - DNA, 635 bp, Homo sapiens
aagcattatacaatttttaaacaatcaaaatctgtggtggttgaaaacaaacagagttgttatttgccatgattgtcataaaaaattatcactatgggaaaaaaaaatggtattgcgagctttctattttgctatactttgggtcaaatgtacgtctctgagaagaactgaatacgtagcatctctctcctttgtggagcctcttaacttctgaaaagaacatggcctttttaaggttatctcagggccctgaggacctcatcatatctaggaaggaaggctctgggctctctggactgtaaagacctgtgtgtaacaatttargctttcatttttgggggcatttgttccctcattaacatttctgtggatccttagaaaattgcgtaaaattgcacatttaaagattcaagaattagtcaggaaaatgtggcataataggaaaaagtgtagcaggttttagaatcaatgatatgctatatttttagtttaatcacttgtagctttatgatcttttaataggatgcttaagcatcctgagttttatcttcctcatctctaaaatggcaaaagtagtaataccagattcaaggtcctaagacagtgcctaccacagtgatttatacctagtaggt

SEQ ID NO: 893645 - DNA, 607 bp, Homo sapiens
ttacaactagaagacaaaaaaatgagtttttaaaaagcaggaagttttagatatttatttctactcacaaaatggacactacattaaagaacgtgaaccttgagagtttaaaacagatagaataagataatatcctatttatttaaccaaatatgagagtcccttcttagtttcctgtgcattagtggtaaaataaatttgacctcttcataacaaaattctcatttaattaaaaaaatttaaatgtatgtattctgggtacgaaaatgtaggaaatgtagaaaagtagagtgatggaaaaatgccagccatcgtattactcaaattaatctatgttaactatttggagtatttcatttcagcctatgagaaattttgaagtgcaatttaattatgaatgaatgaagaggttttgaaagttccttttctaaatatttagttccatatttacctataggcctatagrccttttgttgtatccaagtgaaagcaacttcctctttgcacttgaacataacttcacctccaatccagaccaccgctgtacaaactggttgggatacgggtctgttcaaagcaaataagaccatgctagacatttttacgt

SEQ ID NO: 893646 - DNA, 566 bp, Homo sapiens
gccaagtcaatcctaagccaaaagaacaaagctggaggcatcacacatatctacaactatctgatctttgacaaacctgacaaaaacaagaaatggggaaaggattccctatttaataaacagtgctgggaaaactggctagccatatgtagaaagctgaaactggatcccttccttacaccttatacaaaaattaattcaagatggattaaagacttaaatgttaggcctaaaaccataaaaaccctagaagaaaacctaggcaataccattcaggacataggcatggtcaaggacttcatgtctaaaacagcaaaagcaatggcaacaaaagccaacattgacaaattgsatctaattaaactaaagagcttctgcacagcaaaagaaactaccatcagagtgaacaggcaacctgcagaatgggagaaaatttttgcaatctactcatctgacaaaggcctaatatccagaatctacaatgaactcaaacaaattttacaagaaaaaactaccccatcaaaaagtgggtgaaagatataaacagatacttctcaaaaggagac

SEQ ID NO: 893647 - DNA, 664 bp, Homo sapiens
aacttagaaattgggggtaatgaacatatgaggactaatatttgtatatgtggatgatcctcttttaatactggtttgaaccaaggtgaatcaaatagatacttggaaacagattgttaagaggattttaaaagtctagttttgaacacatcatgtcttcttaatttaaacagaaggcttaaaaccatcaagtttacttgctgaaattaatcctgaggtgttaactagctatatgatcctgagaaatttatttaatttctttttgcttcaatttttacttctgtacacaagtgataataatatctatcacatagtttttaaaaaatatgaaatgagttaggacatgctaaatgcttctaatagtgttcatcatacagaaaaaaactttawgtgttaattcttattgaagttgtggttgttattatgtagagagacccctgaacatagaccttctcacttcacttcttcacaagaataaatatctattgaatggatgaatgaatgtttacttattttcaccttaccataaaaaatagcactttttttctctgctgaaatggattttctataggtaaatataattatccagtttgtagattcaaggaatttaacactaaaaggaatagggtggaaactggagtcttttaaggaaagatggaagggc

SEQ ID NO: 893648 - DNA, 646 bp, Homo sapiens
ttttttttttcaaggaaagaagacatgaacaaatatttagtgtggtttagtttgaggtagataatattttaataaaaaaattaataatgcctcaaaaaaatatggtctggggccagcagcatcaactaggatcttattagaaatgcagaatctttggtcccacttcaagcttgtcaaatcagtrtctgcattttaacaagactcctagttgattcaaatgcataatacaagttttagaagcactgctctgtatcacttttttggtatccacatctctgatgagagtaatgtggtcctctctatttggggggttatccttggtttttgaagtactgagtgactagaaagataacagaatggttaaataatctgtcaccccgtctgtgcttaactgtcaatcagttccttgcacatatgaacttctccacctgtaccacccatcttctctagctagattctaactgtaaaacccttcagggaaggacattcattctttatttggtgggttttgtttgtttgttgtctgttggctaaagatagtactcatcagtgtcactgtgggtttctcttgggacagaaggtggcaaaattggatgttgtcatttctttttttctggttcctcttccgacacccacatccattatt

SEQ ID NO: 893649 - DNA, 609 bp, Homo sapiens
tgggtcacacctgtaatcccattactttgggaggctgaggtacacagatcacttgaggtcaggagttcaagactagcctggccaataaggtgaaacactgtctctacttgaaaaaacaaaaaaaaaaacaaaaattagccgggcrtggtggtgggcacctgtaatcccagctcctcgggaggctgaggcaggagaatcgcttgaactggggaggtggaggttgcaatgagccaacattgcaccactgcgctccagcctgggtgacagagactccatctcaaaaaaagaaaaaaacaaaaattaaaactgtaatctccaattatagtagacaaatgtccaattaattagacatttaaaattgaaacattcaatccctacatttaacttacctttaagtttgtacatgcatttttaggatcataacagactactaaatccactaaagaaaaagccaaacatctaattagttactcctaagctccgagctgtcctgaaagagctatatggagctactgatacttttaataaagtaattttgtcttaaatttttaagtttacctataatatagggagtgaaataaagctgtgatttgaggaatatttgtgctg

SEQ ID NO: 893650 - DNA, 678 bp, Homo sapiens
gggaatcaaaatagtaatcccatttataatagccacaaataaaattaaatacctagggattaaccaaagaagtaaaggatttatatagggaaaactataaaacactgatgaaagaaactgaagaggacatcaaaaaatggraagatattccatgttcatagactggaagaatcaatattgttaaaatgtccatactactcaaaacaatctacagattcattgcaatccctatctaaataccaatgacattctgcacggaaatagaaaaaaaaaaaaaaaaagctaaaatttatatggaaccacaaaagacccagagtagccaaagctatcttaagcaaaaagaacaaaactgaaggaatcacattacctgatttcaaattatactatagggctatagtaaccaaacagcatgatactggcataaaaacaagacacatagaccaatagctgggattacaggcacacaccatcatgcccgactaatagaccagaaacaaatctacacacctacagtgaactcatttttgacaaagatgctaagaacatacaagaacatacactgggtaaaagacagtctcttcaataaatggtgctggaaaaaactggatatccatatgcacaagaaaaaaactagacccctatctctcaccatatacaaaaatcgagtcaaaatggaat

SEQ ID NO: 893651 - DNA, 560 bp, Homo sapiens
ctgaagtcctcatattgctccatgggccactctaggtacataagctaggatgtcataggtcagagagaagcccagcagagaccacatcaaagttcaaccttgttccagacctttgtaggtagaaaataaggttaagtgaaacatggaaggtaaccatggaatattaccggttcccggtcagtcactcttgattagcaaacatggcccaaagctgtagatcaaggacttcctgaataatactggttctggagacagaagctatgagttcagtgctacataactctctctstggacagacagctctgccaaagctattacattatatttaagtatatgtattaagtatatatctaaatatatattatacttaaaatattagtttaaatttaatgttttaagtacaatatatataccaaagagcacaaagaaaaaaaaaggtacagcttgatgaatttttacaaagtgaacacacccctgtgaccatgactgagataaagagattagacattaccagtatcccagaagcctccatttgccccttcctaggcactactgacttg

SEQ ID NO: 893652 - DNA, 690 bp, Homo sapiens
tataatcattgcaaatatatatgcacccaactttagagcacctaaataaaaagcaaatattgacagtactggagggagaaatagatagcaatacaaaaatagtaggagacttcaaaaccccactttcaacaatgaatggatcattcagacagattattttcttttctactgtgtaaggaaacagtagacctgaataacactatcaggcaaatggggctaacagaactatatatgaacatatccatccaacagcatacagaacaaatactttcctagtgtacatagggacattataccaggagagatcatatgttagggcgccaaacaagtacttaataaaatttaagaggattaaagtcctatacaagtatcttttccaaccacatagtataaaactagaaatcagtaacatgaatgtagtagtctgttttcattccacacggctggggaggcctcagaatcatggcrggaggcaaaaggtacttcttacatggcgatagcaagagaaaatgaggaagaagcaaaagcggaaacccctgataaatcacatcagatctcgtgagacttattcactatcatgagaatagcatgggaaagacctgcccccatgattcaattaccttcctctgggtccctcccacaacacatgggaattctgggagacacaattcaagttgagatttgcatggg

SEQ ID NO: 893653 - DNA, 528 bp, Homo sapiens
tgaagctggaagagcaggtggtcaggaatctcccccaaccttcagtgcagtaatctttagagcctactcatcataagtacaaaggtggttgtgaaggcagtgctataaccactgaggggaacctaataaaatgggtatatctactccacacaagggaagattcatcccatggacacaatctttaagatgccgagaggactacagggcatgattgccaccatactatatgcagcaacatcatgacttcattcctgtcctagcccagatgagaacctgatccaactccataaacggaacaccaacagggaaatctgtaaccttaaaaaaacggcatcttccagtggtagaaagagcctaaaggtctgagacaggcagtataggaaggccatgtcytagggtgtagggagaggtcatcttagatatcagtgttgagaaagaccagaatgaggatggggacaatcagcaatggccacccaggaaaaataacagtggaatttgcatgggggaagggatggtgggagcaatgca

SEQ ID NO: 893654 - DNA, 545 bp, Homo sapiens
tttttgtttttccatacccatttcccttctaaacatgtctttttgaatagtactgtcagtagcctgtaggaaactcaatcttccatggtattcgttcttaaaacttaaaggcagcaaaagcagtgaggcttgaatcaatagcaactataataatattctagcaaatagtaattgactgcatgctgtgcatctggcagagtgtaaagcttcaaaatttttttccaggctaattgggatatccattatcttaaattaattatttatctctttatggtagcaacatttgaatttttctcttctagctatctcaaaatrtatactaggttaatgttagctatagttaccctactgatctaatgaaaacaggtcttatttcttctatcgtactggaattaaattggaaccccatttaatcaaattcttctcttccatccctttcccctcccctgtttcccttttccttggtcttttgggtaagccaacctttctgcctggggtatcttcctgagatccatgtttttagcagccacttatgagggagaaca

SEQ ID NO: 893655 - DNA, 658 bp, Homo sapiens
cccctttatcattatatagtacctttgtttgtctcttcttatagtttttgtcttggaaactaatttgtcttatataagtatagctactcctgctcttttttggtttccattggcatggaatatctttttccatttatttacttttagtccatatgtgcctttttagatgcagtgtatttcttgcaggtgacagatcaacaggtcttgtttttctcatccattcaccccatattttgtcttttgattgcagagtttagtccatttacattcagtgttattatgaacaagtaaggacttctttctgctgtttgttactcgttttctggtagtttggtcttcattattttcttcctgtcattcattartggagataattttctctggtgatatgatttaatttctcacgttttattttttgtgtatccattgcatgttttttggtttgaggttgccatgaggctttcagatactatgtgataacacattattttaaccttgtgacaacttaacactatttgtatgaacaaacaagcaaaaagagaactataaaaactatatgccttaatttcatccccccactttttaacttttatttctgtttctattttattgtactgtctataacttgaaaagtcattgtagttattatttttgattg

SEQ ID NO: 893656 - DNA, 639 bp, Homo sapiens
tatttgctaatcttttattttacaagtattgtttatttgtttgtttgtacttacttgaaaaaaatctttcctatctaaggtctttaaggtaatgtcttatattttcccttttttattttaggcgttcttttttctacttaaatttaactacacctcttttcaaatttgcctgtcacctcacacatttttttccattgagtactcataccctagttacctcaccattcagatgtcacttccatgccatttcttcccctgagtgttcttttgttcttcaggttaggagcaatcttcttgcctgccagagagtcttgcaaaaaaaaaaaaaaaaaaggtgattttcttttcttctccggaagtttttatattgtacttaaactagtcaagacagtattatgcttgtttcagtatattattcttccaaatagttcttgagaacaagatctataaatcttgatatccccaaagagtcctactcagtgtctcaaagaatargtttaccattaacttttgtaaagagaaaaaaaaatgtatgtttagtttggacaactgaatgctcatctgggacacacagtaattatttccaaatacttgaacacctatcctaggttaaaggaattgaagtggtcctatatggtc

SEQ ID NO: 893657 - DNA, 611 bp, Homo sapiens
tttttttcaacacattgtctttgttgtatactctagtaagcagaatagtggttccccaaagatgttcacatcttaatccctggaatttgtgactatgttagttacaaaacaaagaagaattatgtctgaaggtgaacttcagtgattgcagatgaccttaagatagggagatcgtcctagatcagcgggatagatctgaagtaatcaagaggatccttaatgtgggaggcggaaggggacgaaccagagcgatagcagcctgtgtggctttcaagatggaggacggaagccacaacctgaggaacacaggcaacttctaagagctggaaagagcaaagaaacagattctccaaagcttctaacaggaacacagtcataccgracccttgattttaaattcgaacgcctccatccctgtctatcactttactctgctttatgtatttttaattacttatcactatcgcacattatataatcaacctatatgttgatttttaaattgtttttctgcttactctaaataaactctgagaataataacctattctgttttatgtactaatatattcccaatatttagacaagtgccaggaagatagtgtgtgttt

SEQ ID NO: 893658 - DNA, 618 bp, Homo sapiens
agagaaaaatatattctttgccagatgtgttgtgacaaactacagaacatcaatgacaagacagaaaaatgttaatacaagttgagggaaagaaagacagtttgcttacaaaggaactacaactagaattatagctgcctattcaacagcaaaaattaagccagaagacagtggaatagtatctttaaaaatagggagagatttttgcctctaagagaaatgcgggaatataggatttggagggacggatacagagagcttctcttctagagcagagaaatattttcctaatttgtcttgctaatctccacttctccaaaccccaaatatatgcaacaaatataaatgtcrtggttgttacttactaagcagtgttactgaacgagctacctgctctgatttcagaagtaaataaaacttagccctagccttagaggatattctagacagaacaatgttctctccccattcccaatgatgtccacatccgaatccccttaatatagaaaaagagactttgcagatgtgattaactcaaggaccttgacatagggctatcatcttggattatctgaatgggtccaatgtaattacaaggattcacgtaagagggagaca

SEQ ID NO: 893659 - DNA, 609 bp, Homo sapiens
aatgtaagtgtcatttcctgttccttctggatcgtgtgttccctaatcagtcaaatcgcgtcttccagcctccgttatgaatatttccatcgcttgtgcgctccaggaaaacctggccacctacaccctccctgaaaatgtatttttgcctgcagtgatctagagaaaggggaaggctattttactgacccaaatgsttcaactaaatttgatttcagccttggaagcaaagaggcattctcctcttattcagcgtcattgccaactttaaatcaatacctctcccattgtcctaaaacctccaaatctaaagatcttgctatcagattatattatatacttctatccctcttcttcacacttgatatagtcacttaaagactcctgcgtcactttctctcattctttgaacattttagcttttgcctttctgtcgctttctctaccaatatttttgtctttattgaaaatgaattcatgatacattatgataatccggctgatgtcctgggcctctccattccccaccatcatctccaatgatcctactttctacttcagctcagccagctacttgaaaggcacacaaatcttaactgaatattagaa

SEQ ID NO: 893660 - DNA, 674 bp, Homo sapiens
ccagcatacaaaccagccttgtctgtttcagaaatagaagagacactggtgtttgagaggcacagggcactgaaagggctttagatttggatatatctgcatttgcgcactgcttctccacttactgtccatgtaatttgggatatgttccttagcctttctgaacataactttcctcaggtaaaagagcttcttttcatwgtttatgtgaggattgtgggctatttttgtaaagtccaatcacagagtgtatgccttatgaaaagattggctaccacggctgcaatgattaataatatgttcatattttcctttctgattattgactatgtttgggaagagtgatcatttaaaatcaaatattgacatgttaatattgcttatctctttgaggcaggggttttagatgacttttacttttgtatgtaattttatttttaagtgaaaagtattccacaagattttgtatattatacaaacatataattggaaacagagctaatgaacaaatcaattttgattatgaaagaattaaaataaagttgggttgatatcagtctgtagatcaaagatgcctcaatgaaaaattttgttctgggttaatccaaggcacaaccctcctttattaagcagtttgttatgtcatgcaccagaattatccacatttgagttga

SEQ ID NO: 893661 - DNA, 711 bp, Homo sapiens
tttggcttccaaagaagaagttaacttaagtataaaccttgaatctgtgacttaatgtggaaataattagaaatttgcatggattaccattgttcctgtgtttcccttacttttcaatcaaatattgtttcaaatttcatgctagcttgaataactatttttataataagyaaaacagaaaaagctaacttaaatatatgtttattatatcaaatttttgataatagctatcccctggatagtaacccagatgtgtctatgtgtttgtgaaaagaagcctatggggtatgatgtcatgaaaaatcgctttcagattttgctgcgtattctgctatgttggtagaattcagtacatgagactatgttcacatagtacaaaaataaataacatatagtacaattttgcatataacatctatctaaattcaaatatagttcttatcattcacacttgagatccagattccatttaaataatatttattaatcttctatcacatgcaggaaatgttacatatattactgtaactaaattaggttactcttcaacttggcaatgaaaaatcccctttggcatagactttgctattaaaaaagaagttggtgcaagttttacaaaagaagggaaatttttcctggggccattcatagttgacactcagaaattatagtggaggaacacctagaatagaacagattagaagaacaagc

SEQ ID NO: 893662 - DNA, 601 bp, Homo sapiens
ggatttattgaaaagttcaaaatatgctgtttttgtttttattccattgatgaaataaatgcatgaatgggagtaacagaatatattaacacatctagagaaaaatattgttgcttatccctgcatagctgctggtacatcacagatagcaacaacaaaaatccataaccagtactatgatttggatgtcttctccataactcatgttgaaatttaactgccattgtgatgatcttggcaagtggaacctctaagtggtgattaagtggcagagtcttcataaatcctgttatttcatgagtggtttagactcctgggaatgagttccccaggataycctttctctgtctcacaggctcctttgttctctctcatcatgtgatatcttccaccatgttttcacacagcaaggggatccttatcagatgcaaaccctctatctggaatttccagactccatagctaagaactgataaaaatttctattgtctataatttgcccagtgtgtagtattctgttacagcaatagaaaatggactaggactaccagccaaaatcttaggtcagaaactaaagtgactccagtgagacattagatga

SEQ ID NO: 893663 - DNA, 548 bp, Homo sapiens
agcagaaacttggttaggtttgcaattagaaagaacattctggtggaagtgtgttcatggggtagagagataagagacatcactcctaatttttccttttcaaaacagctttcccaaggactttttgggtctctcaagtacatagggtcagaagtctaaaaagcagcttaaggaataaaccatcaaacaatccctctactgtcaggtaagaatatatggttgagtatcacttgtccagctcagtcatcttgcaagcaattgacrttggttatttctgtgttgaaattaagtcatgaaacacaaagcgctgaaccagattcttaatttggacttaatcgcatttattatagtgcaaaacaaatacattcttcccagaccagagcaacattgaatagcattgtaaactaatttttttgatgtcaaggaaagatgaaaacaagataaaacatgcgagagaagcagcttgcattagatcaggcacagtaaaactaagaaacatcagttgctactagcaaagaagcaaaagtccatggagtttgaatttttgt

SEQ ID NO: 893664 - DNA, 632 bp, Homo sapiens
cttttctggttcacactataaaaattataacaagaggatatgttctcttttcttctaaatatttatactattttcattaggtaacaaacgaagaaacaaaaagcctgtaacataacacctgcaaaaggattgaataaaaataatagtgtgacaagtccaaattttgcttccaaagaaagcaaatttatttaatacaaagaatattttccaaactcaaaaaatacttaagaaataatgaaaacaggaaaaaaacaaacaaccaaaaaaacaacgggaacgaaatgaagtgaagattctaaacttcaattcattctatttaaaggcttctggttgctacgtggttataaagcccatggaggtgaaattcaaaattaccttgctctattcgaacaatagacttaatcttctagttaatttgagaatgttgtgattcaatggctaaaataacagatggccagtgagtaggcctggattttagttgtkgttctgatgttattaactacttgggcaacctctgatagagttgaacctatcgtaattcacaggactaggtaggcttttaggtttggttccaatattttatgaatttctgagactagtagcacattacttaataaaccagatccaatgct

SEQ ID NO: 893665 - DNA, 508 bp, Homo sapiens
agtggaatgcatacatctttaatttcatgtatacctaaactatttgtttcattacacttgctactgaactcagttaaaatcctgacctcagaatttcattgtggcttatatatgtctgggaaggaagattacaggaaggattttgataatgttctcataaaaacagccaggctagtacttrctaaaacatcactgctgtctctggatattttcttcctagactagacccatgagtagcttaaccaaagtgaagtgtcctgattaggcctaaatggccatgaatagaaaaacagagataatctcctgtcctatctctgagtctacttggcagaaattcccaggaactagatctctgttgttagaaaactctgcctatcaaggaacctactcctttccctcaaagtgaatattttatttttagacaaaaagtgggggtttcaaattcccgacagacatcttataaagaaaattaacacaagatttgtgatctgatatcagattaaatgag

SEQ ID NO: 893666 - DNA, 508 bp, Homo sapiens
agtggaatgcatacatctttaatttcatgtatacctaaactatttgtttcattacacttgctactgaactcagttaaaatcctgacctcagaatttcattgtggcttatatatgtctgggaaggaagattacaggaaggattttgataatgttctcataaaaacagccaggctagtacttgctaaaacatcactgctgtctctggatattttcttcctagactagacccatgagtagcttaaccaaagtgaagtgtcctgattaggcctaaatggccatgaatagaaaaacagagataatctcctgtcctatctctgagtctacttggcagaaattcccagsaactagatctctgttgttagaaaactctgcctatcaaggaacctactcctttccctcaaagtgaatattttatttttagacaaaaagtgggggtttcaaattcccgacagacatcttataaagaaaattaacacaagatttgtgatctgatatcagattaaatgag

SEQ ID NO: 893667 - DNA, 599 bp, Homo sapiens
atgcctttagtgagttgactaccaataaaatacatttgcagaagcttgaattttaatagggtgccgaccttttgccaactcagttgggagtgagaaatacgacaccttccagagtgattcatttcactccttgctgagcttctcttgttcatccttctaggaagacaaagcagcataaaatttaccattatattaagtggttaaaattatctttaccactataaaacatcagtggtataaagaaaaatcttggaattagaaaygtctttttccccacttgttatcatatccaacttctgccttcaagcatcttttagaaattggaaagcaaaaagctatttatgtaatttgatcttttcaaactgtttcatagatgattgttttttgtaatctcctgtaatatttgcttatctggcaacaatggaatattttgtccattgttttgctaacaaatttctaccaaatgcattgctcacattgcaccaaatccctttgtgaaagatgtaccaaaatggagtcatttatgtcaaactctaacaaaatggggtcaagagaggccacaaaaaaaatcctcgtgcacacatgcctgtaacaagggt

SEQ ID NO: 893668 - DNA, 582 bp, Homo sapiens
atttgatcttttcaaactgtttcatagatgattgttttttgtaatctcctgtaatatttgcttatctggcaacaatggaatattttgtccattgttttgctaacaaatttctaccaaatgcattgctcacattgcaccaaatccctttgtgaaagatgtaccaaaatggagtcatttatgtcaaactctaacaaaatggggtcaagagaggccacaaaaaaaatcctcgtgcacacatgcctgtaacaagggttatcacaagaccttcttcaaattgcastattccagataaataggttccaggacagttacctagcaacagctgtctttaccaataaacaaatgtcaactcctacaatgagcttttgacccgtgaacttgtctcaaagcagcttacctggacctctctttgtatttaaaaacttctcctgtgccctaaccccttggatgtgcctatgatccatcatccaccatagcatgcacattcctagattgcacttcgctgctctttccaattaaaactcatttgttctgaagagcatatgtgagtttctttttaggttgacacttctcatccctcaa

SEQ ID NO: 893669 - DNA, 670 bp, Homo sapiens
tcatacattaggatcagggcttggctgctctgtgcagcttcaggacttgatgccttgtgtcccagaagctccagctccagccatggctgataggggccagggtatagctacagctgttgcttcagagggtgcaagtcccaagcattggtggcttgcaagtggtattgggcctgcagatgtgcagaaaacaagagttgaggtttgggaacctctgtctaaatttcagaggatatatgtaaatgcttggaagtccagacaatagtctgctgcaggggcagagccctcatggagaacctctgctagggcagtgcagaagggaactgtggggtgtgagctcccacacagagtccccactggggcactgtctggtggagccatgagaaggccaccatcctscagaccccagaaatgtagatccaccaacagcttgcattgtgtgtgtggaaaagccacagacactcaatgccagcctgtgaaagtagccatgaggactataacctgcagagccacaggagagaagctgcccaaggcattaggagcccaccccttgcatcagcgtgtcctggatgtgggacatgaattcaaaggaaattattttggagctttaatatttaatggctgtgctacatggggcctgtatcctttttgttctggccaatttctccctctt

SEQ ID NO: 893670 - DNA, 602 bp, Homo sapiens
tgtaacaaaagcagcaccattgctgaagggaatgattaagaaacacttgaggcagagccctccttcagccgctttctgtcctaggcaagggggttaaggctaaggagacacatgcagaccttttcttctcatgacttgaggtagagtttcctgtccttcctatgattcagcagctcagaaatgacagaaagacctattatgcttgcttcttaaataagattatctgtactcctacctctggaaacattaaaaaagctctcaaaactattattttytagtgctttcatacaatgcaaattacagatgttaattggaatgcagttctccttcttcagacttatttcccaagtggacagattgaagctcacctgggcttttccaagcattttgttaagtctaccctcaccctcagtcccttattattcattatctattaccctggaacatataaacattcgctgctggctactatttccttgtagtttattcaacagtttggatttgatgtatgggttgttttttttttttttaaaggaaaaaaaacccagacacccaggaaattaagaagtttatcaattggagtcctagagcagcccaatgct

SEQ ID NO: 893671 - DNA, 587 bp, Homo sapiens
aagagataggctggtataaaacaaaaaactctggaagaagagattacatgtcttctgcatgagcaccatcctcctcccttgggtgtgggagggggcaggaagcacaagtgtgcatgagacatgttcttctgcttctttttttttttttttttttttgtttgagacaaagtctcgctctgttgcccaggctggagtgcagtggcgggatctcagctcactacaacctccgcctcccrggttcaagcaattctcctgccttagcctcctgggtagctgggactacaggcatgtgtcaccacacctggctaatttttttgtattttttagtagagacagagtttcactgtgttagtcagtatggtctggatctcctgacctcctgatccacccaccttggcctcccaaagtgctgggattacaggcgtgagccaccgcgcccggccccacacctggctaatttttgtattttttagtagagagggggtttcaccatgttggccatgccaggctggtctggacctcctgacctcaggcaatccacctgcctcggcctcccaaagtgctggaattacaagtgtgagccactg

SEQ ID NO: 893672 - DNA, 657 bp, Homo sapiens
aatggtactgcctaggttttcttccagggtttttatggtgttacgtcttacatttaagtctttaatccattttgagttaatttttgtatacagtgtaaggaagggatccagtttcagctttctacatatggctagccagttttcccagcaccatttattaaatagggaattctttccccattgcttgtttttgtcaggtttatcaaagatcagatggttgtagatgtgtgatgttatttctgagtgctttgttctgttccattggtctatatatctgttttggtaccagtgccatgctgttttggttactgtagccttgtagtatagtttgaagtcaggtggcatgatgcctccagctttgttctttttgcttaggattgtcttggctatgagggctcttttttgtttccatatgaagtttaagccaccatattttgtcttacatgtayggtaactcaggcctcatttgactgacccaggtatggacatatgacccaaggacagctcattttaaactctcagtatgaagggcaatcctattttctctgctgagattttaagcaagagaataccataagaatttattacttggcagtagaaaaaaactgaagaaagcttatcttttagaggctagaatagccataatggaccacacat

SEQ ID NO: 893673 - DNA, 503 bp, Homo sapiens
tataggtgcttggcatggcttcaggggccaattttgccgagatcataacaagtcttttttcccctactttcacctgatttaatcctgtagttcagttggttctcagtcttccaactcttagtcttccactctttttttttttttaattattatactttaagttctagggtacatgtgcacaaygtgcagatttgttacataggtatacatgtgccatgttggtttgctgcacccattaactcgtcatttacattaggtatttctcctaatgctatccctccccctgccttctaccccatgacaggcccccggggtgtgatgttccctgccttgtgtccaagtgttctcattgttcaattcccacctacgaatgagaatatgtggtgtttggttttctgtccttgtgatagtttgctcagaatgatggtttccagctgcatccatgtccctgcaaaggacgtgaactcattctttttatggctgcatagtattccatggtatat

SEQ ID NO: 893674 - DNA, 553 bp, Homo sapiens
tgttttgaaatatgtgtaaataatgaaatgtttagatacagaaaaatgacataggaattaattatcccagatacttatcattttttggtgaaaacacttaaaatctactcttttagtaattttcaagaatatgatatattgttactattagaatctactataggtttcttcaacttcttcttccaatcaaaatgaaattttgtgtactttamccgaatctctccaacctcttcactctcaacctctgggaactaccattttactctctgcttctttgagtttaaattttttagactccataaaaagtgagattatgtatttatcttgctgtgccttgcttatttcacttaacataatgtcctctagttcatccatgttgtcacaaattacagaattttcttctttgtaatgtctgaatgatatttcattgtgtatatgtaccccattttctttatccgtttatccactgataagatgcttaggctgattctatatcttggctattgtaaataatgcttaaatgaacaaggaagtgcagatattgatttggtaa

SEQ ID NO: 893675 - DNA, 647 bp, Homo sapiens
gggcacctgtgtcctcctttctaatggttcagcaagaaggaggtgtgtacacagagagccagcacaggcagggtatggtgttagcagtgggtgggcttggggcaagttcgttgtattgctattttgaaaaatgacaatttgggtgcctcggctcatgcctgtaatcccagcactttgggaggccgaggcaggtggatcattgaggtcagaagttcaagaccagcctggccaacatagcgaaaccttgtctgtactaaaaatacaaaaattagctgagtggtagtggcacacgcctgtaatcccagctacttgggaggctgagggaggagaatcacttgagcctgggaggcagaggctgtggtaagctgagatcatgccactgcactccagtctgggtgacagagtgagaccttgtctcaaaaaagtaaaaaacmaaaaaatttaaaaaaaggaaaaagaaaaatcaaaattaaaagatgaataaattttaaaagtgtgccacaaaacttcaacctttaacatttaaaaaattctcgtgggaacatacccgtccttttttagtttttgcagaagcacaactgagcttgctttgtgacttaaatgactgaggcacactgaaagaaaggacaataaggaggacatcctag

SEQ ID NO: 893676 - DNA, 566 bp, Homo sapiens
cttgaatgtaaatgggctaaatgcctcacttaaaaggcacagaatggccagttggataaaaaaacaagacccaatggtatgctgtcttcaagagacctatctcacatgtaatgaaactcatagggtcaaaataaagaaatggmgaaaaatctaccaagcaaatggaaaacaggaaaaaggcagggattgcaatcctaatttcagacaaaacagatttcaaaccaacaaagatcaaaaaagacaaggaagagcattacataatggttaaggattcaattcaacaagaaaaccgaactctcctaaatatatatgcacccaacacaagagcatccagattcataaagcaagtccttagagccctacaaagaggcatagactcccacacaataatagcgggagacttcaacactccactgacagtattagacagatcctcgaagcagaaaattaacaaagatattcaggacttaaactcagcattggaccaaatggatctgatagacctttacagaaatctccaacctcccccgcacaccaaaaaaagtatatacattcttctcattgcc

SEQ ID NO: 893677 - DNA, 572 bp, Homo sapiens
caattttcattttaattacacacaggcaaaaatctaataaagaatcataaggaagttgaatcagatttttttttttttttaaataaaaacggggccccattttgcccaggcggggtctcaaacctccggggctcaggtggtctcccgcctkggcctaccaagtgtgctggggttacaggcttgagccaccatgcccggcccagatctatttttatctacaaagccattcaaataacccacacagagcatctgaaaaatgttactaacgctttctctcttcaaatttctaataaatgacaaagaattgcacaaagaattgactggtacatttcaatgaaatactcattcagttctgaaaacgaatgtagcgttctcctctggcatttattcgggaggttaactcaaactataagcctgtctcaaatgctgcctgataacttcatttttcagctctcacagtggccaccctcctcgctggctctcttctacatgctaaaactcaccaagagccttcttccctttgatcctcaacctcgaattttctccagactgagttcagttcttatcactga

SEQ ID NO: 893678 - DNA, 572 bp, Homo sapiens
caattttcattttaattacacacaggcaaaaatctaataaagaatcataaggaagttgaatcagatttttttttttttttaaataaaaacggggccccattttgcccaggcggggtctcaaacctccggggctcaggtggtctcccgcctgggcctaccaagtgtgctggggttacaggcwtgagccaccatgcccggcccagatctatttttatctacaaagccattcaaataacccacacagagcatctgaaaaatgttactaacgctttctctcttcaaatttctaataaatgacaaagaattgcacaaagaattgactggtacatttcaatgaaatactcattcagttctgaaaacgaatgtagcgttctcctctggcatttattcgggaggttaactcaaactataagcctgtctcaaatgctgcctgataacttcatttttcagctctcacagtggccaccctcctcgctggctctcttctacatgctaaaactcaccaagagccttcttccctttgatcctcaacctcgaattttctccagactgagttcagttcttatcactga

SEQ ID NO: 893679 - DNA, 639 bp, Homo sapiens
gaaaaatccctcaaaagtgtttttgaaaaggaaggggttacgtggtggttaaggtatgtgggccaagatactgggcattagttgtttactttccatggcaacatttgtgtcccttaatcaattctcctgccatattcagggatttttagggtaccttccttcatcttggcccagacgcttgggatattccatgttttcacacttttgcttcaagaaggcattgggtmtgggagcaggggctcgtgtctgtaaccttagcacttgggaggccaagagttcaagaaggcatcggcatagaatggccaagcacatggtggtatccaagcacacgttgtggagctgaaattgcatcctttctctggcattgcttttgcatctgtaaaatggaaggcataacaggtcccagttcatggaatcgttgtgaagtgcttagcatagtgtctgctgtttactaagtttattctgtcctccaggcctgtcaggtcttttgtattttaagaaggaaacgggccaagaagctgagctccataaatgttatatgtgattattcagataccttgcatccctcttattgttatcctacaattaaggggctacgttatagtgaatgtaagcttcatgtcccagcagacgtttgct

SEQ ID NO: 893680 - DNA, 601 bp, Homo sapiens
gtctggagatattcagagatggtataaattattttcttctgtcaatttcaggtatgcttgtctcactttctcatacgtattaactcacttttaataatctacccattttctcttgttctgcctttaggcaattgggaartaagtgattgggcacttgttcttgataacttgtggatggttttggtttctggttgctgtaattaaaggtgacttaagtagaagaaattaggtgtctgcccactaataagcaaggtgatgttcataagctgctttgccactattggcctcagagcttcaaccccagcaacttccattaaagccagggattaactattagtgcagcacagtggaaggaaccagaagaacagttctttgggtcccagcaacaaattacttctgaatgaaacctctgattaatggctccagagttgcctctttgttttgcataattaagtttcatggagtgttacaatgaacaaccttgccatcacccaggtagaaacagccaccatttatttggccagcagtgtcagaaagtgctgggtggtgaataagaagcatttatgaggggattaggtgcatttgggtcataattgaataa

SEQ ID NO: 893681 - DNA, 638 bp, Homo sapiens
aaggggagaaggaggagaagggggagaaatagaaggaagaggatgagaaattggagaaagaaggggaggagggaacagtagtaatacctattctacccatagtaaaatgttgccataaaaatcaaaggagacagtgcctatgaaaatcctctgtaaattgtaaagaactctacgaattcaactttttttgctgacctcctaatggatgttttcaggaattttactaagatttagagccaggcatatgwtttttaaaagagagagagatcatgctctagacaaattgggtgcctcattatacacttaccaggaggaaaatgctgccattcctggctaaaaacccatttgtcttgcaaatatctataatgaacagattttgggataaatactatgtaatctgtgatgacagttctctcatttcttttttattagttcaatcttctcagcatctgaaccacatagctacagaacctccataatcattaaggcagctgggacgtatgcattttttctcctttccttggcacatcacagagtccccaatcagtcccttgttacaaggcctatgttctagtagtagttaaatgcacctgtataagaatgccagaacagaaaagaaaacaaacagcagggtgcat

SEQ ID NO: 893682 - DNA, 653 bp, Homo sapiens
ttccatttgatggagtgattcatttacttagaatattttaatacctttctagtgctgtaggataaaggacaataccacactccctttactttctgctccagttataatagattactttcactttgttaaatatgccatgatctcttttctccctgggccttttgaacacatgatcttctctgcccttctactagtacgcccctgcaaacaccctcatctctactgcccccagctgcccttcaccttactatcctctatgacctgaataacttcctacttatacttcttaaatgcttcgaggaggcttttttggctccccaatatgttaggtgtatttgatacaaattcctaaacaactccrtatttctcttttcaaaacacttatcatgcttgaaatgtataattaaagtccacctttcaaacaagattacaaattccctgtccacagggaatttgttttgaatttctgactcgacttaaagacattgcctggtatatagcaggtgcttaataaatattggctgaatgaacgaaataaagcattccattccatgtgcatattataaacatatttgatgtttttgcccttcaaccaagatcatagttctctgagggagggaccatgttttatacttgagtgtccttagcagtgc

SEQ ID NO: 893683 - DNA, 653 bp, Homo sapiens
ttccatttgatggagtgattcatttacttagaatattttaatacctttctagtgctgtaggataaaggacaataccacactccctttactttctgctccagttataatagattactttcactttgttaaatatgccatgatctcttttctccctgggccttttgaacacatgatcttctctgcccttctactagtacgcccctgcaaacaccctcatctctactgcccccagctgcccttcaccttactatcctctatgacctgaataacttcctacttatacttcttaaatgcttcgaggaggcttttttggctccccaatatgttaggtgtatttgatacaaattcctaaacaactccgtatttctcttttcaaaacacttatcatgcttgaaatgtrtaattaaagtccacctttcaaacaagattacaaattccctgtccacagggaatttgttttgaatttctgactcgacttaaagacattgcctggtatatagcaggtgcttaataaatattggctgaatgaacgaaataaagcattccattccatgtgcatattataaacatatttgatgtttttgcccttcaaccaagatcatagttctctgagggagggaccatgttttatacttgagtgtccttagcagtgc

SEQ ID NO: 893684 - DNA, 653 bp, Homo sapiens
ttccatttgatggagtgattcatttacttagaatattttaatacctttctagtgctgtaggataaaggacaataccacactccctttactttctgctccagttataatagattactttcactttgttaaatatgccatgatctcttttctccctgggccttttgaacacatgatcttctctgcccttctactagtacgcccctgcaaacaccctcatctctactgcccccagctgcccttcaccttactatcctctatgacctgaataacttcctacttatacttcttaaatgcttcgaggaggcttttttggctccccaatatgttaggtgtatttgatacaaattcctaaacaactccgtatttctcttttcaaaacacttatcatgcttgaaatgtataattaaagtccacctttcaaacaagattacaaattccctgtccacagggaatttgttttgaatttctgactygacttaaagacattgcctggtatatagcaggtgcttaataaatattggctgaatgaacgaaataaagcattccattccatgtgcatattataaacatatttgatgtttttgcccttcaaccaagatcatagttctctgagggagggaccatgttttatacttgagtgtccttagcagtgc

SEQ ID NO: 893685 - DNA, 682 bp, Homo sapiens
tctgtactgcatcaaatcattcccctgcactctagtttccagttgggtttggccaatggtaaacgatggcaggtgaccagagtgggagaggagagaaagtctggtttattcattctcttggtttgctctctgctgatctgtgatttggcagtggcttattctcccacctaaggcaaagagatcccacagtgggcccttcccactgttaaagctttccctaggttccatcccttcccttgctccatcaagattgacagtgttagtggttcccaccattgctagtccctagggcttcaccatcccttagtggtttccttaagattgcccacaactttgttaagaagtctcccactgagtgtggcattaagttcctgctggggccctgactgatatgctaatatacataaaggccactatrtagtccctttctttgagtcagtgttgtagaataaacagaccactggactgtctactaaataaaataaaaccctgcattctatattcctatatttctataagactaaaaatggcattagtgccactatttcttgttcttcttgcacactgggcttccagctgagaatcagtcagtgtggtgtgtgaaaggacaaaatgaacatcattcatctctatgagttaactagtccagtagttacttttcaaatggagttgcatctgtatt

SEQ ID NO: 893686 - DNA, 677 bp, Homo sapiens
ttgattctggcaaggatcattaatgatttctaaatccattcaatgaaaagttgttggaaaacggtatgctcatatggtctaaagtgtcaccctacagataacttgttaattaccaaaggaaagttttcctttcaacgaaaagatttacagccaacaccttaactaagtaatttaagataacattacaaagaataggataaactactattttgtaccacttaatgtgatacagctcttgccaaaaacatttaacctaatctaatcatgaggaaacaatcagaaaaattcagattgtagaactctaaaaaatgttaacatcaggacactttagaataaaggatgttaaagaaacatgaaaactaaatgcaatgtgtaatactcaattggatcctaggagagacaatctataaataaaattgttgagaaaattgggaaaatgtgaatataaactacatytttggtaatatactttcaaagttaattttggggggtactgtgactatgtagatgaatcatcttctttggagatacatgctgaaattttagaagacagtggaatttaattttaaagagtaatcagtgaatctagatttgttttaacatcttgctagtttccaacttttctggaagcttaaaactttttaaaatccaaagttggtggaaaaaaatctagattt

SEQ ID NO: 893687 - DNA, 651 bp, Homo sapiens
cctttgttttggccaatttctcccttttggaatgactatatttacccagtatctgtacccccatcgtatctaggaagtaactagcttgcttttgattttacaggctcataggtggaagggacttgtcttgtctcagatgagactttggactgtggacttttgggttaatgttgaaatgagttaagactttgggggactgttgggaaggcatgattggttttgaaatgtgaggacatgagatttggaggggccaggggcagagtaatattatttggctttgtccccacccaaatctcatcttgaattgtatctcccagaattcccgtatgttctgggaaagacccagggtgaggtaattgaatcatggggcccagtctttcctgtgctattaktttgatagtgatattaagtctcacaagatctgatgggtttatcagggctttccacttttgcttcttcctcattttctcttgctgccaccatgtaagaaataccttttgcctcttgccatgattctgaggcttccccagccatgtggaactgttaagtccaattaaacctctttttgttcctatgtctttatcagcagcatgaaaacggactaataaacacacatacacacaaatcagctactaggaatagaaaataact

SEQ ID NO: 893688 - DNA, 612 bp, Homo sapiens
tttatttttttatgtttatttttgagacagggtctcattctgtcacccatgatggagtgcagtggcccagtcctagctcaccgcagcttctgactcctgggctcaagtgatcctcctgcctcaaccttctgagtagtcaggaacacaggggtgttagtttttaattttttgtagagatggggtctcactatgttgcctagactggtcttgaactcctggccccgagcaatcctcctgccttagcctcccaaatagctggaattacaagtgtaagccatgccacccggcttcattccattttttaaacaattatatctccccattgagaatgtgaaaaatgagatatgtggcagggctagggaaacaaagggttaagtaccttcttcttcaacagtgtkctctggggatgagaagaaccctggtcaataaacagatatattgacttgttattatttaaagttgtttaaccaggtagagataaacgaaagctttcagcagctgaactatcacacaaatcacaattaaggtggcatatgtgtttggaagacgtaaaatcaattcccgtgaagataatgttttagtctctatttgaacttgaaaacagaagtaaat

SEQ ID NO: 893689 - DNA, 542 bp, Homo sapiens
ctctgaggcaagaagctaagaattgaggatttgcagggcctgccacatttttggggatggggcagggaaaatgtttctcattccttccattcttctacagctttgagaacagaacacaaatcagttatccaatagcctagcctgtcctgtgacaatggaggagcrtgacattgaacccagggagggagcaaagcggtttaggggaattgaaacctactctgtaccgcacagaaatccagtgagggcagagtttgaaaaactggtaatacagaggaagagagaaaacggggcacaaaaaacctagaaagttactgcgttgataacagtttttactgagacccataaggaactgcagcacattgatggaacacacacaaaaaaagtcttttgtttgtgcttttgttctccaccaatctacatgaggttctgatgggatggatggcccacaccttccacccagtaggaggcactcagacttttagggccctagatggaggccccacagcaggggcagcaacagagccgcacccctcacctagagc

SEQ ID NO: 893690 - DNA, 645 bp, Homo sapiens
aagtgttaggtattactgtaacaagatttttagaaatcgttttaaaaagcaacataacgagtgcagatcacaaacctctacaatccatacaactctatgaaaaatgaaaacaactaacattttatgcaaaaaggcactagttgttcaggattgaatttccactgataggtatcttgagaaaggatgggggtatggatagaaagtgtgcatgcttttataattagtttgcctgcagagggaaggagaggtgtactttggctacaggrgcatttacaatgtaaggagttgtttctaatgataggaaagcactggccattcacataggttgaagaaaaagagccagaggagagtgagcagtttagagatcaacaagagctgaagcatgagtaaaggctaagcagaaagagagggaggctgggttggaagcccagataggaagattagctttgtccaaatgaaggagtacgccttcctttcaacctgtaggtcacaagattagggacacactgtaggtttgtcagcgtggagatcagaagctagagggatgtcaacagcctccttgaacgcatctattcaaccttgctgttcaccgtgacaccaaacactttgccctggagttgtcagctctcctggcttttgaatgca

SEQ ID NO: 893691 - DNA, 597 bp, Homo sapiens
aaataagggcaataaagattagaaagcaaagggggcgctagtttgggtagatagatggatgaggaatctttacgatcatagggctgcatttatgctcacgtgggcctggaatcagccattcatatccacatctgtcatcatgcagctctatgttgtctttctctttggggcctgttctttgctagcttgtgttggtaaagaattacatgaggccaggcacagtggctcacacctgtaatcccagaactttgggaggttgacgggggcggttcgcttgaggtcagcagtttgagaccagcctggccaacatggcaaatccctgtctctactaaaaatacaaaaattagccgggcatggtggcaggcacctgtaatcccagttactcaggaggctgaggcaggagaatcacttgaacccragaagcagaggttgcaatgagccgagattgcaccattgcactccagcctgggcaacaaagtgagacactgtcttaaaaaaaaaaagaaagaaaaaaagaattacatgaaaaaaaatagtttgtgttatttacaatcaaatcagccaactgtagagattgtctggcattgtacacattgt

SEQ ID NO: 893692 - DNA, 672 bp, Homo sapiens
cagataactgtagtaattatatactatgtcaactctctacaagtctcagcatcaactctcactacacccatttcaactcacggcaatttggatagatgctgacgttctttttttcctgttttacttattcacgaaaacaaatctaaaagaatagtttaaaagaagtaaaagaaaggcatgtcataaaaaaaggatgtgcacgtgaaccctgaactttgtgtttaaatcttccttccttcctcccctcccttgttctccccttctctttcttgatatgggaagaaaaagaaaatttcagagatgactttacttcatttgtgaagcttcctgacttctgcccagtcagggttgttcccttttctgagcttacccacaatatttttgtctctcttcgaacaccctactcaaacctgttttccagcttattggaagcacatattcttctgtcccttggtgaagcactccttsaaattagaagaatgacacattcattttgtaccctcacgggcccaccacatagtggacacccattaaccacttattaagttgaattttagaaaaattgtttgattttaaaaattcaaaaagtgcatatattcaatggagaaaactggggaagcactgagcttgctgcactccctcccctcaaatgtgaggggtaactgggggcca

SEQ ID NO: 893693 - DNA, 579 bp, Homo sapiens
gtaactgattaaaaaccaactacctcaatcgcctttgtagtgtgactttttttctttaaaaatatttttagaccaaataaagagggcacggtatcaaagccatgtgtagatgtggagggaatgaggctggactgcttctccattacagtaaactactgttctggagacattcagaaactccttargctcccatgaggtaaatgtttagcccaagaacatgcgtttctgggagcataccttaacaaagggtgtagatctgtctgaccaagaggcaaaataaaagtcagtatttctacttgagcaatcctgaaggtttatgcttctaggaaggaccaggttatttaaattgcaagctggaattcaaaagggatgttatgggctatgtagtcgcttcttcaatttccttcaagctaaggggatcttcaccaatcagtaccacagaaatcaccgaaaataggtgtcagccagctatggattggggtgaatattactcggcatttgaggtagcaaagaaataaccactgagtgaacactagaggatggtgaaataggtaaataggactatttcttaagcaagaa

SEQ ID NO: 893694 - DNA, 610 bp, Homo sapiens
ctagaagggattgaggtcctattgttagcctcctgaaacaaaacaattatcggccaagaattttgtatccagtgaaacaaagttttataaatgaaagatacagtcttttccagacaaacaaatgatgacagaatttgccactaccaagccagcactacaagaactgctaaaaggagctcaaatcttgaaacagatccttgaaatatgccaaaacagaacctccttaaagcatcaatttcacaggatctgtatatcaataatacagtgagaaaaacacaaggtattcaggcaacagatagcatgatgaatagaatagtgcctcaaatctcartactaacgttgaatatgaatgacctaaattctctacttaaaagacatcgaatggcagagtggatgggaattcaccaatcaagtttctgctgtcttcaggagaccctgctagagtgcttttctggcagccgccattggggggttcccaatttgcttctagcaaattgggaacaccttggcacctcaagcatagcaggtgcttgaccttgaggggccaaaaacaaagctgcagacctggtcccagcaccccatagttggagcatgaagctcaggagtgctg

SEQ ID NO: 893695 - DNA, 603 bp, Homo sapiens
ggggtggtttccccaatactgttctcatggtagtgaataagtctcacaagatctgatagttttataaggggaaactcctttcacttggttctccttctctctcttgcctgccaccatgtaacatgtgcctttcgccttccactatcattgtgagtcctccccagccatgtggagctgtgagtccattaaacctctttttctttataaattacccaggctcargtctgcctttatcagcagtgtgaaaatggactaatacaatcatattaattcttattgcttttacaaaagtcatgtaagaaatatatttcagcacattttagaatgactcaattttcatcagagatagttctatgtttctatatctccaagtgcattttatttaattttctttagtatgctatttatatttttatttgtgcaacatttataagtaggtctattttattgtacacttggtttaaattttatttgaatatatttttatagtagtttaaaaacgtattatggagaaatagcctttgttcaacatattttatatttcctgctcatctaaattatattggatcccaaaaagttgattttattttctcctttatttgc

SEQ ID NO: 893696 - DNA, 675 bp, Homo sapiens
ttcactggatttactgacaaagagataattgatgatctttgcagagggtttcagagtactgggggcggaagccaagctagagtgggaagtgatgaagaaaaatgagtgtagatcgttctttcaaaaaatgtgtctgtgaaggaatgaagatagaagaggatgtagagtcaagagaagtttggtggtgagtgtgtatgtgtgagtgtgtgtgtgtgtgtgtgtgtgtgtgttttaactggtagagttaagcatttctggaaagagccagaagacagaaagtttgaaataaaggtgattagagataacctacagaggacaagggaatctacaacagaagagactctttagtcaggggtagacccctcctttactctgatatgggtgggagaaggaagcaagggtagctttgcttgctggttaagtgggtagtgcacagtgccggaagtttaaccttgrcatctatttcctctgtgaggtaggaagcagatatctgcagggagtgtgaggatggaggaataggaggctttcgatgagggtggagggatggtaggctcaaaggtctggagtgagccaagcatgttggtgcatgcctgtagtcctagctgctcaagaagctgaggcaggaggatcacttgagcccaggagttcgaggctatagtaagctaggattatgcc

SEQ ID NO: 893697 - DNA, 567 bp, Homo sapiens
aagtggagttaccggcctgggttcacggcgtgtaagtaacggagcagagaccgggacgctggtctttggatgttaagtgcaagtggttccattgcccttcagcactggggagagagttgggggccgttttcttcttctaagtgatattttggaaccaacacagtactgccccattgccttccccacagccatttctttattacattawttttttcctgctgcttccaacccattctcttctgcacaaaacccccagtttcgctctcccaggctttcacacacattactcaatccacccgaaaagtactctgtactgcttcactcaaactccgacacccagcaagcctttgtcagggcaggaagatgcaaagtgcccctattgcacggttaggctggggctctaatattggccactggtctgcactgggatctcaggcaagtcacgtactgcctctcagcctctaagtgcccttccaattatagtctgccatcccatcaatcagtggatgcaatcctttttaatgagttatccagctaactctcaatgcgtctagataatagaatgct

SEQ ID NO: 893698 - DNA, 657 bp, Homo sapiens
ttttttttccaactctctaaatcaggatacatggactcctatgtgtgtgagatggtcaggagatgcagtttggatgagaaagtgttgaagtatcaattggttatacaacaggactgaatatttgaaatcaggactgttctggaaagcttagcatgggaggaggggtcccatacgttgacgccggtgcccttccagatttctcccaaataaaatgtgctcttctaaagtaagttccctgattattcaactgtgtgctctcatgaggcactgagacaaatacaccaaaatacacccaaacctgtctacagtcatggttaaatgcaaattctatrcatatgtttctgttcagtgattaagaatgtaaaaagctttttggcacttgttagttgaatgatttatacaatactcctctttgctcttcctcccttctcttccagagcctgtgaacttgttgtttctgaaaaaggagtcagttgctattggaatattatttaaggagacacatgtcaatgccattctacaaaaatggtactagtttacgccatgacttaaaagggtgatgggttacacattagaatttggtagcacgatcaggtgatttatactttgtaagacatggtcacagtagggagtgtctgaaggggtagatccttcacc

SEQ ID NO: 893699 - DNA, 625 bp, Homo sapiens
ggcttccttaatacccacggtacatccacttgagattgccaccctgtgaagatgttcattagatctcaaactctgacatattctcaactccaacttttgttccacttacatctcaaaaatatttcaaaagtgctggttaacctctttgttgtctctttcaaagtggcaaatgcctgaagaaaaacaatatagcttcaaatattatgcttgctaattyttttttttttttttgagacagagtctttctctgttgcccaagctggagtgcagtggtgtgatctcagttcactgcaacctccacctcccaggttgaagtgattcttgtgcctcaggcttccaagtggctgggattaccagtatgtgccaccatgcctggctaatttttttcatttttaatagagatggggtattaccatgttggccaggttggtcataaactcctggcctcaagtgatctgcccacctcggcctcccgaagtgctgggattacaggtgggctcaccttttttttgattcttcctttcccagatgtcatctcaaaagtttttctacactattgtttttattaaaagattgtaaatattttgtccagattttaaatcttcttcagaagtagaatttgtct

SEQ ID NO: 893700 - DNA, 516 bp, Homo sapiens
cttttttttcttataaagttgtttaagttccttatagattccggatattagacctttgtcagctgcatagtttgcaaaaattgtctcccattctgtgggttgtatgttgtctctgttgatagtttcttttgctatgcagaaactctttagtttaattagatcccacttgtcaatttttgcttttgttgcaattgtttttggtatcttcatcatgaaatctttggttgtgcctatgtcccgaatggtactgcctargttgtcttccaggctttatatagttttgggttttacatttaagtctttaattcatcttgagttaacttttctatgtggtgaaaggaaggggtccagtttcagtcttctgcatatggctagccagttatccccataccatttattgaatagggagtcctttctccattgcttgtttttgtcagatttgtcaaagatcagatagttgtagctgtgtggcctcatttctggggttctctattctgttccattcttctgtgtgtc

SEQ ID NO: 893701 - DNA, 613 bp, Homo sapiens
atacagtgttgaaaagaagtgtcaaaattagacattcatgcctctttcttgatcatgggggaaaacatttagtctttcatcattgttgtatgatgttacttgtggatttttctaaggtaccttttgtaggattgaacctaatcctcttggttgagaaatttttattgttcattttaaatcatgaatgtgtgctaaatttttaaaaatgtttttctttgtcttttgagatgatcatgtggctttaaaaaatttattatatactatatttcattaattgatttttagatactaagtcaagctatcatttttgcaataagtcccacttagcatgggtgtatgatctgctttaaatattgttggattcagcttactaatgttttattaaagagttttgcatctatgtttatgagatatagtaatctgtatttttattccttatgtttttgggctttaatattggatgaccctaractcatgaaataagttgagaaattgtttgactttttctatattttggaagagtttgtgaagtattgacatgttttgtttttaaatatttggtagaattcacttccgaagtcacagaagcctggcttttctttgccgaagattt

SEQ ID NO: 893702 - DNA, 502 bp, Homo sapiens
gctttgttataaaatttagatctgtgactcatcctgaattaatttttatgtacggtgtgaggtaggaattaaggtgcatttttttctatgccaatatctaattgcttcagcaccattgattaaaaagaacgtcatttatccacttaattatgggtgtctttgccatagatcaaaggactgtatgtgagggtctgtttctgagctctctattttattccattggyctttttgtctatttttgggctaaaactatgctgtctaaattattgctaagtagtaaatcttgaaatcaggttgtttaaatcctccaactttgtctttaagttttcttgtattttttaagatcctttgaatttccatatgaattttagaattgacttgtcaatttccccaaaataaactgctaaaattttgaatggaatcatattgaatttatagataaattttgaaaatcaatgccattttaacaaacttgagcttctcagttcatgaacataggata

SEQ ID NO: 893703 - DNA, 662 bp, Homo sapiens
gggtaagtgaagtctgcactggcatccaaatctcgattagcaggggatggcaaagtgaggggcgtgtgtgcatgtgatcagaagccagaggtgagaggagcctggaggactagaataacagaacagagagtccacatggctggagctcagagtggggcaggaagcagaggagatggtgaataggggaagaggagctagaagggaatagaggacaaagggttttgttaagaaaacttgaccttaccccaagaatattggggaaactttggcgagcttcaagcagaaacattacttgattacatctgactttcaaaaatgtcactttggtgkgcagtgtgaagaaaggattagttacacagggcaatggtggaaacaggaagagcgggaggactggcccttgtagaaatcaagtgagaaatcctggtggcttagattcaggcagtcacagtaggagtggactgaagtgggtggatataaggggatgcctttaccgacccagagatcagggaggaaggggaggtttgcggggaggaaagatgatgagggaagtgcttggggtcatacaaatggagtatttagcaagcagctgaatttgtgagttaggagctcaggatagagatgagggctgaagacacaggtagatttcaaagtattctgcacaa

SEQ ID NO: 893704 - DNA, 670 bp, Homo sapiens
tgcttcaagccaaagaacaaaagaaaaggtttctgtccagaagcgaagtttactactaatgggaatcggaaaagcagcccaggccattgtttcaataaacagtgatgacttttcctttacttaaaaatatccctttaacaattcaacttcagccaaaactcctgtcactttttactatatatttgtgttattacaagaaaccakgaacataggggaaacaggcctctgtcctccatgtctaatgggtctgttgtatgcctaaaagccaccgtgtttcctttgagctggtctgattaattgctagtgactacttgcttgttgaggatggagaaggagtggagaggcaccgaagggtatgatatgtcgctgccttcacaagggtaaataaatgctggcaacaccttggggtggggagtagttcattttgagtagactgagagagaagtaaaaagccttagtttccaggaaatattagaatgggtaaataaaaattcagatggggctcagtcagaatactactcgattaataccacagactgagcttgtcacctgtcccctcccctaattttcccttgaattccatagagctgtctatgtcaggtatctgtgtacagaaactttggcctcaccagcaaatactataattattttgaggtcatgggaggatcta

SEQ ID NO: 893705 - DNA, 673 bp, Homo sapiens
gtcaatggcacacttagctgcctgctacctaggccatcatgtcttccctgccaccttgtgtggccctgtacaccaatcaaagaagttatgccccaccctatccctttcctccactcacccaaatccatgccaggtcaagccgggggggatccagactcatgaagtattccctaactaattgtctccctcaatgatctttttcttcttttttgcctaaggtgtactgatgaatctaattagattatatgataataacaccgtgtcctttattattttttccccaggaatactttcaartgatcgactccttttcagctttcagttctcagtggaatgacacttcttggagaagccttccctgaattcccaatctaaattgttctctcttgctgcccgtgtgaccagtcacagcaacctcttttaatttcttcgtaccgctcaccaagatttgaaattttctcacttgtttatttacttgttttttatctcaaactcccaccactgagagtgactgtgtttgcacagatcaccactactttatccctactgcctagaacgataacgataacacaatagacactcagtaaatatttgttgagtgaatgatgcaagaatcatagggtggggtacacagaggtgcttaagaaaatccttactggatgaatcagagctc

SEQ ID NO: 893706 - DNA, 640 bp, Homo sapiens
catccagtcaagcatcacatattgtctcaaaactttcaaaaacaaaggacaggagtgatgttagggaagatggtgggtaggaagtgccaggaatctgtctctctgcctagacaacaattgcactggcagaatctgactgatagaactattttggatctctggagtcttgcagcttccrgaggtcagcttagatggtggtaaatcatggctaattttggtcaatttcagctcttagaacagtagcaactactcacttcccatcctccagccctgtggcaggcagctgtgccaacaatctgggtgcaacttgcatgtggctttcaagaaccagggtgggcaacaagtaccttgtcctccaaatattgaggatctgtgtcctcataactgactatgaaggtgcaggccagaggcctttatagcaatccccattgcctaaagtggcttccagggtatgtgaagataattgccttaaaaaaatttccctccagttttccccttctggggagccaaacatttaaggattagcacatttaaaagcaataacatatacaagggaatttagtaagtcaccatgcacgaccaaggaaagcagtgggctcagaaatgacctgagaagaccttaagtttacacctcatgctg

SEQ ID NO: 893707 - DNA, 704 bp, Homo sapiens
atataattcagtcccatctctgttgagtgtgggtgatagacaagtacataaacctaaatgagtaaactttttactcacatctcttttgagacaaggagtcctttgagtggcttaagtcactcagtgcttgaaaccttcatttcaaggtttatgaaaagaacctacattagtcctagtctgagaaagagagacacctgaaggtggcaagcccctaaaccatcctattcttggctccactcgacccttatcctgccattcccatggctggccttctgctctccactctcagttgtagggtcacaggggaggagattaagtcaacataataatatatttacaaatcacataatttctataaaatttgagttgtttttttgccttgattcctagaatttaaaaaagtaaaacaagaacaacagcaaacttgtgatctgttyagaaaatgtgtcacaacaaagaaatagcagtggctgacacttttgacagattcccaatcaggagtcaggggttgtgctgtttcacctctatcacattattcaatcctcccaacctgaaaagatggcatagctggccccaaatctcagcaaggacactaaggtctggagatgggggcggactgcccagtacatgcagtctatcagtggtggaaccaggagatccctgccattgggcctgcagctgtggagccagccgcttctggatct

SEQ ID NO: 893708 - DNA, 608 bp, Homo sapiens
cgtaacaataacctgagcattcatcttatgaaactagaaaagcaaaaacaaaatagacccaaactaagtggaaggaaataaaaattgcaagagcagaagtcaaggaaattgaaaacagaaaagcagtagagaaagtcaatgaaacaaaaatctgattcttttaaaagaccagtaaaatttattaactccttgcaagagtgaaagtaaaaaagagagagcaaaagttcctaccaatatcaaaaattaaaatgaatggaatatgagtactatacacacaaatatcatttcctcttctatctttccacaggcctgtgcacctttttcaaggagaaggacaagggtagagatgttagtaccctttatctccataacataggattgtgggtgctgaatggagcttacttacagctgtattcctcatgtcaaaaacttcccaggactttgaattcgactsatttgttttaattaaatcattagccaaagtttacctcttcagctggaacaactcactttggctatttcagttcttctcataatcatggagaaagttatgtaatgatttaaaatattctcaaaggttcttctttcactaaaacgttactaaatcc

SEQ ID NO: 893709 - DNA, 636 bp, Homo sapiens
acttatatatttaagagattagttgattttcatgacagttggaatgagtgaatcactcctttcctttttcctgttcccttgcctgagagctaaaaaaagacttcctaattaagatttcactagtaattgatttcttaattatgaagctggtggtctggtatttttaaaataagagctgtaagtgtccttgaaattggcaccttaaaaaataattcccaaagtaggcaagactaagaaacaccatttggcctatggcttcagaactttaaattaattctacctttttttgctcctgcacccttgtgccygtatgtccaaataattttacatcaatttttgattctagaattgccgtttatttaactacttgctcgatcataagaaattatgagttatttatatcaatttttaaagtttttttaatgcaaccattggaaatagctattgtgtatttcatattcctttatccacctttttacacatttgacatattcagtcctaaaataaagatggtatggatgtttttaacatatgttttgttctaaaacaatgttacaattactacaagaaaaaaagaaccaatttctgtgtgaaaaattaaaacagagcattggattaaaattttatgcttctatc

SEQ ID NO: 893710 - DNA, 633 bp, Homo sapiens
agtaattagacaataaatataaactagaaaattaatttatattagcattaaaatatcaactacttaggaacaaatctaatgaaaaatatatcttaaacaggaaactacaacttattactgaagaaaataagacagagaaatgaaggaggattccaaccttgtgcattaatggatacaatttgtaaagatgtcaaatatctgcaaatttatctagagtttsgggaaattcaatttcaatctcagaaaatatttatggaaattgacaagctgatattcaaagatatgtggaaacgtaaaggccaagaataggtaatagaatcttgaagaagaaagccgatgctagaggactgcactgcaaaatactggaattgattaaaagacagtaattaagttagtaacagtgatttatgacaaatttgacacttaaatttactgggaaaaggatagatttttcaataagtggtactgagccaagtggatatcaatatgctgaaaaaaattaatcttggcccctttcaccatgtacaaaactgtttaggtttatatattactaaagctttaggaaaatactttcatgatcttggagatggcaaatacttggtaaaggaaatgaaaagaccaaaggaaaagttt

SEQ ID NO: 893711 - DNA, 554 bp, Homo sapiens
tgctataatctatcacatttggtacgtttttcttagatgcgttttctggatctactgagagtttttcttttttttttcctataatcaattaatgtggagattttaaatgataacttaaaaatattaacctattttgcattcctagggtaaattgyactagtgtaagctttaaatttttattttgtaaataatacatagttttctatataacaaataagactatctctatcccatctatttccctaaaattagattttaataatatgtggaacatgtacattgtcaggggaaaagtttagactatagatttggtttttgaaaggctatttttttgttggaatttttttttattattcataaatcactcttatactcttaataattgtattagtttgctgcagctgcataacaaattaccagaaacttactaggttaaaacatcacacattttcttatcttacagcttccatcaaccaggagtctgtatatgctttacctggttcctctgctcagggtgtccaaaggctgtggtcaaggtatgtgcggaggcatat

SEQ ID NO: 893712 - DNA, 579 bp, Homo sapiens
gatgcgttttctggatctactgagagtttttcttttttttttcctataatcaattaatgtggagattttaaatgataacttaaaaatattaacctattttgcattcctagggtaaattgtactagtgtaagctttaaatttttattttgtaaataatacatagttttctatataacaaataagactatctctatcccrtctatttccctaaaattagattttaataatatgtggaacatgtacattgtcaggggaaaagtttagactatagatttggtttttgaaaggctatttttttgttggaatttttttttattattcataaatcactcttatactcttaataattgtattagtttgctgcagctgcataacaaattaccagaaacttactaggttaaaacatcacacattttcttatcttacagcttccatcaaccaggagtctgtatatgctttacctggttcctctgctcagggtgtccaaaggctgtggtcaaggtatgtgcggaggcatattgtcaaaagaggtctaactgggggaagttaagctttcaggtttcttgggttggtggcaaa

SEQ ID NO: 893713 - DNA, 554 bp, Homo sapiens
tgctataatctatcacatttggtacgtttttcttagatgcgttttctggatctactgagagtttttcttttttttttcctataatcaattaatgtggagattttaaatgataacttaaaaatattaacctattttgcattcctagggtaaattgtactagtgtaagctttaaatttttattttgtaaataatacatagttttctatataacaaataagactatctctatcccatctatttccctaaaattagattttaataatatgtggaacatgtacattgtcaggggaaaagtttagactatagatttggtttttgaarggctatttttttgttggaatttttttttattattcataaatcactcttatactcttaataattgtattagtttgctgcagctgcataacaaattaccagaaacttactaggttaaaacatcacacattttcttatcttacagcttccatcaaccaggagtctgtatatgctttacctggttcctctgctcagggtgtccaaaggctgtggtcaaggtatgtgcggaggcatat

SEQ ID NO: 893714 - DNA, 563 bp, Homo sapiens
ggaatcttagttgcctccaagtttcaacaattatgaaaaagtgttcataaatgtccctatggaggtttatgtgtgagcatagtttttaactcatttgagtaaatactaagtagagctattgctagattgtattggtaagattgtgtctaattttgtaaactgccaaattatacaaattattctccaaactttctatagcatttttcatttccaccagcaatgaatgagagttcctattactctgcatcctcatcagcatttggtattgtgttctggattttggccattctrataggcataaaatgatatctgatggttgttttactttgccatactctaatgatatatgatgttgaagatcttttcatattcttattttccatcatattccttctttgatgagacatctatttgggtcttttgtccatttattaacatctttgttcctgttcttgttaagttttaaaagttgcttgtagatttttggaaaacagtcgtttatcagatgagtcttttgcaaatattttttccagtctgtggctgttcttttcattttcttaaca

SEQ ID NO: 893715 - DNA, 639 bp, Homo sapiens
taggataaatgtatccacgaataggaaaaaaatatattgtctttattcctctagatgttgcccctaatttggtgtatcacagcaatacccaaagattaagatgcaaagtctagggcaggagtgtccaatcttttggcttccatgggccacattgaagtagaattgtcttaggccacacataaaatacactaacattcctaatgatagctgatgarctaaaaaaaaaaaaaaaaaaaattgtgaaaaaaattgcaaaaaaaacacctcataatgttttaagaaagttcaagaatttgtgtagggtcacattcaaagccatcccgggctacatgtagcctgtgaaccacaggttggacaggcttggtctagggtcaggaatgcaaccctcctggggtaactgcatatttgctgcttcacctcctgaggtctataacctccactgcccaaatactataaaacagcaattccacttaccttttatttatctctattttcctgtttcacattttttctccatagatcttatcaagaagtaacatattacatatatttcattgtttatttccattgttctatgagttaatctagcttctctgagatgcagacaagatgaaattactcatgcaagagacctgccgg

SEQ ID NO: 893716 - DNA, 664 bp, Homo sapiens
tgtcagaccttgatgccagttggccctgggcaaaggataaaaagaacaaagtaaaggatgaagcaacttagcctgctatacagacctaagagacttgacaaggctattgtaaagttcttgcatcaaaatgtcccatcaaagaagaaccatatcaccctcctgaatgagatcacctttaacacccttgccttattcaatcgttggcacagagaaacaacagaaagcattcccttggcacaaatgactaattttagagcataatatctgtaattggcagttaattacatccctcacaaatggagatctgacaggcatgcatcaattctgtctctacctattgaagtacaggggcttctttattcatcgaactatgctaaacacctacaagagtacatggrtcacagtaataatcaacaaatgtattagaataaatgaattgtctctggcaaaaaaagatgtttgtattttctctaatgtcttcttggaaattagtcttcttccaagagctactggtcatctggaattatagactaccttgggggatgtctgaatcttcttgaaaacttcacaatagggcaagaaaaatttttttaaaggagctatttgaccagaaaccagagaagtgtccttgcagaacacaaattatccctaacaccagtcactg

SEQ ID NO: 893717 - DNA, 650 bp, Homo sapiens
aaggttgataacagtggagagtgtgctaaagttttgcagagttattgatttcctcagcagacaggtgaactgagttgggcctatgtgacccagagctctttgttctggcaactcaggctgtgagcaacctttgacacatcaatttttgtcacggattattatgttttctgtgtgagccatgatatgaaattgctgggaatcaataatttatgataatacattgaaagtatcctgagcaatggggaatccacgtggagtaaagcaccaggctgtggggaatcctcagaggtcatcatatttctttacaacgtccccaaagtgataactggcaatatttcacttacagttgataataacttttaraggtggatactattatattgcttattttatagatggactaacagaggtcattcaaagacctctgctgaataacctttcatctttatagaggcagccaaaccacaatttttacaggggtaaaatgcacccagacaaaggattagattttctgagaatcagttgtaaagacaggtgattgaattttccaaagatgacaaacagtatctcctacaaaatatgattttctggaaatatgccactactcctctttaatctgcaaaggtttatgtatgcgtgcaggaagaggc

SEQ ID NO: 893718 - DNA, 586 bp, Homo sapiens
aaaaaattctgtcaatttctgtttttttaaattcatatttcctcatatttgtacatattcttttatcatttattatattttatctactaaaccttatccagcttgattcacccagcatttgtggttcagatctggtcaaacagaagtgctttgaatccaatatgactgtaatttactggaattgtacaccctgagtcaggatttagagctcagtattcttatcttgactgtttttgaatccagtgaaaacatcaagggttctctcctggtgtttttagtgaaaggttcacttttataactccctattattgtagaagattgttaaagctcatactgaattggaaatgttctaatatcctattgcagttttagttgttttaattaataataatgcatgctgcaatatcaaacaacartatttcagtgacttaataggtggagaggccaaaggaaaacttcccctttgccctctgggcagtccctaaaaatcaagtttcaaaaggtgaaaaggaaataaggaagtactttagaggagtaataaaagatttttaggggaattcagtcggcttggagagcacacagtgcc

SEQ ID NO: 893719 - DNA, 633 bp, Homo sapiens
gagtagaataaaatggctgactcttcaaactgagacatcagctagtttcctgcttttaaacagaacagaaatggtggcttttcctgtgtgtaaagtctgctggtttttgagctggcttttgaaccatcagttctcctaagtctctaacttgttgaatcacccagaaaatcrtgggatgtgtcagcctccataatcttatgagcagtttccttctttataatcaatttctccctatgtatatagatattataagggactagcttacaataaatattaatatttaaatagtaaaatactatatatgtgtatatgtgtgtgtgagtatatatatatataccactgccatatatatattttatatataattatatattaatgatattaatatatatatatatatatatggcagtgagtgtgtgtatttgtgtgtgtgttttctattggttctgtttctctagagaactataatacagtatggatgtgttgaacaccacctttccccccattatattgaccagaaccagatttatggtcttgtctaaaagaaagggtggtaagtagtatagtttttcatacatccagaaagaaaatttaaatggctttataattaataataatatttctgcctcattc

SEQ ID NO: 893720 - DNA, 633 bp, Homo sapiens
gagtagaataaaatggctgactcttcaaactgagacatcagctagtttcctgcttttaaacagaacagaaatggtggcttttcctgtgtgtaaagtctgctggtttttgagctggcttttgaaccatcagttctcctaagtctctaacttgttgaatcacccagaaaatcgtgggatgtgtcagcctccataatcttatgagcagtttccttctttataatcaatttctccctatgtatatagatattataagggactagcttayaataaatattaatatttaaatagtaaaatactatatatgtgtatatgtgtgtgtgagtatatatatatataccactgccatatatatattttatatataattatatattaatgatattaatatatatatatatatatatggcagtgagtgtgtgtatttgtgtgtgtgttttctattggttctgtttctctagagaactataatacagtatggatgtgttgaacaccacctttccccccattatattgaccagaaccagatttatggtcttgtctaaaagaaagggtggtaagtagtatagtttttcatacatccagaaagaaaatttaaatggctttataattaataataatatttctgcctcattc

SEQ ID NO: 893721 - DNA, 579 bp, Homo sapiens
catttgcttgtcttcttttaagcaatgtctactcagatcttttgattgttttaaaaatattgctattgaattatttatgaatttcttatatattctggatattaaaaccttatcagctgaatagcttgccattttttctgcattctgtaggttgtctcttcattttcttaattgtttactttgctgtggcagtagctttttggcttgatgtaatctcatttgtctatgttttcttttgttgcctgtgcttttggggtcttatccaaaaaattcttgtgcagaycagtgtcataaagtgtttcttttatgttttcttatagtaatattaccatttaggatctcacatttaatactttaataatttttagttgatttttgtttatggtgagacctaggggtttatcttcattcttcactgcatgtggacctccagttttccctgaaccatttactgattagagtacctttctccactttgcatttttagcaccattgtccatagtaagttcactgtaagtgtatggaattcttctgtgttctctattctgttcctttggtctatgtgtctattttgatgcc

SEQ ID NO: 893722 - DNA, 610 bp, Homo sapiens
caaagagttcagggaaatattcagtttcatcaacattgggaaaggcattaaagagttgaagagcaatgcacttttccatgccttgcaaaacaccatctatacaggaattgataaccagggaatttggctgcttcagcagtagaaaaaactaacaaatagtctgagttgaaaatatggctttaactttttcttcttgttctatgtgaggyccttaatacattaaccatagtttgacatataatatatgaccaaaattttattttatatttttattttttgaggaaactttcctctgatacatcaatgctactgtaggaaatgaaaatgcgaatgaaaaattaaacattatctaccactgagggccttgagattactttgaaacagattatcagcctgtttaaagaaattatgaaaaaacatcaagttatttctgttttctttggcaattatattgtattatgtgtgctcttcaaaataccagtagaagtgcttgcctttccctgctacagtaggtaagaaaggcaccaaattgaatataaaatgtgatcactttttcttttactctccttctttccacagactttccagtaaagtcaaaacaaacaaatag

SEQ ID NO: 893723 - DNA, 506 bp, Homo sapiens
aagacatactgccctcttttgaacaaagtaaaatttcagggaaaaacggtttttttacaaagcaaaatcagagtgcatagaaaaaataaatgcagagatgatggtaaacaaagaagattaacttgcacattttataaagattttaagaatgctgaatttgattttaytttctcaaacttttagtatgtgtgtttgtttactttcatgataattcttaaatgcatttgaacacagtttgcagtttaaagaatatatctatacatatggaaacccttgtcttaaagatatctaatgattgttttaagtaataaaaactctgatattctctgcagattccacctgaagtaatttattaccattttgttattgctattattcacctctatgaatgcttttttacttgacaagtctgtatccgtagtttagcaacgaggccagaacaataaatctgtcactgtgtgatacactctgggtacaagtttatgagattgtctccatgtagatgg

SEQ ID NO: 893724 - DNA, 610 bp, Homo sapiens
caaagagttcagggaaatattcagtttcatcaacattgggaaaggcattaaagagttgaagagcaatgcacttttccatgccttgcaaaacaccatctatacaggaattgataaccagggaatttggctgcttcagcagtagaaaaaactaacaaatagtctgagttgaaaatatggctttaactttttcttcttgttctatgtgaggtccttaatacattaaccatagtttgacatataatatatgaccaaaattttattttatatttttattttttgaggaaactttcctctgatacatcaatgctactgtaggaaatgaaaatgcgaatgaaaaattaaacattatctaccactgagggccttgagattactttgaaacagattatcagcctgtttaaagaaattatgaaaaaacatcaagttatttctgttttctttgrcaattatattgtattatgtgtgctcttcaaaataccagtagaagtgcttgcctttccctgctacagtaggtaagaaaggcaccaaattgaatataaaatgtgatcactttttcttttactctccttctttccacagactttccagtaaagtcaaaacaaacaaatag

SEQ ID NO: 893725 - DNA, 605 bp, Homo sapiens
ctgaggtcaggaattgaagatcagcctggccaacatggtgaaatcctgtctctactaaaaatacaaaaaaaattagccgggcatggtggcgggcgtgcctgtaaacccaactactgaggcaggagagctgcttgaacccaggaagcagaggttgcagtgtcctaagatgatgccattgcactccagcctgggcaacaagtgcgagactctgtytcaaaaaaaaaaaaaaaagaaaagaaaagaaaagaaaaaagacagatggaagtcaggaaattttacatgcagaattttttacctaaaatttaaaaaatgaatgatgccaaggtttatatcaatttgaattatacctatttccactcaaatgtattaaataaaagagaaagataaaaaacttaagcaagagaacacaaactttatattcagaaaggtaaactacagctgtctttgacagttttaactacaaaattttataataaccacattttcaaaagattaggtgtaattttatataatacataatttattagtcacaatttataggctattagaagtttgacatggataagtgtactaaaagcattttgaagttgcgaaaatcaaaatat

SEQ ID NO: 893726 - DNA, 595 bp, Homo sapiens
atactctagagatattttccctaggttttaaaacatcgttgaaaggtagcttttattgtcaccatattaccaatgagaatgtagatccaacaactagatccaaaagtttggaacttgtttccaaaagtttgagttgtatcacaatacatcatacaatgttcatttttcaatatcagacataaatatgctcrtgtatatttttgtctaaattatgttgtattatttgcttcacaagttcttgttgccatctggatcattaacagaaaacataagacagttgcacaagtaaattataatagttttgaattgatttgcagattcagtgatatgctttgggtcaccatgtaaaataagtccgatgtcaccaacaagcaagagagaaatggaacactaagctggaattttcacaggaaattataattataatcttaaaataatcactgagtacttttccctgttctattgaaatatatttaactctaaataaacaaaccaaaccgaacgagacaagggtaaattttgtgatacagctatactacttgatttccatttgcttatttactcctttatttattttttatttttatagatgtaa

SEQ ID NO: 893727 - DNA, 630 bp, Homo sapiens
taccactgggagccctcaattattatttgaagatgcccaagttagtctgttggaagatgagacaatgtggaacaaagaagagccattgatgaagacttggataacctgttggaatgttaagcaatatagatcagaaaacattcatcctgactaagttcccctaaactaaccaggctgccacctgtcagaaataattgaggccaacattgttcatccagtcattgatcaaccagtggcagccatcctgccaggtaatataattctaaccattattggttaaatttaaatgattgatttttttactttatagaacattgtttatataaaccaacatacataactgtatatattwtatacagaatagcagacaacatgtgctccatgttcacattggtttctgactatataaaagctctggccacataaaagttgcatacaagtcttatcttgaaaattttgatataccttataattttttaatatccatatatagtaaagtataacatttacttgattaaagcaatgaaacaacacctttctgcaactgtatttatttacctacaaataatcctataaaattaaaaaaaattccacttaaatgcacaatatacaaattcattaacactgtca

SEQ ID NO: 893728 - DNA, 593 bp, Homo sapiens
aagtaaccctctgtataaacaatagatcctggtttgtaatcccagcactttgggaggccgaggcaggtggatcacgaggtcagtagatcgagaccatactggctaacacggtgaaaccccgtctctactaaaaaatacaaaaaattaaccaggcttggtggcaggcacctgtagtcccagctacttgggaggctgaggcaggagaayggcgtgaacccgggaggtggagtttgcagtgagccgagatcaccccactgcactccagcctgggggacaaagcgagactctgtctcaaaaaaaaaaaaaaagatcctggtgatgatgatcactcatagtactatgggctgtatgaattgtatggaccatttaggggcacagtgagaaggtgggtacttgcaagtcaatgagagaggactcaggagaaaccaattctgccaacatcttgatcttgaacttctaaccttcagaactgtgagaaaataagtgtctgtgatttaaaccacccagtatgtggtattttattacagaaatactagtatactaatattgtcatgttaatcactcttgtattaagatgaaaagaaaacatttaa

SEQ ID NO: 893729 - DNA, 610 bp, Homo sapiens
caaagagttcagggaaatattcagtttcatcaacattgggaaaggcattaaagagttgaagagcaatgcacttttccatgccttgcaaaacaccatctatacaggaattgataaccagggaatttggctgcttcagcagtagaaaaaactaacaaatrgtctgagttgaaaatatggctttaactttttcttcttgttctatgtgaggtccttaatacattaaccatagtttgacatataatatatgaccaaaattttattttatatttttattttttgaggaaactttcctctgatacatcaatgctactgtaggaaatgaaaatgcgaatgaaaaattaaacattatctaccactgagggccttgagattactttgaaacagattatcagcctgtttaaagaaattatgaaaaaacatcaagttatttctgttttctttggcaattatattgtattatgtgtgctcttcaaaataccagtagaagtgcttgcctttccctgctacagtaggtaagaaaggcaccaaattgaatataaaatgtgatcactttttcttttactctccttctttccacagactttccagtaaagtcaaaacaaacaaatag

SEQ ID NO: 893730 - DNA, 578 bp, Homo sapiens
ttactcatgtaaccaaacaccacctgtatcttaatagcctatcaaaatataaaaaaaattcagatttatcacattgcctacaaatgtcatttagaaaatggagaaacattttaatattaaaataaaacataacaattaaaamaaagacttcctcggacaaataaaagctgaaggatttcatcaataccaggcctttcctacaaaaaaaatgctaaagagagtaattgaaacagaaagaaaatgacattagtgagcaatatataatcaccagaaggtataaaactcactggtaatggtcagtacagagaaacgcacagaataatataacaccgtaactatggtgtgtaaactacttttatcctaagtaaaaagactacaaaatgaactaaacaaaaataattaacaactacaacttttcaagactgactatgtctttatgtctttttgtactgactatagtacaaaaagatataaagaaaaaatgaaaagctaaaaagcaggcagatgaagttaagcacagagtttttattagttttccacaagaaaactgtaggtgcatataaacaaattcaatgaag

SEQ ID NO: 893731 - DNA, 578 bp, Homo sapiens
ttactcatgtaaccaaacaccacctgtatcttaatagcctatcaaaatataaaaaaaattcagatttatcacattgcctacaaatgtcatttagaaaatggagaaacattttaatattaaaataaaacataacaattaaaaaaaagacttcctcggacaaataaaagctgaaggatttcatcaataccaggcctttcctacaaaaaaaatgctaaagagagtaattgaaacagaaagaaaatgacattagtgagcaatatataatcaccagaaggtataaaactcactggtaatggtcagtacagagaaacgcacagaataatataacacygtaactatggtgtgtaaactacttttatcctaagtaaaaagactacaaaatgaactaaacaaaaataattaacaactacaacttttcaagactgactatgtctttatgtctttttgtactgactatagtacaaaaagatataaagaaaaaatgaaaagctaaaaagcaggcagatgaagttaagcacagagtttttattagttttccacaagaaaactgtaggtgcatataaacaaattcaatgaag

SEQ ID NO: 893732 - DNA, 653 bp, Homo sapiens
actgttgactacagaatagctgatgatattttcatcagtgaattcatttttgccttcaacttgctataatacccttatttatcgtcatttttacttatccgtattttaaattcaatttcattctgtgcatttgtgttatgtaacttaactattcgtgaaactgaatttggatagcactaagtaaataaagcaaacaccaaatcaccacagaaagtaacacaaaaaattgtcaatctcttaggctgctgtggactgtaaatgatgaaaatataactcaattatttttggaaataagaaaaacacagtgttttcctcaggaaatccaacactggggtaaatttcaggttggtttaataatcagtttagcaatattttcaagtgtttamattctccatatatcttaattgtctaatccttggattggtttcactctcatccacgtagcaagattgctgcaacaattctggttatcttgtcctaacatgacagattcagacaaagagacagaacagtccttcctgctggctatttcactggagaaataatacattttttttcagaagctgcctcctgtttcactaggcaggatgttttaacatttgcttttctaaaacagcccgaagcaagaataatttaattattacagttttcct

SEQ ID NO: 893733 - DNA, 579 bp, Homo sapiens
cctgaaggaagcactaaacatggaaaggaacaaccggtaccagccactgcaaaaacatgccaaattgtaaagaccatcaatgctataaagaaactgcatcaattaacgggcaaaataaccagctaacatgataatgacaggatcaaattcacaaataacattattaaccttaaatgtaaacgggctaaatgcccccagttaaaagacacagaccggcaaattggatagagtcaagacccgtcagtgtgctgtgtttgggagatccatctcacatrcagagactcacataggctaaaaacaaagggatggaggaagatctaccaagcaaatggaaagcaaaaaaaagcaggagttgcaatcctagtctctgataaaacagactttaaacaaacaaagatcaaaggagacaaagaaggccattacataatggtaaagggatcaattcaataagaagagctaactatcctaaatatatatgcacccaatacaggagcaccgagatttataaagcaagtccttagagacctacaaagagacacacaataataatgggagactttaacaccccactgtcaatat

SEQ ID NO: 893734 - DNA, 618 bp, Homo sapiens
ttaaaatgcagttacctgtgttggaaagaaaattgtagcatttccttttttgaggaaatgaagtgaaaaagtgagccactgggttagtctccaagtgaagaaagtcaggaattcttgtcccagtgggagaggatgagtttgttttcaggcattacattaaatgagaatatttgtctcatcactgtaagtgtgggaagaagtatgcgtgtggatattggaaagccagaagagcccttgccagggcagtcttgatggatgaacatcctacctgctagggaacatgaaggaagccaatccctcccagccatcgtctttgctcctaccctggcagtcacaacacaagcaagagattcaggtaggccaactggatgttcttgctcaagtstttgagttataaataagtaacacaaagaaaacaaaatagtcagaatccattcacagccacagtaatggtgatagtgtcgtggcaaaatcaccattgactagccaggcatccttttgctctgtagctgccctggttcttgccctttcgtcaaaattttcctgcagtctttcattgattcctggagatctccatatccttctaacaagatttcttcttgcttaagattactacaa

SEQ ID NO: 893735 - DNA, 610 bp, Homo sapiens
atgattggaagacgaccatggcatcaaactttgtttccttctgtattagtgcttagcccagagcttcaacctaacttgaccttgaggtcttcagatggcttccagtagcaatcagagctatgtgctccttgtttacgttcagcaaaagatagagaaactggtttctcatctaacactttcaaaaggagagaactttctgaaacacctacaggaaatttctccttgcatctctttgactggaattgagtcacataccaacttctaaaccaatcactgccaagaaaatagcacttcctttagacaagacacatccaactcttgagcctcatattacatcgtaacttctcaataggggaaggtgggagcagatgtcggggagtctaccrtaacctccaccactcacatgcatttgtgactacaaggtttcctcagcttcttttttaatgtggcaggtctagaatgggtaacaagtaatgacttcaattctctgaataaacgaagttttggctttctattgaaaaatcaagtttgcattggtgactctggacacactactcaatttctaacaatgcatagaaacagaactctcacaattgcaaatggagctaag

SEQ ID NO: 893736 - DNA, 572 bp, Homo sapiens
accatgaggacaccataacctataaataatgtgctgataccagaaacccaaaatgatggtaactgagagtggttctaaggccctaagttttggtacactctcatctaagtgagaacctgaccaaaaagggggaatttttttttttttttattttctgaggtggagtcttgctctggtgcccaggctgaagtgcagtggcatgatcttggatcactgcaacctctgtctcccgggttcaggtttaagcaattctcctacctcagcctcctgagtagctgggactataggtgcgtgccaccatacccatctaattttttgtatttttagtagagacgggktttcaccatgttagccaggatggtctcaatctcctgaccttgtgatctgcctgctttggcttcccaaagtgctgggattacaggtgtgagccaccgtgcccagccaggcagaatattttaaacaaaattctgggaggccgttgttttggactaagttcatgtactaggtctcaacaaaccaagccaaaccaaaccaaaccaaaatggagttgcttgtgctaggactttaaggaa

SEQ ID NO: 893737 - DNA, 635 bp, Homo sapiens
gcaataaataataatgaagtgctacaaactgtttacaaagataaatctcaccagtataatttaatcaaagaattcaggcatgaagaagcacaagttttatgctttctttgaggtaacatttaccagcatgcaaaagcaaactgtaaascagttttcatgaacacctgttcagtattgccttaatattttttggtgggagtgagaaatactgaattcactttctctttattgacctatagtttcacatatgtttatgaatactaaaagcaaaatgataattgaaaataatcatgtactgtttaactgaggacaaacacagttttgaattctttttaacttcgtgatttataggtttattaatccattaattgttctctaattaattaaatatttatcaaacacctaatagtatgtttaaggtaaatttgttccaaaaagcccttaacaggcaaccagtctaataggctagagagaaaagccaatgtttacaaaataatgcatactttaattaaataattcattctttcataccaaaaatattttttgaattactacaaaatgcatcacatgtatgtagttggaaagcaatggattttataaagtgggggcaaacagagaaaatactaaatgcagtg

SEQ ID NO: 893738 - DNA, 648 bp, Homo sapiens
ttcccatctttctgttcatgtattcattgtttagctcctgcctataagggagaacatgtggtatttgcttgtctgttcttgcattaatttacttaagcaaataccacatgttcttgcttataagcaggagctaaacactgagtggaagatggcctccagctgcatccatgttgctgcaaaggacatgatttcattcttttttatggctgtgtagtattccatggtgtatatgtacagcatttttattatcattttattttattttattttttgagatagagttatgctcttgttgcccaggatggagtacarcggcgctatcttggctcactgcaacctccgcctcccaggttcaagtgattctccttcctcagcctctcaagtagctgggaatacaggcatgcaccaacacacccccggctaatttttttgtatttttagtagagatagtgtttcaccatgttggttaggctggtctcaaactcttgacctcagatgatccaccggtctcagcctcccaaagtgctgggattacaagcatgagccactgtacccggcctcacatttcattatctaatccaccactgatgggcacctaagttaattccatatccttgctattgtgaatagccctgtgatgaaagagaa

SEQ ID NO: 893739 - DNA, 614 bp, Homo sapiens
tactttcccatcaaaagtgtataagcattccttctctccacatttttgccaacatctgctatttttttctctttaataatagtcattctcactgggataaaatggtatctcattgtagttttaatttgcatctctttgatgattagtgatgttgaacgttttttcatatatcaattggctatttatatgtcttctttttaaaaagtacctattaagtttctttgaccactttttaacgcagtggtccccaaattttttggtactagggaccattttcatggaagacaatttttccatggacagggaattttggggggatggtgttaggattaaacgtttccacctcagatcatcaggcattaattaaattctcataaacaatgcgcaacctagatctttcaygtgtgcaattcataattaggttcgtgctccaatgagaatctaatgttgccactgatctgacaggaggcagagctcaggtggtgatgctcactctccaccgcccacctcctgctgtgccacccagttcctaagactggtaccggttcacagcccagtgaaccaccaggccaaagattggtactgcttcatagcccagggtttggggacccctg

SEQ ID NO: 893740 - DNA, 503 bp, Homo sapiens
ttgattcatcaagccaacagggaagggtctccttacataatgggcattataatattatataatgtaatcatgtacatataatctccacatctcattatttttgccttattgtattagttagaagtaagtcatgggttctgccatgaaagaagaggatattatgcaaaggagtaaatactaggagagaccatgaaggggacaamttaagagtgttttcatggcagagaaattttggaaagcaagagtaggagtggagagaaacatgtgtttggagggggagagagaaggagaggtgagagagaggtccatgttgttgtgggtgggtgaagaactaatggcatttaagttgaattcaagtatgtgtaaactgatagtacttctttattttatggtaaaatgcttggtcttttattctgtattttttcaagtaattattggtttctcttgctagcacttccactgattaggaatcatagtttcatatcaataaaatattttttaaa

SEQ ID NO: 893741 - DNA, 649 bp, Homo sapiens
aaattaactaataagaacttgtagaaatgaaaaatgtattcactgaatttaaaagttcaatggatggtttaatctgaagattagacacagccaagagatgagaaatgagttggaagatataactgagcatgcgtgttaagacawgaaaggcaaggaatgaaaattctgaaagctgggaagagttgagaggcatagattatggaccaaatgagaaggtttagtatgaatccaactggcattctgaaaagagacaatgcagaaatggaagagggaagaaacaagatttaacaaaaaaaggctgtgaatttccccaaattgataaaaagcatgcatctgtattttcaggaatcatactgaaaccaagaaaataaatttaaaaaaattttcacctggagaaattatactgaaaatttagaacactaaaggagataaagaaaatattaaaagaaaaaaggcaggctacttgtaagaagcaaagattaagtgaatacactaaatgatactacgaaacatcttcagaaatgaatggggattataaagaaaattatcaggatattcatcagtattggtcaaggatctatgagaatgtgatttggaagagctaaaatggctaatctcttccttaaatagtttgatgaattgttggttt

SEQ ID NO: 893742 - DNA, 589 bp, Homo sapiens
tcacaaatttattcagccattcttactcctttctaatcttttctgaatcttactatgatggttaattttatgtgtcaacctggctgagccacaagacgcccagatatctgcttaaacattatttttgggtttacctatgaaggtgtttctggaagagattagcatttgaattgctggattgagtaaagcatattgccctccttgatgtggaagggggtgtcattatccaattaatcaaaggcctgaatagaacaaatggtggaagaaggttggattctctttctgccttactacttaatctggcggaaattmttctgcccttggtgctcctggttctaaggccctcagatttgaactggaatctacaccactgcctctctggccctcagtcctttgtaccacagtaggagtcttcatgggtttccagtttatagacattgcattatggaactttccgctttcataattatgtgagtcaataatcttgtaatacctctcctctataagtataaaatatgctatgggctctattaggagaagtctaatatagattttggtgccaaaagtggggtgttgctgtaacaaatac

SEQ ID NO: 893743 - DNA, 703 bp, Homo sapiens
aataaaaacaaataaataaataattaaaatttaaaactataacttcatgggaaaaatattctatctaaaaccaaacagttctgtaaaacagtagaaactttttaagtacttattaaaatatttttagaatttaaaaactgcctgtgtaaactgtaatactatataaaagcatgtgagacactagcttaaaaacaataatgaagaatatggctccaatcaaagttattataattcctttttcctgtactgtgcaacaaaagaatatatagaagcaaagaagaaggaaaacagctataacaacaaataataggcagccagaaattwacatgaaaaagcttgatggaaaagaactactgtgtagaaaataaaagaaatagtataaaaatgtgctttttaaatagaaaacatacttaaattccatcttgagaaataattctaaatcatatttaatagtacaataaatttagagaggcaattatagtacactgcatgccagcctattaataatttttaggctgaccatttaagggagcaaaagtgttttgaatagtttttcacttttctttgtcatgaccgaactgcactagatttagtctagtgctgattatcacctctcaagaaattctttacccattgcattagttttcttccttcattctttcttttgcaagctaacatgagttattctacagcgaataatgtg

SEQ ID NO: 893744 - DNA, 490 bp, Homo sapiens
taccaccagtctctttgcatagcaagagtgacctttactccagttcccaacaagttcctcatctccctctgagaccaactcatcctggatttcattgtccatatcactaacagcattttggtcaaagccattcaacaagtctctaggaagttccaaacttttccacattttcctgtcttcttctgagccctcaaaactgttccaacctctgcctgttaacccagctctaaagttgcttccatatttttgggtatctttatagaagcaccccactctctgtggtaccaatttacgrtattagttcattttcatattgctataaagaactgcctgagtataggtaatttataaagaaaagaggtttaattgactcacagttctgcatggctggggggcctcaggaaacttacaatcatggcagaaggaacctctttacagggcgtcaggagagagaatgagtgccgaaggaaggggcaattctcttataaaa

SEQ ID NO: 893745 - DNA, 613 bp, Homo sapiens
tacaataaaattgtaacaattatttggtgtataaatgaatgaatgatccactcttcctctctctttgctcctgggaagtacttgctccttatccagtatcttacatctcagtaaaggccaccacaatttaatcaattgcttgggacatttacctgggattttgtttttaactcctttcyttcacaacacacattaatccatgagaaaatcctattagtttttttcttcatattatgtcatgaatttaacaacttttcacatgctcaactattgcctgaactattacaatttcttactgactgatgtcctcaggttacacttgacagttcccgtagaggagtgttatcttttaatataaatgtaaatctgatcacattgctgtgttcctcaacatggtttttttggttccacatctgtctatgatgtagaaaactgaaaagagcatcattcccacttaaacaattaaaggccagatacactacaaaattaacgctttctttgaacccataagtcaatttctactattccacatataatatttaacattcaataacaaaataagcaataattaaaacacaaaaaaaggaagaaaaaaggattactaatagacaaa

SEQ ID NO: 893746 - DNA, 582 bp, Homo sapiens
gtgggacaaaaacacacagcgtaaaacacacaatataatctgcatgcaatttgacagagaagagaaaggatggatgagaaaaacaggacaccagaccccccccataaaagcgcattcacacacacacacaaaaatgaaactctgtggaaaccgctaatataaaagtaaatataaaaatatttgtttttcttatgttcaatgactctaaaacagaggtcctcaagcaggaaaaattttgcccctcagagcgcatttggaaatctctgtaaacactttttatttttaagttggagagtagggggtgctactagaatctagtgggtagagacaagagatgttgctaaactatatatagtactataacacaggacagctcccaacaacaaagaattacctgatccaaaatgtaagtaatrttggtactgagaaaccctgttaaaatatagttgatgttctaaaggaaaatgatattgttttatgtggctttataacatagttaaaattaaaatgtgtgaatataatggcacaaaattgggataaatggattggaaatagaaatctgtgaagttttacaataaaggt

SEQ ID NO: 893747 - DNA, 635 bp, Homo sapiens
agaagcatgtggtttctattgcctaataaataggtatagctggaagacaaaaacagattttgagaaggatccatctgcctctaattcctgggggctccatgaggaaaacagaggtctctccaaaaatggaatctgtggtaccttttctgcttttcccaaagagtcccaggccatcagaaattaccatagggcctctgatgtgtgcattaacagtggcaaggcaaaatggttaccaggccaccacacaggagcagaagaggccaggctcctcccctctgcataaggcgcaaattcctggtggctccaacccattctcccagtgtgcaggtgggcccttagtctgagccattcacattgatttatttcccttactgcacatgtgttcagggatggaattttccagtgactgagaaaaaaccttttacmagcaaagcaagatccaagaagagaaaaacataaaggccttttaagtatacctaatatttggatatccacttttaattaagctgagcactctttaagaaaatccttttaaatccgttattacctgactttagccatgccaagcggccaatatttctggcttttgaactttaccaaaagtaacatcccaactgctcatagaaaggaaaatt

SEQ ID NO: 893748 - DNA, 560 bp, Homo sapiens
ctctgaaaaacaggcaaacaaataaaaatctgacttgtcgcatttgccagtttccatggtgtaaatactcttatgatcacttctaaaacttccaatatgcaattgttgagaagagatgtgcaccgttggccccaggaagccagcgggaacctctgtcatacttcactgcttctcargcacagtctgctccaagaatacctctcccatttctggcagtttttggaggtggtttaatgtatgacctgttctttctaggcttgctcaggactgctatattggaccttaccttgtgccctgtcaaagctctagaatagaggttagaaactttttcttaaaggtctagagagtaattaattttagacttgcaggcaaatggcttctgttgcaaaaaaaattaactccgcccttgaagctcaaaggcagctgcataaaatgatggatgtggctgcatcccggtaaatttcatttataaaaacaggccctgcagctcttaactgtcccttgctcacaaactcctgaatttctgctacagccttcgaccagctctgaaccgcaagctg

SEQ ID NO: 893749 - DNA, 675 bp, Homo sapiens
atgggaatgggacagtctcagaatgggatcttcctacttcgagactcagagtatgtgaggatgacatgctttcttacttcttttttatttttattttttcttcctcatgtactcttaagcatcaaaagggacatgcaatgagagtttgttccaaatggtcattcaggaatccaggattcttccatcttgtgtttttgttgttgttgttgttgtttttgtttttgtttttgttttctccttgggctttttaaattacttttcacctgatcagttaattagacatgaaaataaggattgggtgagggaagcttttgtgatctaggcctgcaaatgtcacacttcaacgcatagtccattccccacacctaattttgggtgaggctaaggcaagtggattagttgtgtgtctgtttctaccactatatttatactgtaaaatatcatttcccatstaggccacttcaacagcctcctcaccatactcccctcctcaaatctcttccctctccaatatcttctccaaagagtatttgggtttggaatccttaatattgacctgtgattccctgtatgttctctctcttttaatctaatttcttactacactgcccttgctttccagaactcaggaccctgcgcctttcctgcacatgctcttctcccaccacaagtcct

SEQ ID NO: 893750 - DNA, 660 bp, Homo sapiens
ttcatgaaaatttaccttggtgcaagtgatatgagctattaaatccatctttcggccagatattccattctgccttagaaagcccaatactaatccaagaaagacatggaaacatgaaattcacacttatttctaagagttgtaattgctgtgagttttcagcatatcttagcccatttggaagaatrgggttttcttgaggctttcttgaacccggagagctttcggaatagtactttccaaggagtctgagatatttctttattttattttaggatagctttggtgctttctctgagggtggcttagggtaaatggcattgaacaagatggccttaaaattccccttagcttgtctgaactttatacaggcttctttttgtctctaggtaactgacctccctctcactctggaccaggtgggctaaccacagaggatcctgaccttccttccccctatcccttacagaacccaggttacacaatcacagagcaaaacattccaagcaagaggccctaatcacaaacttaatatataacttaatgtacttgacacaccccattgatcaatctccctgcaacatcctttgttacttttccactaactcaccacaactcttaaaaaccctaccattctttgttacagaagaggtaagttca

SEQ ID NO: 893751 - DNA, 658 bp, Homo sapiens
ccccttgacttctgccatgagtaaaatcttcttgagtgctccaccagaagccaagcaggtgccagcagcatgtttcttgtatagcctgcagaactgagagccagataaacctctttgcttcacagattactcagtcccagatattctttatagccatgcaaaacagacaaacacatcagtattcaaaacattcactagctaccttgcttataattctatcataattatgtattttatagtttcattttccttgatctttatactttcttttctcaccaaaagtggtattaaattttcattaaatttaaaaacagtttaaaattataatattaaaaacttatatgttaagaaagacacatttttcaaattttcaatttttttttctccaatgcatgagtaaaacattcagcttacatatgggggcatctctccgagaacttagaatttcagagtatcaggtagtaaaatgttgaaaagttttgaacataatctgctaatttaactgataagggaayggtagccaaaatatcaaagtgagtgaaacacagttatataattaatacatggcaagactcaaatttgcttttctgaccataagttcaatattctgttctttggtattgtttaatgcttcctagaaactttcttcagatagaag

SEQ ID NO: 893752 - DNA, 462 bp, Homo sapiens
ctaaattcctaaaataaatttctctatctatttatctatctacatcctgatgtttccgtgtctctgaagaaccctgacaaatacaaaatctctaaagataacctgaaatttgaataatagcaaagtgcacgtagatccttccactggaaagaggtgagatggctctgggacatagtacaggatctgggaggcatgttgaccaagactcacagaagatgggactgatttttttggactttgagttatgaaaatggctacattttttgaaacttactatttatttacrattctatgattcatttcttttatgcctcaatgatatggtttagctttttgtccccatccaaatctcatccccaaatttaatccccacctgtcgagggagagacctggtgggaggggattggataatagaatcaggcttcccccttgctgttctcatgacagtgagggaattctcac

SEQ ID NO: 893753 - DNA, 462 bp, Homo sapiens
ctaaattcctaaaataaatttctctatctatttatctatctacatcctgatgtttccgtgtctctgaagaaccctgacaaatacaaaatctctaaagataacctgaaatttgaataatagcaaagtgcacgtagatccttccactggaaagaggtgagatggctctgggacatagtacaggatctgggaggcatgttgaccaagactcacagaagatgggactgatttttttggactttgagttatgaaaatggctacattttttgaaacttactatttatttacaattmtatgattcatttcttttatgcctcaatgatatggtttagctttttgtccccatccaaatctcatccccaaatttaatccccacctgtcgagggagagacctggtgggaggggattggataatagaatcaggcttcccccttgctgttctcatgacagtgagggaattctcac

SEQ ID NO: 893754 - DNA, 656 bp, Homo sapiens
tttctatttttttttaaattatactttaagttttaggatacgtgtgcgcaacgtgcaggtttgttacatatgtacacatgtgccatgttggtgtgctgcacccattaattcgtcatttaacattaggtatgtctcccaatgctatccctcccccctcctcccaccccacaacaggccctggtgtgtgatgttccccttcctgtgtccatgagttctcactgttcaattcccacctatgagtgagaacgtgcggtgtttggtattttgtccttgcggtagtttgctgagaatgatggtttctagcttcatccatgcccctacaaaggacatgaactcatcattttttatggctgcatagtattccrtggtgtatatgtgccacattttcttaatccagtctatcattgttggacatttgggtcggttccaagtctttactattgtgaatactgccgcaataaacctacgtgtgcatgtgtctttatagcaacatgatttgtaatcctttgggtatatacccagtaatgggatggctgggtcaaatggtatttctagttctagatccctgaggaattgccacactgacttccacaatggttgaactagtttacagtcccaccaacaatgtaaaagtgttcctatttctccacatcctc

SEQ ID NO: 893755 - DNA, 643 bp, Homo sapiens
ttgatatctcatggtaataatactatcttaacttccaaaaataccctcatattctctgattacttttttctcagagtaacctattatttgatagatattaccttttcgtgaatttttctaaaatactaattagaattayctaacttgtattatgtccctggattattttaggctcttctaatgttagttatctttttggttgttaaatttcctcataggcatacatttcttatttgtgtttttatattttaaaatacgaaaacaatggcttggttgccatagaggcttgattggaattgctattccttgtgaaactctgtttcggcatttggcctcttccttaaatgtaaggctcgaacttgacttctgtgaaatatactaacctattggttttacttcatgatatttgggctgggagcacagatttatgctttctccactgtccgtcctgtcttctcaaaataaacgtggcttaattctaaactgtcaatacctacactaggagttcaatcttacttggggtctttagactggatacacctgctttaacctgtacactcatgtcattagtgccactttttctattaaaattcagaaatttaactagtccattcccacttactggacctgctgacttcaatca

SEQ ID NO: 893756 - DNA, 643 bp, Homo sapiens
ttgatatctcatggtaataatactatcttaacttccaaaaataccctcatattctctgattacttttttctcagagtaacctattatttgatagatattaccttttcgtgaatttttctaaaatactaattagaattacctaacttgtattatgtccctggattattttaggctcttctaatgttagttatctttttggttgttaaatttcctcataggcatacatttcttatttgtgtttttatattttaaaatacgaaaacaatggcttggttgccatagaggcttgattggaattgctattccttgtgaaactctgtttcggcatttggcctcttccttaaatgtaaggctcgaacttgacttctgtgaaatatactaacctattggttttacttcatgatatttgggctgggagcacagatttatgctttctccactgtccgtcctgtcttctcaaaataaacgtggcttaattctaaactgtcaataccyacactaggagttcaatcttacttggggtctttagactggatacacctgctttaacctgtacactcatgtcattagtgccactttttctattaaaattcagaaatttaactagtccattcccacttactggacctgctgacttcaatca

SEQ ID NO: 893757 - DNA, 602 bp, Homo sapiens
aactgaggtacatggttcatctcatcgggactggttagacggtgggtacagcccacagcgggcaagcagaagcagggtggggtgtcacctcacctgagaagtgcaaggggtcagggaactccctcccctagccaagrgaagccatgagggactgtgctgtgtgggacgtttctatccggtccagaaaactacgcttttaccatggtctttgcaacccacggaacaggagattcccttgggtgcctagatcaccagggccctgagtttaaagcaaaaactgggtggccttttgggcagacactgaactagctgtaggaggtttttcttgttgttgttttttgttttttgtttttttaccccagtggcaactggaacactgctgagacagaaccattcactcccctggaaaggaggctgaagccagggagccaagtggtctagctcagaggatcccaccaccgtggagcccagcaagctaagatccactggcttgaaattcttgctgccagcacagcagactgaagttgaactgggatgctctagcttggtggggggaggggcatcggccattactgaggcttgagtaggtggttttcccctga

SEQ ID NO: 893758 - DNA, 592 bp, Homo sapiens
tttaataaatggtgtcgggaaaactggctagccatgtgcagaaaactgaaactggaccccttccttacaccttatacaaaaattaactcaagatggattaaagacttaaatgtaatacctaaaaccataaaaaccctagaagaaaacctaggcaataccattcaggacataggcatgggcaaaggcttcatgactaaaacaccaaaagcaaacacaacaaaagccaaaatagacaaatgagatctaattwaactacagagcttctgcagagcaaaagaaactatcatcagagtgaacaggcaacctacagaatgggagaaaagttttgcaatctatccatctgacaaagggctaatatccacaatctacaaagaactcaaacaaatttaaaagaaaaaaaaagtactccatcaaaaagtgggcaaaggagatgaacagacacttctcaaaagaagacatttatgcagccaataaacatatgaaaaaagtttaagttcgttgtagataaatgccaatcaaaaccacaatgaaataccatctcacgccagttagaatggtgatcattaaaaagacaggaaacaacagatgctgg

SEQ ID NO: 893759 - DNA, 697 bp, Homo sapiens
caagaggaaatgcttgtgatacctttttagatggttaagtggagaggctcaatcatcatgacagtacaagggcaatggaattgagtcttttaataaatggttgcctcaaaactgcatctctggcaaaccagaaagtctggtttattttagtccctaaatatctctctaatcttcctaactttagttcatctgcctgaacaccacactcattcaaactttctcatttggaatattacaatagtttcctagcaaccactatcatttgtgcatgctgacctccttcctatctaaaaatgtaacttttctggtaaacaccctctactggcatgccagatccaaaatagggatcacwttagtaaacacagtctgtaagaccctgcactcactgatcctggctatctctcactgcactgtctccaattctctctatgtcaaccactgcattaaatttcaattatcttatttatagagccttcccacatgcctgttgttcttatgtctttgccatttcatctaattaatgcctatgctttccttatataagtgtttaatgattaataattgcaaagtatctttaagttaaatacctttattttaaccatggtttgtagaacactcatcattgtagcagttgccatatctgatattgaattgttctaatttaatcatttgatgaatttatatgtctctcaactga

SEQ ID NO: 893760 - DNA, 604 bp, Homo sapiens
accaacaagctcggctaatttttatatttttagtaggatgggttttcaccatgttggccaggctggtcttgagctccttacctcaggtgatccacccgcctctgcctcccaaagtgctgggattacaggagtgagccaccgtgcctggcctcagatttgtatataatttgttagggtataatttttgtggtctccaaattgccccttattatcattccctgccttttccctgaaagagaaacactccaccagcatcctcaagacctagttgttcctatgtgtggttgcacaacaaagttcacatcacttttaactcaagaccttcctcaagttcctcttcttgctctgttccctcatctcagtgtcatctctgtagtgtgctttgaatgargtccccttgtggatactggtgactaacagactagactggaaagtaggttgtacacttccggagagcagaagaggggagagggcaagaggaaagaaaacagggaagggaagccatgaaaaagagattgctacaatgaattacaacttttttgtattactaaatgcaagaatgaacattagatttttacatgccaggatcattcctaaaaggagg

SEQ ID NO: 893761 - DNA, 604 bp, Homo sapiens
accaacaagctcggctaatttttatatttttagtaggatgggttttcaccatgttggccaggctggtcttgagctccttacctcaggtgatccacccgcctctgcctcccaaagtgctgggattacaggagtgagccaccgtgcctggcctcagatttgtatataatttgttagggtataatttttgtggtctccaaattgccccttattatcattccctgccttttccctgaaagagaaacactccaccagcatcctcaagacctagttgttcctatgtgtggttgcacaacaaagttcacatcacttttaactcaagaccttcctcaagttcctcttcttgctctgttccctcatctcagtgtcatctctgtagtgtgctttgaatgaggtccccttgtggatactggtgactaacagactagactggaaagtargttgtacacttccggagagcagaagaggggagagggcaagaggaaagaaaacagggaagggaagccatgaaaaagagattgctacaatgaattacaacttttttgtattactaaatgcaagaatgaacattagatttttacatgccaggatcattcctaaaaggagg

SEQ ID NO: 893762 - DNA, 678 bp, Homo sapiens
tccaaggaatggagttttattttatgttaaaatttttttctgggtacagagtaggtgtgtatatttatgtggtacatgagatgttttgatataagcatgcaatgtgaaataagcacatcatcaagaatggagtatctatcaccttcattgagctgcaaacaatccaattacactattattttaaaatgttattcttcaatatagtcaccatgttgtgttatcaaatagtagctcttattcattctttctattttttaaaaaatgtttttacccattcaccatcccygcctctacccacaatcccccactaccacttcccagcttctggtacctatcctttctactctctctgtccatgacttcagtctttttgatttttagatccccaaaacaactgagaacatgggtgtttgtctttctgtgcctggattatttcacttaacgatctccagtaccatccatgttgttgcaaatgacaggatatcattcttttttatagctgaataatactccattgtgtatatgtatatgtaccacattatctttatccattcatctgttgatagacacttatgtcgttttcaactcttagctattgtaaatagtgctgcaacaaacataggtgtgcagatagctcttcaatattctcatttcctttcttttaggtatataaccagc

SEQ ID NO: 893763 - DNA, 654 bp, Homo sapiens
tctttttcatagaatgctttgttttcttttggctatatagccagtaatgggatcgctgggtagaatgatagtccaggttctttgagaaattaccagactgctttccacagtggctgaactcatttacattcccatgaccagtgtgtaagtgttcccttttcccgcagycttagcagcatctgttgtttcttacttttagacaatagccattctgactggcctgagacagtacctcattgtggttttaatttgcatttctgtgatgattagtgatgtggaacattttttcatatatttcttggccacttgtatgtctttcaagatgtgtctgttcatgttttttgcctactttttaatagcttttttaattattcaattgtataagttccatatagatcctggatatcaggcctttgtttgatgcataatttgtaaatgttttctcccattctgtaggttgtctgtttcctctgttgatagtttcttttgctgtgcagaagctctttaggtcccactttgtcaatttttgtttatgttgtgattgcttctgagaacttagtcataaatttttttcccaaggccaatgtccaaatggtgtcgcctaggttttcttctagcattcttatagtttgaagtcttaacatttacattttt

SEQ ID NO: 893764 - DNA, 638 bp, Homo sapiens
accttgtatctattggtttttactgacccatgaaaatggctggagttagtctgatctcaccatgtagaaaggtcaggttcatggcttggatttgagaacagcagaatgaatcaactttgaggaagaagctgatttaaaaaaaaagaaaatgtctatttacattgagcttataagaaataggtagagatcaagaagaaaacaagtatggaattacttcaggatattttaaaagcacttccatttaggtatccttgactaaatctgtcaactttgtatccattttctcatgaagaaagtgttgaacttttcactagaagtacttttttttattcctcagttaaaacatgcctgttattctttttgtaatacttaagcaattttwttttaaagatatactacttagttcatccgtctccacttgttttttttttttttttgcaattatgtgtttgtttcctttaatacaactgctataaaagcaatcatgttcatggagaaataagtataattcataaaactagcatgccttgcagagatacaagtaaaaatatagttgtgtgtgtgtgtttatttactgagatgaatttaattcctggagattattttaagctttggaaatgatctctggagtaaagaat

SEQ ID NO: 893765 - DNA, 624 bp, Homo sapiens
agcttgcagatggcctattgtgggacttcaccttcttatcatgtgagtcaatactccttaatatattccctttctatctgtctatctctcccatttatcctattacttctgtccctctagggaaccctgactaataaatacaacaggaaagacggattacacgttagaaaccagcaccctgcaaatatatcatgtgttttctcacattactcaggcctttttcacttagaaggccaagtgaatagttatgagttaaagtgacatgtgttactttgagaagcctagagtaatcagcacytatttcttaaacagttttttcctcaccttcacaattaaaaactgcatgtattccaggttatgctactacaaaataatggcatatttatcagcctgagtataagagattttgtttctattgctgtgcaacaaatttccacaaacttcatggcttatagcaacacatgtattttggttatttactcttttgtttgtgtatatgttaatttgttttatttttatcatagcatccatgggggaaaagcttgcataggtcttacctgagtcctctactcagtatatcactctgactatgttgaattttatcacacactttttcatcctcta

SEQ ID NO: 893766 - DNA, 624 bp, Homo sapiens
agcttgcagatggcctattgtgggacttcaccttcttatcatgtgagtcaatactccttaatatattccctttctatctgtctatctctcccatttatcctattacttctgtccctctagggaaccctgactaataaatacaacaggaaagacggattacacgttagaaaccagcaccctgcaaatatatcatgtgttttctcacattactcaggcctttttcacttagaaggccaagtgaatagttatgagttaaagtgacatgtgttactttgagaagcctagagtaatcagcacttatttcttaaacagttttttcctcaccttcacaattaaaaactgcatgtattccaggttatgctactacaaaataatggcatatttatcagcctgagtataagagattttgtttctaytgctgtgcaacaaatttccacaaacttcatggcttatagcaacacatgtattttggttatttactcttttgtttgtgtatatgttaatttgttttatttttatcatagcatccatgggggaaaagcttgcataggtcttacctgagtcctctactcagtatatcactctgactatgttgaattttatcacacactttttcatcctcta

SEQ ID NO: 893767 - DNA, 526 bp, Homo sapiens
tataatctttctctattttgacctacaaaagtacatttaaaagaaaaatgtaatcatttcattataaatatcattataaatctgttagaatatacaaatcacaaatcttagaatatataatgataagtttctgtctcataatgtaaacataatayaatgttcaatattgttcttattttctaagtgaaacattgtcatgacttcaatctaaatatatttaatgagagaccacaaacaatgtattttgacaagtggtagttagtctattccattatagccatgaacataaagggaagaattttaaatctagcttccctctagattgaattggaaaagtgattccaaatcatgtcaatggccatttattaacccaaatgcatgttaaaaaatcatatgaccagaaaacggagtgttaatatttgcaaactgaatcttgccagggcagtttataaaaagcttattctattctgcctaatgtagctattagtaatgtagaactgaaaaagaaactagaggaaatatcaaa

SEQ ID NO: 893768 - DNA, 526 bp, Homo sapiens
tataatctttctctattttgacctacaaaagtacatttaaaagaaaaatgtaatcatttcattataaatatcattataaatctgttagaatatacaaatcacaaatcttagaatatataatgataagtttctgtctcataatgtaaacataatacaatgttcaatattgttcttattttctaagtgaaacattgtcatgacttcaatctaaatatatttaatgagagaccacaaacaatgtattttgacaagtggtasttagtctattccattatagccatgaacataaagggaagaattttaaatctagcttccctctagattgaattggaaaagtgattccaaatcatgtcaatggccatttattaacccaaatgcatgttaaaaaatcatatgaccagaaaacggagtgttaatatttgcaaactgaatcttgccagggcagtttataaaaagcttattctattctgcctaatgtagctattagtaatgtagaactgaaaaagaaactagaggaaatatcaaa

SEQ ID NO: 893769 - DNA, 526 bp, Homo sapiens
tataatctttctctattttgacctacaaaagtacatttaaaagaaaaatgtaatcatttcattataaatatcattataaatctgttagaatatacaaatcacaaatcttagaatatataatgataagtttctgtctcataatgtaaacataatacaatgttcaatattgttcttattttctaagtgaaacattgtcatgacttcaatctaaatatatttaatgagagaccacaaacaatgtattttgacaagtggtagttagtctattccattatagccatgaacataaagggaagaattttaaatctagcttccctctagattgarttggaaaagtgattccaaatcatgtcaatggccatttattaacccaaatgcatgttaaaaaatcatatgaccagaaaacggagtgttaatatttgcaaactgaatcttgccagggcagtttataaaaagcttattctattctgcctaatgtagctattagtaatgtagaactgaaaaagaaactagaggaaatatcaaa

SEQ ID NO: 893770 - DNA, 650 bp, Homo sapiens
ttgaaacttttgagtgggtgagatctagatgaaattttgcacctttagttgatgttgtaataggttgagacttttgaatatgtttggataggtaaatagagtttgcatgtggaatgaatgtgaatatttggaggtcagaaggctatgtgtgaaaaaaaagtgccccttgtcccccaaaagatctccctgttgtaacccttgacattttttaatacattaacttacatggcaaaatggactttgcagatatgaataagaaagtatcttgagatgggaagattatcctggattatctgggtgtgcatggtataatagaaaacctagtgtaaaccaaagagggtggcagaaaatgasagtcaataggagatgcgaagatggaagcagagatcagaatgatgaaagaaaaaatacaggagactaggaatgcaagtgacttttaaaatctagaaaaagcaagtacactaattcttccctacatattgtagaaggaataaaactttgcttactcattttaaacttctgaccttcagaactgtaagatgataaatattaatatgtttagtttcactataaagagtttataatttactatagctgcaataggacactaatacaacttacacttcattacttatacctcatggttttga

SEQ ID NO: 893771 - DNA, 641 bp, Homo sapiens
tccaattacgtttacatttccaaatcagtgaatgcagttcccactgtaaggtctgacctacagagaagaacaataacagcttttcagtggagctagaacacccctcaaatatttgttttttacaattgtaatgaaaggtatgttatgatgggtaaatgggtcttaaataaccttaaataaccagagtaggaaggcaggtcttaaatgacaaatccactctaacattccaatctcattaagtccttgaatctctcctctctattaaaccaaggcaggtctgggcatttctcaggtaattactgggggctaccttttgatctatgttttgtctaatcgacatccccccaaaataaatctggtggagcctcttctatttccttgagctgcaacgttaaatgcagaatctctgcttagtgggcccataacaataacgtcggcctgatccaactttaggtttcccccaccaytatcccacactcttaatatctactttcacacctatatcccagatttctgtctgcataaattagaaaactcaggtagttcttttgaagtgtagcatacttcttcgtaggtcatactttttacctcacctttaggggactgctggaaactgagtctagttgtaggtcaaagtgcaa

SEQ ID NO: 893772 - DNA, 655 bp, Homo sapiens
ctggcatatttttatatattatggatattgaaagaggaaataagttgtattaaattttggcaaggaggaaaataagatgttgaatacaaagattctctgaggagaatgtctactgataaataagaaaaccgtaaggtgaaaagatgttgttaagggaaataaaatcaaaggcccactcacrctcttcaaaatgtcactaaaacatagcggtattcatcctcttcctaggtaatttaagccaggctaatctacttacagaattatggatcgttaaaataaattgccagtatttgccaattttcaaggtgaccaaagaggactcagtttgtctcctgttgctctttttgtccttgaggttgtatgatgtctctaagtcttgattgttcactatgagacccagtcccagccccttcttcactgctgatattgttctcctcatatgttcacatttgatgggtagatataaaatataatgctgcctgcataagccactcctggtggtttagacctagtggaggcaattaggtaggtagcattatattttcctagtagaacttttgtgcacctcagtgattcctaggagagaatctagcattactactactagcaaattaagaaaaaaagcaatataaggacagaataaacatcgactttc

SEQ ID NO: 893773 - DNA, 630 bp, Homo sapiens
cactgaggttattttcattgaactgctaccattccacactttcctgcactaaatttctgtgccaaagaacttctgtggatcttaatttaagaaacaggttttacaggctgggcacagtggctcatgcctgtaatcccagcattttgggaggccgaggtgggtggatcacgaggtcaggagttcaagaccagcctggccaaatggtgaaaccctgtctgtactaaaaatacaaaaaaatagccagatgtggtggcacgtgcctgttatctcagctaatcaggaggctgaagcagagaattgcttaaacctggggagtggaggttgcagtgagccgagattgtgcccttgcactccagcctgggcaacagagtgagactccatctaaaaaagaaaagaaaagaaaagaaagaaacagtttttacagtgtctrcttttctctattgattttgttcttttttgtttacctgcttagtactcagtgtctttctagtttatgtatattgtgctatgcttatccccaagttgctggaatattggatattgtccttcagtggcagcctgtcgatggattcctgttgttcgtaaataagactcataaccctcaatgccattctgcgtagatatcagaat

SEQ ID NO: 893774 - DNA, 657 bp, Homo sapiens
catgaaatcatgaggatgatgatgataatgatgatgatgacacttagttttaatatatagctgagtgaaaatgaacctgaaaataaaaacacagacaaagcactaagttaaaaagaatagatcctcaccttttgcaaatgtaaattctcagtttcatttacaaatagcacattgtacaagttaatttgtaattttacctttaataataaaatctattttattctgagaaaagtgaccatcaagggacaggcagtgaacatttttaaatgattgtagtttaaggcaatgcctctcaacctaaatcaactgcatcacctgggaattttttgttatgaaagatttttcatatatacaaaatgttcaacaaattatggaagaaacacttatataacaaatcaccaagtttctacttattgacccattgccagttttgtttcatgtgttttcttcaaaccacattaatgggycatttaaaaataattcccagacatgcatcatgtcaaataacatttcaaaaaactgagagcacttacaaagtacaatttgcacaattgaaacaattttatggtgccttataagaagggttggccaatgaatagaattcactctgtaaacatgctgcatttctctccatgaatggaaggtacagtcatggtc

SEQ ID NO: 893775 - DNA, 661 bp, Homo sapiens
ctgttagtggaaatcttggttgtataacatttaaataaggttattttaatgaagtccaaagataagtaaatttaaaaatgtccaaatttctttttcattctaatgagctgtctggaatctgtcaacattctgaactgtaaatgtatgtagaagttcaatactgaaaaaagagcttaaagcataaatctataatttataaaatgtatggaggagaaaacctcccttyaaaaaaaatgaatgattctctctaatcattaatgacatggcagcattgccaatgcaagaattatattttctgttttctatttaatttaactaattcttctaacatttggaaactactgtggtatttaatataaatataatattcaaaacacttttttaaagtttcaaaaataagaattatcatctgtcaggtatagcctacaattcaactgaacgctttttactttgctggcaatgatgagttcccttgtgttagcttatgaaagaaaaagtagcttttattggaactttctcgatattctcttcttgaccactaaatttttttttttaatttgcctctaaaagttagctactagaaagggccaagtgccttttgacaaattaagaatataggaagatattaaatcttaatcctgtaaaaaaatgatgcagttag

SEQ ID NO: 893776 - DNA, 652 bp, Homo sapiens
ttacatcttgctggaagcaatatggctgaacatatcttgcctttcagtaaatagaatttaatttgtgggtatgtgatttagaactagaataaaaggtacatacaatgtttaattaagtacattttagaagagataaactaatgtaggttaaactaactacaatagaaacatagaagttaatcttatccatattttcacattctagaaagttatgcatctttttttctcaattaaaaagattatcatgggttaaaaatttgtcataaaattctttaaagggtaggataaaaatgaaaaaaactctcactggaaatctgtatttgcataattactgtaaaataccaattttacacacaaacaaacagaagccaaaaatgcttcgaaatctcatttgaataatgcatgcatatgtattggttctgcatggctaagccaacagttgcatcagtgaaaatatttaccttttaatgtcaacactagaaataacaattatcaatatgaaagagaaggcccwagtataaaatacatactatcatcaaacaaatctaatttcttattttgttatgaagtaaaataatacatttgttatgcatttctaaagcaaaaaattacataagtatcaggggtctattaatttttaaaagtacacata

SEQ ID NO: 893777 - DNA, 578 bp, Homo sapiens
aaagaagcttccttgagaaccttggaattaaataggaaagctgcacctttaaacttatatttgctctaagtttatttaactacacatatggattgaaccattatcgttcaaagtcttttatgaatctcataattttgtctttggagcctaatcaatcatctttcccaatcttgaaaaaccttggattataggacactattttcttttttttctactgtaaaacatgcaattcttttttgagattgtatctttcttataatgccctctctarcacagatagtagtggctaacattctaatatttcattttacactttctttagacctaggggctgagaagacatgttgtctgccttctaatttaccaatagtttaccaaaacatttatcttattaggaaaagtgcatttaccaaacgaacatacagatacagatatgtactgttaatttctgccatgatttttgcccataaacttttgttagaagttgttctacataatgttctcatatatacattgtcagaccttgctattctattctatttgcaattcctcttcaaggtcatactatcttgttttca

SEQ ID NO: 893778 - DNA, 578 bp, Homo sapiens
aaagaagcttccttgagaaccttggaattaaataggaaagctgcacctttaaacttatatttgctctaagtttatttaactacacatatggattgaaccattatcgttcaaagtcttttatgaatctcataattttgtctttggagcctaatcaatcatctttcccaatcttgaaaaaccttggattataggacactattttcttttttttctactgtaaaacatgcaattcttttttgagattgtatctttcttataatgccctctctaacacagatagtagtggctaacattctaatatttcattttacactttctttagacctaggggctgagaagacatgttgtctgccttctaatttaccaatagtttaccaaaacatttatcttattaggaaaagtgcatttaccaaacgaacatacagatayagatatgtactgttaatttctgccatgatttttgcccataaacttttgttagaagttgttctacataatgttctcatatatacattgtcagaccttgctattctattctatttgcaattcctcttcaaggtcatactatcttgttttca

SEQ ID NO: 893779 - DNA, 701 bp, Homo sapiens
tttgcttaggattatcttggctatattaactcttttttgttccataatgattttaaaatcgtttcttctatttctgtgtagaatgtcaatgcaatttaaggagactataattgaatctgtaaattactttgggcagtatagccattttcacaatattgattattcrtatctgtgaacatggaatgtttttccatttgtttgtgtcctctctgatttccttgagcagtggtttgtaggtctacttaaagagatcttttacttcccttgttagttgtattcctaggtattttattctctttgtagacgttgtgaatggcagtctacatgaatgttaattcatgatttggatctctgcttctctgttgttgctgtataggattgcttgtgacttttgcacattgattttgtatcctgagactttgctgaagttgcttatcaacttcagaagcctttgtgctgggatgatggggttttctagatacaagatcgtatcatctgcaaacaaagacaatttgacttcctctcttcctatttgaatactctttctttctttctcttgccttattgccctggctagaacttccaatatgatgttgaataggagtggtgagagagggcattcttgtcttgtgtgagttttcaaggggaatacttccagtttttgcccattcagtatgatattggctgtgggtttgtcatat

SEQ ID NO: 893780 - DNA, 615 bp, Homo sapiens
ttggtcactgtgtctgtttttatgcaactattatgttatttggattactatagctttgtagtgtaatttgaagttagatagtatgtgatgcctccaagtttgttctttttggtcagaattgtgttagctattcggagccttttaagattccatatacattccaggatttttttttttctgtgaagaatatcattgttatgctgatggggattaggcattttaaatgcatttttgacttaatattttcaatttgtgatgcgtttattgggatataattccatgttagttsaggagcgtatttacatatgtgtgtatgtgtatacacacacatataatctcgagttatttcatcagcctatatgtctctaatcttacagcacatataaattgttacagatatttttgttgtcctcatgtattttatataccattcacatgcttttacccattgtcttcagttaacatctcatagagcactgatgctgtctcttcatttttgtgtgtgtagaactctgtctttagtaagtaaacatttttgaccaggcacttaaagttttgattaaacatattaatttatccatgctcatttctattttatagcacgttattaattta

SEQ ID NO: 893781 - DNA, 627 bp, Homo sapiens
taacagaagcatgggaaaaagggatatgatagttcaaaactttatctgaatggaaattgtcattatttctcaatttaaattatgtttatgttacagtgtagagtttttattacatgcagtatttcagttacaggagatgattgtagtttggaaatgagggagatcaggatgtataaatttgataagaaatttacttggataagtacagatgtatttaataacattrtctaagacattgtgaatgtttctgtaatggggaaaaatcacaggagcatgtaaaatataaaaatatatgaaatcacttaattaaaaataattatgcatttttaataactaaataaaaccttgtgattttgtaagatgtcaacttgtatgtagattatgagaaattttttataataaattccttccactttataattacctacacagagtaaatcttgtccaataatctcttttatcacttaataattattctgatgatattagtagggtttatccaccatttcataatttctgtggggaaaaacaagctaaggtaagtgttcatgtgcttaatttttgtctcttcaaaatttggcctgactgctcttaatttttgtctgacttctaagtgatttctttttg

SEQ ID NO: 893782 - DNA, 627 bp, Homo sapiens
taacagaagcatgggaaaaagggatatgatagttcaaaactttatctgaatggaaattgtcattatttctcaatttaaattatgtttatgttacagtgtagagtttttattacatgcagtatttcagttacaggagatgattgtagtttggaaatgagggagatcaggatgtataaatttgataagaaatttacttggataagtacagatgtatttaataacattayctaagacattgtgaatgtttctgtaatggggaaaaatcacaggagcatgtaaaatataaaaatatatgaaatcacttaattaaaaataattatgcatttttaataactaaataaaaccttgtgattttgtaagatgtcaacttgtatgtagattatgagaaattttttataataaattccttccactttataattacctacacagagtaaatcttgtccaataatctcttttatcacttaataattattctgatgatattagtagggtttatccaccatttcataatttctgtggggaaaaacaagctaaggtaagtgttcatgtgcttaatttttgtctcttcaaaatttggcctgactgctcttaatttttgtctgacttctaagtgatttctttttg

SEQ ID NO: 893783 - DNA, 586 bp, Homo sapiens
tatttcctgggggcctgctttttgatttctcattggggatagggagctgggaattgatatttgaaaagtacaaagaagagcaagtgtgtatacttatgccatttctcattgttactaatttatcttgctgtattaatttccttagctctgagtacatattaacagtctatactgagtaacactcgtgggaattaaagaactaaaactcctagacaatgaagagcataatttctacttccctgtattttcttctctttctcagcaatatatatatatatatatatagctatatatatatatatacacatatatatagctatatatatayacacacacacatatatatatatatatatatttttttttttttttttttttttttgagatggagtctcgctctgttacccaggctggagtgcagtggcgcgatcttggctcactgcaacctctgcctccgggtttcaagcgattcttctgcctctagctgggactacaggtgcctgccaccacacccggctagtttctgtatttttagtagagacggggtttcgccatgtgggccaggctggtcttgatgtcctgacct

SEQ ID NO: 893784 - DNA, 730 bp, Homo sapiens
agaaacctgtgttggtagaatcttgttttattgtggacgggttgtagtgaggccctgaatttcctagcagctattttaaataactatccgttattagatatgtttagattgctggttatatgggagaaaatggatatagaaaggatgagcgttagagttagaataccatattacccatagatgtttgatgcacaaagcattgcatcagttatttatttgctggtaatttattctaataaaggatttattggtagtttgaagaactggaagagaacaaggctcatttcattgaagactcccagaatgaaataatttgcaaaacttatttaaaagtccaattgatgtagtctccagagcacctggtcagattgaaaaataaacagatttgtttggaaaaatcaacagtgcagttaaatatgtgttgacccttattttaaaaatgtaagtaggagcagatgaaggggaatacaattaaatttgttaaggagttactaagaaagagtaaggtcatggttgataaccttagttgaagataccccactgaatatgataaatcrtgttgagccagttttgggaaacaatttgacaatttcttacagtgttaaaatatgtacagtcaccatatgatccagcagttactaagacaaaggaaagcatacgccagtgttcacatgagtgttcaagcagcattattcataatactgcaaaacaaaaatgcatttacctttat

SEQ ID NO: 893785 - DNA, 546 bp, Homo sapiens
ttgagttgatttttgtatatgatgagagagataagtctattttcacgtatctgcatatgaatattcaattttcctagcactatttattgaaaaggatgtcctttctccaatgtatgttcttatcagctttgctaaaaatcagttggctataaatatgtggctttatttctgggttkgctattttgtttcattgatctatgtgtctctcataccagtaccatagtgttttggttactatagccttgtaatgtaatttgaagtcaggtgatgtgatgcctccagctttgtttggttttttttttttttttagggttgctttggctgttcaggctcttttttagtttcatatgaactttaggatttttttttcctgattctgtgaaaatgacattggcattttgataggattccattgagtctgtagattgccttaggcagtatggtcattttaactacattaattcttccaattcatgagcatgggatgtttctccatttgtttttgtcatctacaatttcattcattagtgttttgtagttttcttt

SEQ ID NO: 893786 - DNA, 460 bp, Homo sapiens
ttgacatgaagtcctgcctggtaactgccctctccagctggggccagagcctggtagaggaatgttctccaggagtttggcttagaggctgcccatcccattttcattcctatacccagctgttctgggcccaggtgtgkggacccaggggcagaaggctactggcttgtccattccaggtgctatgtatggaaaatcactccaacccattctaagcacagtcaagagcctttattatggagtgtgctatgacctccaccttcccaaacccaccagcccagccaagaaggtagtggtgatagtggctgctgcaaaacaagaagagaaagacagctgtgtggacaaaggaggcagcaggtgaccttggagagcagcaaagccactgatctcgccatccttaccttgtcattacatagcagtcagtactggtcttgaatctagaaagcccaagtctgaattc

SEQ ID NO: 893787 - DNA, 460 bp, Homo sapiens
ttgacatgaagtcctgcctggtaactgccctctccagctggggccagagcctggtagaggaatgttctccaggagtttggcttagaggctgcccatcccattttcattcctatacccagctgttctgggcccaggtgtgggkacccaggggcagaaggctactggcttgtccattccaggtgctatgtatggaaaatcactccaacccattctaagcacagtcaagagcctttattatggagtgtgctatgacctccaccttcccaaacccaccagcccagccaagaaggtagtggtgatagtggctgctgcaaaacaagaagagaaagacagctgtgtggacaaaggaggcagcaggtgaccttggagagcagcaaagccactgatctcgccatccttaccttgtcattacatagcagtcagtactggtcttgaatctagaaagcccaagtctgaattc

SEQ ID NO: 893788 - DNA, 656 bp, Homo sapiens
aattcaaacatagcccatgcttcctgatgcagaacagtcactctgggcatattaggaaaggtcatttgaaggtcattgtctttcccctgcctctgtactgaaatcactcatgctcttcccttgtcaagattatcttttcactggatcgtaaagttttatagcaaccaggccaactcccattctacagaagaaagcattgaggataagagaggttaacagttttgccaaaagtcccacagcaagtagatggcagagagctgatactctatcgaaaatgcaaaaaaaaatacaaaaaaaaattttttttttgagatggagtttcactygttgcccaggctggagggcaatggagcgatctcagctcactgcaacctccgcctcccaggttcaagcgattctcctacctcagcctcccgagtaggtgggattacaggtgcctgccaccataccttgctaatttttgtatttttcagtagagacaggattttaccatattggtcagtctagtctcgaactcctgacctcaggtgatccacccgcctcagcctcccaaagtgctgggattacaagagtgagccactgcgcccggctgaaaatgcccatttcttaacctttatcattttctcttccaacacaaatggaattcatccttcaat

SEQ ID NO: 893789 - DNA, 656 bp, Homo sapiens
aattcaaacatagcccatgcttcctgatgcagaacagtcactctgggcatattaggaaaggtcatttgaaggtcattgtctttcccctgcctctgtactgaaatcactcatgctcttcccttgtcaagattatcttttcactggatcgtaaagttttatagcaaccaggccaactcccattctacagaagaaagcattgaggataagagaggttaacagttttgccaaaagtcccacagcaagtagatggcagagagctgatactctatcgaaaatgcaaaaaaaaatacaaaaaaaaattttttttttgagatggagtttcacttgttgcccaggctggagkgcaatggagcgatctcagctcactgcaacctccgcctcccaggttcaagcgattctcctacctcagcctcccgagtaggtgggattacaggtgcctgccaccataccttgctaatttttgtatttttcagtagagacaggattttaccatattggtcagtctagtctcgaactcctgacctcaggtgatccacccgcctcagcctcccaaagtgctgggattacaagagtgagccactgcgcccggctgaaaatgcccatttcttaacctttatcattttctcttccaacacaaatggaattcatccttcaat

SEQ ID NO: 893790 - DNA, 659 bp, Homo sapiens
gctctgcccctgcagcaaacttttgcctgggcatccaggcatttccatacatcttctaaaatctagccggaggttcctaaacctcaatcctttacttctgtgcacccacaggctcaacactacatggaagctgccaaggcttggggcttccaccctctgaagccacagcccaagctctacgttggcccctttcagccatggctggagccttgaacayagagcaccatgtctctaggctgcatacagcttggggaccccgggcccagcccacaaaaccactttttcctcctaggcctccaggcctgtaatgtgaggggctgcggtgaaggtctctgacatgggctggagatgttttccccatggtattggtgattaacattaggctccttgctacttatgcaaatttctgcagccggcttgaatttctcctcaaaaaatgggtttttcattcctactgcattgtcaggctgcaaattttctgaacctttatgctgtttcccttttaaaacagaatgcttttgacagcacccaagtcacctttgaatgttttgctgcttagaaatttattctgctagatagcctaaatcatctctctcaagttcaaagttccacaaatcttcagggcagggcaaaatgccaccagtctctttgctaaaaca

SEQ ID NO: 893791 - DNA, 618 bp, Homo sapiens
acagctgtgttgagggaaaacgaaattgtgtatgagaatttaaattggcaaaacaacctaaatccttataaatttcataccacttataaatctgtgagacttcttagccttcttagccttttagtttaaagccagaacagaatatgaagacactgacctatgaaagtcaagtaaacatgcatctttttatcatcacagcaaactgcttgacattgtctgaaattttgaggggaggaggaaaaaggaagacagatttttaaatacacaaattattacaaactgrcatctcaggcagtcatttggtctccatttgtaagaccatcctgggccatttagacctgagagtgaagtgattaatagcacggattgaaagaagttattttaaaaagtgcattatcaccttttattttcatgaggtttagggatcaggaggttaccatgatacttagttttattatttaaataacccactataaataaggatttgtcatatttttccacttgaatcattttttttctctgaggtttctttttttaatcatagtatttaggtacttagaatctaaaaataagatgttaaatctttttactcttttgtgctctcagaggacattcata

SEQ ID NO: 893792 - DNA, 664 bp, Homo sapiens
atgaactttcaaagattcttcaaattccttaatttcctatgggttagctccctctgcatgcctactctaagtgattgtgggaatagctgcaccaaatacaccaaagcatcctagtggaaaatttgcaagtgatctacagcagttccagttagctcaagaccactagtaaagatttgtgcttttagtgaaagggcagtcccataagatattcagtattctatggggtatctatggtatcccatagataccagtattctagaaaagcaatgtggtgttagcccaacacaatacataccatctaagaattatgtaaccattttcatattaatcactgcagaattatctaattaatattttatttaagaccactgaggaggacgtttcacatgacaagaaatacatcttaaatccatcttagccttgctttaaaatgcaaccgtatctattgtgtacmgctttatgatgaatgggacaaaacccaaacacttttcttctgcaattcatgaaggaaagattacaaaatactggaaaacatcatttcggtttttttttctatgcacagagaatgaatgataagccttaagctatcaaaatggtggagatgaggagaagagattgacaatcaatgcatacaacataagatactactgtagtaatgtggtaa

SEQ ID NO: 893793 - DNA, 584 bp, Homo sapiens
caacctacagaatgggagaacatttttacaatctacccatctgacaaagggctaatatccagaatctacaatgaactcaaacaaatttacaagaaaaaagcaaacaacctcatcaacaagtgggcaaaggatatgaacagacacttctcaaaagaagacatttatgcagccaacagacacatgaaaaaatgctcataatcactggccatcagagaaatgaaaatcaaaaccacaatgagataccgtctcacaccagyaagaatggcattcattaacaagtcaggaaacaacaggtgctggagaggatgtggagaattgggaacacttttacattgttggtgggactgtaaactagttcaaccattgtggaagacagtgtggcaattcctcaaggatctagaactagaaataccatttgacccagccatcccattactgggtgtatacccaaaggattataaaccatgctgctatagacacatgcacatgtatgtttattgcggcactattcacaatagcaaggacttggaaccaacccatatgtccatcagtgatagactggattaaaaaaaatgtggcacata

SEQ ID NO: 893794 - DNA, 639 bp, Homo sapiens
tctaaggctgtttgtccacaggcccaccaccctcagtctttgaccactgctgtcaaccagcctgtgcttatcctctgctgaaaaaccaaaactgccactcattaagtacttattagatcccaggcactgggttaagggttttatatatattatcccagttaatttctataacatcatgctgtagtaactattacctctattttatttgttttgttttttttttttttgagacggaggcttgctctgtcgcccaggctggagtgcagtggcacgatctcggctcactgcaacctctgcctcccgggttcaaacaattctcctgcctcagcttcctgagtagctgggattacaggtgygcaccaccacgcctggctaatttttgtatttttagtagagacggggtttcaccatgttggccgagctggtcatgaactcctgacctcaagtgatccgcccacctcagcctcccaaagtgctgggattacaggcgtgagccaccacgcccggcctattacctctgttttataggtgaaggaccttaagcctagagaggtcaaatgactttccaggactgcaaagttaataaatgacaatgtggggctttgtcttacagcaaaacccatgcttttaacaggaaat

SEQ ID NO: 893795 - DNA, 693 bp, Homo sapiens
ggtgcagagaagtcaagaactgaggtttaggaaccttggcctagatttcagatgtatggaaatgcctggatgcccaggcagaagtttgctgcaggggtggggccctcatggagaacctttgccagggcagtgcagaagggatgtgaggttggagtctccacacagagtccttactggggtaccgcctagggccaccgtcctccagaccccagaatggtagatccactgacagcttgcactgtgtgcctggaaaagccacagacactcaacaccagcccatgaaagcagccaggaaggaggctgaaccctgcagtcacaggggcagagctgcccaagaccatgggaaccatcagtgygacctggatatgagacatggagtcaaaagatgtcactttggagctttaagatttgactgccccactgtattttggacttgcatggatcctgtagcccctttgttttggccaatgcctcccatttggaatggctgtatttatccaatgcctgtgcccccattgtatccaggaagtaactaacttgcttttgattttacaggctcataggcggaagggacttgcctggtctcggatgggactttggactgtggacttttgagttaatgctgaaatgagttaagactttggaagactgttgggaaggcatgattggtttgttttgtttttccttttcttt

SEQ ID NO: 893796 - DNA, 441 bp, Homo sapiens
tcactatccgaggggtcctaggacagccagtcactagctacttctcccagccactaagttgtgactggggaactctactcttttcacatgcttttctaattatgcctgaaagccccactcccttgttagggagagacattctagcaaaagcaggggycattatacacccgaacataggagaaggaacacccatttgttgtcccctgcttgaggaaggaattaatcctgaagtctgggcaacagaaagaaaataaggaagagcaaagaatgcctgtcctgttcaagttaaactaaaggattccacctcctttccctaccaaaggcagtacccccttagacctgaggcccaacaaggactccaaaagattgttaaggacctaaaagcccaaggcctagtaaaaccatgcattcgcccctgcaatactccaattttaggagtac

SEQ ID NO: 893797 - DNA, 441 bp, Homo sapiens
tcactatccgaggggtcctaggacagccagtcactagctacttctcccagccactaagttgtgactggggaactctactcttttcacatgcttttctaattatgcctgaaagccccactcccttgttagggagagacattctagcaaaagcaggggtcattatacaccygaacataggagaaggaacacccatttgttgtcccctgcttgaggaaggaattaatcctgaagtctgggcaacagaaagaaaataaggaagagcaaagaatgcctgtcctgttcaagttaaactaaaggattccacctcctttccctaccaaaggcagtacccccttagacctgaggcccaacaaggactccaaaagattgttaaggacctaaaagcccaaggcctagtaaaaccatgcattcgcccctgcaatactccaattttaggagtac

SEQ ID NO: 893798 - DNA, 441 bp, Homo sapiens
tcactatccgaggggtcctaggacagccagtcactagctacttctcccagccactaagttgtgactggggaactctactcttttcacatgcttttctaattatgcctgaaagccccactcccttgttagggagagacattctagcaaaagcaggggtcattatacacccgaayataggagaaggaacacccatttgttgtcccctgcttgaggaaggaattaatcctgaagtctgggcaacagaaagaaaataaggaagagcaaagaatgcctgtcctgttcaagttaaactaaaggattccacctcctttccctaccaaaggcagtacccccttagacctgaggcccaacaaggactccaaaagattgttaaggacctaaaagcccaaggcctagtaaaaccatgcattcgcccctgcaatactccaattttaggagtac

SEQ ID NO: 893799 - DNA, 595 bp, Homo sapiens
tgacaggagcaaatggaaacatatcccatgctcttagatgggtagaagcaatattgtgaaaatgaccatactgccaaaagcaatctacaaattcaatgcaatccttatcaaaataccaccactattcttcacagaattagaaaaacacaattctaaaattcatatggaaccaaaaaagtgcacacatagtcaaagcaggactaagaaaaagaacaaatctggaggcatcatactacctgatttcaaactatactataaggccatagtcacccaaactgcatggtactggtagctaacagataactttccatgttatctatcatgtaacagcaggttaccggtagaaaaataggaacawagaccaagagaacagaatagaaaacccagaaatacacccaaatacttaaagccaactgatttttgacaaagcaaacaaaaacataaatcggggaaaggacacccttttcaacaaatggtgctgggataattggctagccacatgtaggagaatgaaatgggatcctcatctctcactttatacaaaaatcaactcaaaatggattaaggacttaaatctaagacctgaaaatataaa

SEQ ID NO: 893800 - DNA, 614 bp, Homo sapiens
gacattcagaaattattagttaaatgaatgaagattcattacataaactcccatttgcaaaaagcttctctgcaatcggttacaaacattttatgagttggggattctctagttagcatgtataacagggaagggttagccttgatttatgaaggaaatggcagtaaaaggacagaaagatgactgcagacagaaactattttgagacacaattagaatggctcttagaggagaaagggtgaaagtgggaatggactggtttgattcaattaattcttaggatgctgaggtcatctatttttacctccattatcctaagagttaaaactgtcctactgctcagaatataagtctttggcctccaccagcctctggcctgatttactgttaacatcttcacataactttatttggttctgtatcaatgcggatgtggaataacgcacaaaaccttttaraaaggctcacttcctaacgttatagtaattttaaatgtttttaaaatgtgcttttcatttgtttagaagcataagagcttactgaactttctgtttggttgggacccataggtgttatattttaatataacaaaatataatataggaaaatatata

SEQ ID NO: 893801 - DNA, 622 bp, Homo sapiens
tttacagcttttgacttatataaatatagcttcctctgctctcttttgatttctatttgtgtgaaatatctttcccatcccttcactttcagtcgatgtgtgttcttactagtaaagtgagtctctttgttggaagcatgtagttttttttttttaatctattcagtcatgctatgtgttttgattggagaatttaatccatttacattcagggtaactactgwtaaataaggacttgctactactatcttgtaatttgttttctggttgtttgtagattctttgtttcttcctcacttgctgttttcctttgtggtttaattgttttctgagatagtatgctttgaattctttcttttgatatttttgcaactaatatgcatgttttgtttgtaattaccatgaggcttacataaaacatcttataacaggctcttttaagctgatgacaacttacctttcattgtatgtaagaaccctacacttttattccctcccctccatcttttataatattgatgtcaaaatttatgtctttatgttatttgtgccttaacaatttatttcagctacagttttttttaaaatagttctgtctttaactcttacagtagaaattaaa

SEQ ID NO: 893802 - DNA, 622 bp, Homo sapiens
tttacagcttttgacttatataaatatagcttcctctgctctcttttgatttctatttgtgtgaaatatctttcccatcccttcactttcagtcgatgtgtgttcttactagtaaagtgagtctctttgttggaagcatgtagttttttttttttaatctattcagtcatgctatgtgttttgattggagaatttaatccatttacattcagggtaactactgttawataaggacttgctactactatcttgtaatttgttttctggttgtttgtagattctttgtttcttcctcacttgctgttttcctttgtggtttaattgttttctgagatagtatgctttgaattctttcttttgatatttttgcaactaatatgcatgttttgtttgtaattaccatgaggcttacataaaacatcttataacaggctcttttaagctgatgacaacttacctttcattgtatgtaagaaccctacacttttattccctcccctccatcttttataatattgatgtcaaaatttatgtctttatgttatttgtgccttaacaatttatttcagctacagttttttttaaaatagttctgtctttaactcttacagtagaaattaaa

SEQ ID NO: 893803 - DNA, 622 bp, Homo sapiens
tttacagcttttgacttatataaatatagcttcctctgctctcttttgatttctatttgtgtgaaatatctttcccatcccttcactttcagtcgatgtgtgttcttactagtaaagtgagtctctttgttggaagcatgtagttttttttttttaatctattcagtcatgctatgtgttttgattggagaatttaatccatttacattcagggtaactactgttaaataaggacttgctactactatcttgtaatttgttttctggttgtttgtagattctttgtttcttcctcacttgctgttttcctttgtggtttaattgttttctgagatagtatgctttgaattctttcttttgatatttttgcaactaatatgcatgttttgtttgtaattaccatgaggcttacataaaacatcttataacaggctmttttaagctgatgacaacttacctttcattgtatgtaagaaccctacacttttattccctcccctccatcttttataatattgatgtcaaaatttatgtctttatgttatttgtgccttaacaatttatttcagctacagttttttttaaaatagttctgtctttaactcttacagtagaaattaaa

SEQ ID NO: 893804 - DNA, 655 bp, Homo sapiens
tctaaaacaccaaaagcaatggcaacaaaagccaaaattgacaaatcggatctaattaaactaaagagcgtctgcacagcaaaagaaactaccatcagagtgaacaggcaacctacagaatgggagaaaagttttgcaatctatccacttgacaaaaggctaatatccagaatcgacaaagaacttaaacaaatttacaagaaaaaaacagacaaacccatcaaaaagtgggcaaagtatatgaacagacatttctcttaaataaatttatgcagccaacagacatatgaaaaaaatgcttatcatcactggtcattagagaaacgcaaatcaaaaccacagtgagataccatctcatgccagttagaatggcratcattaaaatctcaggaaacaacacatgctggagaggatgtggagaaatagggttgcttctacactgttggtgggagtgtaagttagttagttcaaccattgtggaagacagtgtggtgattcctcaaggatctagaactagaaataccatttgacccagcaattccattactggatatatacccaaaagattataatcattctactataaagacacatgcacatgtatgttactgcagcacaatacacaatagcaaagacttggaaaccaacccaaatg

SEQ ID NO: 893805 - DNA, 592 bp, Homo sapiens
gcttctttaaattgtccaatttaaattgtttacattgtatttaacttggccaactaattacaaattattcaatttgaaacattgtggctttaggtaaaattttaacttaagatgatctattctttgggctgcttagaacgatggcattccagaagaaaacttgaatttacccatgattgtgaaatgctatttcttagttcatgtaaaataaaaaacaaaaccacaactatgtacatgtatatttacatatgcacaaacaaacaaaaattcagaatagccttaggcattataggttaaacacaagttatgattgagtaatgattatggaaaatgttcccaacatttagaaaagaggaaataatakaccatggaaccaaatattcttttctggtaaatgaagcagctacagaaagctttttctacttgttcaaaagtaacaagtgctattgatgaaaaaaaccccaacaaatacccaaaacaaacaaaccccaaaaactcttttgattctacttcaaaacaagattttgcagtagaaaatagatttcattagaaaatagctggccaggcagggtggctcacgtctgtagtccca

SEQ ID NO: 893806 - DNA, 592 bp, Homo sapiens
gcttctttaaattgtccaatttaaattgtttacattgtatttaacttggccaactaattacaaattattcaatttgaaacattgtggctttaggtaaaattttaacttaagatgatctattctttgggctgcttagaacgatggcattccagaagaaaacttgaatttacccatgattgtgaaatgctatttcttagttcatgtaaaataaaaaacaaaaccacaactatgtacatgtatatttacatatgcacaaacaaacaaaaattcagaatagccttaggcattataggttaaacacaagttatgattgagtaatgattatggaaaatgttcccaacatttagaaaagaggaaataatagaccatggaaccaaatattcttttctggtaaatgaagcagctacagaaagcttttyctacttgttcaaaagtaacaagtgctattgatgaaaaaaaccccaacaaatacccaaaacaaacaaaccccaaaaactcttttgattctacttcaaaacaagattttgcagtagaaaatagatttcattagaaaatagctggccaggcagggtggctcacgtctgtagtccca

SEQ ID NO: 893807 - DNA, 645 bp, Homo sapiens
aaacatagtatgtgatctataagcagtaacaaatatatattcagtatacatatgtaaataaaaacataaacataaatatacagaaacacatataatgtacctatttcctttcctactattaaatttgttcctgattgtatggatgaaatataccaatattcaatactgttaagatttttatttcaaatgctctgacctcttgagagtgtgagattwattaaagatttatagagaataggaaaagactgaggatgagaaaatccctcatagtgattttaacaaatttcatgaatataatcaggatgcaaagaggagaaagtcgcagtccagaatacaccaaattttccacctaaacttctaataccgccatcacaaagctaaacaaatgatagctttgtgtgtgtgtctccccatgtactaaaggctgcactgaaaatatggttctttggcttctctaaaatcactgacactctttctccctctccttgatatgatacagtattactatgaagtatcttagtgagtattttgtcagtcactgttgctgggcattcaatgaattttattcatccctaggaaatcctcttccacatgatagcatttccttctccattttcttctttctagattcctaatagtctgaat

SEQ ID NO: 893808 - DNA, 603 bp, Homo sapiens
ctatagttttaccttaaaaaaggtttttttgttgtgttgtgtttgtttttttcatctctggtgatttgcctatctggtattttctgagatcagaagcactctagcaacgctcttgctcaaacgcattcacaaagcccaggacccacagggctccttcagcctccctccctttcttctccatcatgtctaatttgggctaawtctgtgtcagggctggagggtggagcctgcaggttgcactgagcgtggctagcagaggcctttgaaaactcagggtgtcccttgaggaagagagaagaggcattaattaacaccccaaatcagtctgtgacagtgagtcctgcccttaacaagagcaggactaagagggtctaaaatgaattacagggtgagcataatgtaaatttaacatttcgggactattctgtctcagtgtaacagcagacttccgtgacaatctacatttgctcagaaattccgcttggacagaggcttaatcttgaggtcttaacactagtcccagaaggacatttgggtggtacggacactgataagcacagatggaacttgtgaagcaagactttcccaccattctgtgtggga

SEQ ID NO: 893809 - DNA, 606 bp, Homo sapiens
gttctatagttttaccttaaaaaaggtttttttgttgtgttgtgtttgtttttttcatctctggtgatttgcctatctggtattttctgagatcagaagcactctagcaacgctcttgctcaaacgcattcacaaagcccaggacccacagggctccttcagcctccctccctttcttctccatcatgtctaatttgggctaawtctgtgtcagggctggagggtggagcctgcaggttgcactgagcgtggctagcagaggcctttgaaaactcagggtgtcccttgaggaagagagaagaggcattaattaacaccccaaatcagtctgtgacagtgagtcctgcccttaacaagagcaggactaagagggtctaaaatgaattacagggtgagcataatgtaaatttaacatttcgggactattctgtctcagtgtaacagcagacttccgtgacaatctacatttgctcagaaattccgcttggacagaggcttaatcttgaggtcttaacactagtcccagaaggacatttgggtggtacggacactgataagcacagatggaacttgtgaagcaagactttcccaccattctgtgtggga

SEQ ID NO: 893810 - DNA, 658 bp, Homo sapiens
tgttacccaacttcaaactatactgcaaagctgaagtaaccaaaacagcatggtactggtacaaaaacagacacatagaccaatggaacagaatagaaagcccaaaaataaggccacatgcacaaatacaaccatctgattttcaacaaagctgacaaaaacaaacgatggggaaagaactccctagtcaataaacagtgctggtataactgactagcaatatgcagaaggttgaaacgggaccccttccttacaccatatacaaaaataaactcaagatagattaaagactaaaatttaaaacctgaagctataaaaaccctggaaggcaacctaggcaatatcattctggacatacggattgggcaaagatttcataacaaagacaccaagaggaatcacaacaaaagcaaaaattgaccaatgggctccaattaaacttyctagcttctgcatagcaaaagaaactatcaacagagtaaacagacaacctacataaagggagaaaatattcacaaactatgtatttgacaaaggtctaatatccagcatctataaagaacttaaacacaagaaaaaaataaacaatcccattaaaaagtgggcaaaaagcatgaacagacactttcaaaagaagacatacatgtggctaacaagc

SEQ ID NO: 893811 - DNA, 586 bp, Homo sapiens
tttagaaagatgaattagtaactgtgtgggaaaggatgaccagcacaggaggcagggaggacagtatgcaggctattgcaatggtctgggtaagaagttatcagatcctgacccagggcttaggcagtgggaataaaaataagaaactgatgaggaaggcatttaggagaattgggcaaccagctgggtggaggaggggaggaacaggaatctgtcaaaaacaactgtgaagttttggatttgtgtgacaaaccaaaaatagtactaggaaattcaaattggcttgtgggaagacaggaaaagtgctttggatagagtcataattcaagatgaaaaargcctaataatgatcagaatcagtgattttaaaatttgtatgtttaattttaatgtaggcatctttctgcacatgaaattttaaatgggagtccaatacgtgtagcaaaataaaaggaaaatgattcttgttggggtaagattgggtgggagggtcccacatacttcctactcaggcctcctctcattacttccccaaccccaacacacacctaaggggggctcttagacggtgcatggaaagtggttt

SEQ ID NO: 893812 - DNA, 703 bp, Homo sapiens
tggatcatgagctcccatgtagcaccaactatatcttttttctattcatcactacatttctagtgcctaggacaaccttggcatataattagaaatcataagtatattttcataaacaagtgatggtgtcatttacatgtgtatgtccagtgctttctttcctcagaagcatcttgctgcatcttaagccaaccattctcagtaattgtatctcttgtattctaaracctattttactcaatttggtaataatttattcagcatgtgccatgttccagacataggggatttagaaattaataggcataatcttcatctttaacttttatataatctaatatggcaaacagatatgttcacaaaaaaactataatctgctcattcaatgcttgctggacacttactgagggcttattaagtgcctagatttctaggccctagaaatatagcagtgaattaccctttgtggagtttctaacctggtgaaatgtgctatacatttattctgaaggcatgaaatgacagtaagaaagaagcaattaactcttcttctaggcgatagggaccgttgagaaagacatgatacaagcaacaagtagatgctccccatgtagaactctgggacctacaatttgagtacctttgatgccttaccacagagttttatcctgaggctactgaagcatgtttaagcattagagtg

SEQ ID NO: 893813 - DNA, 675 bp, Homo sapiens
cacacccatgtatttacaaatagtagtccacagtacaagcaaagatttggaagttattgaaatataaatgactgaagccctggtcctgattaaaattatatagggagagggtatagaggaagaagagataaagccctggaatggggaatagcaacacttaaagaaaggcagggaaaaaaaaagacaggtcaaatggtaaaagaagactttctcaaaaactttcatggttagtattttatataataaaccacagtgttggtcttggaattctgtctaatgaccactcatctttgttaaactgacagtcacataagccatattactgcctccctctgctttataaaactttgaattcaataaactcattaatgcttcccacaatgaaagctctaaaattcaacacaatcatccttaccacctaaaatgccaaaattcatctagatgttgtatgaaattttaaaacctaccagtggctcctgataaattctytgacattttatgatctctttggtaaagacatggttttacctgtataatcaacctactttttttattccttccaaagttgttttcatgtgcattattcatttaatgcccctagtaaatccacatggttggtgaacataataggggcttgagacatactgacaaactatcaaaaagggctaatacatt

SEQ ID NO: 893814 - DNA, 627 bp, Homo sapiens
gttctttaattcaggttcaagtttcctattagcaaccatacagtgtctaccttgaatagtgtgaagagaatggattatccatactattacccttataccacctgcttttgaaagtcttcatcctcaagttaggggttactcctgtcctgaacattgtatcctcttctgtcaacagracctgccacttctcattggccctaccttagttatcagccatttagtttcatctgcttttcccctgtgtgttgcttaaggggcctcggctcacagtgagagcaagaaatggatgaaggaaaggtgccttggtcctgagtaaagcctcaggacaaagcatcttcactactagggctttttacacaaccaagagtgacttcttagcttaaggcccatgtaccaaaggaggctttgtctctttttcttctttgtctgaaaaccccagagttagtagttattaataaaaacatgccaatttgagacaaaaacaatacaaaggtgagagatatctggagattaagcagtgcttttatttcctattctacaaacatttttgagtgcctgttgtgtaatacgcactgatctggtattcatcagtgaaaataaagatctctgactttgtggaagttacat

SEQ ID NO: 893815 - DNA, 673 bp, Homo sapiens
ctgggtgctcctgtattggggtggatgtatatttaggatagttagattttctttttgaattgaacactttaccattatgtaatacctttctttgtcttttttgatcattgttggtttaaagtctgttttgtcaagaactaggactgtaacccttgctcttccattttccatttgcttggtaaattttttcttcatctctttattttgagcctatgtgtcattgcatgtgagatgggtctcttgaagacagcataccactcggtcttggttctttatccaattggccactctgtrtcttttaattggggcatttaacccatttacatttaaggttaatactgatatgtgtggatttgatcccataattatgatgttagctggttattttgaaggcttatttatatggttgctttatagtgtcactggtctgtgtactttagtgtttttgtagtggctggtaatggtctttcctttccatatttagtgcttccttcaggagctcttgtaaggcacatctgatagtaacaaattccctcagcatgtgcttgtgtggaaaggatcttctttctccttcacttacgaatcttagtttggctgtatataaaattttggtttggaatttcttttttaaaaaagaattttgaatactggctcccaatctcttctggcttaa

SEQ ID NO: 893816 - DNA, 665 bp, Homo sapiens
gtcaatggcacacttagctgcctgctacctaggccatcatgtcttccctgccaccttgtgtggccctgtacaccaatcaaagaagttatgccccaccctatccctttcctccactcacccaaatccatgccaggtcaagccgggggggatccagactcatgaagtattccctaactaattgtctccctcaatgatctttttcttcttttttgcctaaggtgtactgatgaatctaattagattatatgataataacaccgtgtcctttattattttttccccaggaatactttcaartgatcgactccttttcagctttcagttctcagtggaatgacacttcttggagaagccttccctgaattcccaatctaaattgttctctcttgctgcccgtgtgaccagtcacagcaacctcttttaatttcttcgtaccgctcaccaagatttgaaattttctcacttgtttatttacttgttttttatctcaaactcccaccactgagagtgactgtgtttgcacagatcaccactactttatccctactgcctagaacgataacgataacacaatagacactcagtaaatatttgttgagtgaatgatgcaagaatcatagggtggggtacacagaggtgcttaagaaaatccttactggatgaat

SEQ ID NO: 893817 - DNA, 668 bp, Homo sapiens
gatgggagtgaataaatgtataaccataggaaattttaagtataatcacccttagaatttgttagattatcattacttgatttccttaatacattagtcaaactgtgtagcaagacacacatccacactcacactaattcgtaatcactttgagtggatcctttcggctttgacaaatttatgagtcttcacatttttatcaggtttctctgctcattatgcgaatggaaaccactcttctacctgtcccagtgcagaggcagccttatcctactagctctctagacaagcatgaacatgtctgagcctacagtgtaaacaaacaacttgagtcttacttctgtaatgatattacaagtgtgtgtgtcctttgtgtgtgtttatrtatacaacacacaccaacatggcacactgaaatataccacaatttttctctaagtaaataaaccagaactcagctgctatacttccaaaagccaacatctcatgccaactaatggaaataattccatggaaaaatatgaacagtattgttgtatttttacaccgataattatataaaaatctttttttcattgtaacatttgccagctgctattcttttgtaatgcatatgggtgagtgttcgggtgcaaacataatgtatcatccaaaccaaggtatctttt

SEQ ID NO: 893818 - DNA, 604 bp, Homo sapiens
cactttctgtgagtcatctccaccacagggccctctcttttgtgatccagcgatacttgttcacagtcaaagcccaggaagagtggaaagattaacctttgtgagccaaaccgtgtgacacttgattacttgacagaactaatccttctgtcctgatgacagaamttcaactacacaggtacatgcaagctaatatctgttgtaatgcctcccagtttctctggagaattccttagtttcctggacatctctgaaatgcaaagttttggcaacgagtctctgaattaacctctgaaaatctcacccagccaagatggccttcttgagaagactgaagaacatggttggtttcaggctgagctggaagtggtttacctcccaggagaggttccccacagtggtgtttaaggcatggggtggaccaacaccaggaagactcagacatcacaccacccaccttcaactcagtcacatccacctacattttctgaaaacaaaaggcagtctccccaaaaagcactgagactcttgtgtaggtaatctgagcagacaccaacttcccagggcttccttttatccaggagagcttggctgttctttttaa

SEQ ID NO: 893819 - DNA, 493 bp, Homo sapiens
ctcccgctgctcacaacccgccaatgctgggcttcccatcacacagacccacggcccttagggaacctggcagcaccccttcatcacgtggcccctctttctgtgacctcatctccactcctcccctctctccatctggccgccctgacctccctgcygctcctcaagctcagaaggcaactggcaaggcaactggctgttccatgtgtctggaatgttcttccccagatagctcccggctcccccttcgcctcccacaggccctcactccagtgtcagtctttccatgactgtcactctataaaatcctaacccccaacactctccatttgctgcctctgcctcatttttctctccttagcatttatttccaccacagcaggcctttgctcatttgtcttattgtctgtctgtctcctgcctgaggatggggacattcatctgtttggctccccgctgcatcctcggcacccaggacaggggtgggcacgga

SEQ ID NO: 893820 - DNA, 635 bp, Homo sapiens
ttacatgagctacctagattaggtaagttcacagggacagaaaggagaatccaggttaccaggggctatggaaagggggaagggggaattagtgttcaacaggtaaagagttttttgggggatgatgatttttaaagttctggaaatgatgtggtgatgcttgtacaatattgcaaatgtgctcgatacccctgaattatattcttaaaaatagataaatgataaaatttatattatgtatgttwtaccacagtagatttcttgttaataatggtggcttaaaccataggaaaacaagcagataggcctggtatgattatcagggacccaggttccatccattcagccacctcaacacagggcttcctctttatgatccaacatggctgctccaactccagtcatcatctcagccatgcaacagggaggtgggaggaggaaggacaagggcactcctctacctggaagttcaaccttcccttgagggatactttctggaagtggcacacagtccttccattctattggtcagaacttggtcacatagttgcacatggcttcaagggaagctgggcaatgtagactttgttctgggcacccatcttttcagctaacattgaggaagaagagacaaa

SEQ ID NO: 893821 - DNA, 622 bp, Homo sapiens
atactgaatcctttctgaaaaatgtgagcctactataatagtatagcctactgtaatagtaggctcacatttgtcaaaacccataaaacatacaacaccaagagcaggccctaatgtaaactatagactttaggtgataatgatgtgccaacctagatttatcaattgtaacaaatataacacactaaaaagcaaaaacaatcaaactactctgagataccaaaaaacaccagatatatgcataaataaagaaatagtgagtaattcgataaatgaaaaagtaaccaagaggaaacttcacaggcatgattcctttaaggaaacaaagaaataagcataataataataaacttctcatttctaaaatccaaaaactgttacaaaaggattcaatgtgatatttttaaagcamaattattgagcataaaatacaatctggaaggcatataactttgcaataaccttttctgtgtttaggtaaggttgactgcagagttgagagctgggccattgacatttgaggtcatggtggcagcagtcctccactattaccacctatgtccaaacatagctgaccctagcatgactcaggttgaataatattcaggaaatgaggccttgg

SEQ ID NO: 893822 - DNA, 610 bp, Homo sapiens
acacttcttccactctctcagttaccgagccaagacacagagttgcttgtgagtcatttctctacctcatcccccacccaaccttcctgcgagatcctgctcacgttacctcctaaatgctgttacgtgacttcaaccacgtcagctttttatgggggaggagaggcacctgcatatctgtgggagcaccaacctctagacatctcctgccaagttactgcaatgtgcagaaaagaggaagaaagcaagcccaagtcgcaaagtctttgccagtccttctaccaaccacaccttcggtggagatgtgggtctgtggaaatgcagagacggactgaaagccaaatgggccaatgagagctctgaacaaaacattaagcttgtttttctttaaggcaatacgattaacagtggtccattaagaatccgtttaaaaawaataataataatactttttctgactattgttggggaagaataactcctttatggggagtatgaactcaaagacatgatattgtaaaggaggccttgaagaagagagggactaagaaatgtgatggcgtggtctgttacatgtgcaggtgctgtgtgtgagggaagcactgaggac

SEQ ID NO: 893823 - DNA, 610 bp, Homo sapiens
acacttcttccactctctcagttaccgagccaagacacagagttgcttgtgagtcatttctctacctcatcccccacccaaccttcctgcgagatcctgctcacgttacctcctaaatgctgttacgtgacttcaaccacgtcagctttttatgggggaggagaggcacctgcatatctgtgggagcaccaacctctagacatctcctgccaagttactgcaatgtgcagaaaagaggaagaaagcaagcccaagtcgcaaagtctttgccagtccttctaccaaccacaccttcggtggagatgtgggtctgtggaaatgcagagacggactgaaagccaaatgggccaatgagagctctgaacaaaacattaagcttgtttttctttaaggcaatacgattaacagtggtccattaagaatccgtttaaaaaaaataataataatacyttttctgactattgttggggaagaataactcctttatggggagtatgaactcaaagacatgatattgtaaaggaggccttgaagaagagagggactaagaaatgtgatggcgtggtctgttacatgtgcaggtgctgtgtgtgagggaagcactgaggac

SEQ ID NO: 893824 - DNA, 606 bp, Homo sapiens
tcacagtttttatcctcttaaaatagcctgccttcagaaaatatatagtttccttcatgcactaatcatggggagttacgatgtaaatagagccattttttttcttatacaaggaacaagtgctctcaccctcctcccttctctccctccccatacacagaagcacacttcacttcacttatactaaacacttcacttatacttacactgcaacaaagagttgcaaatacatgcaaataaagcctttataactcccctctctcctgctggacagctccttgactcaagtatttccgaagacagacactctgataagggtctgctctgagcttcattctcagcatacagtcctgggattatttacctaccaatattcacctctgcatgaaccagtaagtcattactgacaagaaaaaaacaatttgtgattttttttaatgtcacaatttttctttttaargtttgggagagaaagttgttttgaatgtttcatcagtttctattgccaaatgaacacctgtttcagagtccctgaaagtcacacatcagaagcttctgacttcaacatatagtctgctttgaagaattattttaaaaaagcattga

SEQ ID NO: 893825 - DNA, 601 bp, Homo sapiens
catgaattgcattagtacctttacaaaagggaccccagggagattccctcacccttttgtcacagtgtgaagacccagcaagaagatggacatctatgaatcaggaagagagccctcaccagaacccaaccctgctacactctgatctcagacttccagcctttagaactgtgagaaataagtttctgttgtttatatgccastcaatgtatagcactttgttacagcagcccaagctaagacagcctattatgtatgagcaggtggctttgagataattgagaaaacagagactataactacaaccagccagagatgggatcattgcaaatgggactcgggttcacacaaggtttgtgacacacacacaaaaaaacataaggcagataaatcagcaagggtagcagtcaggaattgacagacgattaatggattgaggaaacagaatagataatttaaaagcaaacctttgtacacaaaagaattcaggaggtgataaaagtaacattttcatatcagttggaaagtaagttattcaatagcaacagaacaatcatttattgaggaaaaataactatttctttcctggttcaatcttggg

SEQ ID NO: 893826 - DNA, 601 bp, Homo sapiens
catgaattgcattagtacctttacaaaagggaccccagggagattccctcacccttttgtcacagtgtgaagacccagcaagaagatggacatctatgaatcaggaagagagccctcaccagaacccaaccctgctacactctgatctcagacttccagcctttagaactgtgagaaataagtttctgttgtttatatgccactcaatgtatagcactttgttacagcagcccaagctaagacagcctattatgtatgagcaggtggctttgagataattgagaaaacagagactataactacaaccagccagagatgggatcaytgcaaatgggactcgggttcacacaaggtttgtgacacacacacaaaaaaacataaggcagataaatcagcaagggtagcagtcaggaattgacagacgattaatggattgaggaaacagaatagataatttaaaagcaaacctttgtacacaaaagaattcaggaggtgataaaagtaacattttcatatcagttggaaagtaagttattcaatagcaacagaacaatcatttattgaggaaaaataactatttctttcctggttcaatcttggg

SEQ ID NO: 893827 - DNA, 588 bp, Homo sapiens
caatatttgtgagcagataaaaaatcagcacagaaaaaggtgagaaatacacaatgtctttcatcaaggtgcaaggaaatgtaaaataacattaaaagtaccaactacataatttgaatataaagagaacaatagcaagaaaggagaggggaagtgatggcgatatggagacacagtctcttttgcatgcacagggcagaaccggtgcctcaggctggagggtgtctgtgagtaccccacaatgaargcaaaagagcacccagcattgaagccacagaccttgctccatgaatcctagctgatgggctggcacagagagatcaggagcagaacaaggaaatccataggaggatcctcccaaagtacttttttttctggtccaaaaatccttaaatctgtcagaagcaggaggttggagtgggagaattgcagagcctggaacacacctgcctgctgatgacccattctgagggggttctttccacttggcagcaatggacttggtaaaaaaaataatagatccttctccatggatcccatttccctttttttttttttttttttttttgagatggagccccaggcaga

SEQ ID NO: 893828 - DNA, 619 bp, Homo sapiens
ttttaaaagagttttatggtttaaaaagttaagaagagctactaagccatgaaaagacgaggaggaagcttaaatgcacattactataccagataagaaaatctgaaaaggctacatagtgtatgattccaaccatatgacagtctggaaatggcaaaactatggagatgtaaaaagatcagtggttgtcagggcctaggaggtcgggagggatgaacagacacagctcagtgaatttgaggggcagtgaaactaatctgtatgatattataatggtggatccgtgtcatcacctgtttgtccaaacccacagaacatataacaccaagggtatacggtgtttatattaaagtataaccctaatgagaactctggactttgggtgataatgatgtgttgatgtaggttcagcccttgttacacgtcagccacccatgtgggaaaatgttgatagtggtrgaagctatgtatgtataggggcaggaattatatgagaacacttgtggtatatgctcaagtctgttgtgaacctaaaactgctctaaaaaataaagtctgtaggtatctatgaaagcgcagacacatggtccgtgagagcacgtcctctctgctataaatt

SEQ ID NO: 893829 - DNA, 649 bp, Homo sapiens
aaaataaaaagaattatcaattgatgtgatcaaagaaaaatgtttatctcatggggtgttggaaaaggaacatcataaaaattaataggtagaataatcatcaaaaacaatctgcacaacaaatattacatagctgaggggaactatcattaaaatataatgtatacaaattgctgagaaactcactacaccttctaaatcatgtcaaaagagttgtttgcatataagctgtctgcacttcttctctctctctytttttttttgttcatattcactgcaaggtggcttttgtccacccatgcaaatcactcatatgaaggtcacaatgatgtccaggtggccaaagcctgtggctaatcctcagtcctcatctcaccgagacagcagtttcttagcccttctcctacctccactggcttctcttctcagctcctctgtagttccccctcctctttccaacctgtatgcattggaggggcccaaagctcaaccctaatgctcttctgcatcttggtccctaggtgatctcacctagtcacccagcctcagatagccttaggcttaggaatcacaaatatatctctcacatgacctctagactcatatcaacctctcaacatcacaatttggatatccaacaggcatctcc

SEQ ID NO: 893830 - DNA, 584 bp, Homo sapiens
cagactggtgctcgccgctcactgtgaaggcaagcaggcttctgcctcagttttttccccctttctcctctgatccattccaatcaacaccactgacagtggacagactgctgtccgggtaagagtgagggggacagagggcctgaagttgctccattcgtcctcatcacgatgggtaaagaagggacttcatgtccatgtgcagttagcttccaaaagacaaggaaatctcccacctagaaggggacccccccaayaccaaccacaggctgggccccccctcttcagccggcccctgcccaggtcctgctgaccaagcctcctcaggacacaaggtcagttcaggacttcagtggcctcatcccttgcatcccaccttctgagttaaagtctttcagaaatacagcaccatgggcttctagagctgcatggaaccctggagatcatcccactccactcgttgaacagtgggggaagccaaggttcagcaaacgggattcttccctcaggcttcatatgcaatggaagggcaccagctaaaagctaagcgctttgactcagagccaaagaccagggacctttct

SEQ ID NO: 893831 - DNA, 627 bp, Homo sapiens
taagggaaagtaggtacagaaatagagcgaattactattaacaagtttagctgcaagaacaatttttttctgacgttgggcaccgaggtgaccttcttgtaagtggttcaaacttggatttattgtcattgtgttctcatcattctactataagtggatcaggcaccaccgacacaagcacacattcatttatgcattcagcacacacgtatggtgcacctagtgtatgcatcatgccaggaactgaggaagagaagatgatgaggacttctgtcctccagaaactcatgatctgctgggggagacgagtatgcaaatgtatcctttaagagmactgtcagaagtgcaatgagagagagaaactgtccgttcacaagactcactccttcatacctggatgcaatacagatggaggtaagatttaggactttctgcagagccactgcattttaagtagactcaaactgcatctttctaggaagcgaggcagtatttatctgtccaagcaaaaattgaatgaagcacatgacttccatggatgcaaacattataaacaaggtctctgtgtgaatttgcaggattgaatctcccagattacagttgaaccctaccacctagaaatactat

SEQ ID NO: 893832 - DNA, 510 bp, Homo sapiens
ctcccgctgctcacaacccgccaatgctgggcttcccatcacacagacccacggcccttagggaacctggcagcaccccttcatcacgtggcccctctttctgtgacctcatctccactcctcccctctctccatctggccgccctgacctccctgcygctcctcaagctcagaaggcaactggcaaggcaactggctgttccatgtgtctggaatgttcttccccagatagctcccggctcccccttcgcctcccacaggccctcactccagtgtcagtctttccatgactgtcactctataaaatcctaacccccaacactctccatttgctgcctctgcctcatttttctctccttagcatttatttccaccacagcaggcctttgctcatttgtcttattgtctgtctgtctcctgcctgaggatggggacattcatctgtttggctccccgctgcatcctcggcacccaggacaggggtgggcacggagtgggcaggcaataggt

SEQ ID NO: 893833 - DNA, 525 bp, Homo sapiens
ttatttctcctggattgttacattgaaaatccaggtctctcagtttagacctttggggagactcttcagtcctctccccatctgctaaccttgaccaaacacaaaggagagaggggcttcagaggagggtccctcggaccttggtgggcaggacccactttccctgtgcagaaggaaacttgaaatcaggagactgagcctcacccagggacaggccccaccrctgtgccctgacaggcccttgtggacagaaagggacagggcgtagcctcacttcgaccctctgggtttgctgtggggccagctgggcctggtgtggctgagctccagagtgctgtcagccactcccagttccctcatgacctgggcagggaatataatatcacctctatctgtgcagtaagcacagcaatgtcagggacactgtttttagaatctggcttgctcccctcccccagcccaactgattatctgtcctggttgccaggcacctgtttgcattagatacagaacactccgcagggt

SEQ ID NO: 893834 - DNA, 575 bp, Homo sapiens
atgcaaactgtcttcaatagaatgctctgtccagagtcacagtggagtccatcgcaacaaataaggtcagacagctcacagctacaactgggctcatgccttccaagtatcaaagtcataacaaacttcctctgtgtgagtccacaaggcattcttcctctgggggaatcactccctttccattgtcctgatactcyctctgtggggctgtagaggagtgcatggcttttgccctacttccaagccttctcagggaacacagcagggacaaagagctgaaggctcagccttggccatggcccatcaggcccactgcaggcttctcctgggagaagatccagagcctcgggctctgggctcccatatgcagggagaacctccgaccacagaaattggaaggagctaccactgcctaggagacatcttcccttgagctttttcaagggctgaacaaacagagcccacacttgttcacggaatccatgggcctcagcacatcagagagaggagaagaaattgacccagagtgtaacccacccccatcttcgggccccaccaagaattgtcagtgatgc

SEQ ID NO: 893835 - DNA, 644 bp, Homo sapiens
acaggcccatgaacctcaagttatttgagggaccttgagaaaagaggtattcatccatttatacaggtattacagacacagtctgagactgagtcagatttttggcttgacttcttaacatagctaggaagccaaggggctttttaaaaagtctaatctgagattctttatgaaaatattccagcaaagccaacttasaacaagcctataggtcattcatcattcttactaaacttttgtaaataatcaggtcaaagactaaacttaaacaaaacagtctgtctatgattatctttggttgaaatgggaggattcgagagaaaaaattatgtcatagaaaaaaacttcacatatgcctgttattacattctagccttgtccatttgtttctgagctttgtatctggactgaatcacacatttttattttcctccaatatatggctgagacactcagactaatgtttccaatttttcttccacccttctgacttagaattattagaaactaaaactgcctttttcctgaggctgaagctagtcaacttggctttgaaggaatattattgcaacagcttatatttggacaaaactttctacacgcaaaatgcaggctacaaaaatctgtcagattgccactaatct

SEQ ID NO: 893836 - DNA, 580 bp, Homo sapiens
tgtgaagggtttagggagaaattgttagtaacacatttcatttgagaaaataaatttcttttagggaagatgaaggcaagaggagctctagagtgagcaagaagggattggtgattttttttttatatcattctttggcacagagttctaggaaatcagttgtgtgataggagacccactcctgtatagcaaagctaccatggatgaaggccttctagacctgggattgtaggagttctaaccatcactaaacttctttagtgcggcagatttttcgctgactccactgccattcctgcttgattctagtgaggcttctgatataacaatgctagaaaactaaaaaccccacttaccagagccaggattttgtaygtggatgagattcttccaagcagatgtccacatacgagactaggagggtttgagcaatgggaggcagtggccaggctcagggacactggaggtctttgcaagcaacagacacgttggttctcctggggcagttctagaagagtttccagagtctggttcctagaaacttaggtacggagcagtacgtggtggcaaccatggtgtt

SEQ ID NO: 893837 - DNA, 644 bp, Homo sapiens
aactgggctcatgccttccaagtatcaaagtcataacaaacttcctctgtgtgagtccacaaggcattcttcctctgggggaatcactccctttccattgtcctgatactctctctgtggggctgtagaggagtgcatggcttttgccctacttccaagccttctcagggaacacagcagggacaaagagctgaaggctcagccttggccatggcccatcaggcccactgcaggcttctcctgggagaagatccagagcctcgggctctgggctcccatatgcagggagaacctccgaccacagaaattggaaggagctaccactscctaggagacatcttcccttgagctttttcaagggctgaacaaacagagcccacacttgttcacggaatccatgggcctcagcacatcagagagaggagaagaaattgacccagagtgtaacccacccccatcttcgggccccaccaagaattgtcagtgatgccagaggaagaggcacctaattcaacagatcaatggagactcacatcacccacaagcaccacttatctgctatttcatcccacaccagtacctgatcatcaaccgttgcaaacactcattgctgtaattgtatcattagtttcaatcacagccaa

SEQ ID NO: 893838 - DNA, 585 bp, Homo sapiens
ctgggggattaaagacatttttaccatggaattaatgacagcggggatctcaccacccagcttaaccagatgtcattaattccataaccaaaggttttttttttttttttttaatttattctggttttttggaaccatttgaaattcagtgctgtagccacatggcggcacctcccccgggtctctctgcaggtgcctcctggragtgagggctttctcccgcctgcccacagcgagtgcagctgaagatggccaacttctatatatatatagttatcaaaagaagcagaacatcatgcaacagtcgtatccaaatttcccaaaaagctccccaaattggaatcagataggtctgtgcactgccctggtgaccctgacgttctcgtctcatttaacccaggagcgtcctcccgggaccagaccctgagcattctggacactgctgggaggtcttcatcaaggaaaacacgcccatgagacaactacttcaggcggggccgccagggacgccaaagccactgtcaggaggtgcttgagcaacagggtgtccccacagtgccacatcccccagcggaggccacacag

SEQ ID NO: 893839 - DNA, 585 bp, Homo sapiens
ctgggggattaaagacatttttaccatggaattaatgacagcggggatctcaccacccagcttaaccagatgtcattaattccataaccaaaggttttttttttttttttttaatttattctggttttttggaaccatttgaaattcagtgctgtagccacatggcggcacctcccccgggtctctctgcaggtgcctcctggaagtgagggctttctcccgcctgcccacagcgagtgcagctgaagatggccaacttctatatatatatagttatcaaaagaagcagaacatcatgcaacagtcgtatccaaatttcccaaaaagctccccaaattggaatcagataggtctgtgcactgccctggtgaccctgasgttctcgtctcatttaacccaggagcgtcctcccgggaccagaccctgagcattctggacactgctgggaggtcttcatcaaggaaaacacgcccatgagacaactacttcaggcggggccgccagggacgccaaagccactgtcaggaggtgcttgagcaacagggtgtccccacagtgccacatcccccagcggaggccacacag

SEQ ID NO: 893840 - DNA, 606 bp, Homo sapiens
atttctttcttcaaatctgtccatttttgtttcatatacattggtgatctgatgataaacatgtatatatttataattgatatatcttattgatggatggacattaatcactacataatgtcctgtgggcccagcccccgccgatcagtctgctccagcttctgtatgacagtggcttcctcatcaggctcctttcctggcctatggctggcccctccccagtagggccatcatgtccccaggtaacatccacgtggccccctgggcagcacatatcattcctcagttgctctcactagaagccaatacttcaggccccacttcctaaggtctggaaaattatggcagcctaataaaacaagctgataaatttaagactggtattatttctctyccagttgtttgagaatattcagcagggaaagtatttgggtctgtagttggctctgtaggaaagcttttgatgttagattcaagttatttaatcaatatgggatatttgtattttttttccttttgtgtggattcggtgtcttgacaaatatagacagttgtgtctccaccaacacaatcaatacatagactcctctcatcatcccatacatt

SEQ ID NO: 893841 - DNA, 625 bp, Homo sapiens
ggcaggtcactcctagaattttagcaatgttaatatttattttcttatgtttagatatttattacccctgaaaatcatggttgttactggaagaaaaaaatattttttcacacacacacacaaaaatacataaacacaaacactttctcaaaatgctggacagttcttacattatgtaccaaaatgtccatcttttttccccctggaatttctgtattaattaattttctgtcctatgatagtgccgtagttttaaatctctcatctcatttcactgtttcagtttttaattcattcctaatatgtatatagtaaagtgcactaatcctacatatacaacttaatggatttttatatmtgtatacactcatataaccattagctagatcaaaatacaaaacatttcctccacccagaagattccactgtgccctttcttatccaatactctcctgcccagaggtaccactattctcacttttattactgattagtttgttctttttttgaacttcccataactaaataaataacaacatatgatgagtatattttgtaccgatatgcatgttgtttcatttttgatacataattttttattgatttttaaatctggtgttccaaa

SEQ ID NO: 893842 - DNA, 596 bp, Homo sapiens
tcctttatcattttttctttacttttgtctgactgatttgactcaaagaaaattttcttactctgaaattccttcctcagcttggtttattcttctgttaatacttgtgactatattctgatattcttgaaataagtttttcagctctatcggctcactttggtccttctgtaaaatggccatttgtcttttgtcccatatatcattttactgtattccttagaatccttggaatgggtttcaactcatttaaagtgtcaatcrtcttcattcctatccatattctaaattttatttctgacatttcagtcatttcagcctgaatcatttcttgggaactggtgcagctgtttggaagtaagaaggcactcttgctttcttgagttgccagagttcttgcactgtttctcatctgtgtgggctgatgtttcttcaatccttgaagttgctgtcctttgaatgtgtgtgtgtgtgtgtgtgtgtgtgtgtgtgtgtgtgtgtgtgtgtgtgtgtgtgttgcttttaccttctttggtattcttgggggttttgtgatggtataaggtgtgttcaatcaactgactttgtttctgtta

SEQ ID NO: 893843 - DNA, 647 bp, Homo sapiens
gatcctcctgcctcagcctcccaagtagctggaattacaggcaaatgccaccaggccctgctaattttttgtatttttagtagagactgggtttcaccatgttggccaggctaatttcgaactcctgacctcaggtgatccacctaccttggcctcccaaagtgctgggattacaggcgtgagccaccgcacctggccttaattattctagttttcttctmcaagccaacctaataaggaataggaatctacaattcataaaacgtcagtgaggagcaatgtttctcaacatcctatgtatgattcacacaatattcttaaatatcaatacacgtgatgcaagcactccagagagttcaaagaaaagtattcattatttttaaaacttttaatggcatgatgtgggaaatgtattttttcccatattttaagaagccctattttactacatcaacaactgatttaaaatatcctcctccagtgttttatctgatacagtggatttttctcaaagtctcttgcctaactgacacattctcaagtgatgaataataaaaaaacacattattccacaccctatcattgataaaggatcacagccctgcagctagaatagttgccgcctaataaatattttgaataaataa

SEQ ID NO: 893844 - DNA, 647 bp, Homo sapiens
gatcctcctgcctcagcctcccaagtagctggaattacaggcaaatgccaccaggccctgctaattttttgtatttttagtagagactgggtttcaccatgttggccaggctaatttcgaactcctgacctcaggtgatccacctaccttggcctcccaaagtgctgggattacaggcgtgagccaccgcacctggccttaattattctagttttcttctacaagccaacctaataaggaataggaatctmcaattcataaaacgtcagtgaggagcaatgtttctcaacatcctatgtatgattcacacaatattcttaaatatcaatacacgtgatgcaagcactccagagagttcaaagaaaagtattcattatttttaaaacttttaatggcatgatgtgggaaatgtattttttcccatattttaagaagccctattttactacatcaacaactgatttaaaatatcctcctccagtgttttatctgatacagtggatttttctcaaagtctcttgcctaactgacacattctcaagtgatgaataataaaaaaacacattattccacaccctatcattgataaaggatcacagccctgcagctagaatagttgccgcctaataaatattttgaataaataa

SEQ ID NO: 893845 - DNA, 668 bp, Homo sapiens
gagatggttggaggacctgtctttgaagactgaactggataactcaggggaaagtctaccctaggattcctagactctccctgcagccactttctactttgattcatttacaaaaaaggttgtaacttaataccttcttggtctgataaatgctctaaatatgtgagttagtggagtgaaggagacaagagaaaggttaggccagcggggagtgcaggcttctcctaaataaagcattgaacagcctgggcttttgagcgcagcccagcatctaaggtagatagtgttctcgtacttgtttgaaatgtcccagaaataccaacgttttagcatccaagctgtatcccttagaatgctccttgttccatggtatatatacgccacattttctttatccagtctatcattgatgggcatttgggttggttccaagtctttgctattgtaaatagtgctgcaataarcatatgtgtgcatgtgtctttacagtagaatgatttataatcctttgggtatatacccagtaatgggattgctgggtcaaatggtatttctgcttctggaaccttgaggaattgtcacactgtcttccacaatggttgaactaatttatactcccaccaacagtgtaaaagagttcttaaaaaaaaaatgttccttgttcccaa

SEQ ID NO: 893846 - DNA, 612 bp, Homo sapiens
atcatggtggtttggtgtacaaattatttcatcactcaggtaataagcatagtacctgattggtagttttttgattgtcaccctcctctaaccctccacactgaagtaagccctagtgtctgttgtttccttctttgtgtccacatttactcaaagtttacctcccacttataagtgggaacatgatgtatttggttttctgttcctgtgttagttttcttaggataataacctgtatagccccatccacgttgctgcaaaggacacgatctcattcttttttatggctgcacagtattacattgtatatatgtactacattttaaaaatccagtatattgttgatgagcatttargttgattccatgtatttgttattgtgaatagtatcatgatgaacatatgtgtgcatgtgtctttatggtacaacaatttgtatattttgggtatatacccaataatgggattgctgagtcaaatggtaattctgttttaagttcttcgagaaatcactaaactgctttctagagtggctgaactaatttacattcccaccagcagtgtataagtgttccttttctccacaaccttgccagcatctgctattttttg

SEQ ID NO: 893847 - DNA, 555 bp, Homo sapiens
tggcaaaatttatgttacatatatttcactgaaataaaaaactataaatggagggataacatttaccatgacggatattagtgtacttgtagacctatgtgcatggaatttctgggccaggaaccatgcttgatttaactgtgtgtccttgaagttctgcacattggaaagacaaacaaggagggttttggagctggtcttgcacagccaagcaatgagaagcattggtttcttatcctgtaaaagagaactttcatttttagtatgctaaaattcarctgcagagttggtcaggacccttttttgctctaaaaatctggcattttgtgatgttctagggtagaaggagcagagagggctgaaatctgggtacagtgttttctggagacaagacttgaactcacctggaggctggcatggtttgttgagggcacaaatgcagctggacttgggaaagtgagctcgggtcttgctggagaggactgggttctcagctcagcgctgccagttggagaggcagggacccgtcctggagacagtggctgacccatgcac

SEQ ID NO: 893848 - DNA, 555 bp, Homo sapiens
tggcaaaatttatgttacatatatttcactgaaataaaaaactataaatggagggataacatttaccatgacggatattagtgtacttgtagacctatgtgcatggaatttctgggccaggaaccatgcttgatttaactgtgtgtccttgaagttctgcacattggaaagacaaacaaggagggttttggagctggtcttgcacagccaagcaatgagaagcattggtttcttatcctgtaaaagagaactttcatttttagtatgctaaaattcagctgcagagttggtcaggmcccttttttgctctaaaaatctggcattttgtgatgttctagggtagaaggagcagagagggctgaaatctgggtacagtgttttctggagacaagacttgaactcacctggaggctggcatggtttgttgagggcacaaatgcagctggacttgggaaagtgagctcgggtcttgctggagaggactgggttctcagctcagcgctgccagttggagaggcagggacccgtcctggagacagtggctgacccatgcac

SEQ ID NO: 893849 - DNA, 520 bp, Homo sapiens
gagggaaggtctagggctgaaggctgtttttcagatccttttgtcccatgggatgttcccttgatgtagtactctcccccttttcctatagatgtggcttcttgtgagctgaattgtagtgattattgtctctcttctgggtctagccactcagtgagtctacccaactccaggctggtactgggggttttctacagagtcctctgatgtgagctgtttatgggtctttgagccatggatacctgcgcctgttccggtggaggtggcrgagggcgcaatggactccgtgaaggtcctcagctttggtggtttaatgctctatttttgtgccggttggccacctgccaggaggttccaatttccagaaagcatcagccatagtagtgtggagagggaccggtggtgggcagggaaatagaactctcaagattatataccctttgtcttccgctaccagggtagatagggaaggaccagcaggtggggtggagctaggcgtgcctgagctcagactctcctg

SEQ ID NO: 893850 - DNA, 565 bp, Homo sapiens
ttgaatgtaaatgggctaaatgcctcacttaaaaggcacagaatggccagttggataaaaaaacaagacccaatggtatgctgtcttcaagagacctatctcacatgtaatgaaactcatagggtcaaaataaagaaatggmgaaaaatctaccaagcaaatggaaaacaggaaaaaggcagggattgcaatcctaatttcagacaaaacagatttcaaaccaacaaagatcaaaaaagacaaggaagagcattacataatggttaaggattcaattcaacaagaaaaccgaactctcctaaatatatatgcacccaacacaagagcatccagattcataaagcaagtccttagagccctacaaagaggcatagactcccacacaataatagcgggagacttcaacactccactgacagtattagacagatcctcgaagcagaaaattaacaaagatattcaggacttaaactcagcattggaccaaatggatctgatagacctttacagaaatctccaacctcccccgcacaccaaaaaaagtatatacattcttctcattgcc

SEQ ID NO: 893851 - DNA, 569 bp, Homo sapiens
cttcccgaggactgaatgtgtcataaaatccccagtctctagcagtacatgtgtattgagttggatcacatgctgctggacccatggcttgtcatcatgtgtacatgtagccgactttgactctcaactgtgtcagttctgggctagagactgttactttatacaaagagagataaactgtgtcccttgtcctcaaataaatargttggactactagggtatttacaaaacagagtgtaggtgaagaaaaggaaatttcagtgacaaattaggaggcacttaagaaatactggacgttttcaattaatttggcaaaatgaaaagtaatagatacatttccttggttgtggctgtgatgggtagagacagtggtgctgaacctcgctcacacatgtgaaagcttgtctgctccagaagtagaagagagccttccagttgctaaggctctgtccagggccgggctcctgccaggtggcaggcagaggcttcctcaagccctgcgtccctcttctgggttcagagaccactcccaggcttggttctatcagcacactccatgcatacaggtg

SEQ ID NO: 893852 - DNA, 614 bp, Homo sapiens
gcttccacttgcaagtcagaacatgcagtatttgattttctcttcctacattattttgctaaggataatggcctccaactccatccatgtccctgcaaaggacataattttgttcttctttatggctgcatagtattccatggtgtatatgtaccacacttcctttatccaatctgtcactgatgggcatttaggttgattccatgtctttgctattgtgaatagtgctgcagtgaacatatgcatgcatatgtctttatggtagaatggtttatattcctctgggtatatacccagtaatgggattactgggttgaatggtagttctgttttttgctctttcaggaattgccatactgttttccacaatggttgaactaatttacctcccaccaacagtgtgtaagtgtttccttttctctgcaacctcaccagtgtctgttattttttgactttttaataataaccattctgatwggtgtgagataatattttgtatgtatataggtctgcacatttttccggggaaaagttcattgctttcatcagattctcaaaggcacatgtaatgcaaagtaggttaagaacaagggatcacttctgattgcttggtt

SEQ ID NO: 893853 - DNA, 655 bp, Homo sapiens
acatttgggttggttccaagtctttgctattgtgaatagtgctgcagtaaacatacatgtgcatgtgtctttatagtagaatgatttataatcttttgggtatatatccagtaatggaattgctgggtcaaatggtatttctagttctagatccttgaggaatcaccacactgtcttccacaatggttgaactaactaacttacactcccaccaacagtgtagaagcaaccctatttctccacatcctctccagcatgtgttgtttcctgagattttaatgatygccattctaactggcatgagatggtatctcactgtggttttgatttgcgtttctctaatgaccagtgatgataagcatttttttcatatgtctgttggctgcataaatttatttaagagaaatgtctgttcatatactttgcccactttttgatgggtttgtctgtttttttcttgtaaatttgtttaagttctttgtcgattctggatattagccttttgtcaagtggatagattgcaaaacttttctcccattctgtaggttgcctgttcactctgatggtagtttcttttgctgtgcagacgctctttagtttaattagatccgatttgtcaattttggcttttgttgccattgcttttggtgtttta

SEQ ID NO: 893854 - DNA, 605 bp, Homo sapiens
gaggtgccaagcacctgttgtcctccctccacatcctccatctgccctgaaaactttctctgacattcctttactgctccactcttgctttaggtctcaataccaatcacttccttgaccactcacccccaatcacaagtccccctggtgcacccctgtatctttcatccttggcacatttcctagcttgtgctcatatgttyatttgcgtaggtaattgattagcgtctgtcttcccagtagattataagatctaaacgagtaaggaccatgttttattctctgctatagcctcagatccttgtgcatggccagccacagcatactactacatgctacatactacatgctacatgccacatgctacagtcagtcatgctgctgtctgctacagtcacgtgtacttaaccagaggacactacagtgctactacaagtcatgtgtcacttaaagacagagatacgatctgagaaatgtatcattaggcaatttcaatcattgtgtgaacataatagagtgtatttacataaacctagctgctataggacactatacaccgaagctatatggcatagcctattgctcctaggctacaaacctgtaca

SEQ ID NO: 893855 - DNA, 575 bp, Homo sapiens
agttgaagacccagctcagaaaattcctgaaaacttaacaattggctctcaagagccagtgtttttttttttttcctcttggcagtgggcggcggaggcaggggtcctaatgaaacggtcagtgcttgcttgtgcggcagcggcacaccatccaaatgcagaatgtgcatatcctgtttcctgaaaagccaaccaatccctcactgagtgtcatgatcaccccttcacctagacctacttatttcttctccatttctagtgaaacaaaagtcagagaactaggaggtgagagtgagtgtggggcctcgctgttctgaaatgaagagctctgtcaagcacttacaagcagtgcacaacsgtgcggccttccccgccattgtactcctcttgccacttgtccacctggcgaatgagcttcaagaaggagcgcttagacactggtgtgtccctgtacatcggccagcccaggaactggaattgctgcaccatccgatatccatcttggggctacgaagaacaaggcaacaatcggggagtggaaagaaaacaggcattatttactgaattccagtggg

SEQ ID NO: 893856 - DNA, 575 bp, Homo sapiens
agttgaagacccagctcagaaaattcctgaaaacttaacaattggctctcaagagccagtgtttttttttttttcctcttggcagtgggcggcggaggcaggggtcctaatgaaacggtcagtgcttgcttgtgcggcagcggcacaccatccaaatgcagaatgtgcatatcctgtttcctgaaaagccaaccaatccctcactgagtgtcatgatcaccccttcacctagacctacttatttcttctccatttctagtgaaacaaaagtcagagaactaggaggtgagagtgagtgtggggcctcgctgttctgaaatgaagagctctgtcaagcacttacaagcagtgcacaaccgtgcggccttccccgccattgtaytcctcttgccacttgtccacctggcgaatgagcttcaagaaggagcgcttagacactggtgtgtccctgtacatcggccagcccaggaactggaattgctgcaccatccgatatccatcttggggctacgaagaacaaggcaacaatcggggagtggaaagaaaacaggcattatttactgaattccagtggg

SEQ ID NO: 893857 - DNA, 590 bp, Homo sapiens
ctgcaagtccatgaatgccctttcctaggatatcagggaccagagtggaacatgagctattattacaagggagggatggaaaaattagactttttttatttttggaaaaatacacataaaatttaccatcttaaccatttttaaggtcagtgccattaagtactgttaaaagaaaaactttagacaaattaaatttagccaggtttatttgagcaaagaccaattcatgagtcaggcagtcctcagaaacagaagaggttcagagagccacacctacaagtgtgagwggcaggcttttgtaggccaaacagagaagcaaagtagagaaatcacctaattggctacagctaggcatctgccttatttgagcatggtgtgatgagtttggagttggctgcctgattggttgaaacccttcctgttttatgtattccctagcacatggtccaatagaaagaaactatgaaatataaatgcaagccacatgtataatattaaattgtccttaaatctaatagccacactaagtaacagaaaaagaaataaattacttaagtttagtaatatattttattaaatctaatatgtcc

SEQ ID NO: 893858 - DNA, 627 bp, Homo sapiens
atgactgtttaatgtgttttccattgccttaagtcccatgaactcaagcaccgtaaatctaatttgtttaacactacatatccccaacacttagcatagtgtttggcatatagcagatactcaaaaagtcactgaataaatgagaagaccttactgaggaggggacatctgagttgaatactgaaaaattggcagaatttggacagttagagatggttaggaatgattaggtaagagatttctagaagatgaaatagctcagtattctgacaatattagacaagcctgtattaaaactgaaatttaggctgggcgtggtggctcacgcctgtaatcccagcactttgggaagctgaggcaggtggatcacctgaggtcagtggttcsagaacagcctggtcaacatggtgaaatcccatctctacttaaaatataaaaattagccaggcgtggaggtgtgtgcctgtaatcccagctactcaggaggctgaggcaggagaatcacttgaacccaggaggcagaggttgcaatgagccgagatcgcgccattgcactttagcctgagcaaaaagaacaaaactccgtctcaaaaaaaaaaaaaacctgaaatttaaaaaggcactgtg

SEQ ID NO: 893859 - DNA, 570 bp, Homo sapiens
tactgtgcatcctctcaccaccaaataaaactcctctgaagcggtgggggaagcatcgggaaagaaacaagggacttggtgatgtgctggtggcccactgagccaacgcggatgggggtggcaataatagaatgtactatttgggaatccttgggcaccctgtgtggaggaggctggagraagtggtcccggctctagctctctctgcacttctgcatgggggccaccgggggagctgtagagttcagattgtggcagggcagctctggttgcagggaacagggacagccctgagtcttctgtgccttaagaaaggtagatcactggaacacttctcctgccccagagagggataggccaagagagggcattgggcttgctgaaatcctgtggtggagggcctggtgggattatcagagagggttcaacctggagggatgtctgtggccatgtgacagcccaaagggaaagtgggcccagaggaaatgttatttcaggcctgaaatgatggagaaaaccataattgcctaagactacattttctgccatcaagtagtatggggcttgaaa

SEQ ID NO: 893860 - DNA, 627 bp, Homo sapiens
aaatacttgctgtcatgaaagataaggcaagactgaaatgtttcaggttagtggagactaaggagaaataacttctgaaagcagtgtgaggttctgggacagagaacatactgggagaaaaactggtgtaacaattgaagaaagtctatakttgagttaataatattgtaccactataaatttgctaaccttgataattatactgagattatgaaatatgctaacattaggaaaaatggtatgaagaatataagggaattctttgtactgtttttgcaatttttcttcaaatctaaaatgattcaaaattaaagttataaaagaaatacaagtggttctgagagactaataataaacacatgcagtgaacatttattgagtctccacacacacaagaaggggtgtcaggtctgatggcaccctcaccatctaagcgttgcctgcagcggctccagggtgagcagatccaccctccagtgctccactgagagagttcccatcagctgaggcaattctctggagaagggtcctcggcagcccattcgggaaacacctggaggatggagtaccaactgatgaaggggtttcctgtggcatcacagtgtgataatgacatttgctgctaag

SEQ ID NO: 893861 - DNA, 674 bp, Homo sapiens
atgttcttgaagatccatcatttatttatccagtgggccccaaacatcggaaggttatggttctcatttgttgaaaaatacgactctaggagaaatccgtgactccatagaatcttttggttttactgcttccaagatgcaaaacactaatgaatagttggtttttaatcttctggcttgaattttgatcaccattaggcaaataaccaagtgagtcagtcaagcttaatctacacgctttacaggaaaacatgagaggtggaaagggccatgtcattcacttagatgctgtttctttttacattttaacgtatttaagaactatrtttaataatcagataatactacttataaaatacagtaacagccagaaacaactgtcagagagaatctaagcgggggcatttcaaactgggttcctttgagtcctggtcatgtggagacgtctcagggagggctgttgggtctctgggacttcagtgtcactgctgtgtttccatctgtttccccatccttctgtgtgccccaaacacctcaggccccataacaaactatcttggaaatggcctcttcttatcttaaagctctcatgattttgggcggaagtcagctcaacaagagatttgttgtaaacaatgtttgcttgtctaggttaaagatttctgaactcagga

SEQ ID NO: 893862 - DNA, 674 bp, Homo sapiens
atgttcttgaagatccatcatttatttatccagtgggccccaaacatcggaaggttatggttctcatttgttgaaaaatacgactctaggagaaatccgtgactccatagaatcttttggttttactgcttccaagatgcaaaacactaatgaatagttggtttttaatcttctggcttgaattttgatcaccattaggcaaataaccaagtgagtcagtcaagcttaatctacacgctttacaggaaaacatgagaggtggaaagggccatgtcattcacttagatgctgtttctttttacattttaacgtatttaagaactatatttaataatcagataatactacttataaaatacagtaacagccagaaacaactgtcagagagaatctaagcgggggcatttcaaactgggttcctttgagtcctggtcatgtggagacgtctcagggagggctgttgggtctctgggacttcagtgtcactgctrtgtttccatctgtttccccatccttctgtgtgccccaaacacctcaggccccataacaaactatcttggaaatggcctcttcttatcttaaagctctcatgattttgggcggaagtcagctcaacaagagatttgttgtaaacaatgtttgcttgtctaggttaaagatttctgaactcagga

SEQ ID NO: 893863 - DNA, 587 bp, Homo sapiens
tcgcctgaagtgcaactctatgcccatctaatgcacacagcagcagcgcaagttagtgagcagcagctgggaagcccacagctcttcctgccctctctgggaaaccaaacagcgaccacaacgaaatcacatgttgagtgagggctgwaaacccaaagaccctggtgactgagatctccaactttagagaactgctagagaacaagtgtgtgcctgcccagtcagtgggtgcccctcagccttggccacaggacagatgtgaggccatgaactgatggcatgggagcacggggctggggtggcccagccgtccccagaacactgagctaccaacttctacctccctaccacagcctgatccgatcggcacgtgctgctagtggtcagcgttctgctagcctaccagctttgcaccccctgggtggaaggagaatagcggagggatgacccaggtgcaggaggaggcagcccgggctcagaggtgtctgaagaccttggtcagacagcgaggcactggcactgtgttcaagcaccctgtgccctgacttccagcatctctgacgtgtgcacctctcaccagagaggcc

SEQ ID NO: 893864 - DNA, 537 bp, Homo sapiens
aggcctccaccgctgacccctccagagcatgtgaactcagtgaagcttacaaagcctctggcctggctcctgacttggggagagaaaaagtagagatcagcggggcctcagactctgctttccagtatgagagtgggaatcaccaatctcagtgccttgatccaggctgaggaaagtcagaggaaactgtttcctcccagaaactgtccaggcagaacaatgggtgccctcctacagcagatgggcgatttcacctttcaaacattctcaggtttgagtgaccctcagctcctgagccagtccaagaacaattccttccagatctctcctggcccaaggtctccaggccartgagggaaggtgccttcaaggcgagctcctgcacactcacgcacacacttgattttccatttcaagtgacaaatatttgaacatctcaggtgaagctggagaaatatctaatgtccttaatgaagctcctcacataactgtgtgttgtggacacacagttacgtgagggatcctctgggcagaagt

SEQ ID NO: 893865 - DNA, 540 bp, Homo sapiens
tgaagaagcaacctacagaatgggaaaatatctgcaaaccattcatcagataagggattcataaataagatatatgaagaattcctacacttaatagcaacaacagaacaaacaaacaaaacccaagtaactttatttgaaagaatgggtgagagactggaataaacatttttcccaaaaatatattacattttatattgtcttccttgacaattactttttcactgtgaaaaccactcaatgatgtcacagatggatttcacaaacatggaagttcagacttcatgraagatttggccaaagacaaaaaatagctctgatttccaaatacaaatcatttcaatgggcaaaaaaacaaagtgcctggtatgataaaatgcattctctcaaccttctttgagtgtgttccagcacaaatgtctatctgcagtattcatagcaaattctagccaacctctgcatttccttattagcttgaaactaaatggcaggaaacacccaggggcactagtaacactagaatcttgtgccaatttaaaa

SEQ ID NO: 893866 - DNA, 463 bp, Homo sapiens
cacaagtcctccagtaacaaagttaagtgaatccagaaaaacaagttctcctatcttaagactaaaaatcttaaacttgagggctaggcgcggtggcttgcgcctgtaatcccagcactttgggaggctgaggcaggcggatcacaaggtcaggagatcgagaccatcctggctaacacagtgaaaccccgtctctactaaaaatacaaaaaattagctgggtgtggtggcgggcgcctgtagtcccagctactcgggaggctgaggcaggagaatggcgtgaacccaggaggcggagcttgcagtgagccgagatggcgccartgcactccagcctgggcgacagagccagactccgtctaaaaaaaaaaaaaaagaaaaagaaaaaatcttaaacttgaaactacagagctctgtataggaagaagaaacagtcactcacaaaaatgaagagaagatattt

SEQ ID NO: 893867 - DNA, 691 bp, Homo sapiens
tgtataggttgagtgaataaccaatttgcagtggtggattgagaagtccagtttgatttcattgggacagactgcaaagtgtagttgtttgagcaaacacaaagaaactttgtgtttttgaagacaatcagaatgattacctttctacctctaactaatcaggtattgattgacaactttttggcattataaataaagtaaaatagatctctgcattccaaaatatgttttttagtttatttatatcctgaagaaatggtaagttttcactggaactgattacagtaaacaataatatgtccccttagtctttctgacatttttatatagattgagattgaaaaacygtgcatttggggcagtggtattatggtcatttcgttgctattttctgttttaataaaatcctagaactagtagcaaccgagtaaagattgagtttgcaagataacagattgtctcaaatctattcaattctcagcagtttttcatcaaataatttcaggatccattttattactcatttttgaagtaacacctttggtttagttttattttcccataaattctgcttttgcttctgtaacttttttcttgaactataagcatagtcatcactcagttgatatctagtttattttttgccttcattcgttgtttagtcagttgttatttaatttagaattttata

SEQ ID NO: 893868 - DNA, 604 bp, Homo sapiens
caatctctgaattctgtaaccattattattgacattaacggtgttagggctgttgtaaaatttttgggaaaacttttatttgctctttctcataaaatgctgccagcttgaaaaactcattaaaactaatgaagtatcaatatctcagtaaatgcttcctgataatgactattcacttaattattatttcaaaagtgacttttttttttcttttttttatttttgagatggaattttgctcttgtccaggctggagtgcaakggcatgatctcagctcactgcaacctctgcctcctggggttcaagtgattctcctgcctcagcctcccaagtagctgggattacaggcatgcaccaccacgcctggctaatttttgtattttcagtagagacgggttttctccatgttggttaggctggtctcgagctcctgatctcaggtaatctgcccgcctcggcctccccaagtgctgagattacaggtgtgagccaccgtgcccagccaaaagcaacatttttatttgaaggcatatttacaaaaattcttgatagttaccaacttaaacatcaatacacctttgtgtatttcatcactttcagttt

SEQ ID NO: 893869 - DNA, 640 bp, Homo sapiens
cattatgtttgcacccgaacactcacccatatgcattacaaaagaatagcagctggcaaatgttacaatgaaaaaaagatttttatataattatcggtgtaaaaatacaacaatactgttcatatttttccatggaattatttccattagttggcatgagatgttggcttttggaaatatagcagctgagttctggtttatttacttagagaaaaattgtggtatatttcagtgtgccatgttggtgtgtgttgtatayataaacacacccaaaggacacacacacttgtaatatcattacagaagtaagactcaagttgtttgtttacactgtaggctcagacatgttcatgcttgtctagagagctagtaggataaggctgcctctgcactgggacaggtagaagagtggtttccattcgcataatgagcagagaaacctgataaaaatgtgaagactcataaatttgtcaaagccgaaaggatccactcaaagtgattacgaattagtgtgagtgtggatgtgtgtcttgctacacagtttgactaatgtattaaggaaatcaagtaatgataatctaacaaattctaagggtgattatacttaaaatttcctatggttatacatttattcactccc

SEQ ID NO: 893870 - DNA, 643 bp, Homo sapiens
gatagggctgagtgtttttttcttgtaaatttgtttaagttccttgtagattctggatattagccctttgtcagatggatagattgcaaaaattttctcccattctgtaggttgcctgttcactctgatgatggtttcttttgctgtgcagaagctctttagtttaattagatcccatttgtcaattttggcttttgttgccattgctttaggtgttttagtcatgaagtctttgccaatgcctatrtcctgaatggtattgcctaggttttcttctaggatttttatggttttaggtcttacatttaagtctttaatccatcatgagttaatttttgtataaagtgtaaggaaggggtccagtttcagttttctgcatgtggctagccagttttcccaacaccataaaatggtattttttgagtgacaaatgcttaggaccagtaaaagttaaactagaagaagaggtataaaccaggggaaaacactacctaaagtgttttcctacagttcaattgtagttgatgaatacttgtaaaatgaaaaatctttttgtgatggggagaattcacagttactgaactgcctgatttattttattttattttattttattttattttattttattttattttattta

SEQ ID NO: 893871 - DNA, 643 bp, Homo sapiens
gatagggctgagtgtttttttcttgtaaatttgtttaagttccttgtagattctggatattagccctttgtcagatggatagattgcaaaaattttctcccattctgtaggttgcctgttcactctgatgatggtttcttttgctgtgcagaagctctttagtttaattagatcccatttgtcaattttggcttttgttgccattgctttaggtgttttagtcatgaagtctttgccaatgcctatatcctgaatggtattgcctaggttttcttctaggatttttatggttttaggtcttacatttaagtctttaatccatcatgagttaatttttgtataaagtgtaaggaaggggtccagtttcagttttctgcatgtggctagccagttttcccaacaccataaaatggtattttttragtgacaaatgcttaggaccagtaaaagttaaactagaagaagaggtataaaccaggggaaaacactacctaaagtgttttcctacagttcaattgtagttgatgaatacttgtaaaatgaaaaatctttttgtgatggggagaattcacagttactgaactgcctgatttattttattttattttattttattttattttattttattttattttattta

SEQ ID NO: 893872 - DNA, 633 bp, Homo sapiens
cacatagaggtacttaaaaatttctggttcttgaacttgattaatacgatattgaaaaaccaaatctctgagtgtcaatttcagctcttaaactaaatggtgtataataactttagaatagtaaatgcttttggagaataaggaagggaaaaatatagcatgtgtggcaattagctgtatctatagcaatttatttctttttaaaaaaagggacctgaaaaaatattgcaaaacattcatatctgttcagttgaagtgatggttgtatgtgtagttgtctacacattttctctactttttgtggttttaaaattaatratcatataattaattttaactctaaaactgtgatttttataataaattaagaaagtgtgaatttagcaaggatttctcttgtttatacaagaattagtcaggaagttcttttaaatagagacctcttacaatcaaatactatttgatttatatgattttgattcaaatacaacttttcagaaacctatctattgaataaattttacctttattggaaaaggatacttacgcatagttttctaaatgtgtttaataaacttagttatattaaatgtgaaagtattaaaggggatgcatattcagatggcaatctat

SEQ ID NO: 893873 - DNA, 577 bp, Homo sapiens
acctatgtaacatttatgtttcataaatgtcagaaaaaggtcttgcttcaatttgtgcttgaactttctacagccaacaattttctctaccaacacctactagaaaataacttcacccctaaatataacaagcttttccctttggtttgtattttgttttatgacccaattaactttaaattaagtaggctttatgatgaaagaacaccatcaaattggcatataaataatgttataaatagactcccaaaggatgaacaatgaaatctgttactgcaacccattttaaaaaaccagctcttaygagcttgatataaatggttttcttaccagttggagactgcattctatttgcaacagtccaaagtgtgatggacaattaattttactttttcctcaaaaacaggaatttttcatgacgcgtcgtgaatatgtaccaagtctaactcagacctttggggactgtggtatgagcaatctcatgagtcttcagttttatttatactgtatactttacatcaagagcaactatacttatagcacttactttggaagaaatgtctctacctttagaaag

SEQ ID NO: 893874 - DNA, 577 bp, Homo sapiens
acctatgtaacatttatgtttcataaatgtcagaaaaaggtcttgcttcaatttgtgcttgaactttctacagccaacaattttctctaccaacacctactagaaaataacttcacccctaaatataacaagcttttccctttggtttgtattttgttttatgacccaattaactttaaattaagtaggctttatgatgaaagaacaccatcaaattggcatataaataatgttataaatagactcccaaaggatgaacaatgaaatctgttactgcaacccattttaaaaaaccagctcttacgagcttgatataaatggttttcttaccagttggagactgcattctatttgcaacagtccaaagtgtgatggacaattaattttactttttcctcaaaaacaggaatttttcatgacgcgtygtgaatatgtaccaagtctaactcagacctttggggactgtggtatgagcaatctcatgagtcttcagttttatttatactgtatactttacatcaagagcaactatacttatagcacttactttggaagaaatgtctctacctttagaaag

SEQ ID NO: 893875 - DNA, 679 bp, Homo sapiens
gctatcacttgcagtattgtgttgagtaggagtaggaaaggtgggtatccttttctcattctagtttttgaaggaaaagctttaagttttcctcactcagtatgacattagctgtaggtttgttatatatcactttttttgtattgatatgtactttctatacctaacttattgagagtttatatcatgaatggatattgaattttgttaaatgattttctgtgtctattgaaatgttcatatggtttttgtctttctgtgatgtatcacatttattgatttgtatatgttaagccatccttgtattcctgagaggaatcacactttatcatggggaatcatctttttaatgtgctgttgaattcagtttgttaatatattgtttagaatttttcatctatattcatcaaggatattagcctgtaattttattttaattattgtatccttgtctggttttgaaaccaggggaatgttggtctcataaactgagtttggaagcaccccctcctctttagttttctgtaataatttgaagastatcaatattagttctttaatgtttgatagaattcagcagtgaagccatcaggtcctaggcttctttgatgaaagacattttattactaatttaatttcttatgattattggtctgttccgatgttctatttcttcata

SEQ ID NO: 893876 - DNA, 601 bp, Homo sapiens
acccagtaatgggattgctctgtcacatgatatttctgtctttaagtctttgaggaactaccacaacatcttccacaatggctgaactaatttaaactcccaccaacactgtataagtgttcccttttctctgtaacctctatagcatctgttgttttttgactttttaataatagccattctgactggygtgagatggtatctcactgaggttttgatttgcatttctctaatgatcagtaatgtttagttttatttcataaattgttgactgcatgcatgtcttcttttgagatgtgtctgctcatgttctttgcccactttttaatgttttttttttcttgtaaattcatttttcttgtaaagttccttatagatagatgctggatattagacatttgtcagatgcatagtttgcaaaaattttctcccattttgtaggttggctactactctgttgttagtttcttttgctgtgcagaagctccttagtttaattagataccatttgtcaatgtttgcttttgttgcaattgcttttgacattttcatcatgaaatctttgcccgtgcctatgtcctgagtggtatttcctaggttg

SEQ ID NO: 893877 - DNA, 643 bp, Homo sapiens
aactgaaagcagagaccagtctgtccacgtggtcccagtctgcctctccctgagatgtcaagagccttaagaatcactaggattctagtatcctgttaagcctgtgtatataaaaatgtttgttttgtttttcatatgtttattttatttttcttctattctgaccctgtagtatatcatttgtggtgtttgtgcttacgtttgattgacatctttttttttctataacaygtagtaaaattatttcaaatggtgtaagcaatgttaagcaaagaagacaaatcatataggcatttaatacctgatataaaaatatagaattcttttaaaagcaagaaatcaaaaaacggtgttaaattgtttttaatactatatattctataataaacgtacagtgattctgtatgtctacatgcataattaaatattgagagatacataacagaaaaagagccgtttgtgatataactatgttcacttttatcattttaagttaattatgtcttactagtgatataatagttgatatagtaatatagtgaatttgtgacataagtaactaatctgcctccttgtacgcttcatgctaaaggctatgaaaataggaaaagactaaaatttcaatgtcacgacaattatttgt

SEQ ID NO: 893878 - DNA, 605 bp, Homo sapiens
atagttgatatagtaatatagtgaatttgtgacataagtaactaatctgcctccttgtacgcttcatgctaaaggctatgaaaataggaaaagactaaaatttcaatgtcacgacaattatttgttattgcgaaagaacaaagtatgyaaaactggccatttttaacaggaaaattaatgctttaaaatatgcattcattgaattcattgggtctcatattaaattttggctgttttcttcatggagccataaagtaagctctcactgttatagcagaagtcaattaagcttgctgtacacgaggatgcattgtatagatgatgtttttggtcttggaactgaagaggagaaaccacaaaagagacagagatggagtgtgcagaaattttatttgaatctcaaagaatgaacttaacagaagtcttgggtatagtaatatatgaacggtgatagtactatgtgtgatttttattctatcgcataaagctaaatttttaacttgactcataaatttaatttataaccagaataaaattatgctacttaaacctagcaaacacataattttaccaagcttgaattgatgtatacagattttaagtga

SEQ ID NO: 893879 - DNA, 633 bp, Homo sapiens
tatactgcaaaaagtcggggcaggagatatagcctccctggaaacattctacatgcctcttcccaatcagaaaccctctcttgctaagaacaatgactagcctgattttgcagtaaatacttcctttcttttctttatagttttaccaccagttgtgtgccacttaacactacagttgagctcttctattccttattcccctaaagtatcctttaattgtctaaagaaactatgtctagatatctttgtaattaacttgttgaaaagccattgtattttttttttctgtagagtttccttcatatatatctacatggyataggttagtgtgactctctataaattaataactaagttgagagacttaatcagaattaaagttcagtttttttgcttgtctaatttataggcggtaagttcttcaacaggaggcatataccgtaattctttctttttatagttttagcagttcttaatgctccaagtctaaatccatttttccaataggtattgaaaaatgatgatattataattttattatttcttcttcagctgtttgcctgaaaaaagaaatatctatcatttggttacccagtggtttcatccttattaaagaagcactccatctcttct

SEQ ID NO: 893880 - DNA, 594 bp, Homo sapiens
aaaatttcatataatcataacacctttatatgtgatggttcatgcttcactttgccttccaaatcttgtgcaaaatttctcttctggtcaactctaaccaggttgtataggaaagaagattttgttgggtatctttctgattaacataaattaatattatcaagggagttcatgatgtaatttcatatcattctcaaaagtatgtatatatattgtttttaatactactgtatcctgcttatttaatttgggaattgcacttattggaaggtctacaatattcratatttatatagagaactgtgctcctgttgttaattttaagacattttaaagaagtatcctgtgtacttttaagtgatttatattaatattttagacataattgtctttattcaactacatactgtgactcagaataattatattgttcaatcaaaccaggtaggttgtaaatgaatgttatgttttatgcatcaaacacaataatcaactaattataatatttcagaatacaatgttattcaacattataagtcatcagggagatgcaaattaaaccataagaagatactatttcatagccagtttaat

SEQ ID NO: 893881 - DNA, 604 bp, Homo sapiens
cagaagaaacttctaagcagcaaagcattcaagacgtgacagagtataaaagtttagaaaatttgcagccagtctatgcagtgggaaagaaagctcattttctctggagaaactaaaatctgctgcagaaattcacataattaattaggacccaaatgctaatcaccaagacaatagggaaaatatctctagggcatgtcagaaaccttgcaggcagctccttccatcacaggcccggaggtctaagaggtaaaaatagtttccttcctggaccatgccaagggctcccagctctgtgcagtctcaagacttggttccctgtgtcccagctacttcagctccagccatggctaaaagaggcaaaagtacagctcagggcattactttagaggatgcaagccccaaaacatggcagcttccatgtgatgttgagcctgtggrtgcattgaagtcaagaattgaggtttgaaaacaccacctacatttcagaggatgtatggaaatgcctggatgtccaggcagaaggttgctgcaggggtggagccctcatggagactctctgctagggcagtgcagaagggaaatgtggggttggaacccccac

SEQ ID NO: 893882 - DNA, 522 bp, Homo sapiens
taatctaattaaaaatggacaaaagatcagaatagaaatttcttcaaaaaaatgttaaatagccaataatcacattaaaaattgctcaacataattagtcaaatgggaaaatgcaacacgaaactgcagtgagatgatgcttcatgcctcctaagatggctatgatgaaagacatctaacaaacattgtcaaggatgtgaaaaaatgttatcctcataaattcctggtggtaaagaagygcagctgttttagaaaacattctggcagttcctcaaagggttaaacataaacttaccatatgacctagtaattccacttctaggtaaatctaagagatataaaaacatttgtccattcaaaaacttctacattaatcttcatagtaacactattcttaatagccaaaaggttgagacaacctcagttttcattaacaatggataaataaaatgtagtatattcatacaataggataacattaatataagaaataaagtattgaagtatgctccaacatggatt

SEQ ID NO: 893883 - DNA, 576 bp, Homo sapiens
agtggtagaaacggtggccggactgctttttaccctttgggtggaagaaaggacatgtttggcaggaggaagggaaaggagacgatgggtactaggtatgcatggttctggcgggcatcaggactggggtggaataatgagtaaagccttagcagcaaagctgtaccaacacagtgttggaaaccctgtgccagtccaagcaatgacagtgccctgctcagacaccacttgacgttgatgtggcacaaatgtgtggctgcggcactgtcagctgtgtgcttaagactggagtgcaagtgtgacctatagaaacagccttggggtcgtcaggacattttccttcctagagtctatttggcaggcaccgcaccctccgccagtccacatcagaacacattatagraggctttagaatgttctgctaatctgcacctttcctcaagcgggtaagttacttgtagaaagataaaaattttcctgtataaataaattcagaataaccataattctggtgtccctctctagcacaatactgtatcatagcatatcttatgtgcaccagcctgtctctgaagg

SEQ ID NO: 893884 - DNA, 582 bp, Homo sapiens
tgcctcacaccagttccttttatcagaccaagtgagacttcctgtggactggcccagcttcctgatatatttcctttttcctttggcagaacaaagaaaaccatagctccaaggatccttgggagcaaacacaatttagccctgaagaacctattattttaaatttttcattctcaatgcgtagggccaagcgcctgcctttgctttttttttccccacagcattctgtgtaatgtcccgatgaaccctatgtgcaattaccaggggtcgatgagctacttgaattcatcctagttgtagttkgattttattcaaagtaggaaaattaagccattttcagtgcacaagcacccccacctcatacacgcatacaccttcaagagggacgtggaacacctctctacatagggtttaaccttttgttacctgagctcaacacaacaggtgtgcaaggaaaccctcttgtctagagatttcaacctatctgtttttgcagttctgactctagaaacatgcgtataggagaagaagcttcaaggtgtatccaaaggatcatcaaagtcagttgaagaagaaattcca

SEQ ID NO: 893885 - DNA, 665 bp, Homo sapiens
ttttcccagctgcttcagaaagaaatcagcttcacctccacttcccgctctagcactgagctacctgtgcttcccattcagctactgagctacctgtgtttctccagctagacttggttttatctaaggatcaaatgacttccagaaatactsctgaagatgtagaaagatgcaagtgtaactagatattccaatggatggtaaaagatatttaagcaagttatttttatctggtatttactttctttcattggttcacttcattttagaaacactgtattgcattgcattgcactgtattgcattgtatcatatggtaactttatttccatgtgttgcctcctccagtaaactgtgagttccttaaaggcaaggaggggccttgagtttttacctaccacagtgcttggcacatagtagttactcaatatttgcagaataaataagtgagaatcatttaagggtctaagatatacctatcacttatatttcactttgtcttcttttgacatggatgatgttgctttttattatttttaatgatgaacatggtaatttaaacatagaggaaaaccataaaccttaaatgccttgtgtgggttttttgtgtatatttgttttggagttttgctttcttttttaagcttgtacaagtgaaatgaaca

SEQ ID NO: 893886 - DNA, 644 bp, Homo sapiens
ccagctgatattccaaaagtgttgtccctcctacttccttgtctccatttccctgctctgtcaagatggtttccctgctctaacaagaaggtaactcgatccaagtcctggatttgggctctgctttaggataatctgaccaagatatttcattgaatcttcactctagaatagaaacccatatgcatcatgacatgtacctcttgaacatttgcagctaaagaaaaaaaggcacaagatgaattgggcagctcgtrctccatctgctggagggttagaagttgccaattatacgactaaatgttgtgacttagccatactacttttcaaggaccaaaattgcagccaaactcagaaagatattatcatttgccttctaaagagacttggagttgtagaaaagctatgaacttatcatgtatcttgcttgcagaatccactttgggactgtttgggactgttactaattttgacaaaccatatttgaatctttaacatattattgaattaatgtaacttcaaaagaaaactagcagcctcttctatcaagtctgccttgtatcattatcacctttcttaaatttctctattattttaaaatctaagttttctaaaaaaatactttatcttataacctcagcttc

SEQ ID NO: 893887 - DNA, 646 bp, Homo sapiens
ttttttttttcaaggaaagaagacatgaacaaatatttagtgtggtttagttggaggtagataatattttaataaaaaaattaataatgcctcaaaaaaatatggtctggggccagcagcatcaactaggatcttattagaaatgcagaatctttggtcccacttcaagcttgtcaaatcagtrtctgcattttaacaagactcctagttgattcaaatgcataatacaagttttagaagcactgctctgtatcacttttttggtatccacatctctgatgagagtaatgtggtcctctctatttggggggttatccttggtttttgaagtactgagtgactagaaagataacagaatggttaaataatctgtcaccccgtctgtgcttaactgtcaatcagttccttgcacatatgaacttctccacctgtaccacccatcttctctagctagattctaactgtaaaacccttcagggaaggacattcattctttatttggtgggttttgtttgtttgttgtctgttggctaaagatagtactcatcagtgtcactgtgggtttctcttgggacagaaggtggcaaaattggatgttgtcatttctttttttctggttcctcttccgacacccacatccattatt

SEQ ID NO: 893888 - DNA, 648 bp, Homo sapiens
taaggcacgtggttatgagccattttcttcaggtactcaatttcatctttagctaactttcttgtaatgactcctgtctagcatgacttttgaaattgcaatcttccttctagaattatttctactttacttgtaaaaaattgccttttcctttatattttctagcttttatggaaaaataattatcaacatttattatttgcttttcactttcaaagtcagccatacratcactttgagaaatggtttagtcacatctcccaaagcttgtgttgtagtatcacccagctgttctactcttccatatacttgcagcagaaataaagtatattcatagcagcactattaaaaatagccccaaattggaaactatgtgactgccaatcagtattaaagtggtgagtgtattgtatcatgttcacacataaatttactgtgcagtaatgagaaataacatctaaaggaatatgcataaaagtgggtaattttcaatatatcatattgaagaaaaggaataagaagaaagtgtaatatatagttccattaatatacaataaaaatgcagcccgaactaacattttagaagacaggatcgtgatagccaggtcaaagtgaggaaagcagattgcagtggtaataacataagag

SEQ ID NO: 893889 - DNA, 697 bp, Homo sapiens
acccagcctggttacatgtaatttaagtagccttgcccttttattgttctgtaatattcatattatatatttgaagtaggacaagcagatttcctataaggaagtacaagtaagggactgggaaagtgagcatgaagcagataattcaaacaatagcaatatttaaagcaaataactatttagatataggttaagatctgctaacagctgcaatagataataaatacttacaaatttttgccaattttcagtagtatatggaagtgagaacaaatttggaggtattgtttttcatgtttgatgatggtgttatggtataattacatatccgtgaaagttatttaataaatatactttgaaacaaaaagtaatatttattataaaagactaaaatttttctataactagctatgggttaaaatagcaccaatattctcttatcattgtgttattctctaaaggaagctcttattaaacataatgcaggatataattctactgatgtccccttaatagtaarcaagactctggactaaaagaagtgcttgataaataatttcataggggcccttggatttttaaatcatgaagcagatactcaaatgtgtgtaaattgtagatgacaaaattacgtaatgccagtgaattgcagggaaggatagagctaattacatcatatgcatcttgtggatcacag

SEQ ID NO: 893890 - DNA, 631 bp, Homo sapiens
tgccttaattttcttacctgtaaaatgagtctaagaatagcatgtaccttataggctcttttgaggaataaatgagttgcagaattcctaccatatgtaaagtagcatatgtaaagcatatgtaaagttccacaaaattattgttgctaatattgttataaattacagttagttggatatcttgttactgacaatgttagatcaaaggccgtgtatatttacatacagtatttattagatactgtcaaactaccatctaaaagctttttacaaataattctctctctagatatagtataaaaagctaattataaattgaggccatgtgagggaaactgtcaggaggtccctttagcaatgaatgatagtttatagagagtcaaccactttgaaagttatttgggagaaatatacagaacaggtggactgcatgacctgtttgccctgtgaaaataggtatttgaaatgacctgattctcaacytgagaattttcaaagtgacaaattacactcatttggcttgtaatgatgttctgattataggctataagaccaatgatggatttccctgacttcttttcttaatgttctcaaatcctgttgtgacctttccatattcaagcatgtagca

SEQ ID NO: 893891 - DNA, 602 bp, Homo sapiens
gacctgggtagagatgaaaaacctcatgactgagcttggagaaaaagcagctgaagcttagcatccaggcccaagggagcaagacatggaggcatgctcctgtctagggtcttcctccaattctgatgacctgtctaaagagcgtcttcctgtgaaaatgactaaccttgagagtagtgatctcattcagactatagtcccaatcaactttgaatgattttacttcatgacctcagtaaagaacacaaaaataataaagtaagattaatatctacgtaagaaatacacattaccactgcatagattatgtccagtataataggataggcctaygtcagtttgtaaaaactttattaatggaagttttgttgtcctgttctataatcgtatggcattcttatacttatgaatgtgagctatttatgtcacatctcgtgtcttctgtttgtcaaaatggttcaccattagaggctgggcctttaactactactaattattaatacaatggcttacacactctcataagtggccactaaagagagaattcacatgcttttaattatattgctgtgcatgttaacgcaagataatttttgccactc

SEQ ID NO: 893892 - DNA, 614 bp, Homo sapiens
ctggatatctgtaagtttgtataaaatcttgaaataaggtaatgcacactgtctttgttctttattggaaaaatattttggctatttgaggtcttccttttccatataaatttaaaaccttcttggcaattttctcaaaaaaagtctgcagttcatttttggagaattacattgaatctataggtcaacttggagataattgatatattagtaatatagatttttccaattcaaggtcatggaatatttctcaatttatttagatctcttttaacttcaggaactttgtctactttttgattttttattttaccttaagttctgggatacatgtgyagaatgtgcaggtttgttacataggtatacatgtgccttggtggtttgctgcacgtatcaacccatcatctaggttttaagccctgcatgcattaggtatttatcctaatgctctccctccccttgccccccaccccccgacagggcccggtgtgtgctgtttccctccctgtgcccatgtgttctcatttttcaactcccacttatcagtgagcacgtgtggtgtttggttttgttcctgtgttagtttgctgaaaatgatggcttccagcttcatc

SEQ ID NO: 893893 - DNA, 665 bp, Homo sapiens
tatacttcaaattgtaaggtacatgtgcacaacgtgcatgtttgttacaacatgtgccatgttggtgtgctgcacctcatttaatgtgtgtttgaaaagactattcagtagttgttggttgtagtgtattattaatggttattaggtaaagtttgctaataggctaattcacatcttctaaattctgacctagtttagtctacctgttttactttctcagagtggaatggtatagcctctacctataattgttgattgattcctgttaattctgtcaggatttcctttcagttcttcaggtatttggaagcgctggtagtggcatacacgtacaggatttttatgtctttcttgtgaaatgattcttattatttgaaatgacctccgttatatctaatcatgttgtaataaacttgggtcctgatactaatagagacttcccagccatcatatgattagtgtttgcatgatgtgtttttacatgcttatgtttttaaatctgtttccattcttttctygtttgcattattcctgatgcactgtcaccattgttcttatttgttcttttgtgcattaagtgacttttttctctagctgctctcaagattttaattcttgatttttagaaatattgttatgatatacctcattataatttctttatg

SEQ ID NO: 893894 - DNA, 592 bp, Homo sapiens
taccttgtttattgtcatatcatgctaggttttttcaaattaaattgagttgcactgaatttataaacatatcaggagagaatgtgtatttagtaattgtggtaataaatgctaatcttccttccattcctgacagtcatcattgtgatttwtttttattttttttgtaaaatctaagcatggatcatcaaagtattctcatggttttcatcttatgatttttaggtgtgaaatgggactagtaaacatttcagaaatgagatattatttcccctgttttgctgacaagcttctcattttatttgatattagtaacttcaggctaagtccctggcaatcatatgttaggtaatattattagaaaaatcacacctcaaaacaaattaatcaaataatttgacttacttatccataatgtttaacaaagaatggccacggtgaacttgatgaagagggaatccttttcttcaactttaattagcactatccagtaaggatgtttggagagctaaaagctgcacacagatttttgatagaggttagaggtaaacaatgttcactagttgcagagtcatagagtgacactatggac

SEQ ID NO: 893895 - DNA, 592 bp, Homo sapiens
taccttgtttattgtcatatcatgctaggttttttcaaattaaattgagttgcactgaatttataaacatatcaggagagaatgtgtatttagtaattgtggtaataaatgctaatcttccttccattcctgacagtcatcattgtgatttttttttattttttttgtaaaatstaagcatggatcatcaaagtattctcatggttttcatcttatgatttttaggtgtgaaatgggactagtaaacatttcagaaatgagatattatttcccctgttttgctgacaagcttctcattttatttgatattagtaacttcaggctaagtccctggcaatcatatgttaggtaatattattagaaaaatcacacctcaaaacaaattaatcaaataatttgacttacttatccataatgtttaacaaagaatggccacggtgaacttgatgaagagggaatccttttcttcaactttaattagcactatccagtaaggatgtttggagagctaaaagctgcacacagatttttgatagaggttagaggtaaacaatgttcactagttgcagagtcatagagtgacactatggac

SEQ ID NO: 893896 - DNA, 642 bp, Homo sapiens
atatatataatatgtatatacatacatagaacataactttcaaaagacaaaacttataaacttattatttttcaattttaattttttttcagagaatagtacatttgtatatttgtggggtacatgacaacttttgatacaggcatacaatgtgtaataatcamattagggaaaatggtgtatccatcacctcaagcatttatctttcgtgttacaaataatccaattatacttttagttatttttaaatgtataattattattgactatagtcatcctgttgtgctattaaatacctgatcttattctatttttaacacaaacctatttgaagttcacttctatcctctgcaatgacaaaaagatacttattttttcataaaaataacttcaagcaacctacgattgtaataagtttataaagttaattttctatatatagaaaaaagtactagctattagtattttagcaattcttcaccataataaaatagggctcctatatggttaaaaaagagtaggatcttaatctgatgggatcaatggccttaaaagaaaaggaaaagagagttctctctgagtctctatcccacaagtgatcacacagtgagaaggaagctgtctgcaaagccaggaaaagag

SEQ ID NO: 893897 - DNA, 642 bp, Homo sapiens
atatatataatatgtatatacatacatagaacataactttcaaaagacaaaacttataaacttattatttttcaattttaattttttttcagagaatagtacatttgtatatttgtggggtacatgacaacttttgatacaggcatacaatgtgtaataatcaaatyagggaaaatggtgtatccatcacctcaagcatttatctttcgtgttacaaataatccaattatacttttagttatttttaaatgtataattattattgactatagtcatcctgttgtgctattaaatacctgatcttattctatttttaacacaaacctatttgaagttcacttctatcctctgcaatgacaaaaagatacttattttttcataaaaataacttcaagcaacctacgattgtaataagtttataaagttaattttctatatatagaaaaaagtactagctattagtattttagcaattcttcaccataataaaatagggctcctatatggttaaaaaagagtaggatcttaatctgatgggatcaatggccttaaaagaaaaggaaaagagagttctctctgagtctctatcccacaagtgatcacacagtgagaaggaagctgtctgcaaagccaggaaaagag

SEQ ID NO: 893898 - DNA, 643 bp, Homo sapiens
tttcagttgttttcactttttgacattattaataatgctgtcattagcatttatgtacaagtttttgtgtggacatatatcttcatttctctttggaatgtaattacaattctctgtttaacatttggaggaactgtcaaacattttatacaaaacatctgcaccattttacattcccactcacagggcatgagggtgccaatttcttcacatcctggccaacatgktttactatctgactttttcatggtagccactccaatgaatgctaagtggtatcatgattttgatttaaatgtccttgatggctagtgagtttcagcatcttctcatgatcttattggtctttcttttgcttgggtacttcttattgtagtcttgtttatttctctaactctttcatatcttaccccttcaacctcatatttaatttgatagttccagtgagcccctttaaactctttcaacacagctttttttttcctcaagttcaagcccacacagttaccatttttttcctacttttcttacttttttattggtgagggctgactttgtaggggtacaactcatgcaactgcacagattctgcactctttaacgaccccaagtttgagctaatatgctgcagtcatcgtcatct

SEQ ID NO: 893899 - DNA, 643 bp, Homo sapiens
tttcagttgttttcactttttgacattattaataatgctgtcattagcatttatgtacaagtttttgtgtggacatatatcttcatttctctttggaatgtaattacaattctctgtttaacatttggaggaactgtcaaacattttatacaaaacatctgcaccattttacattcccactcacagggcatgagggtgccaatttcttcacatcctggccaacatggkttactatctgactttttcatggtagccactccaatgaatgctaagtggtatcatgattttgatttaaatgtccttgatggctagtgagtttcagcatcttctcatgatcttattggtctttcttttgcttgggtacttcttattgtagtcttgtttatttctctaactctttcatatcttaccccttcaacctcatatttaatttgatagttccagtgagcccctttaaactctttcaacacagctttttttttcctcaagttcaagcccacacagttaccatttttttcctacttttcttacttttttattggtgagggctgactttgtaggggtacaactcatgcaactgcacagattctgcactctttaacgaccccaagtttgagctaatatgctgcagtcatcgtcatct

SEQ ID NO: 893900 - DNA, 611 bp, Homo sapiens
aaaagaaaaaaaaagaaaaaaggattatgaaaggcagtcaacaataaaaggcaacttgattctgacacaaattactgacttcatttgctgatattaggcagcttctaagaaagccactttatttccatcacactttctaaaaaaataaaaatggaaagcattgataatattgagaacacacaaaggaggaagtgatgccaataacttacttaacctttttcccttaataattttttctacttttttccattattacagtatatttctttttcagaccaacaacatcattagcaaattataaatactttacacttttacagtacatttgttatatttttaattaaaatttgtttatttaaaccaaaatttactttatgattttttttaatttttctaaatgtgaatctaaatgaagaaaaaaaaaacttaagcatgccaagatatgatttatatgagacctcctggcctcttccactgtcctacaaaagtgctaggctgctaggcaacatattatcttaatgaaactatatttaggacttttattctttgcatttcattaatattttaaaacatttgctrtatcataggattagtactaaatgtctgttgca

SEQ ID NO: 893901 - DNA, 585 bp, Homo sapiens
ttcattttatctattttagaatatatacattttcttcacctcataaatgataagcaaagctgctctaaaatagttgctctaaaatctactatctgataaatttaacatctaggtcattttagtatttgcatgtgtttgttgtattgttcctttacaattcacctcactgtactggttgtcaaaaaatactgaattktgtcctggatattgtaaatattatgttgtgcattctctgtatctttagataaatatgtggggattttatttttcaaggagttaatcacctctaagttttgtgttccatcctgtcagcagtgactcaaacctcaagtgatttctcaaagcttttgctgtgctggtttgtgcgtgcagagctagggcataggctaaaatttctgtgggtttttacacagaattttgacatacccttctctgactcctagctgagattaccctcacactctccaacattatgtatgcttttttccaagatacctctgtccttctggacaagttttagttaccacgatcactttgaacctcttcaactagggcccgtcccctgggaaaagccttgagagaaaa

SEQ ID NO: 893902 - DNA, 602 bp, Homo sapiens
cagagtattatgactggaaaagaggaagatatttcactctagtatgtgaatgctttgaagagtatgtaggacataatctacaatacaatcataatacagttttacaaggatgatgcctattcttattctcatcaatatgatttttaaaaacttatttttattataaattatttccctagtaatgccttttcaatttgatttagaaaatggattgtatatcgtgagttttatagtgagttacctggttctaatattcatgacctagtggaattcaggtcaagacttgtatatttcagttcccagagccygtgttatgcttattatcagcttcaacctgctcagacacaggcagaattcagtaatgcaggccagcactgagcaagaaataagacttttcttaggtcacagttaccaccaccaaataaactaggctcagagaaaatattcagagccaaaggaggaattacaaaagaaagtagaaagcttgcattaagcaagtaatcaagtcaagaaatctcatactgcaggagaatgcagtgatcagtactgactccaagttcacctctaaatctcagaataagaaaaaaaagaggcagggaggg

SEQ ID NO: 893903 - DNA, 602 bp, Homo sapiens
cagagtattatgactggaaaagaggaagatatttcactctagtatgtgaatgctttgaagagtatgtaggacataatctacaatacaatcataatacagttttacaaggatgatgcctattcttattctcatcaatatgatttttaaaaacttatttttattataaattatttccctagtaatgccttttcaatttgatttagaaaatggattgtatatcgtgagttttatagtgagttacctggttctaatattcatgacctagtggaattcaggtcaagacttgtatatttcagttcccagagcccgtgttatgcttattatcagcttcamcctgctcagacacaggcagaattcagtaatgcaggccagcactgagcaagaaataagacttttcttaggtcacagttaccaccaccaaataaactaggctcagagaaaatattcagagccaaaggaggaattacaaaagaaagtagaaagcttgcattaagcaagtaatcaagtcaagaaatctcatactgcaggagaatgcagtgatcagtactgactccaagttcacctctaaatctcagaataagaaaaaaaagaggcagggaggg

SEQ ID NO: 893904 - DNA, 563 bp, Homo sapiens
gtatttttgttatttatttatggtataattactaacaagactcttttagtttttatgtttcagaatattgatttaatagaggctgaatattctcaatgaaaaaaatgtgaaaaaagcatacacaatatgcctactgccaaacacgttagtattaacaatgatgggagcattgtaatatattttaacctcttaatgcctcagcagagacttgggaagaggtamcaacctaatttcttcataaatgtcctaattgaaagttgattatagaacctaactttggcgaggtccagatgcatattcctgatgtaaaattatacagtaaaagtattttaaaataaaaagtataatttaaaaagtgtctttaaaatcaattattatatttgaagacgttagtaagtatacttatttgggtattctttcttgagatgtcaaatgacattttccattattttaggcaaatatgttttaatgcagaagtttacttgttatgatcaagggcaaaagttctatgaatcaatttatttgtaatttcttaatcacaactgtgctagggagacaatttt

SEQ ID NO: 893905 - DNA, 586 bp, Homo sapiens
attttcctgagtgaaaaaaatgaagtcctggctagtgagtccttcaggtcaatgttatatttgcttggggatatgtttactgctagtaagtagcataaaagaaataattttattagagctttatccagcctctccttgtggcattacccttcagtgtctttctcagccctgaatgctaagccaccatttagaatccttattgttaaattaccataaaatagagtttcaaagtaaaaaattctaccagaattagttaagttaaataaaacattaaaatctwccagtttacactcagtttctctccccacttaattcatcaccactctcttcttggtaattagaatattaggtccatcttggtcctaatggttaggtcaatgtttggaaatgcagctttcaaagattattaagtcctgttaccagcttttgtgaataagttcatggaatgtccctgcattaattgtctttgtttctgattacagtcttttaagaaaaatttctctaaaataacttcctggtagctattttatatacttctatactctgacataattgtcttcttccttcagtaatcataattacacaa

SEQ ID NO: 893906 - DNA, 522 bp, Homo sapiens
caaggggaaaatagaggaaagaggtcagagaagtggggatgccacaataatcaggttccagaggcgtttggtggccaagaaacatactgtttcctttgcctctatttttttattacaatgcctagaataaacagtgatacgaagctgaattccacattgtactctcagaccatatttggagttcagcagttcacatctgggagccacgtttaagacactgatgagttaagctagaacgtgttcactgaagaacaaccagaaagattaaagaacttgaaaccacatttcaaataaagaattcttgaaggaattgaaaattcagcttactaagggggttatgacatctgtttaaaaatatctgaaaygtaatcaggtgaaataaggactttgttttgtggccctaataggttgaccagggtccagtgaataaggactatagtccttgggaaacagacttggttcaaaagaagaatcaacttactcactttctaagagtcagagctgaatactacttactacatt

SEQ ID NO: 893907 - DNA, 451 bp, Homo sapiens
ttattcactaccatgagaacagtatgggagaactgtcaccatgattcagttgtctcccaccgggtccctcccacaacgtatgggaattatggaagctacaattcaagatgagatttggatggggacacagccaaaccatatcagaaagacaasacttttgtcaacccttttacctctaagagctaggattttctaagagtttcctcctctccccatttagctcaagtgataaaatgaacaaatgtaaaggaccagaaaaggatctgagttgagcaaaagtcttcctgccagtgtaattacttaagtgcccctggtgacatgggcacgtgtatgttttgtcagctctgttacacacctgtatgcatataaatattttaaatatttccaatgttgtttgcttttgttgtttaagaaattgcattaagttaaaaccattagccatgaaggccca

SEQ ID NO: 893908 - DNA, 581 bp, Homo sapiens
aagatgaattagtaactgtgtgggaaaggatgaccagcacaggaggcagggaggacagtatgcaggctattgcaatggtctgggtaagaagttatcagatcctgacccagggcttaggcagtgggaataaaaataagaaactgatgaggaaggcatttaggagaattgggcaaccagctgggtggaggaggggaggaacaggaatctgtcaaaaacaactgtgaagttttggatttgtgtgacaaaaccaaaaatagtactaggaaattcaaattggcttgtgggaagacaggaaaagtgctttggatagagtcataattcaagatgaaaaargcctaataatgatcagaatcagtgattttaaaatttgtatgtttaattttaatgtaggcatctttctgcacatgaaattttaaatgggagtccaatacgtgtagcaaaataaaaggaaaatgattcttgttggggtaagattgggtgggagggtcccacatacttcctactcaggcctcctctcattacttccccaaccccaacacacacctaaggggggctcttagacggtgcatggaaagtggttt

SEQ ID NO: 893909 - DNA, 614 bp, Homo sapiens
atgtggaaaagtttgaaacttcctagagactcagagggcttagaagacaggaaggtgtgggaaatttggaacttcctagagacttgttgaatggctttgaccaaaatgctgtcagtgatttggacaaaaaggtcgatgctgaggttgtctcagatagagatgaggatcctgttgggaactggaggccactcttttatttatttttctgagaaggagtctagctctgtcacccaggctggactgcagtggcgcaatctyggctcactgcaagctccacctcctgggttcacgccattctcctgcctcagcctcccaagtagctgggactacaggcacctgccaccgtgcctagctaattttttgtatttttagtagagacagggtttcaccttgttagccaagatggtctcaatctgacctcatgatctgcccgccttggcctcccaaagtgctgggattacaggcatgagccactgcacctggccaggtcactcttgctatgcaaagagactggtggcattttgcccttgccctacaggtgtgtggaattttgaacttaggagagatgatttagggtatctaggggaacaaatttctaagtggctaagcattca

SEQ ID NO: 893910 - DNA, 614 bp, Homo sapiens
atgtggaaaagtttgaaacttcctagagactcagagggcttagaagacaggaaggtgtgggaaatttggaacttcctagagacttgttgaatggctttgaccaaaatgctgtcagtgatttggacaaaaaggtcgatgctgaggttgtctcagatagagatgaggatcctgttgggaactggaggccactcttttatttatttttctgagaaggagtctagctctgtcacccaggctggactgcagtggcgcaatcttggctcactgcaagctccacctcctgggttcacgccattctcctgcctcagcctcccaagtagctgggactacaggcacctgccaccgtgcctagctaattttttgtatttttagtagagacagggtttcaccttgttagccaagatggtctcaatctgacctcatgatctgcccrccttggcctcccaaagtgctgggattacaggcatgagccactgcacctggccaggtcactcttgctatgcaaagagactggtggcattttgcccttgccctacaggtgtgtggaattttgaacttaggagagatgatttagggtatctaggggaacaaatttctaagtggctaagcattca

SEQ ID NO: 893911 - DNA, 508 bp, Homo sapiens
ttcccataccatatgtataatagcaactctttttaaatagctcaagctgctttaaagcactatacaactaattctcccaatgctactttgaaaaacccaagttaaactgcttacttaatcaaggcagtgggtacactagaactctcattcatatactaaatgttcttctgtatctccagttccasatactagtaaggtccactttcaattacacttccactattagaacagatgaaaagttaaacattcaatcagtcaggagaatgtgaaatattaccatggtttacccaactattataatctctcaggcactgagaactcagcataaagtggttattccatgatgtcagcatggaaacgtatccattatttagctatccattaattcagccaatcttcctttggatctacttatagctcaggctgctataggttgttctaaacctaacttggattgtcctagtgttagtttaggttatcttcattcttaaatctactgtttgattgt

SEQ ID NO: 893912 - DNA, 587 bp, Homo sapiens
tgctgtattcccacttattaaaatgtaaatgtttctgtatatgattattttagcattctaacacatacttactgaaagccttttttttaaaataagccgctttaaaatatgttgtatattctgtcctaatgtacattataattcactttaacaatgaatgtaactctaaattaagatactgtctctttttctactttaatgaagtttgagagaaaagagaattttgctttaacttaaaaaaaaaaaaaacaggcagggcacctgtaatcccagcactttggaaggctgaggtgggcagatcacgaggtcaggagatcaagaccatcctgactaacacgatgaaaaccccgtctgtactaaaatacagaaaaaaatagctgggcgtggwgctactcgggaggctgaggcaggagaatggcatgaacccgggaggtggagcttgcagtgagccgagatcatgctactgcactccagcctggacgacagagtgagactccttccccccccgccaaaaaaaaaaaacctagattttattgatggattaagtataagtacctaatacataaggatctcttatttttctctgt

SEQ ID NO: 893913 - DNA, 614 bp, Homo sapiens
cttttgtatattaaccttgcatcctgaaaccttgttataattgtttattagttccaggagctttttttcttgatttttcagattttctttctttttttattttgagatggagtctcgctctgtcgtccaggctggagtgcagtggtgtgatctcggctcactgcaacctccgcctcctgggttcaagcaattctcctgcctcagcctcttgagtagctgggattacaggcacacgccaccacacctggctaatttttgtatttttagtagagatggggtttcaccatgttggtaaggctggccttgaactcctgaccttgtgatccacccgcctcggcctcccaaagtgctgggattacaggcgtgagctaccacacctggcctgattctttcagattttctwttagacaatcatgtcttttgtgaacaagatagttttatttcttccttctcagtcagtatacattttctttacttatctcattgcattagctaggatttctagcataatgttgaaaagctgtggtgagagagtatgtgtttgccttgttcctgatcttaatgagaaagcttctaatttctcaccattaaatatgacgttatctgtatatttt

SEQ ID NO: 893914 - DNA, 639 bp, Homo sapiens
ttttcaatttacagtagactaaggcacagaaaggcaaagctccttgcccccttagagtctccatatcttcacctctaaaataaaaggatttgattggtaattttgtaaatgttaactcacaagcaagattataaattctgcaagggcaaaggtcatattaaacaaatgaggtttctttcttttttttttttttwaaatatttttgtagagacgggttcttgctctgttgcccaggctggtctcgaactcctggattcaagtgatcctcctgccatggcttcccaaagtgctgagccactgtgcctgaccaacgactgggatttctatagcatttaacaaatattagacagcagtgagaaggggccagaaatggacccttgagaggtaaaggagcaataaactaactgcttaccctcccctttctagaaacctctttctcctcctcatgcaaatgaagtgtttacatacctgctcttaagaaaaataccagtcgcttaggtggaaggcttcaaagtgagttgttattactgatgctttttttttttttccttttgagacagagtcttgctctgtctcccaggctggagtacagtggtgtgatcttggctcgctgcaacctccatctcctgggttcaagca

SEQ ID NO: 893915 - DNA, 644 bp, Homo sapiens
ccatgtcaaaaaaaaaaaaaatacaatttgaaatgtagcaacaacaatcttttttttttcctcccttggcaatgactggtggttgccctcagattctcttgtccctagttagatgctgaggcggcgaatcaagcttcagttaaacttccctggaattacagattttacagaatcatgcagacatgaaaggtgaccttgctcactttcaggcttgattctgttcagcaatgtccaagttagttggcaaggaaagctactggagtctgaacaggctacaattctgtttatttctttcataaaaaatcacgggcaaatggatgaaaatccaagttttggacaatgcagaggatcagctttcagcactcacctgagtaggatgtcaaggtagccaggacttctgtagaaaagggtcagctctagcatccatgggcatacagggaggaatgcatgcatgcatgtgtatgtgtgcagrgatatgcacagatgggctcatgggtggtggagcagtccccttagttacttaaagtactgcggaaggctcctcttgctgtctctttgctacatacctggccccttttaactagatattttcttgagaaagtaaacattaccattaggccttctcccacttcatgacgtgaaat

SEQ ID NO: 893916 - DNA, 544 bp, Homo sapiens
cccccatgccctgactgatctcccttccctcaactgtcaccacacttatgatctgaggcacacaaaacttgtggtacttaaatttcacctgcctagtattttgcagtagtcatttaataggctggtgttatggccctggtgaagtcattaccctttgaagacaggcagtgtactgtgtacttgctaatttctgcaagcatgtagcatgtaagacatatgcttcttactacgtgctgactgatggcaagaacatggcggtattctctggaatgttytcagtaccaagtaagagttaaagaaaagacaaagatccctccaaagccagtctctatgagaattccagataattccttgtacctttcagctccgtaagatgagggggcccttactctcccctatgcagcaaatactagtgctttcaactctacaggccagcgacccattcctcaaagagaccactaactgcagaacaactcccaggtgttatgtcaccaacgggcaaagctttctgccagctacatgtaatccaaaacctcctaatgat

SEQ ID NO: 893917 - DNA, 614 bp, Homo sapiens
taactctaatctgtagacaaacctatgccaggtcagttccataagaattatctgcagatcttcaaaaggcaataaatgcctgcaggatatttaagactgagctattcagagtgaggaagggggtagtgatcagactttttaaatatgattacagattactgtgatatgttataaggtttagaatccactgatctagtccaatttctcccttttcctatgaggagaatgaagccaaagaagtgttatgacctgctggaatactggctgcctaagtaactcatgactatcccttaggctttttcagcgtcgttatataagacaggagacccgaaagttgtgtgcagaatggatyggagagttaagtcctggagagagggagaccacttaaaaacaacaacagcaacaaccacacaaatgtgatagttacctatgaaatattgcattaaagtagtcagtaccgcgaccagagaaaggggtaaaaatggaatcactttaaacagaccaaggatataattcacaataagagatgacaaagaggttaacaattcagaggctctcaggtctgattcggggaggaatgtttatgatctgggcaattaatttggaatcaagag

SEQ ID NO: 893918 - DNA, 639 bp, Homo sapiens; identical to SEQ ID NO: 893794

SEQ ID NO: 893919 - DNA, 574 bp, Homo sapiens
actttgagctcaggactatctcactcagtttggataactaagttgagagtcagaagttaaggggtatcaagcttttcattatttgaatgttttcctggtttccctcattgttcttagaaagcaaattcaattaaatatttatgagctctgactactaggttgctcgtatgtatatatgtataatatgtatgtgtgtgtgtgtgtgtgtgtgtgtgtrtatatatatatatatatcatgatattgtgttgcaagaaaaaaatctaataatatttagatataatctctgccctccagagttttcagtttaaaatagaaaccagatgaatagaatagaatgagaaaccacgtgactatagagtaaggcagaatgagacaagtagatataagaaatggcagggcagggtcaaatcacatcaggatgggaacaaaaaacaggagatttcagaaaaggctaatgaatgaatgaatggaagtcagtgggcaatttcaatttcaatatgctgcgtatgacgtgagtaaggaaccaagtgcacactgctattgagatgggccttaacaactggataccatttt

SEQ ID NO: 893920 - DNA, 591 bp, Homo sapiens
ctggtggaggtaaaggaagggcagggaggatataaggcagccagctgagccagtgcaagtgtccaagtgagaggtgagggtggcctggactaggcggcagtagtaaagatgaagagaagtggatggattcaacagatacttgagaggcaaaattggcagacaataaaggtgagagaggtgccaagagccttctagtgtgtacaaccaggtttcaagtggtgcagtccactgagcctgagagccccggaagaagatcagggctagaaaactgacctgcaatcttgctaggtccacgtaatactattcagcataaaaacagggttcttttggaggaaccagcatacactctaggactgggagcatatcttccactcacaatctttttcacttgggtttggtaaaccttaattttctatgtgcaaggtgatggtaaaagacttatcctyggaggacaggcgcagtggctcacgcctgtaatcccagcactttgggaggccaaggcagccggatcacttgcagtcaggagttcgagaccagcctggccaacatggcgaaaccccagctctacttaaaaaaaaaaaaaagtaaaaa

SEQ ID NO: 893921 - DNA, 647 bp, Homo sapiens
aaaaaatgatgttggtagtttgataggtatagcatttaatctgtagattgctttgggcagtgtggccattttaacaatattgattcttccaatccatgagcatggaatgttttccatttgtttgtgtcatctctgatttctttcagcagtgttttgtagtwctccttgtagagatctttcaacttcttgtttagatgtatccctaggttttttcttttgttttttgttttttgttttttttttacagctactttaaatgggatttcaaccttgatttgagtctcagcttgaacattactggtgaatggaaatgttacttatttttgtacattaattttatattctgaaactttattgaagttgtttatctgttccagcagtattttggtggagtctttagggttttctaggtgtagaatttttattattcatgaagagagatagtttgacttcttttcctatttggatgccttttatttctttctcttgcctgattgttctgggtagcacttccagtattatgttaaataggagggatgagagtgggcatctttgtcttgttccagttctcaatatgaatgcatccagtttttgcccattcagtatgctgttggctgtgggtttgtcatagatggctcttattatta

SEQ ID NO: 893922 - DNA, 618 bp, Homo sapiens
aagagcagcctctagcatgtagagcaggcaagagtgctgagtgagtaagacttacaagcatcagagtgcgctagagaaaacctacacatggctatatttttcttttcttcttttgagacagaatctgactctattgcccaggctggagcacaatggtgcgatcttggctcactgcaacctccacctcctgggttcaagcgattcttctgcctcagcctcccaagtagctgggactacaggtgtgcgccaccacgcccagctaatttttgtatttttagtaaagatggggtttcaccatgttggtcaggctggtcttraactcctggcctcaggtgatccatccaccttggtctcccaaagtgctgggattacaggcacgagctaccgtgcctggtcagggctattttttctgaatatacttttctccttgcttcccattacttaagctgccttttctccccagtggggcaacactgaggctgtcagacacgctgagatgaccaagagtttcacagtaggcacttattcctgatatgaattctgtccctgaaagcaagccggagtcggggtgcagagaaaacagaaacagaagaagaaaaaaggacaagaagtaacagg

SEQ ID NO: 893923 - DNA, 671 bp, Homo sapiens
aagaaaaaccaaggtactgtgaaatctctctactggagcattttaaagtaaagtataggcactaacagaattaattacagatttttgtttattttcccctatgttctactaggactacaaaaaccataaaactcaccagaatcttacattattttattcaacaaatgtagaagtattgcttgatcaagtaatgtggtgcttgatttttaayaatttactgtagactttgttatcaatatttaactagtttacttcaatattaaacagatcaataaccatttgttatttaaacaaatgtttaaccacaaacatacctatatgtatatggatgtgtgtgtttgtgtatgtatgtataattgagctgcttatatatcatgtagttttttaaacaaaaaaatagataatagcatcttaaaattaaatcttgagacattgggttataagtttcaattttgcttttctttctgcgtattcatggtctgtagaggagactagacttccctaatgttttagtttccaaatattttgccaagtatgaatgaactaggtcaacgaaggaaaacattctttctgaagcctacattaatattctactgtttgaaaaactgggctaacccttcaatcattttgttaatatttgtagcttctcacagagttgtaaaacctcataa

SEQ ID NO: 893924 - DNA, 520 bp, Homo sapiens
gatgtcttgaattggaactggtgaggaggcattcagggtgaaatatgtagctgtgagatagaaatcctggaccagaactctgtggagagttggagtggaagctgagattagggtagtatctatgttaagttaataataagattggcagggagataatattttaagaagcaacatatataaaaagaaggactacgtcgagaagtcatagcattattaaccatggggaagagaagctattaaagaactcagaagcagaattgatagggtccaaccagagtcagtgatagcctgtcagcatgcaagatgaagtccaagaactccactaacaacagggtggaactctcaactatgtgagtagagaggaaagatttttctatttttytgatcatgaaattgcttatgaggtacaggccccaggtgttatgaagaatatgacttggttcgtttggggcactgaaggtactgggggaggcgctacttttagagcgctcaaatatgccacgatttcatttcattttgc

SEQ ID NO: 893925 - DNA, 527 bp, Homo sapiens
gaggccctctaagatgaggttcttattcaccttgtcttttgttatctctttttaatttttttaattatagttttttaagaaaattatttggcaaacataactttagaggtagaaattcttgaacattgccttgtacttaatatttttaaatatctgtcttctctgtattctcatttgatcacaatttttagattattatcacaaaatatatgtgtgtggctcaggaacaacttatctagacagagctcatctctctagaatgttctcatatccaaaacattatagtatctaaaaagcgttacataaggaaggcmattttctagaaagtcaaaatagacatttcatttatatacatgccagtgctcactttttctccctcttacacacaattcttacaaatgtattttttttttctttcccagccagcctagaaagtagtaatacttcttggctgggtgcaggggctcatgcctgtaatcccagcactttgggaggccgaggcaggcagatcagcgaggtcaagagat

SEQ ID NO: 893926 - DNA, 636 bp, Homo sapiens
taataaaaataacaatatatgtaaaatattaggtataaatgaaaatagaattctaaaacaaagttcaagtaactcaaaagaaatcaagaaaagatgctgagagtaacaaaaaacagaatgaacaaatagaaaacaaataataaaatagaagacttaagcactaacattaaacaaaaacccatattccagacatccatgaagaagtaattagacataggaatgatatgcaaaaaaagacttccaaaacttctaaagttgaaaattagaatgtctgagaagaaaaaatacatggaatgtatctagtggcagaatagacatagcagttgaaaagattagtgaacttgaagacataaagatagcaactatctaaaaggaaaaacacagagaaaaataattttaaaatgataataagaacatcagtaacctctgggacaattccaaggaccctaatacatgtgtaacgggagtctttggggaaaggagcacaaaaagagtcsaaggtataacaactgaaacttttccaaacttgatgaaaaactataaacccacagatccaagaagctcaacaaatccaaagcacaagaacatgaggaaaattaacccaaggcacatcacaatcaaatttctcaaaaacca

SEQ ID NO: 893927 - DNA, 639 bp, Homo sapiens
ttagtccttgcttagaagaatatttgttggatctgtatttctcagtaacttcattctcattctgtagttgttctgtttgctccttctattcctaatttaaatatattcccccttttgagagaaggaaatgtatacrttgtaaaattccaaaacaaatctctaagagacatctgggagccaagggaacaagcagaaaggaaagaagaccactgagtgagcctacctggaattctaaggtttgggatttgtatgcactcatacattgagtagatacccctgccatttgtataatttcattactctgaggaagaggacggtttaaggtggtagggttgaggacagaaagagtagccctatggtagtagccctatggtagtatctatgaggaacatatctgttctctatttataacaatttctgtttctcctaggtattagtcagaaatgcaaaaagccccctttggatcctcagagagcaaccctattcatcttgtgggggtcctgtctttttgttcctgctgtcatttaagttttctacaatcttgtctgaaatggccaggcattttgtaatagaagcgagcacctctttgatcattagaaagaggcacctatcttttcttaaaaggcctcgtttgactag

SEQ ID NO: 893928 - DNA, 658 bp, Homo sapiens
tctgttgcccaggctggaatgcagtggtgcaatcacagctcactggaacctcaaactcctggggtaaagcgatcctccagctttaacctcccaagtagctgggagtacgggcacgtgccatgatgcctggctaattttctttacttttttttgtggagacagggtctcgctatgctgcttaggctggccttgaactcctgggtgcaagcgatcctcccartttgacctcccaaagtgctcagattacagacatgagccaccatgcgtggtcccaatttacctaattctagaacctcacagaggatgtggaaacagaagaaaacacacaacaccaaattacgtgttaggaagatatcactccatcgatagccaattaaataagcaagtatttctcaacatctactgaggaggcattatgtttgggtgattaacagagattcattttggaaagtaacttggcagtaaatattactgtacttcatattcaaaaataatgccactttccttcttcccccattttctatcaaaacttgttttctgggctttcagtgggaataatctgtttccttctccaattccagttaaatgtagcataaataaaggttacctatacaagaaactgtagcactgtttgaattgcagaagggaaagttgggta

SEQ ID NO: 893929 - DNA, 658 bp, Homo sapiens
tctgttgcccaggctggaatgcagtggtgcaatcacagctcactggaacctcaaactcctggggtaaagcgatcctccagctttaacctcccaagtagctgggagtacgggcacgtgccatgatgcctggctaattttctttacttttttttgtggagacagggtctcgctatgctgcttaggctggccttgaactcctgggtgcaagcgatcctcccagtttgacctcccaaagtgctcagattacagacatgagccaccatgcgtggtcccaatttacctaattctagaacctcacagaggatgtggaaacagaagaaaacacacaacaccaaatkacgtgttaggaagatatcactccatcgatagccaattaaataagcaagtatttctcaacatctactgaggaggcattatgtttgggtgattaacagagattcattttggaaagtaacttggcagtaaatattactgtacttcatattcaaaaataatgccactttccttcttcccccattttctatcaaaacttgttttctgggctttcagtgggaataatctgtttccttctccaattccagttaaatgtagcataaataaaggttacctatacaagaaactgtagcactgtttgaattgcagaagggaaagttgggta

SEQ ID NO: 893930 - DNA, 628 bp, Homo sapiens
ataaaagttaaagtgtgagaatatatcagaacttttttgttttttgttttttgaaatggagtctcgcagtgtttccttggttggagtgcagtggtgcgatcttggttcactgcaacctctgcctcccaggttcaagtgattctcctgcctcagcctccagagtagctggkattacaggcgcccaccaccacgcccaactaattttttgtacttttagtagaggcggggtttcactatgttggtcggcctggttttgaactctgaccttgtgatctgcctgcctcggcctcccaaagtgctggcattacaggtgtgagctgccgtgcccagccagaactttctaaatgagtacgtctgtctttcgtttgttcaatcattgatccattcaacaaataattatagagcacatgctgtgtgctaagcacttagttagataagcaaacacaggcctagtccctgccctcgtgaagctgagaattatcagataatagtatttatagttaagattattctgattgtaaaattactaaatattagtatggaatattttggaaagatagaaagcaagtcatcatctccaatttcaccacttagagaaaatctctttttattaatgatctactttata

SEQ ID NO: 893931 - DNA, 619 bp, Homo sapiens
taggtcttacatttcagtctttaatccatcttgagtcaatttttgtataaggtgtaaggaaggggtccagtttcagttttctgcatatggctagccagttttcccaacactatttattaaatagggaatcctttccccattgcttgtttttgtcaggtttgtcaaagatcagatggtggtagacgtgtggtgttatttctcaggcctctgttgtgttccattggtctgtgtatctgttttggtaccactaccatgtgtttttcaaactgttgggataccacctgggtttgggccctagaggggacctctgggagggaagggaaagtgaaaggagtgtggcttctgcttcattcagtgtcacccagtgcacaactgctttcgaaaacwtctattttatatgttgggattacagttgagaaataggttccgctgctaaagtagaaaaaaaaagtagtttgaagaccactatgttgaagacttctgattagattattaggtgatagcagaaacctcttataggagaggaaactaacgaacaagagacttctgagaagacgctgctgctacctaccagtggatccctgcttttctgcctcctgtctgtctatagtgcacattg

SEQ ID NO: 893932 - DNA, 639 bp, Homo sapiens
tatatgcaggtgagaaaactctggcattgttttgagttagagtgaaagtataaagcatttacccaagcattttctctagtagaaggagatgtgtactcgctctagaagctaaaagaagatttggggaatggaattgtatcattcctgctgagtgacactaatgcactggaaaaagtaaatgaaaggcttgtgtgattaatcaactaacgacaaaggctgaaagccagagggccccttaggcaacatatgagagacttttacctaccaaagtccagaaaaagttaagaatcaacctacagaattaraagagctctaagaggattgattttttagtcccaacaagtctactatgccagggtcacagtcttggataaaaaggtgtaggactcccatagttgtcaggatgaggctatggaagttgatgtacttgaaaaccacatgaatatgcacctgcaggagtgagccattactgtcttctagaggttagtactttccaggcttccccttgcttgaagccagtgctgatgcctttactttgcaaatcaacatgtgcccctctcttggtttgttcttcatttcttccccacccaccaataatacaaccaataatgaggatcaaatcacagcataaccaagtac

SEQ ID NO: 893933 - DNA, 654 bp, Homo sapiens
atgtttaaaacaatgatttaatggcactaaaatcattaaatttaaatgaaagtttcagttatgtgaaagtgtaggtgaataaagtacttttaaattgtatatggccaaaattaagaccacttcccttgtagttaacacgtaatttttagtggaacttgggcagaggagtctgcattttacaacctcatagaagtctgatcttttcttaacctttctataactggaaaaataccatgtatgatagcgtcctcctttgaaagatgccaggcagaggcagttatagtagacctgtagattataaatatagtttgtaaaattttactgtaagtagcatgggggctgtgtagaaggatacttgaagaaagattctgagaaagaagaatggggaaaagggacacccacatgcagtggtgatgagggtgagatatactttttttgagcttacaagtcaggtgttacataatattgggaagaaatggggcaaagtgatgatttctgcaagtatttatgtwatatgttcatttccacctacggcattgatgaagaaatgtcataaacatcagtaagacaatctcagtgtcaattgcaaatttcaggatattcaagttgttgagatattgggagttgttatctacgtataacaaagcattacac

SEQ ID NO: 893934 - DNA, 625 bp, Homo sapiens
ctgagaagacactactgaaatgctgtattccaagctatgacttgtcattttggtattatagctgtaacttgttgttgaaagtaaattatctaattgcctttacatagaaaataagtcactaaagtagaattccaatagtaggtcctaatgaattgagggggatgactaatgagcttagttccaattttataatctctaatcatttttcactagttgatttctggaatggtttcctgcttgaacagtagagacaatactygcatttattcattgttaaccagtcaaggctttaaggagaatacatactgcacagtggtttgcagaggcagctggaccactgttagtttgtgcatgcagaaatatttgaagcattatcactaccatgtggatgtggatattccaggagtaaaaacctcccttttctgtttgggtttgccttgtctctgaattcagtgattctttatcaggtatttaggttgataagatccatgtttcaggattactcagtcaacaaatatgaaggttaaactagggataaaatagttagtggactggaaagattagtattggcaggaactgattgggtacctggataaaggcaatacagagaaaatggaaaaggtgt

SEQ ID NO: 893935 - DNA, 632 bp, Homo sapiens
tcccattactgggtgtatacccaaaggattgtaaaccatgctgctgtaaagacacatgcacacgtatgtttattgcagcactgttcacaatagcaaagacttggaaccaacccaaatgtccaacaatgatagactggattaagaaaatgtggcacatatacaccatggaatactatgcagccataaaaaatgatgagttgagttcatgtcctttgtagggccatggatgaagctggaaaccatcacyctcaataaactattgcaaggacaaaaaaccaaacaccgcatgttctcactcataggtgggaattgaacaatgagaacacatggacacaggaaggggaacatcacacactggggactgttgtgtggtgggggtagcggggagggatagcatttggagatatacctaatgctaagtgacgagttactgggtgcagcacaccaacatggcacgtgtatacatatgtaacaaacctgcacgttttgcacatgtaccctaaaacttaaagtataataataataaaaataaataaaatttaaaaaattgtaatcggtatctattaaaataaatcatatgcatactctatgatcaagtaattccagttttatataaatacaagttttatata

SEQ ID NO: 893936 - DNA, 591 bp, Homo sapiens
catgctgctgtaaagacacatgcacacgtatgtttattgcagcactgttcacaatagcaaagacttggaaccaacccaaatgtccaacaatgatagactggattaagaaaatgtggcacatatacaccatggaatactatgcagccataaaaaatgatgagttgagttcatgtcctttgtagggccatggatgaagctggaaaccatcactctcaataaactattgcaaggacaaaaaaccaaacaccrcatgttctcactcataggtgggaattgaacaatgagaacacatggacacaggaaggggaacatcacacactggggactgttgtgtggtgggggtagcggggagggatagcatttggagatatacctaatgctaagtgacgagttactgggtgcagcacaccaacatggcacgtgtatacatatgtaacaaacctgcacgttttgcacatgtaccctaaaacttaaagtataataataataaaaataaataaaatttaaaaaattgtaatcggtatctattaaaataaatcatatgcatactctatgatcaagtaattccagttttatataaatacaagtttt

SEQ ID NO: 893937 - DNA, 665 bp, Homo sapiens
tgggctggaatttctttaacatatatgaaaagtcaaactgttaaaacaggtgtatagcatgaaaggtgattctttgaagagggaaatctacatgttctcataaatttcagtgtatggccttataataagagttcatttaatccttacccaaaactatcatacattttgaggcacttctataagagtgcccccaaacacaaaaggtaatgggaaaaacatggactgtcaaacaaccattcaaatcttggtcttctttattcataaaaattaatkgtgaatgcatttattcagttgatccttaaaccaatcctatgagaagcaaagtctgtccatcaatctaaatgaccaaagagaaaaattgacaaactttaaggatatatgtgtataaatatggagatgtgcacttttgaaataacccttcaggaaggttataagaagttcaaggatttctgaagaaaataccttttcctttatagagcaggaccaagacccaccagtcttatattttttcattatctgatattcttttgtcattggcacagttcattgcctactactctcatccagcatgaaaccaaatcaatgctcacaattctcaggtcaatttccagtatgttgaagtcatccttgtatagtgattttctattgtatcctaaaaaattacc

SEQ ID NO: 893938 - DNA, 665 bp, Homo sapiens
tgggctggaatttctttaacatatatgaaaagtcaaactgttaaaacaggtgtatagcatgaaaggtgattctttgaagagggaaatctacatgttctcataaatttcagtgtatggccttataataagagttcatttaatccttacccaaaactatcatacattttgaggcacttctataagagtgcccccaaacacaaaaggtaatgggaaaaacatggactgtcaaacaaccattcaaatcttggtcttctttattcataaaaattaatggtgaatgcatttattcagttgatccttaaaccaatcctatgagaagcaaagtctgtccatcaatctaaatgaccaaagagaaaaattgacaaactttaaggatatatgtgtataaatatggagatgtgcacttttgaaataacccttcaggaaggttataagaagttcaaggatttctgaagaaaataccttttcctttatagagcaggaccaagacccaccagtcttrtattttttcattatctgatattcttttgtcattggcacagttcattgcctactactctcatccagcatgaaaccaaatcaatgctcacaattctcaggtcaatttccagtatgttgaagtcatccttgtatagtgattttctattgtatcctaaaaaattacc

SEQ ID NO: 893939 - DNA, 601 bp, Homo sapiens
ttagcacataatctctttgcaatttgaaccttttctcatatgccactctgtcaatacaaatgcacttttgcttcaacctttcaaaaaaagtattccatttccttttgttagtccatgactccttgctttcaagcttgttggatccattgttgaaatgtcctttaccctttctttttcttgctaattttatgtttcctttagctcatagcttgtgtcactgactctccaaaatcatacccctgacaccatgggagtgttatagatatctcatttatgtattccttcggcgtgtcatgaaaacctctaacacattacaatatcataccgtctkgcaactagttaattgtctgccacgtattctgtctcaaaagaagtcaattatttccagatgttttacagatggctacacattgttctctggataattttttttttaaattcttagcatggcataccaatttttttatactagttcccctaactttatggcattatttccttatgaacttctcaccttacaccttgttttccaagtccagtgaatcgttttcagttccccagtgtatatcttaatacactctatgaactctgcctgagacac

SEQ ID NO: 893940 - DNA, 672 bp, Homo sapiens
aaaggaagtgaagcgtggatagagacaaaatctgaaggccagggtcctgagctagagctcactaggtgctaaagtcctacttaaagttgaaacgtttagaatagaccttcagtaccaaaacagtgttgagggcaaagacctggagacaaagaaaagagacagtgaaagacaaacagtagtccccaattatctgcaggggatatgatccaagaccttgagtaggtgcctgaaacatagtacatataaccctgaaccctatatatactgttgtttctatccattcatacctatgataaagtttaatttataaattaagcacagtaataacatattaacaataactaataaaatggagcaacgataacaacatactttaataaaaactctttcaaaatatcttaatattctcagaccctgattgcccataggaactgaaactgcagaaagtgaaactatggatgaaggcggacacctgtatgactttcagccagcaaccrtgtctcaggccatcgcaggcatgcaggctctcatctcgcctcactggaatgtgggtgtgagtgactttaccgcctcatttctcagcacaggttcaggacccagatgtgaaaccaacccgcagaagccacatgtcagtaactgtgggtccctttaggggaaggcagaagctaggag

SEQ ID NO: 893941 - DNA, 635 bp, Homo sapiens
gtagacagctgcactgtctgtaaactatggtcattaattacacaggagacaggacacttccagggagaggcgggtggaaaaagaagggtgagactttgaaaagtcatggcgattattaataacagaaagggcaacgaaaagggtaagatgcctgtcctccatatttcaaatacattacattgcccatagcaatgaagtagcagaaaggtctggataggatggagaatgttttcgacctgcatctgaggccagagttaaacaaaacagggtaccacaggcaaggatacatgtagattcacatacagaatttcaaagactatgccaagttggtgaaccattttcctaaggaataagaagtcaacttagtctaaaggagatactgaattacagtacagaatgtaaaccaaagaacacaaggagagaacatcagatttgagctttcccccgagtttcaggtatgaatctctaagatatcagatgcttrgataattcaggctaaaattatgggacaagagtccaagctgggttacagcaagcaagaataaaggctatgactaacacagattttcacagcttaaaggccagatccagctagagaggtggctccagcccatagaggcatggtgtgcctcctg

SEQ ID NO: 893942 - DNA, 637 bp, Homo sapiens
atagtattccatggtgtatatgtgccgcattttcttaatccagtctatcattgttggacatttgggttggttccaagtctttgctattgtgaatagtgccgcagtaaacatacgtgtgcatgtgtctttatagcagcatgatttataatcctttgggtatatacccagtaatgggattgctgggtcaaatggtatttctagttctagctccctgaggaatcgccacactgacttccacaatggttgaactagtttacagtctcaccaacagtgtaaaagtgttcccatttccccacatccctcagcacctgttgtttcctgactttttaatgatcgccattctaactggtatgagatggtatctcattgtggttttgatttgcatttctctgatggccagcratgatgagcattttctcatgtgtcttttggctgcataaaatgtcttcttttgagaagtatctggtcatatctttcgcccactttttgatggggttgtttgtttttttcttgtaaatttgtttgagttcattgtagattctgtatattagccctttgtcagatgagtagattgcaaaaattttctcccattctgtaggttgcctgtttactccgatggtagtttcttttgctgtgc

SEQ ID NO: 893943 - DNA, 591 bp, Homo sapiens
ttagagactattattatccctattttccagattgggaacctgatgctcacaggtattaagcaactttcccagggtcatggactaacaaattaaggagatgagaatgactgtcaggctttagggcctgtgcttggaaaaacttctttgctgcctttaatgattatcagttgcactctaaagttagcacataatctgccacatgtaaaaccctcaataaatgttcaaagaattaataatgtattcgttttggcttttaatttctgctgatgtaagtgttgatacgtttattttctgtttcccactcatctacgagctctcaagaggacagaaatcttgtctgacttayagttatctctcctaaaaattctgcttggaaaaatactcaacaaccatttgttctataagtgaatgagtgagtgagtaatcttaatctcaaaaatataaaattccagagaaagtggcatcatcccctttttatattacttgcctattgctgctgtaacaaattaccagaaactgagtggcttaagaaaacaatattatcttacaattctgtatattaggagtctgacatgtatctcactgggctaa

SEQ ID NO: 893944 - DNA, 593 bp, Homo sapiens
agatgggtaaatcacgaagtcaggagttcaagatcagcctggccaagatggtgaaaccccgtctctactaaaaatacaaaaattagccaggcatggtggcaggtgcctgtaatcgcagctactcagggggctgaggcaggcaaatcacttgaacccaggagacagagtttgcagtgagccgagatcacaccactgcactccagcctgggcaagagtgagactccaccaaaaaaaaaaccaacaaacttaatcaacattgttttcatgaacttygctgtctgtttggacatcatcccaacctttagaaggactagacagtcaatcaacaacattccactaattgagaatcaccataaatcatgacagcataaaatgtcagaatttaaatgtacaaagaggaagtggtctaatttgcaatttcttcatctcagatatcatgatgaatcagtacatccataattggtttgacattgagtttcataacacaaagcatctgggctcactcccatggtgcccaatgagagcaatttctgaagctgggacaaattaccctctttaagaacaacaacagctgtctcagtgatctataaatg

SEQ ID NO: 893945 - DNA, 623 bp, Homo sapiens
ggcctctcttctgccccctgtccattgtacactgattagtaatgttagctacatgccaggaactattgtaatggctttacatatcataactcatttactcatccaaacaacctgatggaggtgatactgtcccctccattttaccactgagggrattgaaccttagacaagttacttgcttgtctaagattacagagctattaagagggattcaaaggtggtatgcctggctcatgaagggatcttaaccagtaagctacatgcttctctcctcccccttttaaaaaggaaagcagggtcatcctttgtacttgagtttcctttgtacttgagttttaggattgctctcatgaacagttacacccctgggttttttgcacacttttctgcctttatagctttccatgtaaaaaacagtactccagaatacctcaatattcaacctactgatatctgctcagacatcagagagttatatacgtgcttcagaaaaaaaaaaaaagaggaaatagaaaaaatgctggaagagtccctgctgtttctgaaacactgagctgggtgctttacatatggcaggtgctgggacaacagttaatagctccatggactgttgagacaggccc

SEQ ID NO: 893946 - DNA, 605 bp, Homo sapiens
gtttaactgattttataaaatcaattttctattttaaattcctttaatttttgctctatttttatgatatctttcattcttcttactttgcatattatttgctcttttttatagtgttctaaagtggaaacagattactagtattagatctttcttttctttctttttttttttgagacagagtctcactctgycacccaggctggagtgcagtgtcccaatcttggctcactgcaatctctgcctcccaggttcaagcaattctcctgtctcagcctcctgagtagctgggactacagtcatgccaccacgcctggctaatttttgtatttttagtagagacggggtttcaccatgttgatcagtctggtctcgaactcctgacctcaggtgatctgcctgcctcggcctcccaaagttctgggattacaggcatgagccaccatgcccagccagatctttcttattttcaaatacatgtaatcatgttttaaatttctccctaagcactgcttttgctgtatcccacaaatttatatatgtagatttttgtccaagcttcctgcctcataactcccataatcctcgttactatcttttgttat

SEQ ID NO: 893947 - DNA, 635 bp, Homo sapiens
gatggcctgctccttcaataggtgaatggacaaacggtgtgtatcggtcggggttctccagagaaaccggaggatctatatcctattggctgtctatctattgaaataggaagagattgaaaggaattggctcacatgactgtaggggctggcaagtcrgaaatttgtagggcaggccaacaggctggaaactcaggaaggagctgatgctatagtcttgaggccaaatttcttcctctctgggaaatctcagattttgtttttaaggccgtcaactgattagatgaggctacccacatgatcaaaggtaatcacctttagttaaagtaaactgagtatagatgttaatcacatctacaaaataccttcacagagacacataaattagtgtttgattgaataactggacatacagcctagccaagttgacacataaaattaaccatcacactgtggtacaatggaatactatgcagtgataaagaggaactagctattaattcacagaaaaattatcaatgaatctgaaatgtattttgctaagcgaaagaagccagacttcagaggccatttattgtatgatttcatatatatgaaaattctggaaaaagaaaaactagagagatgaaatatat

SEQ ID NO: 893948 - DNA, 593 bp, Homo sapiens
atggatcctagctgtttcttgagtattttttttaattccccaagggcttgaaatatttagaggaatgagaatgtgctaaaatcttaaagtaaagggatagtgctgacactcaatacaacaaggaagcaaggaaggagttaccttctggtgagaacagaccatcacagaaggctttgcagaggatatagcactttagctgctatgtagtttataaagagtaggtgagagatggttcctgtcctcccagagctatagtcttggtggtggtgatgggggaacaaggggatatgatatacaagtatgggtaatttaaattttaaatagtcagtggcacaaaataaatttggtatcctaaataacattytatatgcttctccaaactcatggctaattgaggtgacatgaagagaatgagctccactaattattagaatgtttgagtaccgttgtgaccacctgtagatcattgtatatttgtaaccaaacacgagtccagatgctctctgcttgtgtagttcaacaagagcaaggcctggtagaaagacagtaactttattaaccaaaactagttaaaaaaaaaaaaaagggaagca

SEQ ID NO: 893949 - DNA, 685 bp, Homo sapiens
gagaggaagtcatattgtctctgtttgcagatgacatgattgtatatttagaaaaccctgtcaccacagcccaaaatctccttaagctgatgagcaacttcagcaaagtctcaggacacaaaatcaatgtgtaaaaataacaagcattcctatacaccaataacagaaaaacagccaaatcatgagtgaactcccattgacaattgcttcaaagagaataaaatacctaggaatacaacttaaagggatatgaaggacctcttcaaggagaactacaaaccactgctcaaggaaataagagaggacacaaacaaatggaaaaatattccatgctcatggacaggaagaatcaatatcatgaaaatggccatactgcccaaagtaatttaaagagtcaatgctatccccatcaagctaccactgacttttttcacaaaattagaaaaaaatatatttcatatggaaccaacaaaaagcccrtatagccaagacaatcctaaacaaaaagaacaaagctagaggcatcatgctacctgtcttcaaactatactacaaggccacagtaataaaaacagcatggtactggtaccgaaacagatatatagaccaatggaatagaacagaggcctcagaaataccaccacacatctacaaccatctgatctatgacaaacctgacacaaaa

SEQ ID NO: 893950 - DNA, 574 bp, Homo sapiens
atgtttctcatttcaaggacccaatattctaaggctggcaaatgagtctcttttattattattttatttatttatttatttgagacggaatcacgctgtgtcccctaggctgcagtgcagtggcacgatctcagctcactgcaacttctgcatccctggtttaagtgattatctgcctcagtctccygagtagctgggattacaggtgcccaccaccatgcctggctaatttttgtatttttagtagagatgaggtttcaccatcttcaccaggctggtctggaactcctgaccttgtgatctactctcctctgcctcccaaagttctgggattacaggcgtgagccaccgcgcccagccatgagtctcttttatttgatctatagtttacccagaaccacaattaaaatcccagagggacattttggtggaaaatttcaagctaattctaaaatatatagggaaaatgcaaagagataactctagatcaccttgaagaacaacaaaattggacttacactaatatcaatatatattgtaaagttataataattaaggcagtgtgctattgatc

SEQ ID NO: 893951 - DNA, 603 bp, Homo sapiens
gtatgtgtgatatttaaaaattaagccacatcatcatcctaagaaaactacgagactttagttttagtataaacttgcagtgtgttcttgagatttctaaatataaggcttaacattttttccttaatacacatcgatttggcatctcatatgtattatttatcaggaaattataaaacaaagtaaaatgatgttttactaaaatgcacatcatttttagatatgggattttaaaacttgatttataatmctacttttaccatgaaatactcttttgttgtatgaccttgagtacatttcccatctgtgaatctgtgtaatcatgtacaaaaataaatgagacaaaacctaagtgcattttaacctcttcaaattgtaaaaagtgtataatattacattttcaaaagaaaacacaatccttttttatttatagcctttttgaaaaccgtgttaataataaacagaatctgcaaagttcaaatcattttttttttggttaggtggcatgagactttttttaggactacaaaccagcatctagcctagttaaatcttaatttcaaaaccaacttcctaaagaaacttaatgagataaaggaagat

SEQ ID NO: 893952 - DNA, 612 bp, Homo sapiens
aaagatgtgggcttctacccgcattttctcccttccccatcccatctctgctcctcatcccctccctgagagatctgaacactccaaatttttctcttcttagtatggaaagtagtccatctctccacagctcttatatccagacgtagatgcccaaactcatcaaagagtttagaagataaagggccttcaatttagaaccattcaccatacatagaaggcagttggggtcatatggtataatcataaagttataaaatcataggctgttggaaggaatattgaatttaagttcattttcatgtctttagccttaaaattacaaatgttacaagctagagtctcagaattttaaattataccttyccatgaatttttacctaaaccacttggcaatttagtacagacattttctcgacctgatatgtgcgatagaagtagacaagcctcacacacatgcatgtgcgcctacacacacacacacacacaaatttttctccaacagttaaagattcttttcaatatactattctacaattcaaattaggtgctattctgagatatatgtggattaaggaacctaatataagatataggtagctatatttctgt

SEQ ID NO: 893953 - DNA, 640 bp, Homo sapiens
ttgtacaaaactcaaataatgcccacctgcccagagtgtacattctagtgtctgtatgctgggtgaggaaacaaaagccatgtccgaatacttaaaaagctaaacaaatagatgaacaatataatttcagatagcagtaaattctaggatgaraggaagccagggtactacaagaagaaatgaccataaggaacaggatgggagagggttaaattggattggtttgctagggaaaaaccttgctgaggatgtcatatctaatgtaaggctgaaatgaccacaaaaatgagtcatttcaagacccagagtctgagcactgcagacaaaaggaacagtatgtgcaaatctcttcagatggaaatgaacgccacccattggaggaaagaaaacctggtgtgaatggggggaaataagatcagaggcaagcaggggctagattgcatgggctttgataaggggcttgagttttttctggacgtattaagcagtgcaatggcatacttgaatttactttttttaaaatgtcaacttttattttgaatacagaggtacaaatgcaggtttgttacatgggtatattgcattccagtagcgagcataatacccaataggtactttttcaatccacctccctttctcc

SEQ ID NO: 893954 - DNA, 525 bp, Homo sapiens
tgagaacatctccgtatcaaacccaaagagattttctcaagtgaaataaagtgaaacaaagaaagtagcattagcagttccgagttgcagacagttctttttaaaatttgttttttggttcttccaggcctcatttgcaagttgctacttaattaactagggtggttaatgttaggtaaagtccaaaatgtaaaggaactacatagcaataacaatatttcagtatttcttcaataaaagttactgacactctctatatgtcaagcactggagggtgccagtgaaaagagatggtctgttgctatgttctgcattttcgttggtgaaaacagagaagttggctgggtcatmagtgtggtacctctggtaaagctcaagtatagggaaatttaattcaatctcatgtttgaattattccctcttaagggggtaataatcctattcccatggagttttttgagggcactaagtgatagaacacatgtgactatgactagtataataaatgatgtattaaaatcattc

SEQ ID NO: 893955 - DNA, 583 bp, Homo sapiens
tcttttcaaataaactaagccttttgtaatcaggtgtgtgtttttcattcttgcatccctgcccctagcacaatgctttctgggcctccaataagtgtttgctgaatgaatcaatggagggatgaaaagtattcataatgtgtccctccctgtatrggaagtgcatagagtatggcctagtagagttatttggaggagtcattttaagaagtgtataaaaatgttttactaatatatatcagtttaataattgccaaagtaaatgaatgcttctgaaatgcacgtttggaaacggttaaaagatttttttggcacattcttctaattggatcaacttggtataggtttggctgcttgtaagagataatcaaacatatactaacttaaccaaaatagaagttcgtttttcttaagtgacattagtctgaaggtaggacttcacagtcttcagaggcctaagctcatttttcttcctctcaaacatcctcagcttgtgactttcatccttctatttgttgcttcatggtcttgagatggctgcctcacttccagcatcctaactacatgctagggagaaggatag

SEQ ID NO: 893956 - DNA, 583 bp, Homo sapiens
tcttttcaaataaactaagccttttgtaatcaggtgtgtgtttttcattcttgcatccctgcccctagcacaatgctttctgggcctccaataagtgtttgctgaatgaatcaatggagggatgaaaagtattcataatgtgtccctccctgtataggaagtgcatagagtatggcctagtagagttatttggaggagtcattttaagaagtgtataaaaatgttttactaatatatatcagtttaataattgccaaagtaaatgaatgcttctgaaatgcacgtttggaaacggttaaaagatttttttggcacattcttctaattggatcaacttggtataggtttggctgcttgtaagagataatcaaacatatactaacttaaccaaaatagaagttcrtttttcttaagtgacattagtctgaaggtaggacttcacagtcttcagaggcctaagctcatttttcttcctctcaaacatcctcagcttgtgactttcatccttctatttgttgcttcatggtcttgagatggctgcctcacttccagcatcctaactacatgctagggagaaggatag

SEQ ID NO: 893957 - DNA, 663 bp, Homo sapiens
ctttctcctcagaaaatgggattttcttttctattgcattgtcaggctgcaaattttccaaacttttatgctctgtttcccttttaaaattgaatgcctttaatagcacccaagtcaccccttgaatgctttgccacttagaaatttcttccaccacataccctaaatcatctctcycaagttcaaagttccacaaatgtctagggcagggacaaaatgccaccagtctctttgctaaaatataacaagagtcacctttgctccagttcccaacaagttattcatctccatctgagatcacctcagcctggatttcgttgttcatatcattatcagcattttggtcaaagccattcaacaagtctctagggagttccaaactttcccacattttcctttcttcttctgagccctccaaattgttccaacctctgcctgttacccagttccaaagtggcttccacatttttgggaatctttttagcagtgccccactcccagtaccaatttactgagtagtccattttcaagctgctgataatgacatacctgagacatgacaatttacaaaagaaagaggtttattgaacttacagttccaaatggctggggaggcttcacaatcatggcagaaggcaacgaggagcaagtcacatctcacat

SEQ ID NO: 893958 - DNA, 644 bp, Homo sapiens
ctcaggtgtgggtaagacatctcagttctctgctatttgatatgaataggggcaatcccagaagcagcaactgagctcatgggccccaaaatttccaaggaatcacgaggagaactaggctaaatgtcattattttctgaccttcgatgtaccttytccctagtcacttgccaatctcttctaaagggcctcagtccctggagtggaccctaatgatttctgtccattatttggcctagagtagaattcttgcttttctcaaggaaagaaacaaaaagaaaagatgtaaccaaatgtaatttatgtgagtttgtaaattgatatccgaagattggaactgcatacagatgtgtcaaaaatgttaatttccccaagaaatatggtagcacctaattctagcgacacttgtatactttacagatggctttgctgtgctcctggtaaagtcaatgactttctgcctttgaacatgaaaggaaaaagatgttgacaggaattctttagggaaacagaaactacatatttgcttatgctaagttatggcaaagttcagttttattctgtaaataaagcgttgtcttcataaatatcagctatatcctttagagtaaagaaagtcctctttattaaaaaaatctaattga

SEQ ID NO: 893959 - DNA, 581 bp, Homo sapiens
gccaatctcttctaaagggcctcagtccctggagtggaccctaatgatttctgtccattatttggcctagagtagaattcttgcttttctcaaggaaagaaacaaaaagaaaagatgtaaccaaatgtaatttatgtgagtttgtaaattgatatccgaagattggaactgcatacagatgtgtcaaaaatgttaatttccccaagaaatatggtagcacctaattctagcgacacttgtatactttacagatggctttgctgtgctcctggtaaagtcaatgactttctgcctttgaacatgaaaggaaaaagatgttgacaggaattctttagggaaacagaaactacatatttgcttatgctaagttatggcaaagttcagttttattctgtaaataaagcgttgtcttcataaatatcagctatatcctttagartaaagaaagtcctctttattaaaaaaatctaattgaaactcttcaataggtaggcaagtgaggtgattgatataaagatatacttaagtggaaaattggtattcgagttccaataagtaatcaatcatattgttcttggtaa

SEQ ID NO: 893960 - DNA, 650 bp, Homo sapiens
aaaattctcgtgtcttcttggagacagagaaaagttattgagaaagtaagattattttagagtgaggagagctagtctcagtatttacatattttaaagaataattgtggttgcatatgctgctcagaactgagcaagataatttatcttactagtgagtataataaacctaggccaaaaaatttaagattactagaacatgaagtgaagaccaaaaatatcagtacttttttttctttgtaggggaaacaragtcagaaaacagtgagcatttgctcaattttttaaataaacacaagaaacaagaagataataaataagtcccatttttataggtaaatatggtacttcagttagagaacagacatcattaaactggttgatcagaaatctttaaatccctaattaaatatctggaacttgacttctaaaaatgatatttgtacctgttaatttattgttgtggagtgatcaaatgtgtatgaaattattttactttgtggagcaaagggactaaagaataagactagggagtttttatttttatggtactccaaggattaaatagaaagatggatccatatctgtctttccttcctaccaactagctgtgatataaaaggaaatttaaaagtagtgctctactgcaa

SEQ ID NO: 893961 - DNA, 748 bp, Homo sapiens
atagaacagttcatccaacagcaacaaaatacatattcttctcaaatcacatgaaacactctccaggatagatcacatgttaggccaccaaacaagttttaacaaatttaagaagattaaaatcatatcgagtatgttttctgttcatgatgacatgaaactagaagtcaataagaataaccttgaacaactcataattaygtggaaattaaacaacatgctcctgaacaggcaatgggtcaaagaagaaattatacggaaaaacagaaaatattttgggatcaatgacaatggaaacacaagataacaaatagtatggaatgtagaaaaagaagccctgagagaaaaatttatagtaataaatgcctacattaaagaaagaaggaaaatctcaaataaacaacctaatattacatcttagagattagaaaaagaagaacagaatatccccaaactttgcagaaggaagaaaataacagagataatgatagaaataaacaaagcaaatactaaaaagttgtttttttgaaaagataaaatcgaaaaacctttaactagactaaccaagggaaaaaagacaactcaaacaatatctgaaatgaaagaagggagactaacactgataacacataaatacaaggaatcataaactattaatgtgaacaaccatacaccatcaaattgaataacctagaaggaatgaactaatctttagaaacatgcaacctaccaagactaaatcaagaaa

SEQ ID NO: 893962 - DNA, 748 bp, Homo sapiens
atagaacagttcatccaacagcaacaaaatacatattcttctcaaatcacatgaaacactctccaggatagatcacatgttaggccaccaaacaagttttaacaaatttaagaagattaaaatcatatcgagtatgttttctgttcatgatgacatgaaactagaagtcaataagaataaccttgaacaactcataattacgtggaaattaaacaacatgctcctgaacaggcaatgggtcaaagaagaaattatacggaaaaacagaaaatattttgggatcaatgacaatggaaacacaagataacaaatagtatggaatgtagaaaaagaagccctgagagaaaaatttatagtaataaatgcctacattaaagaaagaaggaaaatctcaaataaacaacctaatattacatcttagagattagaaaaagaagaacagaatatccccaaactttgcagaaggaagaaaataacaragataatgatagaaataaacaaagcaaatactaaaaagttgtttttttgaaaagataaaatcgaaaaacctttaactagactaaccaagggaaaaaagacaactcaaacaatatctgaaatgaaagaagggagactaacactgataacacataaatacaaggaatcataaactattaatgtgaacaaccatacaccatcaaattgaataacctagaaggaatgaactaatctttagaaacatgcaacctaccaagactaaatcaagaaa

SEQ ID NO: 893963 - DNA, 599 bp, Homo sapiens
ggctaccttttttacttttttttttttttaagtagagctggggtttcgccatgttggccaggctggtctcgaactcctgactgcaagtgatccggctgccttggcctcccaaagtgctgggattacaggcgtgagccactgcgcctgtcctccraggataagtcttttaccatcaccttgcacatagaaaattaaggtttaccaaacccaagtgaaaaagattgtgagtggaagatatgctcccagtcctagagtgtatgctggttcctccaaaagaaccctgtttttatgctgaatagtattacgtggacctagcaagattgcaggtcagttttctagccctgatcttcttccggggctctcaggctcagtggactgcaccacttgaaacctggttgtacacactagaaggctcttggcacctctctcacctttattgtctgccaattttgcctctcaagtatctgttgaatccatccacttctcttcatctttactactgccgcctagtccaggccaccctcacctctcacttggacacttgcactggctcagctggctgccttatatcctccctgcccttcctttacctccaccag

SEQ ID NO: 893964 - DNA, 644 bp, Homo sapiens
caatgctacctgatttcaagactttctataaagctaaactaatcaagataggtattattgtcataaagatagatgtagagccatggaacaaaacatccagaaatagactcacatatagatggcaactgattttttacaaagtcacaaaggcaaagcagtggagaaaggatagtcccttcaacaaacggtactggaacaatgagatattcatatgccaaaaaaatggacttcatgtcttgtactatgtttaaaaattaactcaaaatgggccataggcttaaatgtaaaactaaatattatacagtttctatgagaaaacataaggaaaaaacctttgactttgggttaaacaaagatcttatagacccaaccccaaaagtataatccmaaaaaaaaacaaattgatgagttaaacttcatcaaaattaaaaacttctgctctttcaaagaatgaaaagacaggcacagtctgggagaaaatcttttaaaatcatatatctaatgatatgattaattcagaatatataaagaacttccaaaactatattataagaaaacaactcagtaaaaacctgggcaaaagatttgaacagacacatcatcaatgaagacagactaacagtaaattaagtgcatgaaaatat

SEQ ID NO: 893965 - DNA, 649 bp, Homo sapiens
aacctcactcactcccaaccgatggagataataactgcatgctactttaagctgatagatttgtggtaatttgttacacagcacagaaaactaatacagggaaggtgagaacaactcatttgggtgctgctcctttctttatcagttgagagacaaaattatatgtgtacatgagctgggtatgtttgagtgtatgggatatgggtctatgggatacataataagggacttcccacagtactaaatgccaaagatgacggattagaaagagcagactataatctccctgaaggcagggatttgcatagcatgacagagtaggaacttaattaatgttgaaggaactygttttgccatgatttagttgtatttgatgcctctacttaaccctaccagttttgtgatacttttgttagggagtataaacaacagattttataaggaacatataggtagtaggagctacttttaatctttgatgtgaagtaacaaagagatacagaaagaagacaatagattttagcttttgcttaggggttatcaatactacagttacgttactgttacacaaccttccaaagtgcagacaatttatggcttcttattaaatgaattagctgtgcacaaaccagaaaacgggaggtaaatt

SEQ ID NO: 893966 - DNA, 761 bp, Homo sapiens
attactgacttacaacacagaaaacaatacatgcctggaaacttatttgaggttttcaactgtgcctgtcttttatgaaggtctgctggaagacttcttgatgcaatgtttgcatagctacatagagagtattactgacatcagtggaattacaccagggcaccagtgaggattaccttcaggtcttgtttgcaaaagtcagagggtttgatgtaagtaattcattatatcaaagggaggcataataattatctgttttaatcttcaggaacctccttgtttctgactttcctactgtatgaatcaaagtgattatttctacatatgctgtcttagtctgcttcggctgctataacaaaatatcataaactgggtggcttataaacaacagaaatttatttcctacagttcttgaggtcrggaagtccaagattaaggtgctggcagattcggtgtctgtcgaggtcctatttcctggttcgtagatggtgccttctcgctgtatcctcctatggtggaaggggaaaagagaccctggggtctcttttatgagtacactaaatccaccttcatgtcctaatcagctgccccaaactccacctcctaatataatcaccttgggggttaggacttcaacatatgaatgtggggagggaggcagacacaaacattgagaccatagcatatgccaagaatcttagaattgggaggaatgatggacatgttgttagcgtgatccttcagtatgtttttttcaacat

SEQ ID NO: 893967 - DNA, 658 bp, Homo sapiens
atttttcttgcttgcatctagtttatcatgattggattaaattattctttgtaacacactcctgaatgattttataacaaatacataaatatgaggattaattaaatgccattatgctaacaatacctacaattttggtcattgcacagacgtgacacttaaaaattagtatacatgtgtagactttggtttaagtcttytattaaaacagtactttgagcttttattgttatcaattaatattttagggtgcccgaggcaagaggcagatggaacctgcagccctgcaccttgtcttcccttcccatccctggctctttgtggcaggactcccatgcaatcaagctgtattagttttctgtagctgctgtaacaaattaaccacaaatatagtggcctaaaaccatgccaatttattatcttgtggttctgaagatcagagtctaaaatcaaggtcccagcagggctgcattccttctggatgccctatggggagaatgtcttcccttgctttttccctctgctccaggctgcctacattccttagctcagagcccctttatctcatcactccaacctcttacttccatcaccacatctcctactcctgactctgatcctcctccctctctcttgaaagattcttgtaattacattg

SEQ ID NO: 893968 - DNA, 658 bp, Homo sapiens
atttttcttgcttgcatctagtttatcatgattggattaaattattctttgtaacacactcctgaatgattttataacaaatacataaatatgaggattaattaaatgccattatgctaacaatacctacaattttggtcattgcacagacgtgacacttaaaaattagtatacatgtgtagactttggtttaagtcttctattaaaacagtactttgagcttttattgttatcaattaatattttagggtgcccgaggcaagaggcagatggaacctgcagccctgcaccttgtcttcccttcccatccctggctctttgtggcaggactcccatgcaatcaagctgtattagttttctgtagctgctgtaacaaattaaccacaaatatagtggcctaaaaccatgccartttattatcttgtggttctgaagatcagagtctaaaatcaaggtcccagcagggctgcattccttctggatgccctatggggagaatgtcttcccttgctttttccctctgctccaggctgcctacattccttagctcagagcccctttatctcatcactccaacctcttacttccatcaccacatctcctactcctgactctgatcctcctccctctctcttgaaagattcttgtaattacattg

SEQ ID NO: 893969 - DNA, 540 bp, Homo sapiens
tcttctcttggtctcacccagttgtcttacacatcaccaagtagcttggtatttaatgggctgtccattctgatgctacagaaatctgtcagggttctatcataggtcagctctagtcactgctcatttatttatcttgtcatttaaccaagcactttttttttttcatgaagcatcatcatttccagagacaccatttttttttttcagtaaaatctcaaagtctaaaattgagttaattatattttaaatcataaaacactttaaattcactttaacatgttttcacatcttaraggctgaggcaggagaattgcttgaaccccagaggtggaggttacagtgagctgagattgtgccactgcattccagcctgggcaatagagggagactgtctcaaaaaaaaaaaaatgtacttttcaagttgtatcatgtttgggtgtcaaaaatataactttgagatgaaggaatatacataaaaattatttcacagattttttctcagttaaaaaatcatacttggaaagattacattttatt

SEQ ID NO: 893970 - DNA, 598 bp, Homo sapiens
ctaccatgtcccaagcactatttggcatctaatatactttgtctttcttcttccgtatagcactaatcacaaatgtcatgacatcattactattgtcacaatctatttcatgtttacyttgctcactagatgacaaactccaggagggtgtgggcctggtctctgctgtttgccgttatatagtctgtgtctagtgtagtgtctggcatgtggcattgcttagtaaacgctcattgaacaaatgaatgagctacagtccttgcagcagagtagcaagttaggcatgatcatctccattttacagataaggaaatggatgctcaaaatgagatggcttcctaggagatactgccttgtggtgctgggaactacatcccagttggttgattccaaacacatttgctctcctggctactaaagtgactattctagtaagggcctccactgggttgccttgttttggttgtgtaaaccttcatgggtacttgcttaataaacagtcttctgggtttagctcctttagctagtccttagtctcccctgatgggctgtttcctttccttttaacttatcactcgtttactttcttgtatcttac

SEQ ID NO: 893971 - DNA, 673 bp, Homo sapiens
ggcctcccaaagtgctgggattacaggcatgagccaccgcacccggccccaactagatttaaattggagggacttgacgatgtcttatttcctttgtatctcacaaagccctcggcaagttctagaacacacaatagactggtaaaaaatgtttcctttggtattaatttacaaagtttctttgaaattttgctagcataggaattatactctctgaatttattctgtatatttacatatagtaatggaatctgaacagcgtaacttttcattccctcttttgaagagaagttgagctgctattttttcttggctatttttcgtcaattttatcccatggtatacctgtgctttgaacacaggtggatcttcaatgactttttccatggaaggactttcagttgaagtaactgagcagcacaaagcctctgtgttgtgtgtgtgtgtgtgtgtgtgtgtgtgtgtgtgtgtgtgtgtgtgtrtacgagtgtgtgtccattccctcataagactttctaatggctagcatctaaactaaaataaaaaatgtgcatctgcatctgaacttcttttttaatcattgtaaaaatatttttcagaacacagcgttcaaaatgtcttttgagtacttatggctaagtactttttacttttgagtaaaaaaggctaatct

SEQ ID NO: 893972 - DNA, 659 bp, Homo sapiens
caatgagagagaaacaaaccagttgaattatctccttgcaccattgtaacgattacttttcccaggatacaaaatttcgtcttggaaaccacgactagataaaagcaacgttcattaaatgcaagcatatgtaatcccagatacttatcacctgtaaaaaccaggtgatgcgtgtggtgaaaccagattgcgggcgctcagtacttatttctgatggtaaacacattgttcttattgctgctaagtataactggtgaaaataaagaccgacccgttttcattcagaattcgagttctgttgtatcacaaaactaagcaaactaaatgttaattgcgcgattaattaaaytagatttgcaatcatctttgacgcaggcaaagatcaaaacaaaccccaaaaacttgctgtcgcctccggatttggctactgaaaatttcaaactcgagtcgtgtttccttgaagactagagagatatggggaggagctgggggtgttctcagacaaccacacactctcctcttcctaccctgcctctgacccgctcccgtgttggtaacgctagttcttcccctccggtatgctgtactcggttaattcctcatcggtggctaacggggtacaactatctggcagttttttgctttttaagtatgacagc

SEQ ID NO: 893973 - DNA, 659 bp, Homo sapiens
caatgagagagaaacaaaccagttgaattatctccttgcaccattgtaacgattacttttcccaggatacaaaatttcgtcttggaaaccacgactagataaaagcaacgttcattaaatgcaagcatatgtaatcccagatacttatcacctgtaaaaaccaggtgatgcgtgtggtgaaaccagattgcgggcgctcagtacttatttctgatggtaaacacattgttcttattgctgctaagtataactggtgaaaataaagaccgacccgttttcattcagaattcgagttctgttgtatcacaaaactaagcaaactaaatgttaattgcgcgattaattaaattagatttgcaatcatctttgacgcaggcaargatcaaaacaaaccccaaaaacttgctgtcgcctccggatttggctactgaaaatttcaaactcgagtcgtgtttccttgaagactagagagatatggggaggagctgggggtgttctcagacaaccacacactctcctcttcctaccctgcctctgacccgctcccgtgttggtaacgctagttcttcccctccggtatgctgtactcggttaattcctcatcggtggctaacggggtacaactatctggcagttttttgctttttaagtatgacagc

SEQ ID NO: 893974 - DNA, 659 bp, Homo sapiens
caatgagagagaaacaaaccagttgaattatctccttgcaccattgtaacgattacttttcccaggatacaaaatttcgtcttggaaaccacgactagataaaagcaacgttcattaaatgcaagcatatgtaatcccagatacttatcacctgtaaaaaccaggtgatgcgtgtggtgaaaccagattgcgggcgctcagtacttatttctgatggtaaacacattgttcttattgctgctaagtataactggtgaaaataaagaccgacccgttttcattcagaattcgagttctgttgtatcacaaaactaagcaaactaaatgttaattgcgcgattaattaaattagatttgcaatcatctttgacgcaggcaaagatcaaaacaaaccccaaaaacttgctgtcgcctccggatttggctactgaaaatttcaaactcgartcgtgtttccttgaagactagagagatatggggaggagctgggggtgttctcagacaaccacacactctcctcttcctaccctgcctctgacccgctcccgtgttggtaacgctagttcttcccctccggtatgctgtactcggttaattcctcatcggtggctaacggggtacaactatctggcagttttttgctttttaagtatgacagc

SEQ ID NO: 893975 - DNA, 722 bp, Homo sapiens
ggggtgtccaatcttttggctgctctgggccaaattagaagaaaaattgtcttgggccacacataaaatacactaacactaacaatagctgatgagctttaaaaaaaatctcataacgttttaagaaagtttacaaatttgtgttgggctgcattcaaagccatcctgggccacatgtggcccacaggccaagggctggacaagcttggcctagaaaatcaagtgtctgattatcattgaaggtgggagtaagtgatagggctgatgccagagggattgattcaaaagccagatacaaagctgttaggcccctaggcccctaggccaccayctccacccagtgcaagtaagctcccatccatattagttttccaggctgccataacaaaataccacagatagtgtggtttaaacaacaaaagtttattttctcacagttctggaggatagaggtccaagatcaaggtgccagcagagatactttttttgaagtcctctctccttggcttgcagacagccatcttaccgggtcctcacatggtcatttcactgtgagcccacatgtctgtgttctaatctccttttcttataaacatatgggattagggcccacccatttgactccatcttaccttatttacctctttaaaggccctatctccaaatacactcacgttctggggtatgagggggttaggacttcaacacttgaatttagggag

SEQ ID NO: 893976 - DNA, 594 bp, Homo sapiens
tattattcattaattttgtttcagcctagtaaaatgggggaggaaggggtacagaatatttcttttctccttcctttctttccctttctttctttttctttctttctttcttttctttttctttcttcttttctttcctttctttctctttctttccctcccttcctttctttccttccttccttccttccttccttccttccttccttccagggtctcactctctcacccaggctagagcacaatgcatgttcacgactcactgcaaccttgaccttccatgctcaggcaatcctcaagcctgaaattatttctttccttyctttctttctttcttttgttttgttttggtggaggacagagtttcgctcttgttgcccaggctgcagtgcaatggcgcgatctgggttcactgcaacctccacctcttgggttcaagcgactctcctgcctcagccttccgggtagctgggattacaggcatccaccaccaagcctggctaatttttgtatttttagtagaaacagggtttccccatgttggccaggctggtctcaccctcctgacctcaggtgatccacccaccttggcct

SEQ ID NO: 893977 - DNA, 589 bp, Homo sapiens
tgctaccacactccagcctaggtgacagagtgataccttgtctcaaaaaaaaaaaaaaaaacagtacaagtggccaacagatatatgaaaatatgctcctgctcaacattactaatcatcagggaaatgcaaatcaaacccatctggtttttgaaagcaggatttatgctcctggattgagtaaacctgaagggttyttggacaatttgggatgaagaaatctcaagaaaaaaacatttattggcaccaataatagcaggttggaggtcccaaataattaactggagagaaagaaaggaattctagctaccttatactggagcatcagttcataacagctagattatagattatgggtttttttttttttttttttttttttttttcagaattagccattgataattcagtttcataaattgcctgttcttattctttgtcagtttttagcatacattctttcctaattgttgtgaaagttccttcatatattttggctcctattctaatttttaactcctaattgttttccttccttataaaatctaatctcgtttattttttctcaccattttttgtcagttgcaaa

SEQ ID NO: 893978 - DNA, 576 bp, Homo sapiens
tcatgctatcattagatgttaataataggggaaactgagtgtgtggtgcatgggaactccggataatcttcataattattttataaatttaaaacttaaaacgaatgaagtgattctaaagcaatatattctgatgaataggatctaaaacaaaaacgactgaatgaacaaattaaccacgaaaaactgaataaaaataataagyttacagtaagagtcaaacattagtaatgtgtcaaaatagacagaatttaatatgcagaaaaacatgagtttttaaaaattataggacaaagtttaagatatcatggatataagctgaaggaaaacaagaagaatttcatttgtgttattaggcaaagaaaataaatgttacagaacttgggattttatataaaatgttttatttaattatattttggagaaagaaaatttaaacttaatgaaatatatttagaaaatgagtaatcaaaacaataaatatcaacattacacatcactcatgacttttaaatgtaaagtcttatgtgcaattttaaactaaattattaaaaatttagataaagcacattattt

SEQ ID NO: 893979 - DNA, 576 bp, Homo sapiens
tcatgctatcattagatgttaataataggggaaactgagtgtgtggtgcatgggaactccggataatcttcataattattttataaatttaaaacttaaaacgaatgaagtgattctaaagcaatatattctgatgaataggatctaaaacaaaaacgactgaatgaacaaattaaccacgaaaaactgaataaaaataataagtttacagtaaragtcaaacattagtaatgtgtcaaaatagacagaatttaatatgcagaaaaacatgagtttttaaaaattataggacaaagtttaagatatcatggatataagctgaaggaaaacaagaagaatttcatttgtgttattaggcaaagaaaataaatgttacagaacttgggattttatataaaatgttttatttaattatattttggagaaagaaaatttaaacttaatgaaatatatttagaaaatgagtaatcaaaacaataaatatcaacattacacatcactcatgacttttaaatgtaaagtcttatgtgcaattttaaactaaattattaaaaatttagataaagcacattattt

SEQ ID NO: 893980 - DNA, 519 bp, Homo sapiens
actcctagaagaaaacatagagaaaaagctccttgacattggtcttggaaataattttttggatattgcatcaaaagcactggttaaacaaaacaaaacaaaaataaacaagtgggactccatcaaactaaaaacttactgcagagcaaagaaaacaatcaacaaaatgaaaaggcaatctcagactgggaaaaatatatgcaaaccacatatacaataagggataatattcaaaatatttaaagaactaaattcaatagcataaaataaataaataacctaattaagaatgggcaaaggacctgaatagatatttcccraaagaagacatacaaacgaccaacaggtataggggaaggtgcttcaaatcaaccatcaccggtgaaatataaactaaaactataagttattacctcacatctgttagaatggtggttatcacaaagacaggataacaaaagttgattagggtaaggagaaaagaaaactcctgtacactgttggtgggaattgtatatt

SEQ ID NO: 893981 - DNA, 519 bp, Homo sapiens
actcctagaagaaaacatagagaaaaagctccttgacattggtcttggaaataattttttggatattgcatcaaaagcactggttaaacaaaacaaaacaaaaataaacaagtgggactccatcaaactaaaaacttactgcagagcaaagaaaacaatcaacaaaatgaaaaggcaatctcagactgggaaaaatatatgcaaaccacatatacaataagggataatattcaaaatatttaaagaactaaattcaatagcataaaataaataaataacctaattaagaatgggcaaaggacctgaatagatatttcccgaaagaagacatacaaacgrccaacaggtataggggaaggtgcttcaaatcaaccatcaccggtgaaatataaactaaaactataagttattacctcacatctgttagaatggtggttatcacaaagacaggataacaaaagttgattagggtaaggagaaaagaaaactcctgtacactgttggtgggaattgtatatt

SEQ ID NO: 893982 - DNA, 519 bp, Homo sapiens
actcctagaagaaaacatagagaaaaagctccttgacattggtcttggaaataattttttggatattgcatcaaaagcactggttaaacaaaacaaaacaaaaataaacaagtgggactccatcaaactaaaaacttactgcagagcaaagaaaacaatcaacaaaatgaaaaggcaatctcagactgggaaaaatatatgcaaaccacatatacaataagggataatattcaaaatatttaaagaactaaattcaatagcataaaataaataaataacctaattaagaatgggcaaaggacctgaatagatatttcccgaaagaagacatacaaacgaccaacaggtataggggaaggtgcttcaaatcaaccatcaccggygaaatataaactaaaactataagttattacctcacatctgttagaatggtggttatcacaaagacaggataacaaaagttgattagggtaaggagaaaagaaaactcctgtacactgttggtgggaattgtatatt

SEQ ID NO: 893983 - DNA, 621 bp, Homo sapiens
cttgataagactaatgcagatgacaaatgtaagttgaagtcaatcttcatttgctatctgaaaataatagagcccttacaaattatgctaaatctactttgcctttgctctagaaatgaaagaacaaagtctggagaacagcacatctggtcacagaatggcttactgaataatttaagtccactgttgagacctacagctcagaaaaaaaaagtttcaaaatattccttctctttagcaatgcctctggtcacccaagagctctgatgaagaagcacaaaagttaatgttgttatacctgcaaaaacaacgtccrtattgcatattatggatcaaggagtaattacaactttcaagttttattatttaagaaatacattttgtaagactttagctagcataggtaatcatttcttagatagacatgagcaaagtaaattgaaacctgaaaaggactcatcattctaaatgtcattaaggacatttgtgtttcacagtagaaggtcaaaatacctactttaacagaagtctgaaaacagttgattacaaccctcaaggaagacttgaggggttcaagactttgacagaggaagaagtaattgcagatgtggtggaaatagc

SEQ ID NO: 893984 - DNA, 651 bp, Homo sapiens
atgtctatctgtcattttccactggcaattcatagtaaatgaaattgaacaacggcagacaaaattatttttaaagctacactagtccactatatgtaattaaatatgaccaacaaaaattacatattccattaaytatttacattgtatttgccttttgttcaagaattgctaaccatatcaaaatttttctgctcacttttattattagttttaaaatatagaatgaataccaatatccctaactcctgtatctgtaccaaaacatttttggacaaggtcattggttggttaactatttttctttcatctccaaatatgtagaactttttttctgagtaatatttgaggaacagaactacaaattccactaagaacatgcttttcatataaattattctgatgaatccaacaactgctctctatctgccctgtgaccacctggctgcagccatcctcatctcctggctgtagccatcctcatctcccctctggaaaactgcaaaatcctttttttaatctgaggttctactttagtccattatcaaccattggtagcttaaagacaagtactgtccagacaaaatacattaaaacagctcgcacccttgcttggacatttcaatggtttctttttgtccttagatgaaa

SEQ ID NO: 893985 - DNA, 612 bp, Homo sapiens
ctcaaaagttgttcaggagtaagttgttcaatttccatgtgattgtgtggtttttagagagcttcttaatatttatttgtacttttatttctctgtagtctgagagtatgcttggtatagagtttgattttttgtttaacttattgaaactttatggccaagcatgtggtcaatcttagagtatgttccaggtgcaaatgagaagaatatacgttctgtggttgttgggtggagtattctgtygttgtgtattaggtccaattggtcaagttataatagacatttagagtttctgtgttagtgttctgcctcagtgatttgtttaacactgtaagtaggtagttgaaatccccccactattattgtgggacaatgtcttttcataggtctagaaatacttgttttatgaatctaggtgctccaatgttgggtgcatatatatttaggatagctgggtcttttagttgaattaaaccatttatcattatgtatgtccttctttgtcctgttatactgtttttggtttaaagtctgttttatctgatataataatagtgacccttgctcttttgtgttttccatttgcatcataaatcttcctctaacccttta

SEQ ID NO: 893986 - DNA, 612 bp, Homo sapiens
ctcaaaagttgttcaggagtaagttgttcaatttccatgtgattgtgtggtttttagagagcttcttaatatttatttgtacttttatttctctgtagtctgagagtatgcttggtatagagtttgattttttgtttaacttattgaaactttatggccaagcatgtggtcaatcttagagtatgttccaggtgcaaatgagaagaatatacgttctgtggttgttgggtggagtattctgtcgttgtgtattaggtccaattggtcaagttataatagacatttagagtttctgtgttagtgttctgcctcagtgatttgtttaacactgtaagtrggtagttgaaatccccccactattattgtgggacaatgtcttttcataggtctagaaatacttgttttatgaatctaggtgctccaatgttgggtgcatatatatttaggatagctgggtcttttagttgaattaaaccatttatcattatgtatgtccttctttgtcctgttatactgtttttggtttaaagtctgttttatctgatataataatagtgacccttgctcttttgtgttttccatttgcatcataaatcttcctctaacccttta

SEQ ID NO: 893987 - DNA, 609 bp, Homo sapiens
cacataggaacactttttgtttgtttttgtggcaagagaaactaaaatctaatcatttaggattaatcccatatagggtacaatttttgtttgttcagacgtttctacaatttgcacaggtaatagcttcatctgtttcaaagtcaactctaaaaagagtagacagttaatattttcctgttcatatctgcttccaaaccacctggtttccttccttcctggtgaattcaaattatccttttttttwaaaaaagtaaactttcagagatattttatgcagcaaggaaacaagcgtacatatttttctcctcttttaagaaaacagtattgttcacactgttctgcaccttggtttttaacttaatattcataggaaatcattccatatcaatacccaaaggacttcctcattctttttcataaacacactttatctatgtgagaatgtatcaaatctgtttcaccagatccctaaaaatgacatttagtatgcttccaattatttggaagacatatttgcttccattacaaataatggtacagtaaatagccacataaatagtcatttcccacatatcttagtatatttataagataaatttctggaag

SEQ ID NO: 893988 - DNA, 609 bp, Homo sapiens
cacataggaacactttttgtttgtttttgtggcaagagaaactaaaatctaatcatttaggattaatcccatatagggtacaatttttgtttgttcagacgtttctacaatttgcacaggtaatagcttcatctgtttcaaagtcaactctaaaaagagtagacagttaatattttcctgttcatatctgcttccaaaccacctggtttccttccttcctggtgaattcaaattatcctttttttttaaaaaagtaaactttcagagatattttatgcagcaaggaaacaagcgtacatatttttctcctcttttaagaaaacagtattkttcacactgttctgcaccttggtttttaacttaatattcataggaaatcattccatatcaatacccaaaggacttcctcattctttttcataaacacactttatctatgtgagaatgtatcaaatctgtttcaccagatccctaaaaatgacatttagtatgcttccaattatttggaagacatatttgcttccattacaaataatggtacagtaaatagccacataaatagtcatttcccacatatcttagtatatttataagataaatttctggaag

SEQ ID NO: 893989 - DNA, 634 bp, Homo sapiens
aggtccacagcacatcctgaggctatagttcaagatgaaaggaaacatatattaagtttgtctcaaaagttatatcttgagattgaggagaaaggagaaagaagataaaaagtttaaaaacatggtttgaagccaagctagctgtcctgttacaaaatgacaaaaggacacataagatacaatgaatactcctttttattcaataaagggaagagacaaagggaatctccaggataatgaacaaaagaaatagtacggcagctgtgcgcaggatatgtgatattgtccattaaaataagagcaggytatatatcctgggaaatgttttattggtaagataaaatttatataatacctaagtatctcaacacagtaaataaatttgatgcagttctttggagaatttggagttgaaatggtgacaaaaacatgcaaagataaacaaatgaaacaaaataagataattattaatgccacaaaaatatgtatttttaggaaaataaatatattagtagttttctacaaggttaaaatttaaatagtatttaaacacttattgtaacataagtctggaatatttatctaccataaattttataaaacttctttgaaaaggtgattaaattgaaagaat

SEQ ID NO: 893990 - DNA, 634 bp, Homo sapiens
aggtccacagcacatcctgaggctatagttcaagatgaaaggaaacatatattaagtttgtctcaaaagttatatcttgagattgaggagaaaggagaaagaagataaaaagtttaaaaacatggtttgaagccaagctagctgtcctgttacaaaatgacaaaaggacacataagatacaatgaatactcctttttattcaataaagggaagagacaaagggaatctccaggataatgaacaaaagaaatagtacggcagctgtgcgcaggatatgtgatattgtccattaaaataagagcaggctatatatcctgggaaaygttttattggtaagataaaatttatataatacctaagtatctcaacacagtaaataaatttgatgcagttctttggagaatttggagttgaaatggtgacaaaaacatgcaaagataaacaaatgaaacaaaataagataattattaatgccacaaaaatatgtatttttaggaaaataaatatattagtagttttctacaaggttaaaatttaaatagtatttaaacacttattgtaacataagtctggaatatttatctaccataaattttataaaacttctttgaaaaggtgattaaattgaaagaat

SEQ ID NO: 893991 - DNA, 694 bp, Homo sapiens
acacaatttcatgaaccccatcatagggctctttttaaaggagatttaaatctagatgtgggtcgagacttcaaacatttagcaaggcagacaagcgtgaattgttttgattcttctgcgaaacattgcagaaactggtgtgatctgttccccagtgtgttcccacaaagtcaccaatattcagaggctctgattccattagacaacaagcaatgctcacagaaatagaacttatgccttgtctgactgctcaagcacatggccgcaaaccttactgaagtcagccttgtcttgtgattgggtttctaacttcattccaagctctcacagagagtagaatattaaagatgaaagattaaagttgcacggtagaattcttttcaatataataaacattaaaaagtggtaatttacaaatgaaaaagcttccatgtctattggaagcatagtttacaattcaagcacatacagattgagcacatctaatgtgaaaaccygaaatccaaaactctccaaaatccaaaatactgagtgtcaacatgatgccacaagtgggaagttccacaaataaatatttaatacaaatttgcttcatgcacaaaattattaaaatgttgtgtaaaattagctttgtgctatgtgaataaagtgtatatgaaaaataacttaatttcatgtttaaccttgggtccta

SEQ ID NO: 893992 - DNA, 552 bp, Homo sapiens
aataagtctaaactgaatgcatgatttttttgctgtcatttctcctcatctgtccagcagtctaattttacctctgctgcaaagtaagattattgaaagcttttagctttttagtcacttagcaatagctttctgattgacttcttggatcctcatccccatgctttgtagaatttaccaatggcctagagtagtaaagcactcgaaattctaagaacgcttccctgggtcattcttctcctccaggactcctagccttcacattctgggtgtgctattacttctgaaaacaaatatttacctcctcccataatcatatctcaaactcaaagtttctgctttccactaagcctttatgccttatcytgagatttagggaaagcaatgtccaacataaaagagcagtataatctggccccctgcaatttgtttatgttctctctatcatcttgtagcctcaagttctatttacttggtgctctttgatactcagtaccagatgcttttggcacttcttcagttttatgaatgtgtttttctgactcatgttac

SEQ ID NO: 893993 - DNA, 642 bp, Homo sapiens
aaggtacagctcaggctgttgcttcagagggtgcaagccccaaaccttgccaggttccatgtggtgttgagcctgtgggtgcacagaagtcaagaattgaggattgggaaccaccatctaaatctctgaggatattggaaaaagctggatgtccaggcagaagtttgctctaggggtgttgtcctcatggagaacctctgctagagcattgcagaagggaaatgtgggtttcaagcccccacacagagtccccactggggcattgcctagtggagccatgagaagaggaccctcatcatccagaccccagaatggtaggtagatccccagcttgcaccgtgcacctggaaaagccatagacactcaacaccagcctttgagagcagccaagagggaggctgtacactacaaagtcacagggctggagctgctctagatcctgggaacccatcccttgtatcagtgtgacctggatatragacatggagtcaaagaagattattttggaactttaagatttgactgccctgctggattttggactttcatgggacctgtatctccttcattttggccaatttctctcatttggaatggctgtatttacccaatgcctgtaccccagttgtatctaggaagtaa

SEQ ID NO: 893994 - DNA, 619 bp, Homo sapiens
cttacatgcctaaatcattatgtacagtctttacaatttacattataaagtctcctaaactaggtaatcattatcatgatagcaatatataagattacaaggagcagatggcctaacatctttcagctttcattggaaatattttagcaaaaatatatagttaaaatttctcagttataagagattggttttccgaaaatttatgttaatattgataaaattcaatataaaatttactaattttatcatgaatagttttcagtaaatcacttcatgattttcagaaaacacagagtaccattgtctaaattattttatatgacttgaaggtttttgttttgktttaatataaacatttagaaggttttctctcagaaaaaaaaaatcaatatattcagggatatttaggcatcccaaatgctacatatcaaaatccaagtaataaagtggtggaaaattgtaaaaggttattttaacattttcttattttgtgtaacactcttttgactaaggacagctatagaatgcaaagttaagtgaaagtaaagatcaaataactagctcattttactcaagggaaaaacaaatatattatctcactattgtgatcacgcaagga

SEQ ID NO: 893995 - DNA, 575 bp, Homo sapiens
atcatcttaaatccaacaagtatctttataagagaagagaagacagacacaaatggaaaaaagccaagtgaagatgaaggcagattagagtgatcctgccacaagcctggagccattaggagatgaaagaagcaagaaagccttctcctctaaagccttcagaaacagtgtggtcctgtcaacacattcattacagactttggcctccagaattgtgaaagggtacacttctgttgttttaacccacaaaatttgtagtaattttttatagcatccccaggatactaatgtagagtgcaaagtrggggtatggcacgtgactataaggtgaaaagtggttgggtggggaggattctagctgaatcctctaaggctaaatcctctaaggttatttaaaagtaaataggcttttctaatgggtggatatttcatgatatttcatctgtggctgactgtttttatttttttttctgaaaatattttccaaacccagaggtgagacagagtttatatgcatgtcagagagaattctaggagcagaccccaggaacattctggaagtgcctgggagccca

SEQ ID NO: 893996 - DNA, 598 bp, Homo sapiens
tttatgtctaattttctctttgggttcatcattttcatgagcatgtaatgtgccaaatgtgaatacatctagtagatgcagtagaagatgctaacattctggatatattccccgaacagccttaagaattcaatcctttattactatatctcactatacttgcaatgttgtaaatagagaaaaaataaaatggacaagatyaaaactgtaaattattgcaactacctccccccaaaataagtgcttaaacatgataagaatatttcctttgtgttttagaaacaaatgttgcactataattcatacaatttgttctaagtctaaaagagtcccaaaatactaatatttagatatttaaaactgaaaatagatatacctatatcactgtaaaaatatagacactggactttgcaaatcatgaatcaacattgggaaacagtcattgtacacatcagtgaacatatgaaattcaaggaggacaaaagaacaaacccaatagtagggatcataattcaaatcaacaagtcaacaaagtctcacatcgccttttaaatttttatttacaaaaattttctcacttactaccttcagtttgctc

SEQ ID NO: 893997 - DNA, 602 bp, Homo sapiens
tgacagaggtttgctgatgcctgtcaactatgccattctgtttacatggttgcttagtacctgtattagtccattttcatactgctataaacaacttccaaagactgggtaatctgtaaaggaaagaggtttaattgactccctgcagggctggggagacatcagaaaacttacgatcatggtaaaaggggaagcaaacacatcctacttctcatggcggcaggaagggaaagaatgagtgctgagctaagggagagcacctgataaaaccatcagatctcatgagaacacactcactatcatgagaacagcaaggaggaaaaccactcccatgattcagttacctcccacaaggcctctcccatgacatgtggggattatgagaactacaattcaagatgagatttgggtggggacacagccaaagtgyattagtgcccactccaactctgaaaattgtgtatcatcccaattggtgttcttatctgaattgcagaattaaaaaaaaaaacaaaaacaaaaactctacagaaagagtggaattattaggttgagaacccaacatgtcctggaaatattctacacttataattaaattttgt

SEQ ID NO: 893998 - DNA, 623 bp, Homo sapiens
tacctcccatgatacgtggggattatgggagctacaattaaaaatgagatttgattggtgacacaaccaaaccatatcacatagcatccaaaacaattcctatttacccaatggtaagtatataacaattgtttattcagatttacttaactgattgcttaaaatattttgtcaatttatggaacatctacagaaatttgattgcttcagggatatagtcattaaytcactttacttgtgtacttttttataagttctgattatgcttaattttgttttcaaaaatgggtcttaaatgctaggtgtgtgaaagagttgaatttcataaaacatttctcagtgtcaatcttttaatattaattattttcctcaaactagtgtaataaaccttaataaactatttgtataaggaactttttttcattaaattttactgagtttaaaaaagcactttaaaggatttttttgaaagagtaacatagtacacctaaaaagttatttataatacaataaaataagatatccaggaaagctggaagaaaggaagtaactggaaatatgggaacaaatatctttgagcatcattttttttttaacctctgaactttttattggcctcctgc

SEQ ID NO: 893999 - DNA, 584 bp, Homo sapiens
gtcttttggatggtttgcatagagttgctgctgtccagggcattaccaagattgaagtcctcaccatcttccagcagggggtggtaggtggcgatctcagcctccagcttgaccttatgttcagcagcgcctcctactcctgggcctggtgctgcccctctgcccaggtctgtggcaactcggactccaggtgcatcagggtcccmttgggctgctccatttgcagggcatagcgggcctccacctccttcaggctgttctccaagctggccttcagatttctcatcgagtacaggtcgatctccaaggactgaactgtatgtctcatccccatgagtatcatctcagcagctccaacctcgatgaactgtgtggtgaccactgtggtactctcctcaatcagccgagactagtatttgtccagctcctctcggtttttccgagccagctcatcgtattgggcctggatgtctgccatgatcttggtgaggtcctgcaatttgagggcatctacttccacggtcaacccagagctggcaatctgggcttgtaggccttttacttccacttcgtggttcttcttc

SEQ ID NO: 894000 - DNA, 595 bp, Homo sapiens
ctgcctgtcgtagtgtgctcaagctggccataacaaaatatcaccgactggggtggcttaacaacagaaatgtatttcctctcggttctggagtctggaagttcaagagcaggatgccagcatagttgatttctggtggaggctctctttttgctgtgtcctcacatggtagagagaggaatctctctggtatttctctttataggggcattaatcccgttatgatagctccasccttatgacctgatctaacccttataacttcccaagagccccatcttcagataccatcacaaagtgtgtcacagcttcaacagataacatttgagggatcacaaacattcagtctctaccactgcctaatagtttaaataaaactagttaggattaatggaaataatagtgtaacctttgaagtgccatctgattccattttagtattactacttagtcattaatggatgcagaacacacacataccacacacacaaacacacatgcacacacacacacacacatatgtctgtatattagcttacaagcattattcatagagtagacttttctataggtcatcaagaagattggaactgtc

SEQ ID NO: 894001 - DNA, 662 bp, Homo sapiens
gatactgtagcttcagatcactgctgacccatagcatatattaaccaattggactcattttcttttggtgctccgatatgtggagtttgccctaatttcaatgttttctgttagaatattctatttttattaaagtaattttatatttcacacaaatattccagttatttcagattttttccccaccatagtagtcagatacaagtccaccagagtaggtgttggagataattctaatgacagraacattagaaaattcaaatatgcttttctcctctgttttctgagccaatatgattgtaccaaattgtcttgtataatctactttttttcttaaaattagttaatttcaaaaagattttcctttctaggattaaggacccaataaattgattgtcactaattatccaccaattctcatagttttgtttatcagtgacaaacttaatttatgctctattaaaacttctactatacaatctctctagggagagaaggatactgacatttaaatggcaggattacacaactgtaaaacatacataaggttaccaaactctccctaaaaattacacataaggagctttactaaatagtagggaaagattatgagtcacagcattttctctgaatgcattgtaacgtgaaccccaaatatctga

SEQ ID NO: 894002 - DNA, 645 bp, Homo sapiens
gtgggatattttggacaaatgcaatttaaagaagattatggcaggaataaagcatgttgactttaagctgtaactactcattgtttgtctgtgcagtacctaatgtcatgactcacatcccctcctcaaggactacagtttcgtttacagcctagtgtgactgcaatgaaattcagtctatgtcagcgaacctgtcaaattcaacatcatgtcctgtcattgtctccagagcaatgaggtgttactgtgattgatctgcatagttgccaaatacttgacatcattcagctatgccctgagctttgaatgagttcatggttatcaaacaacatatatgtatatatatgaaactatttaactggaaagtcttgtggcattaatattactaaatccattgtgatttgtgccaaatgtgtttaaaaagtgtaatctgtgatattgaatgggatatttgggstttaagttatatttcaaaattttgtatagctacagtgtactaactcatctttaggaaacaaagttctattttcactgccctatgataaaacttttaaaatttcatttcaaattgttaaaaagtggcaattataaaagcataaaaggttttacagaataatgtgtaatattaatatttctacatacaaa

SEQ ID NO: 894003 - DNA, 624 bp, Homo sapiens
catggtgaccattagagatatgcttgagcttaggaaagcagataattttcaagttaggtgtaccttccctactgtaaggcccttggatggggctgaaaaataaggtacttaaaattgttttcctgttcctgtggtccttcaaattggaagttgaaatcttcccaatttctgagtctgggaatgagacgacatatgtctttgaggggaaaaaaaaaaggacccattaatatttgggtactttttcagctatagcccaaaataattaaatattacgtatttggagtgaacagttttggcttcaaaaaccaaaaactattaaaatctagyatatgagaaaagttttgtttttttgttttttactttttgctgtcagatgccaaatcaaacttgttatctagaagagagggaaaaatctagaatagcaacaatatgttcaaatggaaaaaaaaaaaaaaaaaaaaaaaactctaccgaaatttagcaggcagaaaatagaagcaagaatggaggaatcagatagatacagccacactgctcctaaaggagaaaatctgatcaagaaatttatccccttgggcttgtatttttcaaaaggagaaatttcatgggtctgatattcatgaa

SEQ ID NO: 894004 - DNA, 614 bp, Homo sapiens
aaaaaaaaatagaataaatattacaaatgtaacacacaaaatatgacccaaactgcaattccaatctgctattttctaggtagattgctaggaaacaataattgatatattctcttgaaattacccaaatagagtcacgtgtaaatcttacagtttggttctttcaacacaaaccatgactctgaatcacaataatgagaaacagacaggggtttacttttcctacactggaaactttcttgggaaatgagtgagattgcattcttttttatcatgtttactcatttgatttactcattatttttacactcgacattaatgatgagacatttatgcacaytgaaaagtgtttgttgcactaatgaacaacttgaatattgaatgatgtagaaaatttaatttccaattttatggttaatcaagaacatttttgctgtaaattctacataaatttggaggtatatgtctgtacatccatatactcaaaatataattttaagtagataaattgtttcttgaatttgaatatgttttatcttataaactatattagatctaaattattgtgtcaaagtcccaaagacatactttttgattaagcatgttatttagtt

SEQ ID NO: 894005 - DNA, 642 bp, Homo sapiens
cataaataactcatgttaacattcattaggcacgcttgcatttttttcacattttttgctttgttttgttttgtttttttggagactgagtcttgctctgtcgcccaggctgaagtgcaatggcgcgatctcagcttactgcaatctccatcccagggttgaagcaattctcctatcttagcctcccaagtagctgggattacaggcacacaccaccatgcctggctaattgtttttatttatttatttwttttttttgagacagagtctcactctgtttcccagcctggagtgcagtggcgtgatctcggctcactgcaagctctgcctcccgggttcacgccattctcctgcctcagcctcccgagtagctgggactacaggcgcctgccaccactcctggctaattttttgtattttttttttagtagagatggggtttcaccgtgttagccaggatggtctcaatctcctgaccttgtaatctgtccgcctcagcctcccaaagtgctgggattacaggtttgagccaccgcgcccagccatgtttttctttaatcatattggtaagtaagcacagtaataaagagaatgaatttaaatattaattaggggaaatggatatcttagagaaaaaattat

SEQ ID NO: 894006 - DNA, 642 bp, Homo sapiens
cataaataactcatgttaacattcattaggcacgcttgcatttttttcacattttttgctttgttttgttttgtttttttggagactgagtcttgctctgtcgcccaggctgaagtgcaatggcgcgatctcagcttactgcaatctccatcccagggttgaagcaattctcctatcttagcctcccaagtagctgggattacaggcacacaccaccatgcctggctaattgtttttatttatttattttttttttttgagacagagtctcactctgtttcccagcctggagtgcagtggcgtgatctcggctcactgcaagctctgcctcccgggttcacgccattctcctgcctcagcctcccgagtagctgggactacaggcgcctgccaccactccyggctaattttttgtattttttttttagtagagatggggtttcaccgtgttagccaggatggtctcaatctcctgaccttgtaatctgtccgcctcagcctcccaaagtgctgggattacaggtttgagccaccgcgcccagccatgtttttctttaatcatattggtaagtaagcacagtaataaagagaatgaatttaaatattaattaggggaaatggatatcttagagaaaaaattat

SEQ ID NO: 894007 - DNA, 668 bp, Homo sapiens
agccatcagcttcacagaatttacttttcttcacatcgctgttttttttttttttttttaacactgcagcccctccctgcctggcctgtgcttcccaccaacgatgacctttctgcaacttcagtgccagtggaatcccagatctgyggctgcttctgagcactgctgactgcttctaggtcccaaaaccaccaatcagaagagccaaaccatgtcactcatcaaaggtagacccatagacagcccttctggaactgcagggtgactgcattcccacagaaggagcaccctccaggtccaggcctgcatgggaaatagagtcacaattcctctctatttagacattcctgaagatgaaaagaggtgcttgtctaatctgaatagctggaacactcgttcaagagtgtgtttgggaagtgagtaactttcctgggagctgagttggctccaatccttctatctgagaagatctcagtgtgtttcactgagagctcccccagccacctatgtcaaggctgggacctctgcccaccattgggtactgcattatgcacctgctttagccacagcaggtttttaccaggggcacctcctctttgggcctgaagcctgaggtattcaaccaagtaaataaaatactaggagaaaataaagaaagaaagaaatac

SEQ ID NO: 894008 - DNA, 668 bp, Homo sapiens
agccatcagcttcacagaatttacttttcttcacatcgctgttttttttttttttttttaacactgcagcccctccctgcctggcctgtgcttcccaccaacgatgacctttctgcaacttcagtgccagtggaatcccagatctgcggctgcttctgagcactgctgactgcttctaggtcccaaaaccaccaatcagaagagccaaaccatgtcactcatcaaaggtagacccatagacagcccttctggaactgcagggtgactgcattcccacagaaggagcaccctccaggtccaggcctgcatgggaaatagagtcacaattcctctctatttagacattcctgaagatgaaaagaggtgcttgtctaatctgaatagctggaacactcgttcaagagtgtgtttgggaagtgagtaactttcctgggagctgagttggctccaatccttctatctgakaagatctcagtgtgtttcactgagagctcccccagccacctatgtcaaggctgggacctctgcccaccattgggtactgcattatgcacctgctttagccacagcaggtttttaccaggggcacctcctctttgggcctgaagcctgaggtattcaaccaagtaaataaaatactaggagaaaataaagaaagaaagaaatac

SEQ ID NO: 894009 - DNA, 617 bp, Homo sapiens
tatggacaggaatgaagatcattgagattcagaaaaacattgagacccaatctaaggaagctacaaattatgataaaacaatacaggagccaaaagacaaaattgtcagtgtagaaaataatctaaccaactgaatagagctgaaaaatactctacaagaacttcacaatgcaatcacaaggattaacagcagaatagacaaagctgaggaaagagtctcagagcttgaagattggctttctaaaataagaaaataaaataaaaataaagagaaaagaaagaaaaggaatgaacaaaacctttgaaaaaatatgggattatgtagagarcaaatctatgactcattgccatccctgaaaaagatgaggagaatggaaccaactattttaggatatcaaccatgagaacttccacaacccagccatagaggctaacagtcaaattcaggaaatgcaaagaacccctgcaaaatacttcacaagaagatcatctccaagacacaatcataagattctccaggatcaaaattgaagaaagaatgttaaggaaaaatttaccagagagaaagggcaggtaacctgcaaagggaagcctgtcagactaataatggacctctc

SEQ ID NO: 894010 - DNA, 630 bp, Homo sapiens
agatattacataatggtaaaggttaattctacaagaaaactaactatcgtagctatgcatgcacttgacacaggtgcacccagattcataaagcatgttcttagagaccttcaaagagacttagactcccacacaataatagtgggagactttaacactccacagacagtattagacagataattgaggcagaaaattaagaaagatattgaggacctagactcaactttgggctaaatggatctgatagacatctacagaactctccaccccaaaacaacaaattatacatttttctcatctgaatatagcaagcacatactctgaaatcaaccacacaatgggatataaaacaatccacaggaacttttaaaggacacaattataccagccatgctctcaggccacagcacaataaaaataaaattcaatacaaagaaaagcactcgaaactatacatttacyggaatattaacctgctcttgaatgacttttgggcaaataatgaaattaaggccaaaatcaagttatttgaaactaataagaacaaagatacaacataacagaatctctgggacacagctaaggcagtcttaagatgtcaatttaatcactaaacactgacatcaa

SEQ ID NO: 894011 - DNA, 656 bp, Homo sapiens
tggcagcttccaattggtgttggtcctgtgggtgtgcagaagacaagaattgagttttgatcgcctctgcttagatttcagaggatgcatggaaacccctggatgtccaggcaaagtttgctgcaggggcagagccctcatggagaacctctcctgtggcagcgtggaaaggaagtgtggagttggagtctccacacagaattcccactgaggcactgcctagtgctgtcctccagacagcagaatggtagacctcctgaaacctcacactgtgcacctggaaaagccccagacactcaatgccatctggtgaaagctcccaggagagggtttgtaccctgccaagccacaggtgcagaactgtccaaggtcgtggaagcccagctcttgcgatcagcatgatctggatgtgagacatagcatcaaaggagatcattttggaactttaaggttcaattactgccctatgagatttcagacgtgcatrggccctctagactctttgttttggccaatttctcccaaaaataaacagtcatatttacccaatacctgtatggccgttgtatcttggaaggaactcacttgtgtttgattttacaggctcataggcaggagggactagccttgtctcagatgagattttaaacttggac

SEQ ID NO: 894012 - DNA, 560 bp, Homo sapiens
atttatttctaactgattatgcttctatgattttttcgctatctaaatttatgtctttcaataatttgaggtgtatgggtcatcaccttttaacatattttctctgtatgttttatttatccttttcttttgggtctctagttacatctatgttaagtatttttatattgcctcacaagttcctgatactttgttcattattatttctaatcttacttctttttgtacatcagattagataactattttattgatctgtattcattctcacttatttttctgtcctcctaatsttctgctagggtcacttggtgatttttttttttttttctataattttctgtactgtgtctttcagttgtttaacttctgcttttcttttgtaacaatttttttttttttgtctttgagcatactttctggcgtactgattctaacaccaaagtcaccactgggttggccttcattttcattttccttgagtatgggtcacacttgctgttactttatatgcatagaaattggtatcctgtcttagatattatgaatagtaaagtttg

SEQ ID NO: 894013 - DNA, 560 bp, Homo sapiens
atttatttctaactgattatgcttctatgattttttcgctatctaaatttatgtctttcaataatttgaggtgtatgggtcatcaccttttaacatattttctctgtatgttttatttatccttttcttttgggtctctagttacatctatgttaagtatttttatattgcctcacaagttcctgatactttgttcattattatttctaatcttacttctttttgtacatcagattagataactattttattgatctgtattcattctcacttatttttctgtcctcctaatcttctgctagggtcacttggtgattttttttttttttkctataattttctgtactgtgtctttcagttgtttaacttctgcttttcttttgtaacaatttttttttttttgtctttgagcatactttctggcgtactgattctaacaccaaagtcaccactgggttggccttcattttcattttccttgagtatgggtcacacttgctgttactttatatgcatagaaattggtatcctgtcttagatattatgaatagtaaagtttg

SEQ ID NO: 894014 - DNA, 689 bp, Homo sapiens
aatcagggaaatgtaaatcaaaaccatagtgagatagcatcttacatttgttgggatggctattattaaaaatcaaaagataacaagtgctggtgaggatgtggtgaatagggaacacttacacactgttggtgagaatgtaaattctatagctgttattgaaaacaatatggaggtccctagaaaagttaaaaatagaactgacatatgatcaaacaatctcacttttggatatatagccaaaggatttgaaatttggcacttccattttcattgcagcattattcgtaatagtcagatatggaacaagctaaatgttaccaatggatgagtgaataaattgtgtgtgtgtgtgtgtgtgtgtgtgtgtgtaatctggccttagaaaagaaagaaatccttccatttgtgagaacatgaatggatctggaggatattaagtgaaataagccagacacagaaagacaaatagctgtactgtatgatctcactatgtggaatctaaactcttaaattttttwccattttatttatgtatttatccatctcagcaatatttttttaagttacataattttattttttataatttcaaattttattttagattcaggggtacacatgcaggtttgaaacatgggtatattgggtgatgctgaggtttggggtatgattgattccatcaccca

SEQ ID NO: 894015 - DNA, 684 bp, Homo sapiens
actctgacatccacgtgtgaaaaaatagtacgacaaaactatatggcattaacagacaaaagtacttaacaaaatattaccaaattaaatctcccagtatataaagtcttagcccataatgaataaatgagatttgtcctaggtctgcaaagttagtattacattggaaaaaaatcaaagtagctcatcagattaatagaataaaggagaataaacatttgataatttcagtagatacaggaaaaacatctgacaaattccaatatccattcrtggtaaaaactcttagcacactcagaattatagggaacattttcaactaatcacgaaaagctgaatgctttccccttagtgacacaacaagaatgttcactgtcaccctcattttccacattgtgctgaagatccatacagtacagtagtctcagaaaaggagtattcaatgatttgaaaggaaagagcaaaattctgttctcacagacatcacttgcataggaaatcctgacattgcttagtgagtcatcttcactatgattaagaagtgaattcagcaacattccaaaatgcaatgttagagcaatatagaaattatagaagaagttagcaaaatgcattcaagaccaaaccaccaaacattgctgagagaaattgaagaagtccaaatacatggaagtttataccatt

SEQ ID NO: 894016 - DNA, 691 bp, Homo sapiens
ttggaggtttctaatgttatattttgactgggtcattattcgctgtgcatttggctggtttgttagatggtttgggggtagctagtaaatagcctttttttaaaactaggattttttttacaaaatatattggatttcttatattgctttcctactctttcgtgaaaaaataaaacagatcttttcttcttttttcttctgacattgtttttcagtttttgctccttttcttcaagattcaagtttatgcttttctttcattttgccacctatttgtattaaatgactcatttgtttcccttaaacttataagtaatagttatgtaattttatttattaagctcattatgtgatttttgtgtagacattcagtccttctactcagggaacacaaaatataagaaaacgattcagatgcttgccatgaagtattacgtgtgtagagacttggacatattatcaggaaaagacctctaattctccatattttcaatgttttcctacttatttrgaagaataaacagatatgaatctaataacacacagatatacacatccaatgaaaattaccgatactttttttataaatggtagcttatttttatgaaaaatttatgtgtgctcggagagcctgataatatggaaataaaatactgtgctctgaagggtttttcttgaagacaaacctttt

SEQ ID NO: 894017 - DNA, 694 bp, Homo sapiens
ccccagtcagtggcaacagctcccactgcaatctctgacctgaagagaaaagcaaccccagagctcttcacggattcctgaggaaaaccggcaatgtcttgcaaggtaactacctcaagggaggtcattacaggttcttcaggcaaagcagagttaacctcctcagaggtggaagaactgcttctactggcaaaaaagagtgagtcaaatttaggagtttaacatccccagcttcatcaggatgttcccatatggccctattccaaatgtgcagatcccattccttcccaatcaatgccctcattttaatagcagaccaaggtgagaagggaattcagttagcactgtaattcagccacctacaggataagactctggatttggttttcaccaacctcagctctgtagctacaagagatacgggtttctttagggcagacacagaaacttttcaggtcacytatgtggagcttcaatcgggaatttgaagccttaagctccccctttttttccctttttttttttttttttgagacagtctcactctgtcactcaggttggagtgcagtggtgcaatctcggctcactgcaacctccgcctcctgggttcaagcgattctcctgcctcagcctcctgagtagctgggatcatccttttcttttctcactttacccagtacagttaaaagcaacc

SEQ ID NO: 894018 - DNA, 557 bp, Homo sapiens
tgttaaaggatctactcaaatatctggttatacttgattgtctgctcgtgtttaaaagtgggggtctaaatagctgatctgtagtctcagcatatgagtggagctgattgaacatgagctttactttagggtgctctgcttgggcccacgtcagtatgtttaaggcttttcttttggattggtcagatgccccaaagaaggctctttcatctctgatctgaaggtaaaggyctgactgccagtgttctgtgtgttgagtggagaaatttggctggagggtctcagaatttacgacgtacaggattacaaaatccccgtgtgtctgtatgatactcatccttcagttaggcctggtatcctctagagtagaccagaccccctctatcttgccctctctgtagtatgaacctcttgttttcaccagagtgggaggacagtcacccagtggggtgaagcagagaagaggatctaggatctgtttcctcagaagctttcaacaaatcctgttgtctgtcccattttcagaggtacctggtgccagttcctgagacttgagg

SEQ ID NO: 894019 - DNA, 619 bp, Homo sapiens
tgagaggctgtttcctcacagttctcatccactcacaagtgaccgcacgttttgtttttgttatttgccgaaatgttcttggctattccactcacctaaacggtcacggtagcaaaacacccagagtccggatcttcgcctaggccaaccccgcctcctcagratacgcgagctagagctccgcccacgttagtcagtcctccctgcgcggcgagaaaaatggcgcccccacgtcgcgtctcctcccaccgctcgccttcttcccggaagctaagttgtatcgcgagatttcggcctgactattacttgggccacggaaatagccaacccttttcttccgcacggttggaggaggtcggctggttatcgggagttggagggctgaggtcgggagggtggtgtgtacagagctctaggacaccaggccagtcgcgggttttgggccgaggcctgggttacaagcagcaagtgcgcggttggggccactgcgaggccgttttaggtaggttgctaagagggcgaggccgtccgggcctggcgggcgggggaggcgttgcatatctggggtttcccggggccccttcgttggtccggaggatcgagactccggagtcggtcc

SEQ ID NO: 894020 - DNA, 627 bp, Homo sapiens
tcgtataaaatttcagggctaagaataaaaaccttgttttgggtttctttggaaaccaggtcagaaatgtcataggtaagtaaccaaatgctgccagtactgaaaggaagcaatcccacttgcagatttcagctgctgagtacctgctagaagagacaggctccaggttctaggcctattatattactgcttcaaactacagaggaaaagcaatttggacacaggatggggaacaacacatactggggtcggggcgagggagagcattaggataaatagttgatgaatgtggggcttaatccctaggtgatgggttgacaggtgcagcaaaccaccatggcacgtgtttacctatataacaaacctgcacgtcttgcacatstatctcagaacttaaaattaaattaaaagcaaaacaaccaacaaaaaaaggaattaaaattatatatttaatactttggaaaatgtgtgagcattcttaattgcaaaaggaagtgctgcttcctccttggttattgcaacttttttttttttttggaaacggagtcttgctgtgttgccagcctggagtgcagtggcacaatctctgctcattgcaacctctgcctcccatgttcaagcaattct

SEQ ID NO: 894021 - DNA, 637 bp, Homo sapiens
gaaacacttttctatcaagaaaatgccctagggagataaattgagaatctcttaattgctcttaatccaggaaatcacgagaaatattctactaaaattaaatataaacttgatgctgtttctcttgttttaaatgaaaaacaaaccataattctacataaaatttaaattgcccatggaaataaggcccatcagcttctctgaggcaacaatcttttcttgaaaattagatccaaaaaaattttttagagatatgtagaggcgtaaagtatacagaaatatatcattcaatccatttaaacttcatctgtttttccaaagtaggttagaatatatttgtcagccagccaatgatgaagaaaatatgtcctacagctacaataaggatatgttttgactagaccatcttgtttttttkgagatgcgagacagtatgcttttcttatacaccatctttttaaatgattggtgagtagctaagactgtgaattctggctgactgggaccagtggtatgcaattttagcatgtgtattatatattttctgtgtgtaagactaattctaaatttgatgcaccaaaatacctgcttccaattttgcctttaatttattagaatgtgtaagagagtggctgtc

SEQ ID NO: 894022 - DNA, 525 bp, Homo sapiens
tcagaagatctgatggtttttatgagagggttccccttcacttggtattcattcgctcccctgccaccaggtgaaaaaggatgtgcttgcttcttcctctgccatgattgtaagtttcctgaggcctccctagccatgctaatctgtgagttaattaaacctctctcctttataaattacccagtctcrggtatgtctttattcgcagtgtgagaatggattaatacagtaaattgataccaggtagtggagtgctgcttcaaagataaccaaaaatatggaagtggctttggaaccgggtaacaggcagaggatggagcagtttggagggctcagaaaagaggaaaatgtgggaaaggttggaatttcctagagacttgttgaatgtatttgaccaaaatgctgatagtaatatggacaataaagtccaggctgaagtggtctcagatgaagatgaagaacttcttgggaactggagcaaattgttgttatgtgttagcaaagagactggaggcattttgccct

SEQ ID NO: 894023 - DNA, 515 bp, Homo sapiens
agcatctgagaaagcccagaaccagacagcaggaggttggtgtgtgctctctctctctatctctgtctctctctgtgtgtgtgtttgtgtatatatatataaaacacaattgtgtgtgtgcaattgtgtgttatggagagcaagcatattgacatgttgatactaatacagcccccatgcaggagatgagaggacagggtgagggccatgcaggctgacagatttgttttcttgaaaagyggtgaaaatgactgctctgctgaagggactgtgggttgtggggatcgttgccagttggagagcattatccaaaagatgggacagtgtgtgtgagtgagaaagaggtatctgtgaaggaagagtgtaagagaacttgctggagtttgaggagtccataatcacagatttgggaagctagagaattggagagaagagaaaagagaaaaggagattctaataatattgccatgacctgtgtattcagatcctcttttaagattcatcaagaaataaaa

SEQ ID NO: 894024 - DNA, 601 bp, Homo sapiens
ctcactgcaatctctgcctcccgggtttaagtgatattcctgcctcagcccccctgagtagctgggattacaggtgcccgccaccacacccagctaattttttttgtatttttagtagagacaggtttgaccatgttggtcaggctggtctcaacctcctgacctcaagtgatccgcctgcctcagccacccaaaatgctgggattacagacgtgagacactgtgcctggccaaaaagtttacttttttaaaaaggatcttgggagttatcaagcaaactgcctattttttcccatctttggctggtattaaatattccaacacaatattaatggagcaatcactgataacactttcctggatgacaatctgactcaactaatcaaaagctattagaatgtacaaaccttgaccaagaaattcgatatctaggagcttttcctaaagaaataatcaaagatacmtacaaaaatctgcaaatgatgtaggttttcacagttgtttataacagtgaaaagttgaaaaaaacttaaaaattggaaataagtggaggactagttagtataatactgagaagacagaatacaatgcagtcataaga

SEQ ID NO: 894025 - DNA, 692 bp, Homo sapiens
tgcttgggattgtcttggctatacgggttcttttttggttccatatgaaatttaaagtagtttttttctaattctgtgaagaaagtcaatggtaacttgatggggatagcattgaatctataattactttgggcagtatggccattttcatgatattgattcttcctatccacgagcatggaatgtttttccatttgtttgtgtcctctcttatttccttgaacggtgatttgtagttctccctgaamaggtccttcacatcccttgtaagttggattcctaggtattttattctctttgtagcaattgtgaatgggagttcactcatgatttggctcgctgtttgtctattattggtgtataggaatgcttgtgatttttgcacattgattttgtatcttgagatgttgctgaagttgcttttcagcttaagaagattttgggccgagacaattgtaaatatacaatcatgtcatctacaaacagagacaatttgacttcctctcttcctaactgaattcccagggaatcaaccaaaaaaggatacatttcaaaattatttagcaaacagtggtcgaacataaaattaacatttatttaacacttacagagtgccagacactatgttttaccttgtttctaattcttagactttactttttacagattagggaattgaaagtcagagaggg

SEQ ID NO: 894026 - DNA, 660 bp, Homo sapiens
cccttctctcaaaaggtttagagtgtacttcagacaattaacgcactaaaaaagactgttctggtgtgaaacccttgatataggacatatccattacaaggaataggtcatagaagcctttgtagagaaaatagtgttgaacattaacagtatttattgaaagcaatgttggtagttatattagtcctgttgtaacgaaattatcacaaacttaatgtcttaaaacatcacaaattatcttattgttctgtaggtcagaagtctgaaatgagttttaccaagccagaattaaggaattggcagagctgcattacttctggaagctccagggraaaatccatttgcttcccctttccaacttcttcttttttttttttttttttaacttttaagttgaaaggtacacgtgcaggtttgctatataggtaaactcatatcatgggggatttgttgtacagattattttcttgaccatgtattaggcctagtacccattagttatttttccagatcctctccctcttcccaccttctaccctccagtaggccccagtgtttggtgttcccatctatgtttccatgtgttttgatcttttggctcccacttaaaagtgagaacatgcagtatttgattttctgttcctgcattagtttgttaag

SEQ ID NO: 894027 - DNA, 678 bp, Homo sapiens
acagatgcaactccatttgaaaagtaactactggactagttaactcatagagatgaatgatgttcattttgtcctttcacacaccacactgactgattctcagctggaagcccagtgtgcaagaagaacaagaaatagtggcactaatgccatttttagtcttatagaaatataggaatatagaatgcagggttttattttatttagtagacagtccagtggtctgtttattctacaacactgactcaaagaaagggactayatagtggcctttatgtatattagcatatcagtcagggccccagcaggaacttaatgccacactcagtgggagacttcttaacaaagttgtgggcaatcttaaggaaaccactaagggatggtgaagccctagggactagcaatggtgggaaccactaacactgtcaatcttgatggagcaagggaagggatggaacctagggaaagctttaacagtgggaagggcccactgtgggatctcttgccttaggtgggagaataagccactgccaaatcacagatcagcagagagcaaaccaagagaatgaataaaccagactttctctcctctcccactctggtcacctgccatcgtttaccattggccaaacccaactggaaactagagtgcaggggaatgatttgatgcagtacaga

SEQ ID NO: 894028 - DNA, 528 bp, Homo sapiens
ccagaggatccctcacgtaactgtgtgtccacaacacacagttatgtgaggagcttcattaaggacattagatatttctccagcttcacctgagatgttcaaatatttgtcacttgaaatggaaaatcaagtgtgtgcgtgagtgtgcaggagctcgccttgaaggcaccttccctcaytggcctggagaccttgggccaggagagatctggaaggaattgttcttggactggctcaggagctgagggtcactcaaacctgagaatgtttgaaaggtgaaatcgcccatctgctgtaggagggcacccattgttctgcctggacagtttctgggaggaaacagtttcctctgactttcctcagcctggatcaaggcactgagattggtgattcccactctcatactggaaagcagagtctgaggccccgctgatctctactttttctctccccaagtcaggagccaggccagaggctttgtaagcttcactgagttcacatgctctggaggggtcagcggtggaggcc

SEQ ID NO: 894029 - DNA, 590 bp, Homo sapiens
aaaggcctctctggtgagaggtgcacacgtcagagatgctggaagtcagggcacagggtgcttgaacacagtgccagtgcctcgctgtctgaccaaggtcttcagacacctctgagcccgggctgcctcctcctgcacctgggtcatccctccgctattctccttccacccagggggtgcaaagctggtaggctagcagaacgctgaccactagcagcacgtgccgatcggatcaggctgtggtagggaggtagaagttggtagctcagtgttctggggacggctgggccaccccagccccgtgctcccatgccatcagttcatggcctcacatctgtcctgtggccaaggctgaggggcacccactgactgggcaggcacacacttgttctctagcagttctctaaagttggagatctcagtcaccagggtctttgggtttwcagccctcactcaacatgtgatttcgttgtggtcgctgtttggtttcccagagagggcaggaagagctgtgggcttcccagctgctgctcactaacttgcgctgctgctgtgtgcattagatgggcatagagttgcacttcaggcga

SEQ ID NO: 894030 - DNA, 687 bp, Homo sapiens
tacagatgaggaaattgttggttagtaaaatgaagaaacctgccgaaagataacttcaaacagcaggtttgggatttgaacacaagcactttgactccagaaaccatgtaattaccccttctttatacctttttgctgtagaattattccaatcaccgaaacattcacattactgttattgagaactgtaggaggccaagtgttgcgttatacaaagaaaatgcaggcattaaaagaaacaacctatatcctgaagactygtagagttttagagctacatgatggttgttctttcgttcctccattggatccttcaacatttttgaacatctattattttaaaggccttgagctgggtgccagggatataaagatgaaagaacagaattcatatcttgatgagctcctaatctagtacaaggaagggagttacaatgcatggaacaaatagaatgcaggaaccagcatggccgcatctccagccccagtccaccccatggggacatggcaaacttgtctttctgaggtcagatacagcttcagaaatctttcaacacgaagctccagttgatatagtgtactactacctaagctatataatatagcctattcctcctaggctataaaactgtaagcatgttaccatactaaatcccactaattaattggattcagtatttgaaatgg

SEQ ID NO: 894031 - DNA, 589 bp, Homo sapiens
gtagcttttgaatttgtttgctcttgcttccctagttattttgtgatgttagggtgttgatttgaggtctttccagctttccggtgtgggcatttagtgctataaatttccctcttaacaccactttagctgtgtcccagagattctggtacattgtctctctgttctcattggtttcaaagaacttatttatttctgccttcatttcgttattttcccagtagtcattcaggagcaggttaatcaatttccatgtagttgtgtgattttgagtgagtttcttaatcctgagttctaatttgattgcactgtggtctgagagactgttggttatgrtttcagttcttttgcatttgctgaagagtgttttacttccaattatgtggtcaattttacaataagtatgatgtggtgctgagaagaatgtgtattctgttgatttgtggtgcagagttctgtagaggtctattaggtccccttgatccagagccgagttcaagtcttgaatatccttgttaattttttgtctcgttgatctgtctaatattgacagtggggttttaaaatctcccactattattgtgtggga

SEQ ID NO: 894032 - DNA, 653 bp, Homo sapiens
ataaatatcatttgacccagtaatcccattactgggtatatacccaaaggattataaatcattctactataaagacacatgcacacatatgtttattgcagcaatattcacaatagcaaagacttgtaaccaacccaaatgcccatcaatgatagaatggataaagaaaatgtgacatatatacaccatggaatactatgcagtgataaaaagggatgagttcatgtccttggcagggacatggatgaagctggaaaccatcattstcagcaaactaacagaagatcagaaaaccaaacaccgcatgttctcactcataagtgggagttgaacaatgagaacacatggacacagggaggggagcatcacacaccggggcctgtcgggggttggggacaaggggagggatagcattaggagaattacctaatgtagctgatgggttgatgggtgcagcaaaacaccatggcacatgtatacctatgtaaaaaacctgcacgttctgcacatgtaccccagaatttaaagtatcattaacaacaacacaacaacaaaaggaatgattctcaggttgctggtttgcacatctggatgactactgaattcattctctgaaatcagatcaagatttaaattactgagtaagatatccc

SEQ ID NO: 894033 - DNA, 653 bp, Homo sapiens
ataaatatcatttgacccagtaatcccattactgggtatatacccaaaggattataaatcattctactataaagacacatgcacacatatgtttattgcagcaatattcacaatagcaaagacttgtaaccaacccaaatgcccatcaatgatagaatggataaagaaaatgtgacatatatacaccatggaatactatgcagtgataaaaagggatgagttcatgtccttggcagggacatggatgaagctggaaaccatcattctcagcaaactaacagaagatcagaaaaccaaacaccgcatgttctcactcataagtgggagttgaacaatgagaacacatggacacagggaggggagcatcacacaccggggcctgtcgggggtkggggacaaggggagggatagcattaggagaattacctaatgtagctgatgggttgatgggtgcagcaaaacaccatggcacatgtatacctatgtaaaaaacctgcacgttctgcacatgtaccccagaatttaaagtatcattaacaacaacacaacaacaaaaggaatgattctcaggttgctggtttgcacatctggatgactactgaattcattctctgaaatcagatcaagatttaaattactgagtaagatatccc

SEQ ID NO: 894034 - DNA, 637 bp, Homo sapiens
tttgtttgcaaatgacataaacttatatgtagaaaaccctaaaggttccacaaaaattagttaaaactattttaaaaaactgatgaagttgcaggataaaaaatcaaaaaccaaaatcagtttcatttatatacattaaaataaacaatccaaaaaagaaattaggaaaatgattccatttccagtagaatacaaacaaaacaaaatacttaggagtaaatgcaactagaaggtgaaagacatacactgaaaactctaagacattgatgaaagaaatttaagaggatacatataaatggaaagatacttcatgttcatggattagaagatttaatattactaaaatgtccatgtattcaaaatgatctacaaattcaatgcgatccctaccaaaatttcaatgacatttattgcagatatagaaaaaaaaaaaaaaactcttaaaatttgtatgaaaccamaaagcaccctgaatagccaaaacaatcttgaaaaaggaagaacaaagctggacggcttatacttcctgactttaaaacatattacaaaaagctacagaaattcaaaacagtatgatacgggcataaagacagacacgtaaatccgtaaaccttggcatattttaataaaatgatct

SEQ ID NO: 894035 - DNA, 551 bp, Homo sapiens
gtaaattaactttgatgtttgatttggtttgctagtgttttgttgagaatttttgtgtctgtgtttatcagagatattgtcctatagttttcctttctcatggtatctcttacaggttttggtatcagggtgatactggcttcagaaaacgagttagggaggagtctttccttctcgattttttgaaatagtttcagtagaattggtaccagctctactttgtgcatctggtagaatttagctgtgaatctctctggccagggctttctttttggttggtaagttttttattactaattccatttggaacccaatattggtctgytcagtgctttagttttttcctgatttaaacttgggacattgtgtgttttcaggaatttattcatttcctctagatattgtagtttgtgtgtgtagaggtgttcacaatagttatctaaggatctttcatatttctgtgggatcagttgtgatgtcacctttgtcatttctgtttgtgtttatttggatcttctctctttttttctttgttaatgtagctagcagtc

SEQ ID NO: 894036 - DNA, 622 bp, Homo sapiens
aaattgtaatccccatgtgttgagggaaggacctggcaggaggtgattggatcataggagtggagaagaaatttctaagcagcaaagtgttcaagatgtggtctgggtgctcctaacagtatacagctatatgctctgagtgctcctaacagtatacagctatakgcagtcacaaagagttggtatgaaatatgtctaaaggggaagtagagcataaaagtttgggaaatttgcagcctaaccatgtggtagaaaagaaaaacccattttctggggagaaattcaagtcagccacatacatttgcataagtaatgagacactgaatgttaattgccaatacaatgggaaaagtatctccagggtgtcttcacagcagcccctcccattataggcccagaggcctaggaaggaaaaatggtttcttgggctgggcccagggccccccattaccgtgtgcagcctagggacttggtacctcatgttccagccactccagctccagccatggctaaaaggggccaaggtacagctcaagtgattgcttcacagggtgcaagccccaagcattggcagcttccatgtggtgttgggcctgcaggtgcacagaagagaagagttgag

SEQ ID NO: 894037 - DNA, 622 bp, Homo sapiens
aaattgtaatccccatgtgttgagggaaggacctggcaggaggtgattggatcataggagtggagaagaaatttctaagcagcaaagtgttcaagatgtggtctgggtgctcctaacagtatacagctatatgctctgagtgctcctaacagtatacagctatatgcagkcacaaagagttggtatgaaatatgtctaaaggggaagtagagcataaaagtttgggaaatttgcagcctaaccatgtggtagaaaagaaaaacccattttctggggagaaattcaagtcagccacatacatttgcataagtaatgagacactgaatgttaattgccaatacaatgggaaaagtatctccagggtgtcttcacagcagcccctcccattataggcccagaggcctaggaaggaaaaatggtttcttgggctgggcccagggccccccattaccgtgtgcagcctagggacttggtacctcatgttccagccactccagctccagccatggctaaaaggggccaaggtacagctcaagtgattgcttcacagggtgcaagccccaagcattggcagcttccatgtggtgttgggcctgcaggtgcacagaagagaagagttgag

SEQ ID NO: 894038 - DNA, 622 bp, Homo sapiens
aaattgtaatccccatgtgttgagggaaggacctggcaggaggtgattggatcataggagtggagaagaaatttctaagcagcaaagtgttcaagatgtggtctgggtgctcctaacagtatacagctatatgctctgagtgctcctaacagtatacagctatatgcagtcacaaagagttggtatgaaatatgtctaaaggggaagtagagcataaaagtttgggaaatttgcagcctaaccatgtggtagaaaagaaaaacccattttctggggagaaattcaagtcagccacatacatttgcataagtaatgagacactgaatgttaattgccaatacaatgggaaaagtatctccagggtgtcttcacagcagcccctcccattataggcccagaggcctargaaggaaaaatggtttcttgggctgggcccagggccccccattaccgtgtgcagcctagggacttggtacctcatgttccagccactccagctccagccatggctaaaaggggccaaggtacagctcaagtgattgcttcacagggtgcaagccccaagcattggcagcttccatgtggtgttgggcctgcaggtgcacagaagagaagagttgag

SEQ ID NO: 894039 - DNA, 342 bp, Homo sapiens
atgcatttgtttttggaatgtaggttggcgtaaataccacaatctaacagcgccaaagtaggctttttcgcacacagtaggaaatcatcaagactgaagcgcaatgaacaaaatcacatagaatgaatacagtgcatttaytgggatgcagatagaaatagtttgaattcatatgtttatgtatacgtgtatgtgaatattctgtgtgggcaggaaaataatgccttctgaagtggtaatgtaatttggtcacatacctagttataaatatttatcataaaccttgataaatataaggtaggttcaaaataaactctgaaattttcaaaaagcacacagctt

SEQ ID NO: 894040 - DNA, 571 bp, Homo sapiens
tcttcctggtttactcttgggagggtgtatgtgtccaggaatttacccattctctgatggtagtttgtttttctgtggaatcagtggtgatatcccctttatcatttattattgtgtctatttgattcttctctcatttcttgtttattagtctagctagtggtctatgtatcttgttaatcttttcaaaaaaccagctgctggattcactgatttttttgaaggagttttcgtgtctctgtcttcttcatttgtgctctgacctttgttatttcttctcttctgctagcttttgaatttgtttgctcctgcttctctagttcttttaatkgtgatgttagggtgttgatttcagatttttccagctttctgatgtgggcatttagtgttataaatttccctcttaacactgctttagctatgtcccagagattctggtatgttgtgtctttgttctcattggtttcaaaacacttctttatttgtcccttaattttgttatttacccagtaatcattcaggagcaggttattcaatttccatgtagttgtgcgagttagagtgattttct

SEQ ID NO: 894041 - DNA, 586 bp, Homo sapiens
gttgtttgcttttctcttataaatttaagttccttatagatgctggatattagacctttgttggatgcataatttgcaaaaattttctcccattctttacactgtctgtttactctgttgatagtttcttttgctgtgcagaarctcttttttaaaattggatcccatttgtcaattttagttcttgttgcaattgtttttgtcatctttctcatgaaatctttgtatgttcctatgtccagaatggtattgcctgggttgtcttccagggtttttatagttttgggttttatgtttaggtctttaatccagggattatacagaaataatccataaatttttgtacatggtaaaaaaggggtccagttttaattttctgtatatggctagccagttaccccagcactatgtattgaatagggaatcctttttctattgcttgtttttgtcaggtttgtagaaaatcagatagttgtagatgtgtagtcttatttctgggttctctattgtttcattggtctatgtgtctgttcttgtaccagtaccatgctgttttggtccctatagccctgtagtatagtttgaa

SEQ ID NO: 894042 - DNA, 644 bp, Homo sapiens
gactattacaattagtagtaacaaaagtagactttagttacaatttccattctcatcgactacacatgtaactctctcccaccattgaactctgccacccgagttcaagcaattctcatgtctcaggctcccacgaagctggaattacagtcatgtgccaccacgcctggctaattttggtatttttagtagagatggggtttcgccatgttggccaggatgatttcaaattcccatctcaacagaaaagaaccatttttaatgttcagccaggcagagatcttatgaattcaaggacagrtccaatttgtttggccttcaaggtctttgttgtgagacaggggcagaaaagaagcctcttgaaaaagaccacgaccacttcaagatttaggttcttgtgaatggtacatgttacacttccaaagagacaaaaaataacaaagctgtagagggcttgtttatttttttaatgtaatcttttttttcttttttgagacgatgtctctctctgttgccccggctggagtgtggtggcacgatctcagcttgaattgatctccgatttcttgaactctgccactggagttcaagcaattctaatgtctcagactccaatgaagctggaattacaggtatgcgccaac

SEQ ID NO: 894043 - DNA, 632 bp, Homo sapiens
tccagattacaatttttgataaccagctcaaatttccttgctaccttggacattaatgatcatagatttaaaactatgaataactacaatgagaatgctcgtacgatctctgtacaatctgtattggttatctaattttttttttttgagatagtgtctcgctctgtcacccagggtggggtacagtggcccatttttggctcactgcaaccttcgcctcccagattcaagtgagtctcctgcctcggcctcccaagtagctgggactacaggtatccgccaccacgcccagctaatttttgtattttttagtagagaccgggtttcaccatgttgctcargctggtcttgaacttgtgacctcaaatgatccacccacctcagcctcccaaagtgctgggattacaggtgtgaaccaccatgcctggccatggttattattctgaataatgaattacctcaaaattaattaacatttattaccacatatgctttctaagagtcaggaatcagagagcaacttagctgggtggttctggtacaggtctctcctgaggtagcagtcaagctgtatgctggggctatcatctgaagcatgaatagagatggaagatctgcttccaaaggctgtt

SEQ ID NO: 894044 - DNA, 551 bp, Homo sapiens
gaggtttcacatgagcatgttcttgaggtaccatttaagctttctttgtgataaagacaggcatttaactatttccacccaaaatatctcctaggctaagataatgccgtacatatgtgtgatagagagtattaggccttcattgaagtatatttttggaaaataaatataaatcacaaagtgctttgtgaaaaactattgaatatgcctgtaggtattgcatttaacttccatatgaaatgaggtgtcccatctagacttgaaagtggggtttcattaaaaactatataacaaaattttaaatttaacaactacatgctttttacgyaaaaataggttttgctttgaaaaaattacaaagaatttctctcatttagacatttatcaatagtttaaccattaattgtggtctatttatttaccattaacaagtttaacaaagtcaaataatgttaaatggggataatataagatgtgtcaaggcaaagattcatttctcaattttttcaaacaagtttggtattatattaaattaccaacacaatgcatta

SEQ ID NO: 894045 - DNA, 663 bp, Homo sapiens
gccacacagaatgagttgggaggagcccctcctccacaattctttggaatagtttcagtaagaatggtaccagctcgtctttgtatgtctggtagaattcagctatgaatccatctggtcctgatctttattttgttggcaggctatttcttcctgattcaatttcaaagctctttattggtctgttcaggaaatcaatttcttcctggctcagtttgggagggtgtacgtgttcaggaatttatccatctcttctaggttttctagtttgtgtgtatagaagtgtacatagtagtttctgatggttattcttatttctctggggtcagtgctaatatcttctttgtcatttctagttgtggttttttttaggatcttcttccttttctttattattagtctagctagcagactgtctatcttattaaatttttcaaaacaactcctggatttgttgatctttaraacggtttctcatgtctcaatttccttcagttcagctctcattttggtcatttcttgtcttctgctagctatggtgttggtttcctcttgcttctctagttctttcagtagtgatgttaggttgttaatttgacatctttctaactttttgatatgggcatttagtgctataaatttccctcttaacactgccttagc

SEQ ID NO: 894046 - DNA, 590 bp, Homo sapiens
ttcttttgagatgtgtctgttcatgttcttttcccactttttaatggggttgtttctttcttataaatttgtttaagttccttgtagactctggatattagacctttgtcagatggatagattgcaaaaattttctctttttctgtaggttgtccaatcactctgatgatagtttgtgttttgcagaagccctttagtttattagatcccatttgtcaatttttgcttttctttctattgcttttggtgttttcatcatgaaatctttcctgtgcatatgtcctgaatggtattgcctagattttcttctagggtttttatagttttggattttacatttaagtctttaatccatccagagttaatttttgtatttgrtataaaaaaggagtccagttttgattttctgaatatgggtaagccagttttccctgcacactttattaaatagggaatcttttctctattgcttgtttttgtcaggtttgtgaaggtcaaatggatgtaggtgtgcaatcttatttctgaattctctattgtgttccaataatctatacatctgttcttgcaccatgctgttttggttactg

SEQ ID NO: 894047 - DNA, 678 bp, Homo sapiens
tatgtcgaatagtagtggtgagagagggcatccttgtcttgtgctggtgtttaaagggaatgcttccagcttttgcccattcagcatgatattggctgtgggtttgtcataaatagctgttattaccaaggccttttctgcatctattgagataatcatgtggtttttgtcattggttctgtttatgtgatgtattacatttattgatttgcatatgttgaatcaaccttgcatcccagggatgaagctgacttgattgttttckacttgactgatgtgctgctggatttggtttgccagtattttattgaggatttttgcattgatgttcatcagggatattggcctgaaattttctctttttgctgtgtctctgccaggttttggtatcaggatgatgctggtctcataaaataagttagggcaaagtccctctttttctattgtttggaatagtttcagaaggaatggttccagctcctctttgtacctctggtagaatttggctgtgaatctgtctggtcctgggctgtttttggttggtaggctctcaattactgcctcaatttcagaacttgttattggtctactcagggattctacttcttcctggtttagtcttgggagggtgtatgtgtccagaaatgtatccatttcttctagattttctagtttatt

SEQ ID NO: 894048 - DNA, 678 bp, Homo sapiens
tatgtcgaatagtagtggtgagagagggcatccttgtcttgtgctggtgtttaaagggaatgcttccagcttttgcccattcagcatgatattggctgtgggtttgtcataaatagctgttattaccaaggccttttctgcatctattgagataatcatgtggtttttgtcattggttctgtttatgtgatgtattacatttattgatttgcatatgttgaatcaaccttgcatcccagggatgaagctgacttgattgttttcgacttgactgatgtgctgctggatttggtttgccagtattttattgaggatttttgcattgatgttcatcagggatattggcctgaaattttctctttttgctgtgtctctgccaggttttggtatcaggatgatgctggtctcataaaatawgttagggcaaagtccctctttttctattgtttggaatagtttcagaaggaatggttccagctcctctttgtacctctggtagaatttggctgtgaatctgtctggtcctgggctgtttttggttggtaggctctcaattactgcctcaatttcagaacttgttattggtctactcagggattctacttcttcctggtttagtcttgggagggtgtatgtgtccagaaatgtatccatttcttctagattttctagtttatt

SEQ ID NO: 894049 - DNA, 635 bp, Homo sapiens
gagggagggggaagggatagcattaggagatatacctaatgtaaatgatgagttaacgggtgcagcaaaccaacatggcacatgtatacatatgtaacaaacctgcacgttgtgcacatgtaccctagaacttaaagtataataaaaaaaagaaaatatgctgtgtgaaagaagccagtcacaaaagaccatatagtgtatgattccattgctccgaaatatctagaataggcaaatctatagagacagaaagcagattagtggttgcctagggctggttgggttggagggaaattggagagtgactgctaatgggtatgaggtttcttttgaggttcataaaaatgtactaaggttgattgtgctaatagttgtacaactgtcaatatactaaaaaccattgaattgtatactttaaatggaggrattatgtctatattatacctcaaaaatgtttttagaaaagcagtggagaattaaaaagttgaaaaatacatagtcaaatctaaacaagcattgactgtatgaaacaatagtaacaaaagcactaatggaggttccataaaaagatggaattaaaatactagaaacaatgtgtgagaggaaaagaagaataagagagaaaaccacctaag

SEQ ID NO: 894050 - DNA, 635 bp, Homo sapiens
gagggagggggaagggatagcattaggagatatacctaatgtaaatgatgagttaacgggtgcagcaaaccaacatggcacatgtatacatatgtaacaaacctgcacgttgtgcacatgtaccctagaacttaaagtataataaaaaaaagaaaatatgctgtgtgaaagaagccagtcacaaaagaccatatagtgtatgattccattgctccgaaatatctagaataggcaaatctatagagacagaaagcagattagtggttgcctagggctggttgggttggagggaaattggagagtgactgctaatgggtatgaggtttcttttgaggttcataaaaatgtactaaggttgattgtgctaatagttgtacaactgtcaatatactaaaaaccattgaattgtatactttaaatggaggaattatrtctatattatacctcaaaaatgtttttagaaaagcagtggagaattaaaaagttgaaaaatacatagtcaaatctaaacaagcattgactgtatgaaacaatagtaacaaaagcactaatggaggttccataaaaagatggaattaaaatactagaaacaatgtgtgagaggaaaagaagaataagagagaaaaccacctaag

SEQ ID NO: 894051 - DNA, 586 bp, Homo sapiens
cctagacttcagtggtagaaacggtggccggactgctttttaccctttgggtggaagaaaggacatgtttggcaggaggaagggaaaggagacgatgggtactaggtatgcatggttctggcgggcatcaggactggggtggaataatgagtaaagccttagcagcaaagctgtaccaacacagtgttggaaaccctgtgccagtccaagcaatgacagtgccctgctcagacaccacttgacgttgatgtggcacaaatgtgtggctgcggcactgtcagctgtgtgcttaagactggagtgcaagtgtgacctatagaaacagccttggggtcgtcaggacattttccttcctagagtctatttggcaggcaccgcaccctccgccagtccacatcagaacacattatagraggctttagaatgttctgctaatctgcacctttcctcaagcgggtaagttacttgtagaaagataaaaattttcctgtataaataaattcagaataaccataattctggtgtccctctctagcacaatactgtatcatagcatatcttatgtgcaccagcctgtctctgaagg

SEQ ID NO: 894052 - DNA, 569 bp, Homo sapiens
tatgttaaataggagtgttgagagagggcatccttgtcttctgctggttttcaaaaggaatgcttccagcttttgcccattcagtatgatattagctgtgaatttgtcatgaatggctcttattattttgagatatattccatcaatacctagtttattgagagtttttaacatgaagggatgttgaattttattgaaggcctttyctgcatctattgagatgatcatgtggtttttgtcattggttctgtttacgtgatggattatatttattgatttgcatatgttgagccagccttgcatcccaggaatggagccaacttgatcatggtggattagctttttgatgtgctgctgacttcaatatgtcagcattttattggggatttttgcatgttcagcagggatattggcctgaagtttttttttgttgtatctctgccagattttggtatcaggatgatgctgtccccataaaatgagttagggaggagtccctccttttcaattgtttgatatagtttcagaagaaatggtaccagctacactttgtacctctggtagaattc

SEQ ID NO: 894053 - DNA, 583 bp, Homo sapiens
agcaatcccattactgggtatatacccaaagaaatataaatcattctaatgtaacagcacatgcacttttttatttatgttttatatactatttatgtttattgcagcactatttacaatagcaaagacatggaaccaacccaaatctttatcaagtccatcaatgatagacttaataaagaaaatgtggaacatatacaccatggaatactatgcagccatagaaaggaatgagatcatgtcctttgcagggacatggatgaggcgggaagccatcatcctcagcaaactaacataggaacagaaaaccaaacactgcatgttctcactcataagtggaagttgaacaatgagaacacatggamacagggaaaggaactacacacaccagggcgagtcagggcatggggagtgaggggagagatagcattaggacaaatagctaatgtatgtgaggcttaaaacgcagaagatagattgataggtgcagcaaaccatcatggcacacatatacctacgcaacaaacctacacattctggacttaaaataattttttttttaaatccatctagaagatttttc

SEQ ID NO: 894054 - DNA, 658 bp, Homo sapiens
ttcctttcagcttcgtgattttgggggcccaagatattttcctttcacggtgtctttttgtaagttttgaaaatttcttcattctcttcaaatattgcttattctttatgctccttttctctcatctttcaaattcacattagcctttcatcatattccaatgtctcttacatttttctgtattttctattcttcttatcatgcttcagtctagatattgtctgctgatctgtctctttcattagttttctttttttgtgtatgttctctgctcttaaacccatctattgtacttttaccttccattgtattttttagtgacttaattttratattttccttttttaaaatttcatttttgcgtgaggattctccagtttgccatatattttcttgaacatacaaattagagttattttaaagtccctgtctgatgattacagaaaatgaataacttgagtctacctatattgcctattttttcctcagagattgtggtcagttagacctatttcctggcatgcttagtgatttgggattgaattgaaaatggtgtatgaaaaattttagaggttctgaaagatgtcatcttcctttaaagagggtcgatttttctggaaggtagtcagaaagggggaaaattatcttgatccaatta

SEQ ID NO: 894055 - DNA, 574 bp, Homo sapiens
gtatatatagttcttagtgcaatgcccggcacataggaagcacttaatgatacttgttccattcttaaggaaaaggctgtgctttgtaatgaagaaaaagttaactatttgtaaagtagtttcatgcaaattatcttgatcctaatacagagctcagcaactagaastcaggctgcttgggaaaacttggcattctgttacaatgatggtggaatagtaattgagaaatcttttaggaaggcaatagggtaacagaaatcaaagacataacttttgaccctgcaggacatgtacacaaagatgcatatgtaaaagttcatcataatcttgttcataatattgaaattttggaaacaacctaaatgtccaacaatatgagattagtttataaatatgggtacatccacacagtatgtatgaggactcttcttgttgcaagtaacagtatcatatcggatgtagcttaagccacaagagggaataattgacttaatcaagagaggtagacctagctcagatgcccctgttctgtaaacccttctctgacccaccaggcaggataaattactcctct

SEQ ID NO: 894056 - DNA, 574 bp, Homo sapiens
gtatatatagttcttagtgcaatgcccggcacataggaagcacttaatgatacttgttccattcttaaggaaaaggctgtgctttgtaatgaagaaaaagttaactatttgtaaagtagtttcatgcaaattatcttgatcctaatacagagctcagcaactagaagtcaggctgcttgggaaaacttggcattctgttacaatgatggtggaatagtaattgagaaatcttttaggaaggcaatagggtaacagaaatcaaagacataacttttgaccctgcaggacatgtacacaaagatgcatatgtaaaagttcwtcataatcttgttcataatattgaaattttggaaacaacctaaatgtccaacaatatgagattagtttataaatatgggtacatccacacagtatgtatgaggactcttcttgttgcaagtaacagtatcatatcggatgtagcttaagccacaagagggaataattgacttaatcaagagaggtagacctagctcagatgcccctgttctgtaaacccttctctgacccaccaggcaggataaattactcctct

SEQ ID NO: 894057 - DNA, 593 bp, Homo sapiens
acactctgtggagggtgtctctgtgccatccatggatgagtcaagcatccttgtaggtcatcacctgagctaacctgtggatgcatgtatctatttacttccttctgcatggcaacaaaatactgtcagtgaaaggtagatggagctacaattatagctaatcatttgctattcaaaggatattgttttggcaaatggcagtaggtcagatttgtgcttcaggaagatcatcctgccagcaatgtgggaaatggctttgaaacatgcacagcctccacagtttgaggctgctgcagtgacctgggagaragatggtgtggttagttgttatcataatggctcccaatgaaccatgtctgcctgtttacattcttttgccatgtgtattagtctatttgtttgatagaacaaaatacctaagactgggtaatttataaaaacaaaaatttatttctcacagttctggaggttgggaagccctaggtcaaggcactggcatggagtctggtgagggtcttcttgctgcatcttcacatggcaaaaggggtgatgtggtttggaactgtgtccctgcccaaatctcatgttgaaat

SEQ ID NO: 894058 - DNA, 593 bp, Homo sapiens
acactctgtggagggtgtctctgtgccatccatggatgagtcaagcatccttgtaggtcatcacctgagctaacctgtggatgcatgtatctatttacttccttctgcatggcaacaaaatactgtcagtgaaaggtagatggagctacaattatagctaatcatttgctattcaaaggatattgttttggcaaatggcagtaggtcagatttgtgcttcaggaagatcatcctgccagcaatgtgggaaatggctttgaaacatgcacagcctccacagtttgaggctgctgcagtgacctgggagagagatggtgtggttagttgttatcataatggctcccaatgaaccatgtctgcctgttyacattcttttgccatgtgtattagtctatttgtttgatagaacaaaatacctaagactgggtaatttataaaaacaaaaatttatttctcacagttctggaggttgggaagccctaggtcaaggcactggcatggagtctggtgagggtcttcttgctgcatcttcacatggcaaaaggggtgatgtggtttggaactgtgtccctgcccaaatctcatgttgaaat

SEQ ID NO: 894059 - DNA, 621 bp, Homo sapiens
gtatttccttatatttcattgagtttctttaagatcatcattttaagttccttctctggaaattcattgactttcttatcacctgatgactttatcaccttgaacgttaggatacaagtcatttactccaagacatcaggccatctaggggtttgatgtgtaatcatgcaaaattacatggcctgcacaggaactgagttaaaaggtcagaattatgatttataaagtgtcccaagcaagtgaaacaaccaactatggctgtaaggatcatgaaaaacagggaattcccccccagtttacacagacaacaaaaactaagtgtaggtcactatctcattktacccatggattttaatttatagaggtgactgagtgatgacatagaaagaccaatgccatcgaaagaataatttattacttacaagtcctgggagaagggggcatgccatgccacacagagccacatgggaagcactaagtttggttaggaggcataagcaggagcaagaggaaagcctaggccagagcctttttgggaggttccaggagaatttcaaggcaggatggagtaaacagcttagagctagcaagtttaaataacttcagtgggctttggcctac

SEQ ID NO: 894060 - DNA, 602 bp, Homo sapiens
atttctattgggtatataccaagagtggaattgctggctcatagaataaacagctaccaactagttttccacagggttgtgtcaattgatacttttgtagcatttatatgtgggaattttaatacctataaatttttatttgccagatatttctataaaacttaaggcttcaattctaagaacgttcttatgctttgattactctgtattagagtaaataagccactctaatgcttcaccttctgtttttagatatggctcgtggacagcagaaaattcagtctcagcagaaaaatgccaaaaagcaagctggacaaaagaagaaacaaggacatgaccaaaaggctgctgccaaagctgccttaatatatacctgcactgtctgtagggtaaggggaattgaattgaaagatacagctctcccgtgggcagttttggyttgaatagattaaaattttgaaaccatggcaaaatagatgctttacatgaaatagtaggtttgagagctgattattttaggtatctattttcattcaccctttaaacaaatattttttgaatggctcctgtggccaggcaaaaatctctaggtgctgggaaaa

SEQ ID NO: 894061 - DNA, 595 bp, Homo sapiens
gtaagtcctaaagcaatcactttttaaaaaaccagtagtgaagataaaaactgaatactaaaggctactcacattcaccacttctattcaacattgtactggaagagctattcagtgcaataaaaaaaggaaggaaaattctttattctgaagcaaaataatcatgtacagagggaaaaaaactgtgatcaagtaaatatgaaaacgaactggcattcattgatagatactaygatttttttttttttttttttgagacagagtcttattctgtcgcccaggctgcagtgacacgatcccagctcactgcacctccacctcctgagctcaagtgattctcatgcctcagcctcccaagaagctggaattacaggtatgcaccaccaccacctggctaatttttgtatttttagtagagacggggtttcaccatgttggacaggctggtctcaaacccctgacctcagatgatccaccctcctcagcctcccaaagtgctgggattacaggtgtgagccaccacacccagccggaattcttgttaatacttttaggtttgataatggtattgttgttatattttaagagtccttac

SEQ ID NO: 894062 - DNA, 689 bp, Homo sapiens
actcaactcagaattatcccatccaagcaggagtgagctggggtatttgtacgccaaccctgaggactgcttctaaggctgtgagtttcctagtacttctggtctacctgtgggtaggcagagatttcagagattgggctgggagtgagggcagaaattatcaatatcaggctcagaggcagagactggcagaggaagttgaccagagcacccccgcaagttctgagagatgcagatgctgcataacaccgtctggctacagaaatgcttaagaatcaccttcctcccagaattttgcctagaacattatgtccatgaccttgatttatgtcactctaagaggagcaatccagctcctatggcaggaaaagcttaggggatgtcaagggagagggaaggagagagcacagagagaaaagaaactcaaggatgttcagcagggctgattctacatagacttaagggtgaattggtggggaaaacagggaaatgttgtgcatcatccttggygtctggattctaggtgttgtgagatgtactgatacagtttgtctgtgtcctcacccaaatatcatgaattgtagctcccatcttccccacatgtcatggaaggacccagtggtgggtaattaaatcatggtgtgtgtgttgggggaggggtagtttcccatgctgttctcatgacagtg

SEQ ID NO: 894063 - DNA, 663 bp, Homo sapiens
agttggcagagaggctggagcagtttctctctcagcacccttggaagaaaccacccctgctgacacctggatctcggattgccagccccaaaatgtctgttgttgatgtcatcagtttgtagtacttttttacaacagccctagcaagccaatacactcctctaagactcctgctccttcttgttctgtatccagggagccctctctagctgagcagccgtgtgtggagaggaagagctgggattccgagccacgtgcctgggtttgcgtcctagctctgacactattagctgtgtgaccttgggcaagttactaaacctcttggtgttttaatttcctcaacagtaaaacagagagaaaataatcatactyagcctatagggtttttctaagaattaaatgagttgaaatttgtaaggtgcttagactagtacccagcaacataataaacactacttaagtgacaattaaaataaagcctcagctttgaggccctggattggatcaacatgagtttggggatttgtggccacagagggaaagccaggacccagctctataatggtcctaggtactaggggtacagctcctgctttggtagtaagtcttttgggcaggaattctgggaggagatgataattcagggtgtcttaaagttgaatg

SEQ ID NO: 894064 - DNA, 632 bp, Homo sapiens
tctttgggtctctctggctttccacgtctgaaaaattaagttaacttgatcagtgattttcaacttaagaaggagcatagagaagggagtatcagaactgtgggatacagagagggcaggactacccattgtgtgctccaggctattcctaatcacttttatcacaatgtacctgtcctatgtccccttctcccagggctatgccctctagatgacagaaaacaaacctgacagctaccatcacgaccccctgagatccccatgtgacactccccaccctaccccaccscagtccagatcaccactgtagaaggctctttctgctgataggaaggtggctcaaccctttagagtgttgcacgggggaaagaaagactgtgaatcactcactgttccagatgatctttggcacacggcaatgcttatgttctatgagactatgatttctgtacaatgccagtgtgaacagctgttacctccttatcacttatgctgcagagcaaaggaagagataattagtctttaaaagatggaagaaacaggggaggttggaggacagatagaatgtgccagtgggtcatgtcatgagccacgtaaatgtgttccaccatagtcatctggaacactccatg

SEQ ID NO: 894065 - DNA, 567 bp, Homo sapiens
gcacaccatcagttatttggagctctgcgctcaggtgggccaatctctagctctgcccctaggtgagaacagcttaacaatgtcctaaaaagccatcaaaaaaataaggttcggaaagtcctcctcaaaatctggatgcaggagcggagattacayacaatgagttataaacaaatcacatcacagatcgagtgagatgtttacatcttggagaaaaagtcaacattcatgaacccggcgacaaattctaattgcgcaaaagtccaaagtgccgaatgaaatagacagctctcaccaggtccctgggaaggggctgctgcgcgcccttcctgcgcgggtaattcgatgtgcgtgtggtgagtggtttatgtttaaatccacccagaaaattgaatcgtgtctagccgcccttcttctaaaatgcagttggattagttgcatctccagcggactccgagacagaaatacgcactaaatctgcaggaaagcgagttccccgaaacctttctggaggcttccacccgccttctccgctacgcacaagtgatggagagggagggagcagtt

SEQ ID NO: 894066 - DNA, 617 bp, Homo sapiens
gtggtggtgcacacctgtaataacagctactcaggaggctgaggtaggagaatcacctgaacccaggaggcggaggttgcagtgagctgagatggcggcagagcgagactccgtctcaaaaaaaaaaagagccccacaaaaatgcttggcactaattttactggtaagatctttcacattttcaaagagcagatatttctcaggctatacaaactgccacagggtttgtaastaaagcgattaaactcattttatgaaattagcataactctgaaactgagacagataaagaactggaccaatttcacttagaaattaaaatttttacatagtaaattattagcaatacatttcaactgtacatttaaaaaaaatcttttactagcacaattcaggatttattccagaaataaagatggttcaattttgggaaatttattaacatattccaccccatatgtcagtagatgtcaagtgacattccatacaagattcctgattttcaaaaaaaaagaaatagaagtagcttttcaagataaaaaatacataatggtaaaataaggaaattaaaaggacgcccactagcctcactattggttaacattgcatcaatcaga

SEQ ID NO: 894067 - DNA, 617 bp, Homo sapiens
gtggtggtgcacacctgtaataacagctactcaggaggctgaggtaggagaatcacctgaacccaggaggcggaggttgcagtgagctgagatggcggcagagcgagactccgtctcaaaaaaaaaaagagccccacaaaaatgcttggcactaattttactggtaagatctttcacattttcaaagagcagatatttctcaggctatacaaactgccacagggtttgtaagtaaagcgattaaaytcattttatgaaattagcataactctgaaactgagacagataaagaactggaccaatttcacttagaaattaaaatttttacatagtaaattattagcaatacatttcaactgtacatttaaaaaaaatcttttactagcacaattcaggatttattccagaaataaagatggttcaattttgggaaatttattaacatattccaccccatatgtcagtagatgtcaagtgacattccatacaagattcctgattttcaaaaaaaaagaaatagaagtagcttttcaagataaaaaatacataatggtaaaataaggaaattaaaaggacgcccactagcctcactattggttaacattgcatcaatcaga

SEQ ID NO: 894068 - DNA, 511 bp, Homo sapiens
gatttttagttgaaatgtattctaactattgtgtggtaaatgaattgtgaaggggcaggaatgaaggcagcaggatcagtttgatgttctcagactgggcgagggctaatggtggtatagacaagtatattcatacaagtagcgagaagagataagatctaagatggactttggtggtagaaccaacaagacttgctcctggattggatatgatggataaggaagagtaaaaatcaaaatratttctagaaatactactcagctaaaaaggaggggactagctatacacacaacaaccttaatgaatttccagggaattacgctgagtgaataaaagttacttcccagccgggcgcggtggctcatgcctgaaatcccagcactttgggaggctaaggcaggtggattgcctgaggtcaggagatcgagtccagtctggccaacatggtgaaaccccgtctgtactaaaaatacaaaaaaattaacagggcatgctggcgtgcacctgtaa

SEQ ID NO: 894069 - DNA, 625 bp, Homo sapiens
aattgcaaacaaaatagtcctggtatagaagaattatattcagagcccatggctaggcaccacgggtgaaatatctgaaaaagagagagtttgtcaatgaagtagaaagaaaatttaaaaagaggaaatgattagaaaatttaaataatgagactgatatattgccaacctatcctaaaataatctccttcttctgaattttcatagcaccttacgaattaccctttcttgtcccttaaaacagtttactttgtaggccagacacagtggctcctgtcttgtaatcccagtgctttgggaggctgagatgggaagattgtttaaggccaagagtttgagaccagactggataatatagtgagaccctgtctccacaaaatcgaataaaaatgtttattttgtatygtagcttactttctatatctttgtctatgctacaaatctacatgcctttgggagcaaataatcatatggattcagagttataaagtaccttgaacacacttagtaggacttctaatttcataaactgaggtagggaccatgtcaattttgtcttgatatcctagatgtatccaggaggtaacatcgattgaataaaggagtgaatttactgaaatgaaaa

SEQ ID NO: 894070 - DNA, 656 bp, Homo sapiens
ggcctctttggaaaaataagaaatttagcaagactggatcaacatccagtggattacaactggattacaaccatcaacaagacatgagtagctgctgacccgttttctagttcacatcatccacatcactctcaactcttgtcctgcactgagacgcagtgttacaagccacatgttttcatgcatgcatgctgtgacttatagtagaaacacttcctatcaaaatgagaaaacaagaggactgggtggccattttcattcaacccattttactcattgaggtcactttaggaatttgacttggtaatgtccatcataggttctctctgtctctctctctctctctctctctctctctmtatatatatatatatatatatacatatatatatatatatatttttagagacaggtctcactgtgttgcccaggctggagtgcagtggcgctgtcacagctcactgaagcctcagcctccaaggctgaagcgatcctctcacctcagcctcccaagtaggtgggaccaggtgtgaaccaccaaatccgggtaattttttttttgtagtgccagggtctcactatattgcccaggttggtctcaaattcctgggctcaagtaatcctcccacctcagccttccaaagtgcccagattac

SEQ ID NO: 894071 - DNA, 633 bp, Homo sapiens
ctgttctgacctcaaccttacttccatagaggcctcatttcctagcacagccacactgagagttaatgtttcaaaatataaaattttgggagacaaattcagtctataacaagagctcctttcagttctataaatgttactttatttattttgaagctttattactgagaccttaaaattttagagttgtagagcacagtaacctcagcaagatggtgaactaggaagctccaggctctcattttctcayagggataccaagttagcaaataaatacagagaataacaactttgcaaaaactctagagagaccagttaagaagttgttagacccagttcaatgtataaccaagaaaggattcccgtgaaagaggcaggaaaatgtgcagcatttcgcaaaaccatatatgccctacctttcttcagcctaacacactccaatctagaggaaaccttccacaccagggattctccctttgaacagaaataaaagagtgggccattgttctgactagtctggggctccccaaagaactggtatctgtctcacctgactcagaacaatgataaggctgtagatctttttggaagtctatgaaaacaggcacaatgaaggcagcatgttagagatat

SEQ ID NO: 894072 - DNA, 657 bp, Homo sapiens
agaaaatatcaacagaccaataattagtaaggagaataaactagtaatcagaaacctcccaacaaagaaaagcttaggaccaaatggctttactggagaattctaccaaccattaaaaggataattaagaccaatcttcctcaaacttttaaaacaaatgttaaagaggaggaaactctttcaatctcattcatmaggtcagcattatccttataccaaaaccagacaaagacactattaaaaaaacttagaccaatatccctgatgaatttcgatgcaagaatcctcagcaaaatactatcaaacaattcaacagcatacttaaatgattatatgctgtaatcaagatgcatttattctttgaatgcaagtgtaattcaacacataaaattcaatcaatgtaatacaccacattaacagaatgagagacaaaaaccacataattatatcaactgatgcagaaaaaaatctgacacagttcaacaccttttgtgataaaaacactcaacaaactaggaaaagaaggaaacaactttaacacatcatatgctcactgatgaaaatctacaagttctttataaaagatcaggaacaagacaataatctgcattgttaccacttctattatacgtagtattggaagttctaatcagagca

SEQ ID NO: 894073 - DNA, 657 bp, Homo sapiens
agaaaatatcaacagaccaataattagtaaggagaataaactagtaatcagaaacctcccaacaaagaaaagcttaggaccaaatggctttactggagaattctaccaaccattaaaaggataattaagaccaatcttcctcaaacttttaaaacaaatgttaaagaggaggaaactctttcaatctcattcataaggtcagcattatccttataccaaaaccagacaaagacactattaaaaaaacttagaccaatatccctgatgaatttcgatgcaagaatcctcagcaaaatactatcaaacaattcaacagcatacttaaatgattatatgctgtaatcaagatgcatttattctttgaatgcaagtgtaattcaacacataaaattcaatcaatgtaatayaccacattaacagaatgagagacaaaaaccacataattatatcaactgatgcagaaaaaaatctgacacagttcaacaccttttgtgataaaaacactcaacaaactaggaaaagaaggaaacaactttaacacatcatatgctcactgatgaaaatctacaagttctttataaaagatcaggaacaagacaataatctgcattgttaccacttctattatacgtagtattggaagttctaatcagagca

SEQ ID NO: 894074 - DNA, 620 bp, Homo sapiens
tgtggtccttcatcagccaaaatgttatgtggcacatgactgtaataccttttcttacactccaagagaatgccagaagaaactcatttaaaaatctgaatttttaaaagcaatttgaagtcagatttccttttactttaggatgctaacatgttaattctttcaggattagaatagaaactacataattttacatcaatagactctacaccttgttgcttaatattgatttaagaaattcaaagcaaatataaaagaactaaaaaggttagtatgtgtaggcaacagaaagctgatatttgtaacagacatgatttgctatctctgaaaggctttccyccatgtctccctagctggcggaggtgcagtgtaggtaaagtgaccaccttcaaccttctacttggccatgccaagggaggttaccctatcctcagtcgtgataaagctcatcttggcaattgcattgctcttgagaataattaacctactaatagacgtgtgactttttttgctatttaaagaactaaaaccaagcagccctttgattaaaaacataaatttgttgagaataattccttttcctgccccttgaataaggctctgaaggaaagtaaaggcta

SEQ ID NO: 894075 - DNA, 614 bp, Homo sapiens
atcactctttctctccctcctgccaccacgtgaagggggtcagtgcttaccctatgccttccgccaggattgtaagtttcctgagatctcccagtcatgcttcctgttcagactgcagaacaattagtgagtcagctgaacctcttttcttcccaaattacccaggctcaggtagttctttatagcagtgtgagaatgaacgaatacaatctggtccttcatacaataacaagcatgcttacaatgtgccctcaaagagcacccagtcacttactcctccaggtaatcaccatcactgaacatcttcatttaatttakagcaaaagcttctcccttccttcatcctgaggttttctctggcttgaaagattctgttggagcaggtgcaggtgagcatcctctccttccctactttgcttttcttctcaacttcctcctccattcaccagcttaggttctaccccatgcagggtcaggccaagaagtgagagatcaaaagagattggatttgatttggggaaacaaatgctgtcatgatctgtgagggtgtcttctgggtaaggcaggcacccagctttgaatctttctttctgaagtgctgggtgaatttttca

SEQ ID NO: 894076 - DNA, 614 bp, Homo sapiens
atcactctttctctccctcctgccaccacgtgaagggggtcagtgcttaccctatgccttccgccaggattgtaagtttcctgagatctcccagtcatgcttcctgttcagactgcagaacaattagtgagtcagctgaacctcttttcttcccaaattacccaggctcaggtagttctttatagcagtgtgagaatgaacgaatacaatctggtccttcatacaataacaagcatgcttacaatgtgccctcaaagagcacccagtcacttactcctccaggtaatcaccatcactgaacatcttcatttaatttatagcaaaagcttctcccttccttcatcctgaggttttctctggcttgaaagattctgttggagcagrtgcaggtgagcatcctctccttccctactttgcttttcttctcaacttcctcctccattcaccagcttaggttctaccccatgcagggtcaggccaagaagtgagagatcaaaagagattggatttgatttggggaaacaaatgctgtcatgatctgtgagggtgtcttctgggtaaggcaggcacccagctttgaatctttctttctgaagtgctgggtgaatttttca

SEQ ID NO: 894077 - DNA, 621 bp, Homo sapiens
taaaagacacagactggcaaattggataaaaagtaaagacccattggtgtgctgtattgaggagacacatctcacgtgcaaagacacacaggggctcaaaataaatggatggaggaatatttaccaaacaaatggaaagcaaaaaaaaaaaaaaaaaaaaagggttgcaatcctagtctctgataaaacagactttaaaccaacaaagacaaaaaaagacaaagaaggacattacataatggtaaarggatcaatgcaacaagacaagctaactatcctaaatatataagcacccaatacaggagcacccagattcataaaggaagtttttagagacccacaaggagacttttactccaacacaataatagtgggagactttaacacccactgtcaatattagacagatcaacgagacagaaaattaacaaggacattcaagccttgaactcagctctggaccaagcaaacctaatagacatttacagaagtctctactccaaatcagtagaatatacattttctcagcacattgcacttattctaaaattgaccacataattggaagtaaaacactcctcagcaaatgcaaaagaatgaaaatcaaaacaaacagtctct

SEQ ID NO: 894078 - DNA, 591 bp, Homo sapiens
tagaatattcagaccacagaatctattttggaggtgaaatttagaaaaaatgttttattaattgttctttgaattttgtaggaattctaccttcattgagttaatttctagtctgacatttaaaaagtattgctcattttgttaagtttttcattttactgccacatatttataaactatagtcttttggtttgcaaagttattgttgaataggtttgatagactcctcatcatttctaatttttatgtgtttttcttcatttttcactgatatttgtgtcagaagtttccctgttttatagcttctctcaaaaagccaaaagtggaattatgtacttgtttgatatatttatcttcctgatttattaattctgcttaatacctagtgtgtgtgtatatatatatatatatatgtatgtatgtatatacacacayacacacacacatatatatatatttatttatttattattttttttgagacgaggtcttgctctgtcgcccagattggagtgcagtggcgcaatctcagctcactacaaccttcgcctcccaggttcaagcaattctcatggtgcctcagcttccttg

SEQ ID NO: 894079 - DNA, 589 bp, Homo sapiens
cagtaaaatttaatctacttaatctgctcttataattatattctgtgatgttttccaatacaaatagttattccaaccacttttagaacttgtttcctttccaatgtcctttcatagcatcttttagtataaaacaacctttgggataaatattaataacatcaagtcaacacacagagtgcctattcatctttgttcattatatcacttgctctatttagatgaaaatcatataatcaaaaatgccaatatattgtctgtgtgacaaagtgtctccaatgacacatttagtataaaagccatgttgtactaatctgagaatagaatagatctatatctcattctaataataattctcaatgaatagtgtggctctttcaactgatgcattaaacagayaaagatatttcttggagagttcagtcagttggctatgccgccagttataacagaaaccaattttcaagccgtgagttcttgttttttgttttttaccaaaggtactgtttccgtacactggtattaaaaaaatggattattctttttgatataactaagatgaaacattttttcattttttcctgtgatt

SEQ ID NO: 894080 - DNA, 637 bp, Homo sapiens
atgggctccatctgttgacaaatagttttattttatattttcaatatttggctcactgactactgtattaagctgcgttcaaaggtttatttaaagcatcagctgggatctaatgctaggtaatcatttgtaggtattacaaatttwaaaaagtatttttatttgagtttatttccagtgcccttttttatactaatgcggctttcctctcttctagttttggacgataataagttatttgttcttgttcttcatatgtttacatattaccaaacttcattagttttaagccaggtatattttcatatattgccatgtttgaaattggattgggtcttacaatcaaaagcattgattttattgattgaaacagcaaatattttttctttcctgatgatcataaaaatcaagaaatcaaatgttaaacaataggacattttgcaattaatgacatcttagacctaaagaaatatgatatttcatgtgaggcagctctcattagccataaatatgtttcttttgccaatcttactgatgataccctgatttttacaaactccttcctaatttagtaattctttcaattctaaccatgccttctggtgccatttcatgtgtttgtgcatatttttctatg

SEQ ID NO: 894081 - DNA, 587 bp, Homo sapiens
tgccgaaaatgttcagatattttggcattttcaaaggcaaggaacaatacaattactcctagatttttgccattatagcaacatctgatttattgacttttcagtaactaaataatatcacaccaaaagttataaaatgacttcccaactctcttctgttgatatagaccccacctaaatgtatattattatcatttattatttttatttttactctccacaggttcttgtgtactatgtttaacattgacaagaagataattaggaaataaatatatataaatacaggaacataaagagaaataaagaggaagcaccacagtcaactaaaaaagagagattcccagcaacctacacaaccatttctataggctctcagctgatgcttagtgtttggacaactcayacatgcagattgacagatgaccaacttataaaagagatttttaataattcttaatgatttcacagggtgttgtcaatggaaatatggattcttctacagcaaacatgtacatctatatcatgtggaacaaggatagtgggaaaacctctgattgtgaggacgtagaactgagaagagcata

SEQ ID NO: 894082 - DNA, 627 bp, Homo sapiens
tgttccacatagaatataatgtttgtaaattaactcaagaccaacagtttctttgccttctgaacaaatttgaaacatctgttctaggcctgtgttcatgtgcaatttttgaatttagatactgtattagtctgttctcatgtggctatggagaaatacccaagacttggtaatttataaagaaaagaggttcaactgactcaacaggtctgcattgctgaggaggcctcaggaaacttacaaacatggcagaagggaaagcaacatgacctacttcatatggtggcaggagagagaagaatgagaatcgagcaaatagagaagccccatataaaaccatcagatctcttgagaacttactctctatcaagagaataatatrggggaaaccacccctgtgattcaattatctccacctggtcccgcccttgacaggtggggattattacaattcaaggtgagacttcggtaggaacacagagttaaaccaaatcattccacccctggccttcccaaatctcatgttctcacatttcaaaacacaattatgcccttccaacagtcccccaaagtcttaactcattccaatattcacccaaaagtccaagtccaaagtctcatttgaga

SEQ ID NO: 894083 - DNA, 630 bp, Homo sapiens
agaataatataggggaaaccacccctgtgattcaattatctccacctggtcccgcccttgacaggtggggattattacaattcaaggtgagacttcggtaggaacacagagttaaaccaaatcattccacccctggccttcccaaatctcatgttctcacatttcaaaacacaattatgcccttccaacagtcccccaaagtcttaactcattccaatattcacccaaaagtccaagtccaaagtctcatttgagacaaggttagtccyttccacctatgagcctgtaaaatcaaaagcaagttagttacttcctagatacaatgggggtacaagcattgggtaaatacacccattccaaatgagagcaattggccaaaacaaaggggctacaggccccatccaagtctgaaatccaatagggcagtcattaaaccctaaagttccaaaatgatcccctttaactcatgtctcacattcaggacacgctgatgcaagaggtgagctcccatagctttaggcagctccacccctgcggctttgcagggtacggcccctcttccagctgctttcatggctagcgttgggtgtctgcaggttttccaggtgcatggtgcaagctgtcagtgga

SEQ ID NO: 894084 - DNA, 668 bp, Homo sapiens
aaaccctcaggacctagggctcaacacagagttcttagacttgacacctaaagcgtgatacatacctaaaataatgatcaattactcctcatcaaaactaatcactttttctctgcccatgcttttgtgaaacagataaaaagacaagttacaaactgtatgaaaatatttgtagatcaaatattgacaaggactagtttagaaattatataaagaattatcaaaagtcaacagcttaaaaaaaagcccaattgaaaaatatccaaaagacacgaatacacatttcaccaaaggtgataagtagaagaaatagtcaatataatcatccatcagggcaatgaatactaaaaccactgaagcatcactgtatgcctgtcagaatgcgtaagaatttttaaaataatgacaccaccaaattctgaaaaaaatcrgaaaaattagatcacttatattttaattgggataatgtaaagtggtacagtcactccaaaaaaatgttaaattttttcaaagctaaatgtgcaattagtttctgtcccagcaataacactcctgggaatttatgacagataaatgaagacatattcacacaaaaacttatacactatattcaagcagctttatttgtcatagccaaaaccttaaaacatcccagatgctcttcaaca

SEQ ID NO: 894085 - DNA, 644 bp, Homo sapiens
caattttgatggggttgtttgttttgttcttgtaaatctgtttaagttctttgtagattctggatattagccctttgtcagatgcatagattgccaaaattttctcccattctgtaggtggcctcttcactctgatgatagtttcttttgctgtgcagaagctctttagkttaattagatcccttttgacaattttggcttttgttgccattgcttttggtgttttagtcataaggtctttgcccatgcctagatcctgaatggtatttcctaggtttttttttagggtttttttttttatggttttaggccttatgtttaagtcgttaatccatcttgagttaatttttgcataaggtgtaaggaaggggtccagtttcaattttctatataaggatagccagtttttccaatatcatttattaaatagggaatcctttccccatttcctgtttttgtcaggttttcaaagatcagatggttgtagatgtgacattatttctgaggcctctgttctgttccattggtctatgtatctgtctttggtgccagtaccatgctgttttggttactgtagccttgtagtatagtttaaagtaaggtagtatgatacctccagccttgttctttttgcttaggattgt

SEQ ID NO: 894086 - DNA, 644 bp, Homo sapiens
caattttgatggggttgtttgttttgttcttgtaaatctgtttaagttctttgtagattctggatattagccctttgtcagatgcatagattgccaaaattttctcccattctgtaggtggcctcttcactctgatgatagtttcttttgctgtgcagaagctctttaggttaattagatcccttttgacaattttggcttttgttgccattgcttttggtgttttagtcataaggtctttgcccatgcctagatcctgaatggtatttcctaggtttttttytagggtttttttttttatggttttaggccttatgtttaagtcgttaatccatcttgagttaatttttgcataaggtgtaaggaaggggtccagtttcaattttctatataaggatagccagtttttccaatatcatttattaaatagggaatcctttccccatttcctgtttttgtcaggttttcaaagatcagatggttgtagatgtgacattatttctgaggcctctgttctgttccattggtctatgtatctgtctttggtgccagtaccatgctgttttggttactgtagccttgtagtatagtttaaagtaaggtagtatgatacctccagccttgttctttttgcttaggattgt

SEQ ID NO: 894087 - DNA, 626 bp, Homo sapiens
ggaacatgcccttaagacacagatcacgcatgctattgtttgtggcttaagaatgcctttggccaggcatgatggctcatacctgtaatcccaccactttgggaggctgaggcgggcagttcacaaggtcaggagatcgagaccatcctgtgaatggtgaaaccctgtctctactaaaaatacaaaaaaaatagccaggcgtggtggcgggcccctgtggtcccagctagttgggaggctgaagtgggagaatggcgtgaacccaggatgtggagcttgcagtragccgagattgtgccattgcactccagcctgggcaacagagcgagactccatctcaaaaaaaaaaaaaaaaaaaaaaaaagatgcctttaagcagttttctgcctggggagccaggtgttcatgccatcattccaataacccacaaccttccagcttgggcgttagagccattttgaacatgtcatagtgctgcagagattttgtttatggccagtcttggggccagtttatggccagattttggggggcttgctcccaacagtcttcaactgacagaagcctttccccactttctctatcccccaccaagattatttgaatgctcataaagaagagtatct

SEQ ID NO: 894088 - DNA, 626 bp, Homo sapiens
ggaacatgcccttaagacacagatcacgcatgctattgtttgtggcttaagaatgcctttggccaggcatgatggctcatacctgtaatcccaccactttgggaggctgaggcgggcagttcacaaggtcaggagatcgagaccatcctgtgaatggtgaaaccctgtctctactaaaaatacaaaaaaaatagccaggcgtggtggcgggcccctgtggtcccagctagttgggaggctgaagtgggagaatggcgtgaacccaggatgtggagcttgcagtgagccgagattgtgccattgcactccagcctgggcaacagagcgagactccatctcaaaaaaaaaaaaaaaaaaaaaaaargatgcctttaagcagttttctgcctggggagccaggtgttcatgccatcattccaataacccacaaccttccagcttgggcgttagagccattttgaacatgtcatagtgctgcagagattttgtttatggccagtcttggggccagtttatggccagattttggggggcttgctcccaacagtcttcaactgacagaagcctttccccactttctctatcccccaccaagattatttgaatgctcataaagaagagtatct

SEQ ID NO: 894089 - DNA, 626 bp, Homo sapiens
ggaacatgcccttaagacacagatcacgcatgctattgtttgtggcttaagaatgcctttggccaggcatgatggctcatacctgtaatcccaccactttgggaggctgaggcgggcagttcacaaggtcaggagatcgagaccatcctgtgaatggtgaaaccctgtctctactaaaaatacaaaaaaaatagccaggcgtggtggcgggcccctgtggtcccagctagttgggaggctgaagtgggagaatggcgtgaacccaggatgtggagcttgcagtgagccgagattgtgccattgcactccagcctgggcaacagagcgagactccatctcaaaaaaaaaaaaaaaaaaaaaaaaaratgcctttaagcagttttctgcctggggagccaggtgttcatgccatcattccaataacccacaaccttccagcttgggcgttagagccattttgaacatgtcatagtgctgcagagattttgtttatggccagtcttggggccagtttatggccagattttggggggcttgctcccaacagtcttcaactgacagaagcctttccccactttctctatcccccaccaagattatttgaatgctcataaagaagagtatct

SEQ ID NO: 894090 - DNA, 586 bp, Homo sapiens
tcaactaatctaattgtttcattctttctacatgtgaactttaactctgaaactttacagaatgtaactaaattggtctaataatatatgtaatagatgatatatatataaacatgcatttaaataatttaaatatrtatataatttcaaatctaatgttagttggaatggatattactgtttgaccttctgacacaccagcaaaaactaaagctagaatgtattatttttgaaatattaaattgatcaaaagagaaagcaaccaatgttccagcagatttttttcataatatacatagacactgaaaatcacattgcttacattactcaatttattccataatcaatttcagatattattttctgctaaaatgtcttaatctatccaataataatgtcagaagcacattcaaagacaacctccctagatggtcactgtaataactgagtcagtttcttcattctcagttttgattacttagaactatatttcttcagaacaaaagtaattcatctgaaactattttatgtatgaaatggaaaaggccaaaaagagtcatctataattctttattagtcagtgact

SEQ ID NO: 894091 - DNA, 605 bp, Homo sapiens
gcaataccattcaggacataggcacgggcaaggacttcatgactaaaacaacaaaagcagtggcaacaaaagccaaaatagatgaatgggatctaattaaactaaagagcttctgcacagcaaaagaaactaccatcagagtgagcaggcaacctacagaatgggagaaaatttttgcaatctacccatctgacaaaggtctaatatccagaatctacaaagaacttaaacaaatttacaagaaaaaatcaaacagccccatcraaaagtgggcgaaggatatgaacagacatttctcaaaagaagacatttatgcagccaacagacacatgaaaaaatattcatcatcactgacgatcagagaaatgcaaatcaaaaccacagtgagataccatctcacaccagttagaatggcgatcattaaaaagtcaggaaacaacaggtgctggagaggatgtggagaaataggaacacttttacactggtggtgggactgtaaactagttcaaccattgtggaagacagtgtggtgattcctcaaggatctagaactagaaataccatttgacccagccatcccattactgggtatatacccaaaggag

SEQ ID NO: 894092 - DNA, 634 bp, Homo sapiens
atagattgccatctgaatatgcatcccctttaatactttcacatttaatataactaagtttattaaacacatttagaaaactatgcgtaagtatccttttccaataaaggtaaaatttattcaatagataggtttctgaaaagttgtatttgaatcaaaatcatataaatcaaatagtatttgattgtaagaggtctctatttaaaagaacttcctgactaattcttgtataaacaagagaaatccttgctaaattcacactttcttaatttattataaaaatcacagttttagagttaaaattaattatatgatyattaattttaaaaccacaaaaagtagagaaaatgtgtagacaactacacatacaaccatcacttcaactgaacagatatgaatgttttgcaatattttttcaggtccctttttttaaaaagaaataaattgctatagatacagctaattgccacacatgctatatttttcccttccttattctccaaaagcatttactattctaaagttattatacaccatttagtttaagagctgaaattgacactcagagatttggtttttcaatatcgtattaatcaagttcaagaaccagaaatttttaagtacctctatgtga

SEQ ID NO: 894093 - DNA, 613 bp, Homo sapiens
tgcattaatattatctgagtgccacaactactcagtgaactaaaagaacaataatacttaatgcctaatattaaagttttgcttaattccatagattgttttcaagtgtccatcctgcaaaatccgcatgagatttccccaaatatgtaactgtcttcctttatcagatgctccactcctcacctgcttttcccattagaattacatagcaagagctatgtaaagaattatctagaaaaaagtaactttccatgaaagcataatgtcaaggtaacaggctgaatagtcatgatttgttaaattctctttaggtaccaagacatgctaatttgcatgattacattacgtatgtttcctctttggtttccatactgagctcatakgactgcttaactataatgttttttcgtgaaaacaaacaagcattgcattagaagcttcccataactgtgtactaaatatcctgtcttttctatttctggctgttgtcactgaaaatcttatttctttgtacacttttaaaattagtatatttttagagctttttcacccgtttatatgccctcctttgtgactctcacataacacattgtgggatgttatcacctctagt

SEQ ID NO: 894094 - DNA, 570 bp, Homo sapiens
tgagctcaggactatctcactcagtttggataactaagttgagagtcagaagttaaggggtatcaagcttttcattatttgaatgttttcctggtttccctcattgttcttagaaagcaaattcaattaaatatttatgagctctgactactaggttgctcgtatgtatatatgtataatatgtatgtgtgtgtgtgtgtgtgtgtgtgtgtrtatatatatatatatatcatgatattgtgttgcaagaaaaaaatctaataatatttagatataatctctgccctccagagttttcagtttaaaatagaaaccagatgaatagaatagaatgagaaaccacgtgactatagagtaaggcagaatgagacaagtagatataagaaatggcagggcagggtcaaatcacatcaggatgggaacaaaaaacaggagatttcagaaaaggctaatgaatgaatgaatggaagtcagtgggcaatttcaatttcaatatgctgcgtatgacgtgagtaaggaaccaagtgcacactgctattgagatgggccttaacaactggataccatttt

SEQ ID NO: 894095 - DNA, 657 bp, Homo sapiens
acttatatatttaagagattagttgattttcatgacagttggaatgagtgaatcactcctttcctttttcctgttcccttgcctgagagctaaaaaaagacttcctaattaagatttcactagtaattgatttcttaattatgaagctggtggtctggtatttttaaaataagagctgtaagtgtccttgaaattggcaccttaaaaaataattcccaaagtaggcaagactaagaaacaccatttggcctatggcttcagaactttaaattaattctacctttttttgctcctgcacccttgtgccygtatgtccaaataattttacatcaatttttgattctagaattgccgtttatttaactacttgctcgatcataagaaattatgagttatttatatcaatttttaaagtttttttaatgcaaccattggaaatagctattgtgtatttcatattcctttatccacctttttacacatttgacatattcagtcctaaaataaagatggtatggatgtttttaacatatgttttgttctaaaacaatgttacaattactacaagaaaaaaagaaccaatttctgtgtgaaaaattaaaacagagcattggattaaaattttatgcttctatcccttagaaatcttagtccctt

SEQ ID NO: 894096 - DNA, 658 bp, Homo sapiens
tggcttaggattgacttggcaatgcgggctcttttttggttccatatgaactttagagtagttttttccaattctgtgaagaaagtcattggtaacacccattaacttgtcatttagcattaggtatatctcctaatgggtgcagcacaccaacatggcacaggtatacatatgtaataaacctgyacgttgtgcacatgtaccctaaaacttaaagtataataataataaaatttaaaaaaaaagaaagtcattggtagcttaatggggatggcattgaatctataaattacctcaggcagtatggctattttcacgatattgattcttcctatccatgagcatggaatgttcttccatttgtttgtatcctcttttatttcattgagcagtggtttgtagttctcgttgaagaggtccttcacatcccttgtaagttggattcctaggtattttattctctttgaagcaattgtgaatgggagttcactcatgatttggctctctgtttgtctgttgttggtgtataggaatgcttgtgatttttgcacattgattttgtatcctgagactttgctgaagttgcttatcagcttaaggaggttttgggctgagatgatggggttttctagatatacagtcatgtcatctgcaaaca

SEQ ID NO: 894097 - DNA, 666 bp, Homo sapiens
ttccatgtcctggaaaattatctcagtcccagagaaattgagacagttagtcaccttatcaggatgcttttaaaaatcttgatgttcaagcccacccacccctgacaaattgctcagaatctctgggggtgggacccaggcttaamtgtttctgaaagatctccaagtgattccaatgtacagcaaagcacaagaaagccctgctcaaggacaggcttcttaacttgaaagtacacaacaatcacctagcaatcttggtaaaatgcagattttaattcctcaggtctggagtggggtccaattttctgcagttctaacaagctccctggtgatgccagtgctgctggtgtacagaccagcctctgaatggcaaggatctggaaaacacaagcagtatgttttgtttctactttgaaagaatctataatagagtcaggaagagaagtatgtcaggacaaaattaacaaaagggggaaaaatcaaataaaatataagtaggtagtaatgcagtaaggagagggagcaggtcctaagacacattttcttggattccttagtacactgactacacataataggtatttgacacatataatctggaaatgcttaatgggggtgggttctaacactgacttacaagggtggaagggcatcccaggaaaaggc

SEQ ID NO: 894098 - DNA, 627 bp, Homo sapiens
accacacaccaggggctttaacaataggaatttgttttccctcagttctggatgctggaagtccaagatcaaggtgtctacaggattgcttccttccaaggccattcccttggcttgttggtggctgtttcctccctctgttttcacatggtcttccctttgtgggtatctgcatcctcatctcttcttataaagacatcagtcatattggactagagcccacccaggtgatctcgtttcaccttaattgcctctttaaaggtcctatctccaaatacagtcacattctgatatactgggggttagggctttgtattagtccattctcacactgctataaagaaatacccaggacttggtagtttataaagagaagagatttaattgacacatsgttctgaagactgtacaggaagcatgacggcatcttcttggcttctggggaggcctcaggaaactttcaatcatggcagaaggcaaagggaaagcacacatcacatggctggagcaggagcaaaagagaggggagggaggtgtgacacatttttaaacaaccaaatctcatgagaactaatcacaaagggaatggtgctaaaccattcaagagaaatccacccccatgatcct

SEQ ID NO: 894099 - DNA, 620 bp, Homo sapiens
aaaattcagtcagattttgaattttcctaattgtatcatttatttcatttcagtttatttatgggttgctcaagtaaggattcaaattgtgatattattattttcatcatattgactaaacccttcatctatagggttcctttcctttctctctttctctccctttttacctcccttgcaatgtattttggcagctattggtttattttcctatagagtatttcacagtctggattttgtacctctgtggtatcattaaacatatttatttattcctgataattcttattaattgctaattgtatttagagagttactaaaacttaggctcaatatttaggcaagaattttctgtagtgggttacaagtacttccatcagcagggacatattgtctggttgtctatcttttygtgacattttaagccttgaaaatcactgcttaatcactagaactaagtgtatatttcatttagggttacagaatattctaattctgcaatttcttcatcattttattaactggaatacttctatgaagagaaacttctttttatcaaatattcattccctgagatacctttgtagaagaaaggcataataagtatttcacttttacct

SEQ ID NO: 894100 - DNA, 684 bp, Homo sapiens
acagataattcccgtatgtataatactaaaatgagttttttcaaccattaggaatagatatcttcatttactaatttttaaaatcatgtctcccagcaatttttggtagtttatcattgacatcctagacaaaattatttttttttgcatttatttccaggtattttatattttaagcaattcttacaaattacattttctctttatattttctaatactataacttggtataaagaaaacatacagattttttgtatgttgttatttttaatgtttttcaaattacttttattggattttccaaatgtataatcacatcatttatcaatatttacaaatttctctctaattttccattttatcttatttttcatctttcaacttttattgcattcttatttaattttattttatgtattgattkattagctgttttattttgggttcaggggtatatatccaggtttgttatatagataaattgaatctcatgtgggttttgtgtacagattgttttgtcacccatgtaataagcatactactcaataggtagaataggtagtttttcaaatatcacccttcacctaccttccaccctcaagtaggccctggtatctgttattcccttctttgtgtccatatgtactcaatgtttagcttccacttacaaatgagaacatgag

SEQ ID NO: 894101 - DNA, 684 bp, Homo sapiens
acagataattcccgtatgtataatactaaaatgagttttttcaaccattaggaatagatatcttcatttactaatttttaaaatcatgtctcccagcaatttttggtagtttatcattgacatcctagacaaaattatttttttttgcatttatttccaggtattttatattttaagcaattcttacaaattacattttctctttatattttctaatactataacttggtataaagaaaacatacagattttttgtatgttgttatttttaatgtttttcaaattacttttattggattttccaaatgtataatcacatcatttatcaatatttacaaatttctctctaattttccattttatcttatttttcatctttcaacttttattgcattcttatttaattttattttatgtattgatttattagctgttttmttttgggttcaggggtatatatccaggtttgttatatagataaattgaatctcatgtgggttttgtgtacagattgttttgtcacccatgtaataagcatactactcaataggtagaataggtagtttttcaaatatcacccttcacctaccttccaccctcaagtaggccctggtatctgttattcccttctttgtgtccatatgtactcaatgtttagcttccacttacaaatgagaacatgag

SEQ ID NO: 894102 - DNA, 625 bp, Homo sapiens
aagcccattgttatgctgtctttaagagactcatctcacatgcaatgacacacataggctcaaaataaagagatgaaggaacatctacccagcaaatggaaaacagaaaaaagcaggagttacaattctagtttctgacaaaacatactttaaactaacaaaaataaaaaaagacaaaaaagggcattgcatattggtaaagggttcaattcaacaagaagagctaactattctaaatatacatgcactcaacacaggagcacccagattcataaagcaagtttttagagactttaaaacagacttaggctcccacacaaaatagtgggagacatttacatcccactgacaatattagacagatcattgagacagaaaattaamaaagatattaaagacctgaactcagctctggatcaaatggacctgatagatatctacagaactctctacccagaaacaacagaatatacattcttctcattgctacatggcacttactctaaaattgaacatatagtcagaagtaaaacactccttagcaaatgcaaaagaactgaaataataacaatctctcagcagcacaatcaaattagaactcaagactaagaaattcactcaaaac

SEQ ID NO: 894103 - DNA, 596 bp, Homo sapiens
gaaaaggaggggctcttctctaactcattctatgaggtcagcatcatcctgataccaaaacctggcagagatacaacagaaaatgtaaacttcaggtcaatatccttgatgaacattgatgcaagtattctcaacaaagtacttgcaaatcaaatccagcaacacatcaaaaagcttatccaccatgataaagtaggtttcatctctgggatgcaaggttggttcaacatatgcaaatgaaaaaatgtgattcatcacataaacacaactaaaaacaaaaaccacaagattatctcartaaatgcagaaaaagcttttgataaaattcaatacagcttcatgttaaaaaaatctcaataaactaggcattgaaggaacagacctcaaaataataacagtcatatataacaaatccacagccaacatcatactgaatgggcaaaagctagaagcattccctttgaaaactggaacaacacaaggatgccttctgtcactactcctatagaacatagtgttagaagttctggctagaacaattaggcaaaacaaataaataaagcacattcgaataggaagagaggaattcaaaccat

SEQ ID NO: 894104 - DNA, 598 bp, Homo sapiens
gccaacatggtgaaaccccgtctctaccaaaaatacaaaaattagttgggcgtggtagtgcacacctatagtaccagctatatggaggctgaggcagaagaatcgcttgaacccaggaggcggaggttgcagggagcagagatcgcaccattgcactctagcctggcaacagagcgagactccatctcaaaaaaaaaaaaaaaaagagtaatatgctacctagtggggaggccagggaaggtttccctgaggctgtggctatagggctgtgatctgaaggcccagsaagggttaacttggggagaggagaaagagcattccaggcagagggagcaggccttgcaaaggctttgcgacaacagaaagccctgacaaaggactgaaagaagacccacgtggctagggctgcagaagtgtagaggaagattagattgggaaggtgggtaagaaatgaccattaagtttcaagcagggggaacatgagactcaaatgtgcattttgaaaaaaacaaaacacacagactcagactgcagtatggagaatgggactggaatgttacaaaggcttgagagcagctgctaactgcctgtagcaccc

SEQ ID NO: 894105 - DNA, 695 bp, Homo sapiens
tacccctagatgcgacttgcttccataggagactttagcctaggagaactgtcatacctgatatctgcagggtgtcttgctcatcagacaggtttggtcagacctgaacaccccttgatctgctggcctcctctgactagcagagagctccagtggggcagcccctgcagccaccagcccacctgctccctccccatattgcagctttttttcaggcccacggaaactccccctttgctggcactgtctgcagggcaagttgttgtttttcttgccctgccagcatgtaggagtgcagtgcgctcccccaactccccaccactggcaattgtcatcgcagacaaagtcttggtgggcasagagccagccagccctgcccctgccagtgccctgcccttgcgctaaaactgtgcagagaacagcagatcctcccctgccctgagcaaacactccagctagcaggacacagagaagggacccaggcctgtgcccacaagtaccccacccccaagccaacaacctccagcctgactgcacagagttgccatcaggggccccccacctcacccagctgcagtgccttcaccactatggcagctgacacaactcggctcccccagcacagtaggttcctgatgtcaaggagccagaggacaaagttggggcccaatagaggtcccccagagttagagaac

SEQ ID NO: 894106 - DNA, 667 bp, Homo sapiens
acagaatagagaacctagaaataagcctgcacacctgcaactacctaatcttcaacaaatctgacaaaaacaagaaatgaagcaagaattccctattcaataaatggtgctgagataactgactagccatatgcagaagattgaaactggaccccttccttgcaccgtatacaaaaattaactcaagatggattaaaaacttaaatgtaaaactcaaaactgtaaaaaccatggaagacaacctaggcaataccatcctggatataggaacgggcaaagatttcatgacaaagatgccataagcaattgcaacaaaagcaaaaattgacaaataggatttaattaaacttaacctctgcacagcaaaggaaaccatcaatagagtgaacagacaacctacagaatgggagaaaatattggctaactatgcatttgacagaggtgcaatatccaacatctataaggaacataaacargtttattttaaaaagaaaacattaaaaagtggccaaaggacatgaacagacacttctcaacagaagtcatacatgcagccaacaatcatatgaaaaaagctcagcatcgctgatcattagaaaaatgaaaatcaaaaccacaatgagatatcatctcacattagtcagatttgctattattaaaatgtcaa

SEQ ID NO: 894107 - DNA, 613 bp, Homo sapiens
caggtgtcacaattaatggattactactaataatttaagaaatttggaaataattaatatttttaaatagttgattattgttatacttaaagatgactcaaagttaattcaaaataatctcttcttgttgtttgcttacttgccttcagaaaagctcttttggctataatagagagaaaaaggtagagttgtagttggtggtcatactccaggaaatctggatttgatggacatgcttgtaaccgctgtgctatgctgagtggcccctttcacaagagctggatgacagtaactaaatccgtactattacatgtaatcatagctgtctacaacctggaaaaggtcttgcaactcttttaaatcctttcactttgttttatctagactacatrtggtttggaaaagcaatgacatgtacatgtagtaggaaggtatatgaagcatttctatttatgggtgtgtgtgtgtgtgtgtgtgtgtgtgtgtgtgtgtgtgtgtgaagggtaagaatcacaatatgtcttctgaaaatagaaaaaaacaatttgtctatttcaattgtactcacttttaacccctgcacaattctagtgaataaaactgactgatgttt

SEQ ID NO: 894108 - DNA, 623 bp, Homo sapiens
ggctagaaaatagagcatcagaaatagtaatcatctttattacctagaaaatacagaaatgccaaaaacttattaaatcacaaaatattatgtctaagatttaaaatagcaatagcaataatttaaaaagatatttttaatgaggaaaatatattactattcttattagtgaaatagttctaatttatctaccatgatgaaatcatatatgggagataaattakaagtatatgcatatacataatcactctaattatttcaagacttttgagcagcagtatctttctttaagtaagctatatattactattaattcactgggcagtgcaattacagggaattttcttcatttttgtttaatctatcttttctaaatattctgcacagaaaatgcattactatataataaaattatttatatttaaatacacacaatgtaaaaaagttccactggccgctttttaaaagcattgttttttaaacattattaactatatctagttatatttttatattatagttactaaatatatgactgaagtattagtaataagatttatacattcttttgtgccagtaacactttaaactgtcctcaaatctataatgtatgcttattagaa

SEQ ID NO: 894109 - DNA, 566 bp, Homo sapiens
aagatcaacttaatgaaataaagcatgaagacaaaattagagaaaaaagaatgaaaaggaacaatcaaagcctccaagaaatatgggactaggtgaaaagaccaaacctacgtttgactggtgtacctgaaagtgacagggagaatagaatcaattggaaaacactcttcaggatattatccaggagaactcccccaacctagcaagacaggccarcattcaaattcagaaaatacatagaataccacaaagatactccttgagaagagtaaccccaagacacataatcatcagattcaccaaggctgaaatgaaggaaaaaaatgttaagggcagccagagagaaaggtcagattacccacaaagggaagcccatcagactaacagcagatctgtctgcaaaaccctacaagccagaagagagtgggggctgatattcaacactcttaaataaaagatttttcaagcttgataagtgaaggagaaataaaatcatttacaaacgagcaagtgctgagagatttttgtcaccaccaggcctgccttacaagagctcctgaaggaag

SEQ ID NO: 894110 - DNA, 607 bp, Homo sapiens
atttctttgaagaaagaaagtcaatttgataaatttagcttagcctaagtgtacagtgtttataaagtctacagtagggtacagtaatgtcctaggccttcacgttcactcaccactcactcactgactcacccagagcaacttccaatcctgcaagctctattaattgtaagtgccctatacaggtataccttttttatcttattttaactgtacctttcccaygtttagatatacaaatgcttaccatagtgttacagttacctacagtatattatacagcatggtaacacgctgtataggtttgtagccaatatagactgggtgtgtggtaaactaccatcttggtttctgtaagtacactctatgatgtaaacacaatgatggaattgcctaatgactcatttctcagattgtatccccattgttaagtgacatctgactgtaattactttaatacttgataatttttacttcaccaggattgtagaacacacacacatgcatgtatgcatgcacatgtgcacacacacaaagctttaacttactgtttaaaaaggactgctatggcaaagacagtggggcttaaatatcttctgtcctgtgc

SEQ ID NO: 894111 - DNA, 657 bp, Homo sapiens
cagggtccagcaatagctttattcttagaagagtgagagttttatcgtatcacttccacatttaaaatgacaatccatggcttctgtgtaacaaagtgtcttagagctgagtcatagaattctccaaattatgcttttgaattcatattctaaaatcataccttacaaatctgagtagataatacattttgattagtagaaatcctgtctttattctaggagaaagaaatcttattcaaattacctgaacaatataaatgtaagtttcagcttctattttcttgtttcttgtatcaaccaacaattcaacagtaagttagattcaaagggtttgatggcctattatctgtaagtgaataaagatccagtgaagttttacagtagatatttaacataggctagatattattcttttacatttctcaaaaacaaaacacagaaaactctattcatgtttttgtttacttattgtacrttttgaagaattaaaacatactagcagttgcataaatttgtatgatattatttctgtggtgatcttaatttttcttttatagctgttgctgtgacattttgaatccagatctggcatgattaatggagagactggccatgctgcctcaagacagagtagctgcagccagtgatggagaatgt

SEQ ID NO: 894112 - DNA, 607 bp, Homo sapiens
ttgcttttgttgcaactgcttttggtgtctttgtcatgtaatctttgccagttcctatgtccagaatggtattgcctaggttgtcttccagggtttttatagttttgggttttacatttaagtgcttaatccatcttgagttgatttttgtagatggtagaaggaaggggtccaatttcaatcttctgcatatggctagccagttatcccagcaccatttattgaataggaagtccttccctattgcttgtttttgtcagttttgttaaagatcagatgactstagatatgcagccttatttctgagctctctattctattccattggtctatgtgtctatttctgtactagtaccatgttttggttattgtagccctatagtatagtttgaagttggatagtgtgatgctttctgctttgttctttttgcttaggattgtgtgggctatttgtgctatttttttattccacatgaattttaaaatagttttttctagtactgtaaagaatgtcacttgtagtttgataggaataacactgaatctataaattgctttgggcagtatggcaattttaacaatattgattctttctatccatgagcat

SEQ ID NO: 894113 - DNA, 598 bp, Homo sapiens
agcccgtacttttgaggaaaatagaagacaaaaggtttttaaaaaacacaaagtgtatacacgtatacacaaagtttacaagtttgtgtgttttaacatctactctccttaagaacaagtagacaggaaagatattacctgatatgggttaaattgtgtccccaaaaacatgttttgaagtgctaacctttggtacctgtggatatgaccttacttggaaataggtttttgcagacgtaaccaagttaagatgaggtcatatttgattaggctgaaccctgaatccagtatgactggggtccttatataaacaagagagacacacgcagagtgaagatgatgtgttgaaacacaggaacagtgtcatgggatgctggggacagcagttggagtgatgcatctatgggccaagggaatgccaaggattgccagccatcaccaggacagaagcatgkgtactgatgccctcacagagcccttgaagagagtcaaccctgctgacaccttgatttcagacttccagcctccagaactgtgagagaataaatttccgttgtcttaagtcacccagtttgtagcactttattatggcagccct

SEQ ID NO: 894114 - DNA, 604 bp, Homo sapiens
tggtttttgagaaatttgattgtgatgtgccttgggttaattttcctcatgttcttgtgctttggatttgttgagcttcttggatctgtgggtttatagtttttcatcaagtttggaaaagtttcagttgttataccttsgactctttttgtgctcctttccccaaagactcccgttacacatgtattagggtccttggaattgtcccagaggttactgatgttcttattatcattttaaaattatttttctctgtgtttttccttttagatagttgctatctttatgtcttcaagttcactaatcttttcaactgctatgtctattctgccactagatacattccatgtattttttcttctcagacattctaattttcaactttagaagttttggaagtctttttttgcatatcattcctatgtctaattacttcttcatggatgtctggaatatgggtttttgtttaatgttagtgcttaagtcttctattttattatttgttttctatttgttcattctgttttttgttactctcagcatcttttcttgatttcttttgagttacttgaactttgttttagaattctattttcatttatac

SEQ ID NO: 894115 - DNA, 462 bp, Homo sapiens
aaatatcttctcttcatttttgtgagtgactgtttcttcttcctatacagagctctgtagtttcaagtttaagattttttctttttctttttttttttttttagacggagtctggctctgtcgcccaggctggagtgcaytggcgccatctcggctcactgcaagctccgcctcctgggttcacgccattctcctgcctcagcctcccgagtagctgggactacaggcgcccgccaccacacccagctaattttttgtatttttagtagagacggggtttcactgtgttagccaggatggtctcgatctcctgaccttgtgatccgcctgcctcagcctcccaaagtgctgggattacaggcgcaagccaccgcgcctagccctcaagtttaagatttttagtcttaagataggagaacttgtttttctggattcacttaactttgttactggaggacttgt

SEQ ID NO: 894116 - DNA, 613 bp, Homo sapiens
ggtaagataaaaagatcagagtttagtcctcaaactaatacaataagtttctactttctctccaagtatatcctgtttctgagtggcaggtgaaagttgtgtttcccttcaaccacagcacctggcccagaaccagccttacctgctatccactggtctctgggtctctctttttatgccaatctccatccctttccttaaattcttcctcaggattcccctgagttaccctggaatctgaattcagtttacccttccaaaccaagaaatgctgtttatatctgtgttgtgattacaaataaggttcaagtttytgccttccaccctcaaacataaagaaggctcacagtattcacctgtgaccatggacctgctccagctgaggaagccaagagatttgtttcttttcccctccctcccttcctccttcctttcctgctttctaaaatcataatgtgtaacttttccatgaagggagcaggaattcactcaatcctactcaatcatctcttccaggccatgtgcttttttcccttgattttcagttttggaagaactatttatgtgtaaatagcatcctttctatctgaatcttccataattaaccatcttt

SEQ ID NO: 894117 - DNA, 554 bp, Homo sapiens
tagaagtttggtttaattctttagccttccactcagaagacttatgaatttagtaagtgtattgcacatgtaacaagtcttgtgtttgagagctcgctcttgattttatcctaaaatagcagctctctggtttgatcaagcccagtttctgaggttctagccaatgccagaatcagcaagtgacctcaccataagtcacagctctctgacggctttaaatacagagatttttaaattcattctcccttctccaacttttttgagtagaaaccctgtcctggcagactattttattctgctcagaagcaagtaaatgacttaygtgtttttaagtcaccattgaaagtcaccagtttcaattactaaaacaacaaactacaaaacatctaggaacaaatctaacaaaagttaggcaagacctacagataaaaaaattataaaattttactggacaacttttcaaatgaagaaacaattggagcaattattgccagttcttagagaggaaaactcaataccataaagaaactacctcaacataatacaacgcatat

SEQ ID NO: 894118 - DNA, 638 bp, Homo sapiens
ccaacgaagatcaaaaaacacaaagaagggcattacataatggtgaagggatcagtgcaacaagaagacctaactatcctaaatatatatgcacccaatacaggagcacccagattcataaggcaagttcttagagacctacaaagagacttagactcccacacaataatagtgggagactttaataccccactgtcaatattagacagatcaacgagacagaaaattaacaaggatattcacaacttgaactcatctctggrccaaggggacgtaatagacatctacagaactctccaccccacatcaatagaatatatattcttctcagcaccacatagcacttattctaaaatcaaccacacaattggaagtaaaacactcctcagcaaacgcaaatgaacagaaatcataacaaaggctctcagaccaccgtgcaatcaaattagaactcaggattaagaaactcactgaaaactgcacaaatactggaaactgaacaacctgctcctgaatgacgactgggtaaataacaaaattaaggcagaaataagtaagttctttgaaaccaatgagaacaaagacacaatgtaccagaatctctgggtcacagctaaagtagtgtttataggaaatta

SEQ ID NO: 894119 - DNA, 647 bp, Homo sapiens
catttataaccacagaaagataaaataatgtctggctcactttttactagtaatggggaagggtagcctggaaggaagggagtcatgtatgtatgtacatttataatacatcaagagagatatactgtaatttccattttttttttcaaaaaacaagaactctttgtgtctcattattttcttggtcaagttatagtgagaatgttcatgagaaaaaaaggccaaaatttaaactgctcaaatttctagccattcttttaaaaagcttgatttcaaaagggtatattgtaaattttagccatatggaaaataagaattgaagacaacagaattatcctcagtatgagttgcctcagacrtggttcttctagagggtagcttagcaatggccttcccctcaggtaattatcacaacatttctgtgcatgtctgagtgtggtgcacgctttctgtaacttaggagcctgagatagctgaaaagctatgcaagtacaataatcagaatgggaaccagccaggcattctgactcaagagggataaaaaggaaatcagctgcctaatgaggctctttctttaccccctgcccttgtgaaaaatagaggctacagtatttcattatgaatctgtgtgcttcgtttctcaccct

SEQ ID NO: 894120 - DNA, 557 bp, Homo sapiens
ggaaataatagagcaagagcataatcaaggagagagggagaaggaaatatttaagaaaagatagattaacaaaagaactgtatttgtagtgataaataaggaaagggatcagagcataagagaaggtctggtgtttgataggaggaaagacaatgaatgaggaggaatctgggttcagatgcatgtagatgtctaatgacaggaaaagctatgcrgataattgtcctgtaaaatagtcatatgaggttaaaaattcacttaaaatttatcaggatgccactttttttttgcaaagagaaatagaactgataagtgacctggacataacatgccctcaagacaccctgcattcttcctgaaggaaaaccaagatgagaatctaaattttagtcaaaacaacactgttgctcataatattagaatatgagaatttgatctgatcatttaattgtcaatgacattaagccaagatagccatccagctatttctatctttaaagataattccaccaaagaggatagatggctatgttaccctggacattgctgaatgaata

SEQ ID NO: 894121 - DNA, 538 bp, Homo sapiens
tgggggggttgggggagggttagcattaggagaaatacctgatgtaaatgatgagttgatgggtgcagcaaaccaacatggcacatgtatacctatgtatcaaacctgcacgttgtacacatttaccctagaacttaaagtattaaaaaaaacaaaaacaaaaamaaactcctgtgctctcctgggctcaagggatacttccacttcagcctcctgagtagctaagactataagcatgtgaccacaccaggctattttttaaaaattattttaagtttctttttctagagatggagtcttaccatgttgctcaggctggtctctaactcatggcctcaagcaatcctcctccttggcttcctaatgtgctggggttacaggagtgagccaccatccctggccaccactaagtttctaactttctctgcagttttgccttttcaaaaatgttgcatagcaggaatcatatactatatggccttttcagattggcttcattcactttgtaatattcatttaaggctcctcaatgtcttct

SEQ ID NO: 894122 - DNA, 620 bp, Homo sapiens
cacgtgccatgttgttgtgctgcacccatcaactcgtcatttacattaggcatttctcctaatgctatcccctcttccccccaccccacgacaggccccggtgtgtgatgttccccaccctgggtccaagtgttctcattgttcaattcccacctatgaatgagaacactcagtgtttgattttctgtccttgcgatagtttgctcagaatgatggtttctagcttyatccatgtccctacaaaggacatgaactcatccttttttatggctgcatattattccatggtgtatatgtgccacgttttcttaatccagtctatcattgatcgacatttgggttggttccaagtctttgctattgtgaatagtgccacaataaacatacgtgtgcatgtgtctttatagcagcatgatttatgatcctttaggtatatacccagtaatgggatcgctgggtcaaatggtatttctagttctagatccttgaggaatcgctacactgtcttccacaatgatagaactagtttacagtcccaccaacagtgtaaaagtcttcctatttctccacatcctccccagcacctattgtttcctgacttttaatgatcaccattctaa

SEQ ID NO: 894123 - DNA, 593 bp, Homo sapiens
tacatatatctgcttatcatttcaaaaagaaacagaaagcacatcagtaaacaaataaatttgttacttcaacagattggagggaaggtgatgggatggaaaacacatgagagagagagtgacccctctctgaatataactttgtattttctgactttgggaacatgttaacatggtacatattcaaaaaataargtattgccctttaaggctcaattatagtatctgctaggtggcaacaccttttagcaacacctactggctcagtggcaacactgataacacatttgtgtggtgtgaagtcaacgtaggaccttgctatgtccacaggaagtttctaaatgagtgaccaatatattgcactgcttctttcacagtaaaggtttggtctgggtgtcaaggggtagaaatgagaatttcttttgtgtcactatttatccactgtcaaaatttggcttcccattcagcaactttgggttctgttggtcttgaagtattggttcccaagaaaaaacacttacacaggacacccaacagtcgctccattatgctgggagctgagactgccacatgtccaatttggctgcttgtgt

SEQ ID NO: 894124 - DNA, 556 bp, Homo sapiens
gatttgaggtttcacatgagcatgttcttgaggtaccatttaagctttctttgtgataaagacaggcatttaactatttccacccaaaatatctcctaggctaagataatgccgtacatatgtgtgatagagagtattaggccttcattgaagtatatttttggaaaataaatataaatcacaaagtgctttgtgaaaaactattgaatatgcctgtaggtattgcatttaacttccatatgaaatgaggtgtcccatctagacttgaaagtggggtttcattaaaaactatataacaaaattttaaatttaacaactacatgctttttacgyaaaaataggttttgctttgaaaaaattacaaagaatttctctcatttagacatttatcaatagtttaaccattaattgtggtctatttatttaccattaacaagtttaacaaagtcaaataatgttaaatggggataatataagatgtgtcaaggcaaagattcatttctcaattttttcaaacaagttttgtattatattaaattaccaacacaatgcatta

SEQ ID NO: 894125 - DNA, 679 bp, Homo sapiens
caaataaactagaaaatctagaagaaatggatacatttctggacacatacaccctcccaagactaaaccaggaagaagtagaatccctgagtagaccaataacaagttctgaaattgaggcagtaattgagagcctaccaaccaaaaacagcccaggaccagacagattcacagccaaattctaccagaggtacaaagaggagctggaaccattccttctgaaactattccaaacaatagaaaaagagggactttgccctaacwtattttatgagaccagcatcatcctgataccaaaacctggcagagacacagcaaaaagagaaaaatttcaggccaatatccctgatgaacatcaatgcaaaaatcctcaataaaatactggcaaaccaaatccagcagcacatcagtcaagtcgaaaacaatcaagtcagcttcatccctgggatgcaaggttgattcaacatatgcaaatcaataaatgtaatacatcacataaacagaaccaatgacaaaaaccacatgattatctcaatagatgcagaaaaggccttggtaataacagctatttatgacaaacccacagccaatatcatgctgaatgggcaaaagctggaagcattccctttaaacaccagcacaagacaaggatgccctctctcaccactactattcgaca

SEQ ID NO: 894126 - DNA, 679 bp, Homo sapiens
caaataaactagaaaatctagaagaaatggatacatttctggacacatacaccctcccaagactaaaccaggaagaagtagaatccctgagtagaccaataacaagttctgaaattgaggcagtaattgagagcctaccaaccaaaaacagcccaggaccagacagattcacagccaaattctaccagaggtacaaagaggagctggaaccattccttctgaaactattccaaacaatagaaaaagagggactttgccctaacttattttatgagaccagcatcatcctgataccaaaacctggcagagacacagcaaaaagagaaaaatttcaggccaatatccctgatgaacatcaatgcaaaaatcctcaataaaatactggcaaaccaaatccagcagcacatcagtcaagtmgaaaacaatcaagtcagcttcatccctgggatgcaaggttgattcaacatatgcaaatcaataaatgtaatacatcacataaacagaaccaatgacaaaaaccacatgattatctcaatagatgcagaaaaggccttggtaataacagctatttatgacaaacccacagccaatatcatgctgaatgggcaaaagctggaagcattccctttaaacaccagcacaagacaaggatgccctctctcaccactactattcgaca

SEQ ID NO: 894127 - DNA, 516 bp, Homo sapiens
attaggaattataagtaatgtagatgtgatgtaagtatatgagaggctgtgcataggctatatgaaaacactatgccattttatgtaagggacttgaacatctgtggattttggtatctgcagaagatcctggaaacaatcccccacagataccaagggatgactgtttcatttcaaatttgaaattacaaactagaagcacacatagytgtttcactgctaataataaacctagtaaaagaagaaaaaaaatgagtgggaagaaactggcattgcagcaagaacacttaggtcaagttgtggctctttcagtaagattggtgcatacaatcaatacctttgatgtctgtacatagtgggggagagggaagtggccacaccttccgggagaagaaaagaaggcaggcgacctggtccaatctccttttcaacacgaagaatggtcttctaggtaaaatgactaatgctgtttaataagaggagggtctttaaggaattgtcttaattgaatgtccc

SEQ ID NO: 894128 - DNA, 641 bp, Homo sapiens
aatgatagtcatccatgtgttgctttttccttaaatcatattctctgatatacgctgattggtacactctctggtcaatagttgtcatcttaggatctctttttactgccttttggagatttcctttgccttactcctatactgggtatctatcctcttttctgttgtctcctgtgtcttgatttactctcttatttgatagaacatgtccttcagtagcctcctgaggaagaatggatatgagatacatttttgagattttgcatgtctatatatgtctatatatgtctatattctaccctcacatttgattggtatttctctgagtttggaattctaagtggaaaataattttttccttcacaatttttaaaagatgttgctttattgtcctctttctctcttgccgtggagaattttgcatccactcargttccttatgtgtgatttgcattttttcccctcacttgaagctttcagaaactttacatcagtattctcaaattgtacaatatgggctttgatgtggctttattttcacttattgtcctgggcactcagtgagtattttcacttactcttttcttaaaatctttgttttgaagtttgggtaatttttatgaacctatattcaggtcaca

SEQ ID NO: 894129 - DNA, 592 bp, Homo sapiens
cataatcttatttgccatatacatcttcagataagtgaatctcgtcattttcacagataaacccagagttgggattattgtccacattatatagctaatatgtagagaaataaaatactatagattgtattctacatggtgatgagcttctggatcttcacaaagagaaagatgaatacagtggttagtattcatttactgagacctctctgtgtctcagtaagtcatgaagccttgactagagctcctttcatgcctctgcatgtaactcygagacactgtgtcattggttatcccagaagcaacagctgttattgctggcctctgttcctaagtctagtagagtttggaataatgaggtttctagtcatctttaaaatgagatgttgcctttaggtcctagggaagtaaaatgtcaataacactttccagttccctgagaaatctttgaatgacctgaaagctggttccagccatcagttacaatctgtgggaaaacagtattattcaggagcaatgaggaaagaatatgtttacatctttttgctgagacaagtctttggtcatctaaggattctggttatcttgaaag

SEQ ID NO: 894130 - DNA, 618 bp, Homo sapiens
catgttaatggttctgctctcccaataaatctagttacatatagatccttagccaatttactttttcattatagagaggagaaatcataacatagcatgaactagaactaatttaacattgtacacagtttaaaacttcagtggagttgaaattaagatcattgaaaccccacgagaaaatttacttcctgttccaagatacttgggcttcccagggctaaatggacagtatttattcagcatcctaggtgagtctcactcttaggtctracattgggtcacatctatggggatttcagcatggcttcacacaatctgtccctgccttcacctctgaggcaccaactccaagaaaaaactgtggatataccggtcaaattgggtcttcaaatatgatttactggggtaccagtatgtgtgtatgtatgtgtgtttgtcttgatatgggtctctcttcagggaaaaagacagagacacgcagagatacagagataaagagagagagagtgggagaaagagagagaaagaaataaagcactcacttccctcaaaaactcatacttgaaagctaaattaaaaattaaatatatttaaacttaacaaatggattcaaaagtc

SEQ ID NO: 894131 - DNA, 624 bp, Homo sapiens
tgaatcaggctgtcattgtttttatcttgtcatgtggttagacatattagttgttgttttaccctggttctcttgcgattgtatttttttggttattttcttcagtccacagggtttgttttttggaggattgccttttaaaacagctgctcattgtgtgagaattggctcagcttaaatgagataatgtagtttctaaattcacctaactgggtgtgcataagtcagtatgttttattatatggaaatcaaaccaatgacaggaagacttgatatggaccccttattgccaatggacagccagcctccctcgaaacacctcsctcactgcgggtgacacatgaaggtctgatatttacttacagcacaaggtgcattagtcatgggaggttaggctatgctgtggtaataagtaacccccaaataccagtgtctaaacacaattcaagttcatttatcactctaagagagacagcatggaccagacagcttctctgcatgatctctttgcttctagggtcagtgcaatgtgaaaggaaggctgtgatcaggccaggaggccaatcccattggccagatcctggccacatgaattgatcatagctgcaaaggggtctgggaaat

SEQ ID NO: 894132 - DNA, 668 bp, Homo sapiens
caagggtggaagatcccacttattcaatgccaagctcacccataggtacttccattttctcttagctttccagggtcacagcctttgttatcatctctgtacatggcctcttaaaatgtgtctatggcttaaaatgtgcctcggccttccgggtcctgagcactgacaccaygcctcctcatggggtccatatccccaggcttggacggattctctttctcagacattccaacacaaaagtcccctttagctccatttccctgtgataagctttggctgcttccaaggctcagcacaactccttttgagaaggcagggagtcgcctctgcacctgagtgttgaaggtgactttcccgagtgtcttcaaaagggcatttttctacttaagcttctggaagtgtgcttcctagagctgggttgcaatatctctgttctcaagatgtatgatgaggtcagtagaacgatctatgatcccatgagccaaacatgtttctgcctttactgcattagggacatgctggtactgtattagtctgttctcatgctgcaaataaagacatacctaaaactgggtaatttgtaaaggaaagaggtttaatgggctcgcagttccacatggctgggaaggactcacaatcatggtggaagatgaaggaagagcaaaggg

SEQ ID NO: 894133 - DNA, 494 bp, Homo sapiens
ctgtgctcttatgatccattctcctgttaatgggtctttaagttgtttatcatattttattattgccaccaatgttgcaaaaacgttcttgggcacctctcattctgcacttaagctaacatctctgtagaatatgyacaggagctgagagggctggataatgagctttaccacctattgacacaaattgttctgtaaagggacttctgctcctactggctgtgtatgaaatttgctgcttgtctacaccttgaacagtgacacagaggctgtccttccagtcattgtatcagctgtgtcttcgaggagccattgcaattttctgtcaagccgactgcatctacatggggtggtatgtggttctatcattggaccccagggtcacaggcccactctgtaccttcttggctctgaaatgggtacctggtcacttctatgtcatataggattccttgtctgtggattaggcattctgtgaacccccagagagtggt

SEQ ID NO: 894134 - DNA, 678 bp, Homo sapiens
tcatataccataaaatttacccctttaaagcataaattcagtgtatagtcacaaagttatgcaagtcttgctactatttaattccagaacctttttatcgtccccagagggaaactttgtattccttagcagtcactcctcaatcccttttctccccagcctctggccaccacagagcagctttctgtctgcttggatttgtcagttctgagcattttatgtaaatggaatcatacatatgtggcctttttgactgacaggcttctttcacttagcataatcttttcaagtttcacccatgttgtggcatgtatcagtacttcattcctttttgtggacaaacaatattccattgcatggatatagccatattttgtttatccactcatcggttgatggacatttgagtggtttctatcttttggctgtgataaataacactgctataaacatttgtacacaagtttttgtatggacatgttttccactctcttggatgtcaacctaggagtagaattactaactcattttgtaaaatatacrtttaactttttgaggaactgtcagactcagactgtttttcaaagcagctacactactttatattcccatgttccaatttctccatgtcctagccaacatttattacctttttttttttttttttttttttttggt

SEQ ID NO: 894135 - DNA, 626 bp, Homo sapiens
tctgctgcctgaggaaaccctgtgagtacgggcatggagtgctgggtttaaggaaaaaccagcctgaagggcactgtctgggaaggatgggaaataatacctaagggtggctggggaactctaatcttggaagttatatcaaaagaggacaacaaccatctgccttggaagttttaggtgcaggttttcttccagttggggaagggattggggtgtgggggcactttccctctggtggttttgtagtaaacctttccaaatggacccaactacttagatgtatggacctattaacaagaaggcrtagatactcttcggctcataaccagtggaaaggcatggttcctgtattggaagcatctactactggagtgaaattaactcctagtctgttagttttccagagctgctgtaacaagtctccacaactggatggtacaaaataatggaaatttattctcttacagctctggaggttagaagtccaaaattaaggtgtcagcagggtgggtcccgttttggaggtgctgagggagaatccattccctgcctctctcccagcctctgatggttgcttcaatccttggcattccctggtttgtcagtgctgatgcattcaatctcta

SEQ ID NO: 894136 - DNA, 612 bp, Homo sapiens
agaatgcctgggatctgacctgccccagattaattgacatttccagattttggtaactataaccaaaataatgaatttatttgatgctgttacccacaaaatcatattacctaaggggcattgtctgtcaagatcatgagatgagcccatcttgacatccccaattgaaggtggcttcgtcatatgccatacattgtagaaaaatgttttkcatttgtgatcaagccatgcttttcccgaatgcatgattataaaaatatcttatgaagtatttctagtggttcaatgcatttgtgttggctcccagggagagaagagcttctgtataaacagccatcacaacttcaccatcagtgagcagatttacagaagaggaaacataaatgactaattcacataaagtgttcagcctcactcaaattgagatataattttatgcatgattttaatgccatcttacataatatattcttgtccatttttcattgggttgtaaccattttatatattcagagtcttaacattttaatggtaatatttctgatatacatcttttctcattttgttatttaatattttgttagctttttgacatatggatatttcacattt

SEQ ID NO: 894137 - DNA, 681 bp, Homo sapiens
tgtggctgaaaggggccaatgtagagctcaggctgtggcttccgtggatgcaagccccaagccttggcagtgtggtgttgagcctgcaggtgcacagaagtcaagaactgaggtttggacacctctgcctagatttcacaggatgtakggaaatgcctggatgtccaggcagaattttgctgcaggggcaggaccctcatggaaaacctctactagggcagtgcagaagggaaatgtggggttgaagcccccacacagagtccctactggggcaccaccttgtgcagctgtgagaagagggccaccatcttccagaccccagaatggtagatccactgacaggttgcactgtgcacctggaaaaactacagacattcaacaccagcatgaaagcagctgggagggaggctgtaccctgcagagccacaggggcagagctgtccaagaccatgggaacccaccttttgcatcagcatgacccagatgtgagacgtggagtcaaaggagatcattttggagctttaagatttgactgccctgctggatttcagatttgcatggggcctgtagcccctttgtttttgccaatttctcccatttggaatggctgtatttacccaatggctgtacccccattgcatctaggaagtgactaagttgcttttgattttacaggctcat

SEQ ID NO: 894138 - DNA, 681 bp, Homo sapiens
tgtggctgaaaggggccaatgtagagctcaggctgtggcttccgtggatgcaagccccaagccttggcagtgtggtgttgagcctgcaggtgcacagaagtcaagaactgaggtttggacacctctgcctagatttcacaggatgtatggaaatgcctggatgtccaggcagaattttgctgcaggggcaggaccctcatggaaaacctctactagggyagtgcagaagggaaatgtggggttgaagcccccacacagagtccctactggggcaccaccttgtgcagctgtgagaagagggccaccatcttccagaccccagaatggtagatccactgacaggttgcactgtgcacctggaaaaactacagacattcaacaccagcatgaaagcagctgggagggaggctgtaccctgcagagccacaggggcagagctgtccaagaccatgggaacccaccttttgcatcagcatgacccagatgtgagacgtggagtcaaaggagatcattttggagctttaagatttgactgccctgctggatttcagatttgcatggggcctgtagcccctttgtttttgccaatttctcccatttggaatggctgtatttacccaatggctgtacccccattgcatctaggaagtgactaagttgcttttgattttacaggctcat

SEQ ID NO: 894139 - DNA, 583 bp, Homo sapiens
tgattgctgtcttggtactaagccagtacaaagacaggaatgaagatttacaaagttttcaaagattataatgggcccttgggtgtgatattttaaataggagctgactttaagtcaaaagctttcaaatcaaccagtaagtacttaacagaagtcctttcttcaygacaaggatgaaacacagagtggattacgcaaggtgaatctggtcagcccgggcctgaggtcacgtctgactcccagcaatggtgttttgcttggagacttctactgccctcttggcccctctgtttgacctggcatggtccatctgtagtcactctcataacatgtcatacattcctacacattctcattttctgtgctccttcaactttttttttttttttgagacagagtcttgctctgtcgcccaggctggaatgcagtggtatgatctcggctcactgcaatctccgcctcccgggttcaagcaattctcctgactcagcttcctgagtagctgggactacaggtgcatgccaccaagccgggctaattcttgtatttttagtagagatggggtttcaccattttggccagc

SEQ ID NO: 894140 - DNA, 583 bp, Homo sapiens
tgattgctgtcttggtactaagccagtacaaagacaggaatgaagatttacaaagttttcaaagattataatgggcccttgggtgtgatattttaaataggagctgactttaagtcaaaagctttcaaatcaaccagtaagtacttaacagaagtcctttcttcatgacaaggatgaaacacagagtggattacgcaaggtgaatctggtcagcccgggcctgaggtcacgtctgactcccagcaatggtgttttgcttggagacttctactgccctcttggcccctctgtttgacctggcatggtccatctgtagtcactctcataacatgtcatacattcctacacattctcattttctgtgctccttcaactttttttttttttttgagacagagtcttgctctgtcgcccaggctggaatgcagtggtatgatctcrgctcactgcaatctccgcctcccgggttcaagcaattctcctgactcagcttcctgagtagctgggactacaggtgcatgccaccaagccgggctaattcttgtatttttagtagagatggggtttcaccattttggccagc

SEQ ID NO: 894141 - DNA, 557 bp, Homo sapiens
ggccgggcgcagtggctcacacctgtaatcctagcactttgggaggccaaggcgggcggatcacgaggtcagaagatcgagaccatcttggctaacacggtgaaacaccatctctactaaaaatacaaaaaaaaaaataaaaaatagccaggcgttgtggcaggcgcctgtagtcccagctactcaggaggctaaggcaggagaatgacatgaacccaggaggcggagcttgcagtgagccaagattgcgccactgcagtccagcctgggctacagagtgagactccctctcaaaaaaaaaaaaaaaaaaaaaaaaaaaaaaaamaacttgtactatgacttcaacttccaagtggaatgtagatgttgtgattgcccaatgttcccaacacaattactggacaaaaagccagacaaatgaccaaaatcttgtttcaagtcgccatacagttgtagaaacaataattagatgaactggaatttcacaggaggagacttctagaacagtaggaattttgctaatgtttagtaaggcctcatgatcagatttggcccac

SEQ ID NO: 894142 - DNA, 635 bp, Homo sapiens
ctcaacctttgccccttatacctggattcagcacccagtataattcatacgtggactgacctggggctgctcaccctgtgttcatccatccagtgtaaggctctcatgctgggaggtcctttctaataggtgggatgcccctttggaaagtgcctctcaaggctcctcagtggacataagtggaaccccctttccttggctggaggccccaagagaaattgtggtttgtgtccccagtagacattmttttccaatccccccatgggacaaagcccttccattctctcagactcaccgatgggctgcattctaaaacattgggataaacttgactcccagactctcaaaaggaaacatcgaattttcttgtgtaatacagcatggccactttataaacttccagatcaggaatcctactggcttccaaatgggacctctgcccccagtagtattttataggttgacctctttggtcataattcttctaaacggcttgagattccttatatctgaggttgtgtaactctttctaagtttgctctcctctcccttacatggttccttcctttactaggacagctgcatttatacttctacttctcctcttcagtcctttgtctctttaatttactggt

SEQ ID NO: 894143 - DNA, 684 bp, Homo sapiens
atttggctgccaacagggaattctaaacaactaaaaactccagatgatgaatgcacaacataatgatggttaaattaaaaaaaaaaaagagcacggtaataaaatttccatgaaatattttgtgtaagcgcagataatcagtcattttctttrtagaattcttattcgtaaataatttagaatactttgttctttataatatatgatgggcaactatagtatgattcttctgagtgactcagttcttttttttttttcacatttaatgactttgtttctcctaagtgaatgcacagatagtatattaatcagggttctctggaaaaaccagaaccaatttattatcaggtactggttcatgtgattgtggaggctgagaagccccatgatctgctctctgcaagctggagacccaggaaagctgatgaaagtcaaaggcctaagagctggagggccgatggtatagattgcagcccaggtctaaaggcctgagaaccagaagcacagagggcagaagatcaatattccagctcaatcaggcaaagagaaaaagtcctcccttcctctccgtttttcttctattctgaccctggatggactggatgaggcccagccacattgaggagagccatctgctttaatcagtccaccaactcagatcctgatctcttccagaaacacctt

SEQ ID NO: 894144 - DNA, 601 bp, Homo sapiens
aagatgaatggaccagttcaaaaagagagagacagagaagtcctcctccctccacttttttggtctattcagaccctcaatcaattagatgatgcctgtccacactggtgatggtggatcttctgattcaaatgtgaatctctytaaccatcatagcttctaagttcccacctttcttccatccttgccccatcccttcttctctaacctcaccttgtcctcccttacctctatcctttcctctctctcctgcatacattttgtggaaagcctatgtattaagggtagacacaaggcaaaattgtttctctgttcatggaacttagatactactgcaccagctactggagaaagtattatgcacttgccaagtaatacacaggatttttgtcacttataaacacaacaaagctcaaaatctaccatcatcatattctccttcttgtcactcaaagtcacatcaagaggatgaattgattttgtcctcaggacaccttgtcatgtctcccaactttcctatataactgatggttgttactccagacttttattagattatcttcagtgttgtgggttgaaatgcatcttccaaaagatatgt

SEQ ID NO: 894145 - DNA, 601 bp, Homo sapiens
aagatgaatggaccagttcaaaaagagagagacagagaagtcctcctccctccacttttttggtctattcagaccctcaatcaattagatgatgcctgtccacactggtgatggtggatcttctgattcaaatgtgaatctctttaaccatcatagcttctaagttcccacctttcttccatccttgccccatcccttcttctctaacctcaccttgtcytcccttacctctatcctttcctctctctcctgcatacattttgtggaaagcctatgtattaagggtagacacaaggcaaaattgtttctctgttcatggaacttagatactactgcaccagctactggagaaagtattatgcacttgccaagtaatacacaggatttttgtcacttataaacacaacaaagctcaaaatctaccatcatcatattctccttcttgtcactcaaagtcacatcaagaggatgaattgattttgtcctcaggacaccttgtcatgtctcccaactttcctatataactgatggttgttactccagacttttattagattatcttcagtgttgtgggttgaaatgcatcttccaaaagatatgt

SEQ ID NO: 894146 - DNA, 606 bp, Homo sapiens
atgattgaagcagagttggagtgtctacaagtcaagcaatgccagcaatcaccagaagctaggcgggaggcacccaacagactctccctcacaccccccagaaggaaccaaccctgcaaatgctttcatatagaaggcctctccagaactgtgaaggactttctcctgtttcaagccacccagttagtggtgatttgttaaggcagccctaggaaactggtacacccagtcagtgcaataactttcaaatagttctgcttgcctccaacactcacactccatstgttcccatccttgattactgtggcattctgcacatggcactcaaagctgggtcaatgtgagccaagagaactcaggaaaggagagacataagagagaagaagaccctggagagagaggttttgagactggaaagtaatcatataagccattggatacttgcagaaatcttggggtggtcgctgaacttcccccagagcatgggatgggggaattcaaaggacagagaggcttctgttgccttctgcatgatgtataagaaatctcattgaatcctctctgccactgcatgggctggaactactacctgcacatacagttagg

SEQ ID NO: 894147 - DNA, 572 bp, Homo sapiens
gtgaactgaagatgatggttgatcgccttaattcacctccacacagctatggagtcataacttttaatatcagatgattttcttttagaatatttaaaagcacatacgtagttgtatctttcaaaactgatttgtaagttcttgtgttctgccatattcactaaagctataggcagtgcagtttccagctgctaaattatgcctattccccataaggaaaggatggaaaatgccaycgagacctcctgggctcttgttttttctttacccacatagctcattaatcgtggcccattttccatgtaaccaaaaacttagtctgggaatccttactagcttcaccagcatttaaaggcgttcctaccagtttgaattagcatggagaggaaattaaatcttttttatgttgtctctctctgtgatacaggctgctgctttctccatttcagattgatttatttatattttgcttctgctattttttttcctcaataaaacatcccattccatctcctaaatctctgccttacaaaaaccacagtgacctatcatttctttcaaattgatctata

SEQ ID NO: 894148 - DNA, 622 bp, Homo sapiens
aaccctggggtgatcctgatgttggaattattacataaaggttgtaaaatagctgttaaaactatgctcagtgatttaaagaaaatatgcaataaatgaaaacttaagaaatctcactaaatacatagaaacatgaaaagaaccaaattaaaattttagaactggaaaataaaatacttgaaataaaacttttactggatgaactgaacagcataatggaggtgaaagaggaaaggataggtaagttttaatataaatcaatagaattatccaaactaaagacaagaaagaaaaaaagactaaaaaaagtttgtcaaacaccaggaatctgcggtataatgttaaatgtactggcaaaaaaatcccagaaagagaatggggcagaaaaaaatatttgcaaaataatgacagaaaataaccctcatttggtgaargagaaagatgcacagattccagaaactcagaggaccccaaacaggagatgttgtattatatcaatatatatagattatatatgcagaagaccattttaaaaataatcaaatcaaactgctacaaaccaacaataaagagaaacctttgaagagagcaagaaaaaaattctacattacatgcaggagaa

SEQ ID NO: 894149 - DNA, 618 bp, Homo sapiens
atgttttcttggatatacatttaaaaaactctaaaaagatacacaaagaatggtctagtagtcattatagggggtctgggaaggcaagagataatatatcatattttcaaatttttgaattatgagaacatgtcattcattcaaaaattgaatgtaaaaagggttaagaaagagaataaagcaagggccgggacacatctccactgtcttcccatggccctctcagaagtggatcacacctggtgctrggcagggggacagaaattgctgtggcctgagcagagcctgggtccagccagcatctacacagcccacgtcctcccaggggaatttctctgtgctctgttttgaggggatggtcctggtactggagtagcagagccaggtccctgcttcttgcataaccctgaggctgccctgtttgctcttcttgtgtggagggcattggcagaggcctctggcctgtagaacctttgtgagctgagccacaactcacttcgagctgttctctgccctggctttgctaccctgaggtctccagtgccatccacaccttccgtctgccactgccaacagccacaggtgatggatggggaccataatgtgagaggagaattg

SEQ ID NO: 894150 - DNA, 618 bp, Homo sapiens
atgttttcttggatatacatttaaaaaactctaaaaagatacacaaagaatggtctagtagtcattatagggggtctgggaaggcaagagataatatatcatattttcaaatttttgaattatgagaacatgtcattcattcaaaaattgaatgtaaaaagggttaagaaagagaataaagcaagggccgggacacatctccactgtcttcccatggccctctcagaagtggatcacacctggtgctaggcagggggacagaaattgctgtggcctgagcagagcctgggtccagccagcatctacacagcccacgtcctcccaggggaatttctctgtgctctgttttgaggggatggtcctggtactggagtagcagagccaggtccctgcttcttgcatamccctgaggctgccctgtttgctcttcttgtgtggagggcattggcagaggcctctggcctgtagaacctttgtgagctgagccacaactcacttcgagctgttctctgccctggctttgctaccctgaggtctccagtgccatccacaccttccgtctgccactgccaacagccacaggtgatggatggggaccataatgtgagaggagaattg

SEQ ID NO: 894151 - DNA, 604 bp, Homo sapiens
tgttttcacccgtcctaagggctgctttctgcatctttcttagtttgcctctattgagtctgccagaaactcttactctttttaagattttgttcacgtttttattttatttttttattttttgagacgaagtatccctcttgttgcccaggctggagtgcagtggcgcaatcccagctcacygcaacctccgcctcttgggttcaagcaattctccagccacagcctcctaagtagctggtatcagaggctcccaccaccacacccagttaatttttgtatttttagtagagacggggtttcgccatgttggtgaggctggtctcgaacacctgacctcaggtgatatgcccacctcagcctcccaaagtgctgggattacaggtgtgagccaccatgcccagcccacacatatttttaattaacaaataataactatatatagttagggattacaatgtgatattttaatacacattttagaataattatatcaagctaatgatatatccatctcctcacgtattttcttttttgtagtgagagcatttaaaacccactctattagcagttgtactttctcttgacagtgtacctctctgta

SEQ ID NO: 894152 - DNA, 554 bp, Homo sapiens
atggggataggaacccctgctctcagacctttctamcctttaccctgtgcatctcctcatctgtatcttttataatatcctttataacaagctggtaaatataagtagtgttttcctgaggactgtgagccattccagcaaattattgaactggagagaatcagaagaaccccaggtttatagccagtcagaggtatgggaggatgtccaggacttgtgattggcatcaaaagtgggggcagtcttgaggggctgatgccttaacttgtgggagctgacattaactccaggtagatatgtcagaattgcattaaattgcaggatgctgagctggtgtcagagaattggtggatgtgggaaagagcctgcacatctggtgtcagaagtgttctgtttgagaatggagataaacagtgcttttccagagggagtttgtcttgttcatactaattagctagagcttgtcctccccacttcaaatttgtgaatttttttttttaccagtggaatatgccataaaactgacataactaccaagctctagaatttaaatg

SEQ ID NO: 894153 - DNA, 694 bp, Homo sapiens
cccacttcaaatttgtgaatttttttttttaccagtggaatatgccataaaactgacataactaccaagctctagaatttaaatgatcttggagggcttaagggagcttcttttcaacctcagacataccagaaagcaacgaattctgcagcagttttctggttaatatggcaatgcagacctagggaatatggagaggtggttatgcaatgaaagggkagacatgggaaacacaccagaagacataacattggaaaaacatttggcaaacataaagccatcccaaaaagataagttgcaacactgccagttgggcaagatgattaaatggcagaaatatttatattgtttaggtagaaagaagggaatagtctcagacatggaatagctaaactactgaaagaatttagaccatttggggtccttctgacccccgtgaaattggaaaccatgtaaattagattattaattataaataaaaatgctctggttataccacactttctgaggaaatcataagtcctgttaccctagtgtttggggactcctcttggctaaaatcactcccttggccccatcaccagctgcagtgattcaggggagtcccacctggttgttcctcttagagctgaaagtgctgaggaaggcaaggaattcttgaatcctagagagtccctattttctagaaaatggt

SEQ ID NO: 894154 - DNA, 583 bp, Homo sapiens
ggagggcttaagggagcttcttttcaacctcagacataccagaaagcaacgaattctgcagcagttttctggttaatatggcaatgcagacctagggaatatggagaggtggttatgcaatgaaaggggagacatgggaaacacaccagaagacataacattggaaaaacatttggcaaacataaagccatcccaaaaagataagttgcaacactgccagttgggcaagatgattaaatggcagawatatttatattgtttaggtagaaagaagggaatagtctcagacatggaatagctaaactactgaaagaatttagaccatttggggtccttctgacccccgtgaaattggaaaccatgtaaattagattattaattataaataaaaatgctctggttataccacactttctgaggaaatcataagtcctgttaccctagtgtttggggactcctcttggctaaaatcactcccttggccccatcaccagctgcagtgattcaggggagtcccacctggttgttcctcttagagctgaaagtgctgaggaaggcaaggaattcttgaatcctagagagt

SEQ ID NO: 894155 - DNA, 583 bp, Homo sapiens
ggagggcttaagggagcttcttttcaacctcagacataccagaaagcaacgaattctgcagcagttttctggttaatatggcaatgcagacctagggaatatggagaggtggttatgcaatgaaaggggagacatgggaaacacaccagaagacataacattggaaaaacatttggcaaacataaagccatcccaaaaagataagttgcaacactgccagttgggcaagatgattaaatggcagaaatatttatattgtttaggtagaaagaagggaatagtctcagacatggaatagctaaactactgaaagaatttagaccatttggggtccttctgacccccgtgaaattggaaaccatgtaaattagattattaattayaaataaaaatgctctggttataccacactttctgaggaaatcataagtcctgttaccctagtgtttggggactcctcttggctaaaatcactcccttggccccatcaccagctgcagtgattcaggggagtcccacctggttgttcctcttagagctgaaagtgctgaggaaggcaaggaattcttgaatcctagagagt

SEQ ID NO: 894156 - DNA, 583 bp, Homo sapiens
ggagggcttaagggagcttcttttcaacctcagacataccagaaagcaacgaattctgcagcagttttctggttaatatggcaatgcagacctagggaatatggagaggtggttatgcaatgaaaggggagacatgggaaacacaccagaagacataacattggaaaaacatttggcaaacataaagccatcccaaaaagataagttgcaacactgccagttgggcaagatgattaaatggcagaaatatttatattgtttaggtagaaagaagggaatagtctcagacatggaatagctaaactactgaaagaatttagaccatttggggtccttctgacccccgtgaaattggaaaccatgtaaattagattattaattataaataaaaatgctctggttataccacactttctgaggaaatcataagtcctgttaccctagygtttggggactcctcttggctaaaatcactcccttggccccatcaccagctgcagtgattcaggggagtcccacctggttgttcctcttagagctgaaagtgctgaggaaggcaaggaattcttgaatcctagagagt

SEQ ID NO: 894157 - DNA, 647 bp, Homo sapiens
tcatgacaacaacccctagggacgctctggctgccaaggaaaagtggggagtgggcatgcctgagagagactggcaggatagagacagaaagcaagaggaagccaactccttctgccaagatgcagagacagccacaggtagctcaggcggcccccacttactgatgcagtaatgcatggcagacacacaactgatgcagagaaggggacagaagtgtgatttcagcttgccagcagaaccctgaggttggaggtggggggtcctagggaagggatcctgcagccaggagaagacatcagggccaagtccactgcctgttcaactcttgcaactccaacaccatgcacaagaccagatatctgattacaatttaaatatcaatgaaaccatgtggcaagacttcctgcrctgtatttgatgcattcccaggacctccaaggttggagggcagtgatgtgtcagcagacaatgaccatgaagaaaattacctttggaaatttatgtaagaacagcctgcaaagtattccatgcagaccatgattcagagctttcgggctatttgcctgcctctggacatctccaatttgtcatcatctgagaggccaggacagagtctactaggctgtgtcacctctgatgatggcac

SEQ ID NO: 894158 - DNA, 577 bp, Homo sapiens
taccctggaggcagtgtaacagaaggtcagaaattaagagggtcacctgatgaggctactgcaatagtccaaggggatgatggtttgggcctggactaaactatggcaagtagggatggggagtagataccaagaggagagtagcaggtagcagggccagatgacggcctaaatcgaggggtacaagagagcttgcaygaaataaacaatcagccctggcaggactgactgggactgcccttgcaggacgaagagaggaagggttaaaactacatgtcttgaggctatttgccaatgtccttaggaagcagggagtatggctaatggagcttttagtcctaattagccaaaactgggatcctgccaattttagaggctttcaaggggcatgcttcaaggaagagtccccctgagcttaagtaatgagtgatggcctgccatccagcccaggggcaatgtctctaaccctgggtcatgccagaattatactcccttgactaaacacatcagtttatccaggacccaacatatttcattttatttaatattcccccaaaccccaagtagatgtacttac

SEQ ID NO: 894159 - DNA, 623 bp, Homo sapiens
gcaattctgtatcttataagtggagcatttaggccatttacatttaacgttagtattgagatgtgtggtaccattccattcatcaggttgtttgtgcatgcataacttggttttctgtgtatgtgttttttttaattgtatttttgtttcataggtcctttgagatttacgctttaagaaagttctgttttgatgtgtttccaagatttgtttcaagatttagagctcctttgaacagttcttgtagtgctagcttgatagtggcaaattctctcagcatttgttkgtctgaaaaagactgtatctttccttcatttatgaagcttagtttcactagatacaaaattcctggctgataattgttttgtttgaggaggctgaagatagggccccaatcccttctagcttgtagggtttctgctgagaaatctgctgttaatgtgatcgttaatacagagtgacaacttgattgggttgaaggatgcaaagttttgatcctgggtgtgtctgtgagggtgttgccaaaggagattaacatttgagttagtgggctgggaaaggtagacccacccttaatctggatgagtaccatctaatcagctgccagtgcagctagaatataa

SEQ ID NO: 894160 - DNA, 647 bp, Homo sapiens
ggtggccatttcaatagctgttagctgcaaattcaacaagtataggatacctgtctccttcttgggactttcatggcataccccttttcccaataatgctgtgtggtaaaaaataatagtaataataatgctgtgaggttcagagagactgaataactctcaaaagtcatgtaaaaaagatatatgacagagttactatttgaacaaaggttttcagactcccaggtattccctgcaaagagaaggtatgaggaacaacccctttgtctctgtgaccccacagaagcctctgggaccccactttctgattcttcctcctattcctttttgtctttgatctgcttctatttctcctctcccttttcctcttgtcttttatctgatccwtgccaatcgtgctctccaaaatgaagaacctatgatccctcgattgttgacaacctgagaacatttcttgccctacccaggacagaaggaaatgacataaaaacattttattcattgggtgaaatgggattatttttgagctgctctgttcaacatcagtgaggctgctcaataaagagaagaggaaacctggcataaaagaagaaactgggcttcagctttgcatgcatatacatgtttattgcagcactattcacaat

SEQ ID NO: 894161 - DNA, 610 bp, Homo sapiens
aacccagggtcactgtagctgagaagtattaatatttagggtctgttgtctaaggcggatttccagaaatgcctctcaggctctatccaatgcatacatttttttcatattccttggaatctgggaaccttcgctttctctagattttagatttctatcccagtgtttctggttgtgggatccacgccaatgaagcctcatttatctcctccacttcttgttagttggagttctgcagagaacttggacaatcaaaaaactatgggcttggcatggatgtgaacttcaagtctaaggaggtcaaaaccatctgaggcaggagcgcactttctgagtggggtgagatggagaaggtcattccacacctgaaagccatagctgggatgtggacagkaagggaaagtgtttgttcagcatgtgggaacttgaaaatataggtttgttctcagcatcacttacaaatgtgtctgaagcctatggagggatcttaggtgttggcagtgaagagggtacactgccatctgcggatggaggttacagtcagggtcacgcaggactcaggccctaacatgggcctggaatgcacagccctgcctgatggcatcctcac

SEQ ID NO: 894162 - DNA, 608 bp, Homo sapiens
gacaaatggcatgttttttaaataacatctataaaacatcctgctatctgacccgaggctggagttattcatggcatgcaatgaatctatcccagagagaggcaaggcccagatagcattgtctctcgctgcacaggcccagctgggcaaagcgccaatgtggcgggagggaaggaggtatttctcaactcaggcaaggacttctggggaacaaccccacctccgcgtagatcctcccagatcattcgctgggtgggtcacctttacccagctgctgggctttctcatttttcrtctccttggatcgtgcaacagagcagtggttctcagactaccaggcatcggaatcccgcagagggctccttcaaacacagcgtgctgggctgccacccaggtctcttccgattctagggcagggcctaagaagccgcatctcaaacaagctcccaggtggaggtgatgctgctggtcccggagcccacgctgagaatcaccacaccgggggaaccctcactcaacagaatcaaacatggcaatggctccaggtggcctgcagactgggctgaggggggactcacagcatggcacataaattgactgagttccac

SEQ ID NO: 894163 - DNA, 601 bp, Homo sapiens
gcgactgcactccagccgaggtgacagagtgagactccatctcaaaaaaataaaataaaataagaaataaaaaataaaaaaatcttaaagaagtccttgctgctatcacaacacagtgtggagatcattcacttaggaagccagcatcatcttcaatcaatagcctactttttctgtcagttttaatcccattacaatccaatacaaaacccttccttaaatttccctcacatataaccacgcagaatttggtacatcacttaactccctatattgccatcttttaaccactttcataaatagcttatccaccaaataaaccaggttaccttaagcactttcatgcaatatcctcttaaattctattttgttgattacaagatacaccacttktcacattttatcagctctgaaatatgaaaatgaaaggcttatcctaggtatcaggcagcatttcttcttctctgatggcagataaaataatgggacattttatatccaatgacatcttacattttatgaaaaatgatcatttaatccttacaattgtcctataaggtcagctgtgattcttgcccacccatcagaaagtgcgattaga

SEQ ID NO: 894164 - DNA, 633 bp, Homo sapiens
tctcgtaaagatacccgcagtgccatattcattgcagcattactcacaatagccaagatatgaaaggaaccaaagtgtccatcaatggatgaatacataaaataaattgtggtggatatatacaacggaatatcatttagccttttttttttttgagatggaatctcagtctgttgcccaggctggagtgcagtggcatgatctcgactgactgcaacctctgcctcccaggttcaagtgattctcctgtcttagcctcccacatagctaggattacaggcacccacgaccacaccccactaattattaaatttttagtagagacgggstttcaccatgttggccaggctggtctcgaactcctggcctcaagtgatccacctaccgtggcctcacaaagtgttgggattacaagcgtagccaccatgcccggcccatttagctttcaaaaagagattctgccaattgccacattatggatgaatctggaggacgttatgctaagtgaaataagccacacacagaaagacaaatactgcatgatctcacttatatgtaaaatctataacaaacaaacaaacaaagactcaatggggaaatggggagatgtaggtcaaagaatataaagtagca

SEQ ID NO: 894165 - DNA, 563 bp, Homo sapiens
tgtgcccacatgttgcctctgttgtctcccaggctcttcctcagcccccatagactagcgaaatcctcaggagtcagctcagacttgcccttccctggaagcctgccagagagctcccaatatgtttagtttctgtcctcaccacccagtgcctgcctctgggacagcacttagcccacaggatgacagtggctggctttcatgtctcttccctgacagaccctcaatcttcaaggtaagcaactatgctttactcattttgtccccagcccagtgtctgtgatggtacctgagacatagtggaggctcaggagacattgcctgaataaatgaggtgctgggtggatgcaatcatatgtatgtatrtgtgtgcatgtgtatgcgtgtgtatatgtgtgtgtgtgatacatatatatctgtagatgccctgattgtatgtcagcttgctgtttgggtacctgccatggtttgaatgtttgtcttctccacaactcatgtgaaatttaattgccactgtgatggtactaagaggtggaacatttaagaggtgattaggccacgag

SEQ ID NO: 894166 - DNA, 578 bp, Homo sapiens
aaaataaatgaagcttgacctctcacagcatatacaaatgtcaattcccaatggatcacagtcctcaatatggaaagcaaaataatgcagcttctacaagaaaacagacaatcttcctgcccctggaataggcaaagattttaaggaatcactagctccaagaataaaatgttgataaactggattttggtctgcactaagaactcttaagttgctgttgagagagtgaaaaggcaaaccatgaagtggaagacgctggtaatccacacttccaacaagactcctccagaatgtacaaataactacaaatcrgtaagaaaaagataacaatatattagaaataggcaagagatttgaataggcacttcgcaagtatccagatggtttgtaggcattttgatagccacatttgttcaaaatcaatcaccaaggaaatataaattagaacattgctggcagggtgatagggtttggattcgtgtccctgcccaaatctcacgtcgaataggaggaagggcctggtgggaggtgattggatcatgggggcggatttcccccttgctgatctcatgatagtg

SEQ ID NO: 894167 - DNA, 614 bp, Homo sapiens
ccctggagtggctctctatgtcatatcatccaggtcatggttacaatgtcacctcttccaaggccttccctgacaccatatctagcatagttcccatcttcactccctcatcacttcccaatgttttccctgcttaatttattgtagctttcrtcttcattgtgtatgtgggtagacagtataatctggggttagactctcagagtttaaatctcagctccactacttgagctgcatgacattgggaaagtccttaacctccttgtgcctcattttcctcatctgtacaatagggataatgttatacatagtttatgaaactacagtgagaataaaaggagagattaatgatatgaaaaccacttagaaggctgacaggcaggaggtgaggactacatcaatctttgtttctttatttactcattattgcccgactccctaccctagactgtcaactctggtgtattagtcaactcagcctactgtaacaaagtaccacaaactggagggcttaaacaacaggcatttattttctcaaagttctggaggctggaagtccaagaccaaggtttcagtggggctggttccttggaggcctctgtccttggcttggg

SEQ ID NO: 894168 - DNA, 616 bp, Homo sapiens
aggattaacagtttgtcctatttcccttagttagtttcagaaatttccagaaatacttagatcattcagttgttaaagcatgcttaacaaagcctggcctctatgacagaagtcacatagacgcgcattttagaatttccccactcacctctcaaccctgcagtcatacatttataatgtctcatctcctttggtaaactgtcagatctgcagcctcaaaatctaattgttgacatatcaccaaatgaaaagtaacaaaaacaggtaaacatcaccaaaatgaagaacattgtcttagcatttaaactttaaaatgtatttctactactctggactcattttttccttccatcatctttaaaattgttataaatgagtatctgctcyactgtgtatggtcctgcaagaactaaaacttcccagagtattaaactgtggttaaaattcatgcagtatgtaactcgatgctgagaagaagctacatatgcatatgtatgctcaaaatataagaatttaagaaaaatgtacgataatgaaaaatgcatggattgaaagtgaaaagagctgttttgagcttcaattcatcgctctgtagctgtgtgactttgcacaaatc

SEQ ID NO: 894169 - DNA, 616 bp, Homo sapiens
aggattaacagtttgtcctatttcccttagttagtttcagaaatttccagaaatacttagatcattcagttgttaaagcatgcttaacaaagcctggcctctatgacagaagtcacatagacgcgcattttagaatttccccactcacctctcaaccctgcagtcatacatttataatgtctcatctcctttggtaaactgtcagatctgcagcctcaaaatctaattgttgacatatcaccaaatgaaaagtaacaaaaacaggtaaacatcaccaaaatgaagaacattgtcttagcatttaaactttaaaatgtatttctactactctggactcattttttccttccatcatctttaaaattgttataaatgagtatctgctccactgtgtatggtcctgcaagaactaaaacttcccagagtattaaactgtggtwaaaattcatgcagtatgtaactcgatgctgagaagaagctacatatgcatatgtatgctcaaaatataagaatttaagaaaaatgtacgataatgaaaaatgcatggattgaaagtgaaaagagctgttttgagcttcaattcatcgctctgtagctgtgtgactttgcacaaatc

SEQ ID NO: 894170 - DNA, 683 bp, Homo sapiens
agttcctgtatccagagtcaaacctaaactcaacagtgggtattccaggcatatgtcaccgtttgagccctttgcccatcacagggtctcacttgttccacacaaggctcctcatggctccccacttgcaccccctgttttcctgccactctgattttttttttttttttttgagacggagtgtygctctgtcgtccaggctggagtgcagtggcaggatcttggctcactgtaacctccacctcccaggttcaagtgattcttgtgcctcagcctcccaagtagctgggattacaggcatgcgccaccacgcccatgcctagctaaattttcagattccacccgcctcaatctcccaaaatgctggtattacaggcatgagctaccactcccggtactgccactctgaatttgatgctctcctctgccaaaatagtcttagaattgcaaacccacatgccacagatgtctctgcgaggcccttcatgaacccgttcctgaccttccttcatgcttagaatcatgggtatcttaccgtgtgatgctttgtagctggttattagcatacatgtgcgtctctgtccattagattgtaaaatgctggactgaggcactgtgtccaactccttccatctgaattcttcacagtgcctgggacattttgggccgcggtaacaggaaca

SEQ ID NO: 894171 - DNA, 622 bp, Homo sapiens
acataggtaaatgtgtgccatggtggtttgctgcatctatcaacccatcacctaggtactaagcccagcaagcattaactgtttttcttgatgctctccctccccatccccatccctgacaggcctgagtgtgtgttgttcccctcgctctgtccatgtgttctcattgttcagcttccacttataagtgagaacatgtggtgcttggttttctgttcctgtgttggtttgctaaggataatggcttccattattccagcttcatccatgtccctgcaaaggacatgatctcattcctttttatggctgtatagtattccatggtgtatatgtaccacatttgctttatccagtctatcattgtgggcatttgggttgattctatgtctttgttatgtgaatagtgctgcaatgaacatatgcatgcatgtatctttgtaatagaatgatttatattcctttaggtatatacccagtaatgcgatwgctgggtcatatgatatttctggttctaggtctttgaggaatcgtcagactgtcttccacaatgattaactaatttacattcccaccaacagtgtaaaaacattcctatttctccacatcctcgccagcatctgtt

SEQ ID NO: 894172 - DNA, 576 bp, Homo sapiens
tttggaggattttccctggtatagcagtggtgtttatggtagctgtccaaatttatttatacttcaaaccatgccagaaagttaaggatttctgtcaatgtctacacctagttctcttgttaagactagtaaaaagttctcttgtaaaaagttcatttttacctcgagaggcataagctcagagattattgcaggaggaagggtcaccccttgtgtttgcsccatgaaggcacactcctttttacctggtgggtgttgaaaaaatatttgaaggaatagacctgaatgaatggtaattattggtaggggtgggaaatggactaaatgacctagtgagatctttgttttgagatctaagtataagatcatctcttaaaccttttaacaatattttggtggaacctattagaaacttaacacattattgtgtgcaagatatctaaaaataagtccagttttttagaggcagtaacatttaagataatttaaaacattccatattagtgtaatgtcttgttagggaatgtggacagtaaaaacgaccatttgttaaattttttttcccctccaaaatat

SEQ ID NO: 894173 - DNA, 599 bp, Homo sapiens
agatatctaaaaataagtccagttttttagaggcagtaacatttaagataatttaaaacattccatattagtgtaatgtcttgttagggaatgtggacagtaaaaacgaccatttgttaaattttttttcccctccaaaatattgtctgatgtttgctccttcgtgttacttatggagagttactgtttatgacttaaagatatgggggtggagaggcctaggtaactgcaacaatgtatttaggtaatttacattaggtttttagagggctatgactrtctgcaaaaggaaaattcaagataccttgttataaacatggtatacagtgacctttggcatgcattttgttttgtaactacacgaagtgttaatttggattgaatctttgttttcacttgaaaaccttttttttttttttaagaaatagcttggaaatttaggctgccctgaggtgttttcgtgtgtctgtttatggttgacaagtatctagttatgagaagaaaatgtggatagaattaactgtattataggcgagaagggaattgccttataatcttgtgccactgaacacaagattagtagaagagtgggcttcact

SEQ ID NO: 894174 - DNA, 618 bp, Homo sapiens
aattatagacagtaacagatcagtggcttggaaaggttaaaggcaagagagggtcgaacaggaggaacacagaggatttgggggatagtaaaagtactcagtatgacactacaatggtgggtacatgtcattagacagttttccaaactcacagaataaacaatgctgagagaatgctaatgtaaactatggactttgggtgataataatggtgtcagtgtaggttcactgattgtaacaaatcgctctaagggggacgctgataatgggagaggctgtgcaagtgtatgaacagggagtatatgggagaatctcagtaccttctgcctaattttgctgtgaacctaaaactgctctaaaacaataaagtctatatttattctttcacagtctctgttaagacggacttttttcttcttgctacagataaasagggaggaaatgacagagagaaagctctgattctcatggttatgtgaatatggactatcatgagatccaacctacttgcactgatgagggaagagggaagacaaccaatgtcagttcctgaaatgcaaccaaccaggggaaagctcagcaggaagaggttcagactcttcctctgtggatatgaaa

SEQ ID NO: 894175 - DNA, 600 bp, Homo sapiens
ggcttggaaaggttaaaggcaagagagggtcgaacaggaggaacacagaggatttgggggatagtaaaagtactcagtatgacactacaatggtgggtacatgtcattagacagttttccaaactcacagaataaacaatgctgagagaatgctaatgtaaactatggactttgggtgataataatggtgtcagtgtaggttcactgattgtaacaaatcgctctaagggggacgctgataatgggagaggctgtgcaagtgtatgaacagggagtatatgggagaatctcagtaccttctgcctaattttgctgtgaacctaaaactgctctaaaacaataaagtctatatttattctttcacagtctctgttaagacggacttttttcttcttgctacagataaacagggaggaaatgacagagagaaagctctgattctcatggttaygtgaatatggactatcatgagatccaacctacttgcactgatgagggaagagggaagacaaccaatgtcagttcctgaaatgcaaccaaccaggggaaagctcagcaggaagaggttcagactcttcctctgtggatatgaaaatggga

SEQ ID NO: 894176 - DNA, 614 bp, Homo sapiens
atagacagtaacagatcagtggcttggaaaggttaaaggcaagagagggtcgaacaggaggaacacagaggatttgggggatagtaaaagtactcagtatgacactacaatggtgggtacatgtcattagacagttttccaaactcacagaataaacaatgctgagagaatgctaatgtaaactatggactttgggtgataataatggtgtcagtgtaggttcactgattgtaacaaatcgctctaagggggacgctgataatgggagaggctgtgcaagtgtatgaacagggagtatatgggagaatctcagtaccttctgcctaattttgctgtgaacctaaaactgctctaaaacaataaagtctatatttattctttcacagtctctgttaagacggacttttttcttcttgctacagataaasagggaggaaatgacagagagaaagctctgattctcatggttatgtgaatatggactatcatgagatccaacctacttgcactgatgagggaagagggaagacaaccaatgtcagttcctgaaatgcaaccaaccaggggaaagctcagcaggaagaggttcagactcttcctctgtggatatgaaa

SEQ ID NO: 894177 - DNA, 608 bp, Homo sapiens
agatcagtggcttggaaaggttaaaggcaagagagggtcgaacaggaggaacacagaggatttgggggatagtaaaagtactcagtatgacactacaatggtgggtacatgtcattagacagttttccaaactcacagaataaacaatgctgagagaatgctaatgtaaactatggactttgggtgataataatggtgtcagtgtaggttcactgattgtaacaaatcgctctaagggggacgctgataatgggagaggctgtgcaagtgtatgaacagggagtatatgggagaatctcagtaccttctgcctaattttgctgtgaacctaaaactgctctaaaacaataaagtctatatttattctttcacagtctctgttaagacggacttttttcttcttgctacagataaacagggaggaaatgacagagagaaagctctgattctcatggttaygtgaatatggactatcatgagatccaacctacttgcactgatgagggaagagggaagacaaccaatgtcagttcctgaaatgcaaccaaccaggggaaagctcagcaggaagaggttcagactcttcctctgtggatatgaaaatggga

SEQ ID NO: 894178 - DNA, 640 bp, Homo sapiens
cctcttttcataattctgattataaagtaaggctctgtcttctactcttcttgctttctcactcagacatatcatccatgcctaagggtcaacagcctcctccactctttcaattctgacctttcacttagcattcccagtckcttgctgcatgcttccaattgcagggtattaattacttttagcaaatgtactagaatcaagtgcccaactgattatcaaattccggaagtgtacccaaaggacaatgactaattcctcattgggtcaaagtctttcctatgtggaagcaagagaaaggaacagaactaacactgaacattgtgaggagcccaaaacatgactcctgctgaacacattctatttggttgtagaacccaaccaatataggccccgttgatcgatttccccacaacaagaggaggtcataaaaatcatgcttccactttctcaatagatacttatcgctcatgaatgtctgtgaatcagaagaccatgggactataactctactccactcaaactctccatactcccaaagctggacctcatggtcctcagatcatgtaatactcagacacagcactccagtaaaccactttctggccagaaactcatccttcccatagttcctctccct

SEQ ID NO: 894179 - DNA, 617 bp, Homo sapiens; identical to SEQ ID NO: 892517

SEQ ID NO: 894180 - DNA, 617 bp, Homo sapiens; identical to SEQ ID NO: 892518

SEQ ID NO: 894181 - DNA, 592 bp, Homo sapiens; identical to SEQ ID NO: 892519

SEQ ID NO: 894182 - DNA, 684 bp, Homo sapiens
tttctttttagcaatgaataatattccattatctgttcacctactgaaggacatcttggttgcttccaagttttggcaattataaataaagctgctaaaacatccatgtgcatgtttgtgtgtgtgtgtgtacacaagttttcaactcatttgaataaaaggagtgcaactgctggataatatggtaagaatatgtctaattttgtaagaaaccaccaaattactttccaaagtggctgtaccattttgcattcccacttgcaatgaatgagagttctattactacacattctcaccaggtttggtgttgtcagcgttttggggttttgccattataataggtgtggggtggtatctcattattttaatttgcaatttcctaatgacatatgaggttgaacatctttttatatgcttattgccatttgtatattttcttttgaggtgcctcttcaggatattttgctcattttwaaatcaggttgttttttttcttactgttgagttttaagggttctttgtataatttctcttcttttctttcctttttttctttttttttttttttttagatgaagtctcgctctgtcgcctaggctggagtacagtggcacgatctctgctcactgcaacctctgcctcccaggtcaagtgattctcctgcctcagcctcctgagtagctg

SEQ ID NO: 894183 - DNA, 684 bp, Homo sapiens
tttctttttagcaatgaataatattccattatctgttcacctactgaaggacatcttggttgcttccaagttttggcaattataaataaagctgctaaaacatccatgtgcatgtttgtgtgtgtgtgtgtacacaagttttcaactcatttgaataaaaggagtgcaactgctggataatatggtaagaatatgtctaattttgtaagaaaccaccaaattactttccaaagtggctgtaccattttgcattcccacttgcaatgaatgagagttctattactacacattctcaccaggtttggtgttgtcagcgttttggggttttgccattataataggtgtggggtggtatctcattattttaatttgcaatttcctaatgacatatgaggttgaacatctttttatatgcttattgccatttgtatattttcttttgaggtgcctcttcaggatattttgctcattttaaaatcaggttgttttttttcttactgttgagttttaagggttctttgtatawtttctcttcttttctttcctttttttctttttttttttttttttagatgaagtctcgctctgtcgcctaggctggagtacagtggcacgatctctgctcactgcaacctctgcctcccaggtcaagtgattctcctgcctcagcctcctgagtagctg

SEQ ID NO: 894184 - DNA, 646 bp, Homo sapiens
attgaatcagaaagtgttgaacctggccaactcagatgacaatctagaggggttgacttcaagttagtttattctccttttactcaatgttttcaatgctacgtaaagcctcaaatatttttattagaaaccaaaacttttcatttaaacaatttggtcaccaccaccatccgttagagacacacacacacacacacacacacacatacacacacacacacaactatacaggttgagtatcctttatccaaaatgctttggaatagaaatgttttgtatttcagattttttttaatgttgaagtattcgcatacaggtaataagatatcttggagatgggaccaatgtctaaacatgaaatttgtttgtttcatatataccttacaaacatagmctgaaggtaattttatacaatattttaaataatcttgtgcatgaaacaaaatatgtgcatattaaattatcagaaagcaaaggcaagccccccatgtggacaatctgtggccatctagcatttccaccattgttgacactgaattcatatatcactaataagcaattctcttctatttgtttacacataagcacttaatggtaaaaagtgtgacctacagtgagaaaactatatgttaagggtaactcagca

SEQ ID NO: 894185 - DNA, 646 bp, Homo sapiens
attgaatcagaaagtgttgaacctggccaactcagatgacaatctagaggggttgacttcaagttagtttattctccttttactcaatgttttcaatgctacgtaaagcctcaaatatttttattagaaaccaaaacttttcatttaaacaatttggtcaccaccaccatccgttagagacacacacacacacacacacacacacatacacacacacacacaactatacaggttgagtatcctttatccaaaatgctttggaatagaaatgttttgtatttcagattttttttaatgttgaagtattcgcatacaggtaataagatatcttggagatgggaccaatgtctaaacatgaaatttgtttgtttcatatataccttacaaacatagactgaaggtaattttatacaatattttaaataatcttgtgcatgaaacaaaatatgtgcatattaaattatcagaaagcaaaggcaagccccccatgtggacaatctgtggycatctagcatttccaccattgttgacactgaattcatatatcactaataagcaattctcttctatttgtttacacataagcacttaatggtaaaaagtgtgacctacagtgagaaaactatatgttaagggtaactcagca

SEQ ID NO: 894186 - DNA, 607 bp, Homo sapiens
ttggaagaccttctgaggtacttgccagaggctgttttacagctaactttgttttaatatgtagaaggagtacaccctaaagtagcaatgaaatatagtatagttatgcagccattaaaaaggatgagtcatgtcctttgcacggacatggatgaagctggaarccatcattctcagcaaactaacacaagaacagaaaaccaaacactgcatgttctcactcataagtggaagttgaacaataggaacacatggacacagggaggggaacatcacacaccagggcctgttgaggggtgggggactgggggagggatagcattaggagaaatacctaatgtagttgatgggttgatgggtgcagcaaaccaccatggcatatgtatacctatgtaacaaacctgtactttctgcacatgtaccccagaacttaatgtataatttaaaaaatcaattctattcctatatgctaggaataaacaatcagaaattgaaaaaaatatatatatagtatagtaaatacataaactagtaagtttattatcattaccaaactttatgtactgtacttaattgtattgctgtattttcatatgactggaatcac

SEQ ID NO: 894187 - DNA, 586 bp, Homo sapiens
ctgacagcttgcaccatgcacctggaaaagccacagacattcaatgctagcccatgaaaacagctggaagggaggatgtaccctgcaaagccataggggtagagctgcccaaggccatgggagtccacctcttgcatcagcatgacctggatatgagacatggaatcaaaggagatcattttggaaatgtaaggtttggtgactgccctgttgaatttcagacttgtgtgggacctgtagttctttgttttgacccaatttctcccaatttgaacaggtttttccccaaggcctgtacccycattgtatctgggaagaaactaagttacttttgattttgcaggttcataggcaaaagggacttgccttgtctcagatgagaccttggacttggactttgggttaatgctggaatgaattaagactttggaggactgttggaaaggcacgattgtgttttgaaatgtaaggacatgagatttggcaggggcgggggaggaacgatatggtttgactgtgtccccacgccatgtctcatcttgaattgtagttcccataatccccatgtgtcatgggagggacccag

SEQ ID NO: 894188 - DNA, 635 bp, Homo sapiens
actgtcctccagaccccagaatggtagatccaccaacagcttgcaccgtgcacctgaaaaagccacagacactcaatgccagcccatgaaagcagacaggactggggctgtaccctgcaaaaccacaggggtggagctgcccaaggccgtgggagcctaactcttgcatcagtgtgacctggatgtgagacatggagtcaaaggagattattttgaagctttaagatttaattgctgccttcttggattctggacttgcatggggcctgtagctccttcgttttggccaacttctcccatttgaaacaggtgtatttacccaatatctgtacccctactgtatttaggaagtaattttgattttacaggctcatgtaaaggaaggggacttgccttgtctcagatgagactttggactgtggacttctgagttaatrctgaaatgaattaagactttgggggactgttgggatggcatgattggttttgaaatgtgaggacataagatttgggaggggccgggggagaatgctatggtttggctctgtgtccccacccaaaccaccttgaattgtaataatccccacttgtcatgggagggaccttgtgggaggtaattaaaccatgggggtggg

SEQ ID NO: 894189 - DNA, 608 bp, Homo sapiens
ctttaaaagtacccaaggaatgaatgataatggtagagaagctcccatggtagctgtgggatggaggttttcttggctaaattgattttttaatttgtgttttttaggtgctagtatgataaattcgggagcatagaagttaggacttgcatcctcaytggaggcaaaaattggttattggggagcacaagcatcttagatattataatggtgtgtggccatttaaagctcaatcaacaaaagcttgtttcttaatatttgaatttctctcattgggttttcttgtgtattacactagcaacattgataatggattcatggaagatgtacagaatatattcaaggtcaatccaacaaatttataacgtagagatggctgtggttggaagactttctctctagttgcctgatcttgaagtcattttagttggttaccttcacatacttatgggctaccattgggtgccttgtggcttgcttatatttggccctcaaatataaggatttgagaattgaatgaaaatcatttatattttattatttaattcaattaagattattcagctcaccaataattatctcaagtgccaaaaaggaaaacattgaca

SEQ ID NO: 894190 - DNA, 603 bp, Homo sapiens
atcccacacgggggcctgtcacagggtggggggctaggggaagaatagcattaggagaaatacctagtgtaggtgacaggttgatgggtgcagcaaaccaccatggcacatatttacctatgtaacaaacctgcatattctacacatgtatcccagaacttaaagtataatttttaaaaaagacttcaccaatattatttatttttcctgttgcctcaggttccaacrtggctcaacatggcagttgctgatcctgactttgcttaaaatttggtactttatcacaaattttaaaattaattttgatttctcaaaatattgattaaaatatttatctctactattgaatttttgggcacacctttaaattttgcatgcaagataagcaccttcctcagttgtaggatgttgacggtgataaggacattagcaaaggaaatattgaaaagctcatgaatactgttgcataattcttcttagagaaaatagtttcttggtataggatagaacaattgctaaagggaaggtgacctcctacatagcatgaaaagatgtgtcatgatcttggtatttgtaatttgttccctttcactctgctcaact

SEQ ID NO: 894191 - DNA, 603 bp, Homo sapiens
atcccacacgggggcctgtcacagggtggggggctaggggaagaatagcattaggagaaatacctagtgtaggtgacaggttgatgggtgcagcaaaccaccatggcacatatttacctatgtaacaaacctgcatattctacacatgtatcccagaacttaaagtataatttttaaaaaagacttcaccaatattatttatttttcctgttgcctcaggttccaacatggctcaacatggcagttgctgatcctgactttgcttaaaatttggtactttatcacaaattttaaaattaattttgatttctcaaaatattgattaaaatatttatctctactattgartttttgggcacacctttaaattttgcatgcaagataagcaccttcctcagttgtaggatgttgacggtgataaggacattagcaaaggaaatattgaaaagctcatgaatactgttgcataattcttcttagagaaaatagtttcttggtataggatagaacaattgctaaagggaaggtgacctcctacatagcatgaaaagatgtgtcatgatcttggtatttgtaatttgttccctttcactctgctcaact

SEQ ID NO: 894192 - DNA, 667 bp, Homo sapiens
taccaaaaatacaaaaattagctgggcgtggtggcacgcacctgtaacctcagctacttgagaagctgaggtaagagaatcacttgaacttgggaggcggtgcttgcagtaagccgagattgcactactgcactccagcctgggtgacagagtgagactccacctcagtcaaaaamaaaaaatgaaaatagaaaaaaccgacagacactaaaagctaagaaaatagtgtgttcattttggaatctaattcaaaattcattataatgaattttaacgggccaccaaaggcatgtgttgaagttcactgaatattattcaatgtttgagaattacagacagcacacatatttcatttgtagcaatgtctgatttgttttgcatatatatatttgcatttatttaaaacaaaaaacgtcaaaatatatttcatctgttatttggaaaaaacattgagtaactaattgtccaaatataggtctctattttctaatttttaattaacaatgcttcttatttaaaaaaataacttatttcaaaataactgacatttaatgtttttacattttttaaagtgttcatgtacatctatttaatttctagatatcgtgagggaatcgtcactgtatctggaagccagatgccaaagatgttcagttattatcaatgt

SEQ ID NO: 894193 - DNA, 530 bp, Homo sapiens
ttaaagtcagtgaaaatagccagccagaggcatggaaaattttaaatttaaatttttgatttaatgttgttttctttgctttaacaatattagatagtccaaatgaaattacctttcagactaggttttaagaatcaatagattctttttttaagaattttttaataagattcttaaaatttattttaataaattcagcaatctcattaacagaagaatcaataaattctaatttaacatttgatatttagcttaaaaacataaccactataaaatttaaaatacccttattttacagtattcttatttaaaatattcttrtctgcctttttgattagcttatagctaatctttccttttggaatagaggcaaaaacatattccagacctttgtttgttcttttattttaacaacaccctaacatgataaagtaacatcaattattggattatattattaagcaaaagaactatgaacaatgtaacactgaaggtccctgagctggattcatggttaaagaataatcacg

SEQ ID NO: 894194 - DNA, 631 bp, Homo sapiens
agactttactaaattcatttatcaaatctaggagtgttttgtaggagtctgtagggttttctaggcataagatcatatcattggtgaagagagagtttgactttctcttttccaatttggatgccctttatttctcttgcccaattgctctgcctagggcttcccagttttcttcttaatatgcatgaaataaaagtaaaattgaaagcgattgttgatcagtttatttcacatttctctctcatacacarataaaatgaattcaaagttctatgttaaaaacacaatattagagcctgtcttgttccaaagggaatttctaagttgtctatagattacagaggaatcaagaatataagtggaaactgtttccaaaaaataaacataaaaagtttaggttaacacaggggtttccaatccccaggccacagaccagtaccagtccctggcctgttaggacctgggccacacagcaagaggttagtggtagggagcaagtgaagcttcatctgtttacagccactctctgtcactcacattaccttctgagctcctcctcctgtcagatcagcggtgacattagattgtcataggagtgtgacttgaaccctattgcaagctgctcatgcat

SEQ ID NO: 894195 - DNA, 698 bp, Homo sapiens
acagcagggcactactggaacacacagaagggacacctacccacttttatgtcaacatcatgggctttctgatggaggagatatcataggttgatacctgaaggacaaggaaaagcttgccagatagagggaagaggcaaaggcaaagagcctgagatgaggaagagccctgcagagttccactccatcaagtttgggctacagcaaagggtagagtgmagtaagtggtgagagacaaggctgagtaacttgacaagaattacattgacatgggtgtttttatttcatggtgaaaaatctggaatgtttcctgagaacaagtgtaagccaatgacacagtaaatgacaggagatttaaaatgtcacctgtcaagtgactgcttatgaagggttattgctcaactaagcatttctgaatgagtctaaggtctgttggccttcaatttctaccaaaaccctgagaacttgatgatgcctgtgttttctgagaatcgtttcagtgtgctggctgacagttccatgaggatggcaaaacttaagaaagtgtagagccagtgaaaaagagatgcacagacttcttgggaattttttaagctacagaacatgatgaatttatggtgcataagtacagtcttctctgtgaaagtttttgttttcacatctttcattagatgtgtgtaagaaaaaaaatacttgac

SEQ ID NO: 894196 - DNA, 617 bp, Homo sapiens
caaacactacattttctcacttataagtgggagctgaacgatgagaacacatggactcggggaggggaacaacaaacactggggcctgttggggtcaagaggtagagcatcaagatcagtagctaattcctgcggggcttaatatctaggtgatggattgacaggtgcagcaaaccatcatggcacacgtttacctatgtaacaaacctgcacatctcacacatgtaatctagaccttaagataattttttttwaaaaaattaccttatgttttagtttcttaatcagaatattcattttcagttgatctgtttttaagtctccatggcaatcgaagtcttcatttccaaatacacttaacacatttattgtcatttccaggagtttcttatatctgcagaaacgtacagaattagtaagtcaaatatttttaagagtaaatatttaataattgtttaaacgatattatgttatagcatatcaaagaaacacatctataaactatgatcctttcagtttcaactgagcatagtttggaagcactctatatgaaattataatcttagataaataatatgaagaacaattttatggcatatatggcaggtaaagtggta

SEQ ID NO: 894197 - DNA, 615 bp, Homo sapiens
aaaaccagtccccctgggcccctgaacaggagtcctgagaggatccagatgcagggccatggtcaggcacagtggaagggactcagcgccaaaccactcccaaccctaccctgagaataccagcagctccccagaaagcagatggcacaagtcctttccagaaaaactgaacagtctagggaacagccatccagatccagacatttgggagtccctccaaaaagcctggcttgccatttagctaccatccaccccaccccaaacacagaacttcttggctagccttttagggcctcactcagatatagacagatagccttgggtaaggcatctgaggagggcctccwacataaaagagataaactggagtaacagagaggaaaaaaaaaaaaaagaggaaccagataatacgtgaaccaaagaaaacttagaccccaaaaaccctaatttccttggaaagataagatgatgcatccaaaaaataagatgctatgaaaaagtcatgataaaaagaaagaggaaataagtaatatatatggaataaaaaattcagtaggacaattggaaaataaagtcaaggaactctttcagaacacagtaggaagagatgagatt

SEQ ID NO: 894198 - DNA, 478 bp, Homo sapiens
atttttctatttgtttcacatataattttcagggtctttttgttgtacttggcaggaggaatagggaaaagcatatctacgccaggtcccagagaggaagtctgttccatgtggttttattgctatgttatttggtgcattaagatttcatggttggctgagcaaggtggttcaggactgtaatcccaacactttgggaggctgcttgaacccaggagctcaagaccagcctggacaacatggtgaaaccgtctgtattaaaaatacaaaaaattagcagagcgtggtggtrcacacttgtagtaacagctactctggaggctgaggtgggagaatcacatgatcctgggaagttgaggttgtagtgagccatgattgcaccactacactccaccctgggtgatgcgagtgagaccttgtctcagaaaaaaaaaaaatcatgatcaatatacagtgctgttttaactcacttcataat

SEQ ID NO: 894199 - DNA, 630 bp, Homo sapiens
ttattttttattttgttctatttttcttttttctctaacattttgtatttaacatttaaaaaaataaattttacagttttacctctattgtaatatatgttatttgaggtatgagttcctatcaaaaagccatttttttcttcatcttccaagttctgatatataaagcttatatttttcaattataaatatatggtcatttacattaggtatatctcctaatgctatccctccccgctctcccacaccccataacaggccctgatgtgtgatgttccccaccctgtgtccaagtgttctcattgttcaattcccacctatgagtgaaaacatgcrgtgtttggtttattgtccttgcaatagtttgctgagaatgatggtttccagcttcatccatgtccctacaaaggacatgaaatcatcctttttatggctgcatagtattccatggtgtgtatgtaccacgttttcttaatccagtctatcattgatggacatttgggttggttccaagtcttacatatgtaacaaaactgcacgttgtgaacatgtactctagaacttaaagtataataaaataaataaataaatataaggtgagatatatttttacttcttctataatttata

SEQ ID NO: 894200 - DNA, 477 bp, Homo sapiens
ttccagtgagtgggctatttctaataagattagtagttttttcattcatatttagatttctggattttcaaggtcatgttttagtttatatttgaaatgtgctggaggaaattagggaaacacctcattttagaggtgaattctgcaggccaggaactgcatacaccaaggtgttctgacagcccttccagacctggttcaggtagccccattccacagcctttctaggctgcagccagcacctaccacttcctcagtctcccccttggttaaatgggtcacagtcagtccaggttcttgagacagaaatccygggcatctgttatccttaatactttccttttcctctcagccaatcagcagccagattctataaatctactgcctcaaagttatctctttcattcctccaatctcaacacctttgcagccctcatcaatgataacctgagctatttcaagaactggttcttcttt

SEQ ID NO: 894201 - DNA, 649 bp, Homo sapiens
aacaaaggaaagaaataatcaatgagataattcaaggaaatttctcagaactgaaggatatgaatttccagattgaaaaggcccaccaaatgccctggacactgaatgagaataaacccacaacaaagcatggcatcaggaagcccaaaaatgcttgggacaaagataaaaccttaaaactttcagagggcaaaagcagatcacaatcctcaaacagggaattaagatgttcttttgacttctcaaaagtaatactaggtggggcacagtggctcatgcttgtaatcccagcactctaggaggccaaggtgagagatatatttgagcccaggagtttgagaccagcctgggcaacatagcaagwtccccatctctacagaaaaattagaaaaattagctgagtgtggtggcatgcacctgtggtgtggtcctaggtactccagtggctgaggcaggaggatcacttgagcccaggagttcctggctgcagccagctatgatcacaccattgtactccagcctgggagtgatagagaccctgtcaaaaaaaaaaaaaaaaagcaaaaagcaatactggaagctagggagatatgaagcaataccttcacaattttaaggtaaaattattttttaacctagaattttattc

SEQ ID NO: 894202 - DNA, 580 bp, Homo sapiens
ccttctgctgtgaggaatgtggatatccaagctgagacagtgaatccttgtgttgcacttgagggaaatgaggccgagaagaggcagagttacttgtcctaagcacatagtcagctttgactgaggcgggagcaaagcacagtacattccttactgccaattcagtgtcctgtccccttgttacattggcttgctgaaaagtagaccagtcagcacattcttcaccctgcttatatgttgctgtgtaacaaatcaactcaaactttgtagcataaaatatgaacaaacaccttttattgktatctcttctagttttgcgggttactgggatcagtgaagtggtccttactcagggtctctcgtgcagttgccgttaaatgatggctgaggctggggtcatctcaaaggctttcctattcccatgtgtgatggtggatgctgcctgtcgctggaaactcagcaggggctgctggccagaacacctgctgacagccttccaaggtgacctgggtttcttcacagcttggtggctggattccaagggcaaatgtgcccatgcacacccttttatgacctagcc

SEQ ID NO: 894203 - DNA, 560 bp, Homo sapiens
cagcagcaaaatgctgccggtctctttgctaaagcatagcaagaatcacctttattccagttgctaacacgttcctcattttcaatgagaccacctcagcctggacttcattattgatattattatcagcatttttgccaaagccattcaacaagcctctaggaagttctaaactttctcccacatcttcctgtcttctgagacctccaagtctctgggaagttccaaactttcccacattttcctgtcttcttctaagccccccaaactcttccaacctctgcctgttacctaaagttacttccaaatttctgggtatccttatagcagcatcccactctaccaataccaacttactgtattagttccttttcaagcagctataaagaaatgcctgasactgagtaatttataaaggaaagaggtttaattgactcacagttctgcagggctggggagacctcaggaaacttacagtcatggcagaacaggaggcaaacacatccttctttacatggcggcaggaaggaaaagtgctgagcaaagagggaaaagcccct

SEQ ID NO: 894204 - DNA, 584 bp, Homo sapiens
attatggttcctctctctgaactctaccatttcatagttatccaatattcagcaaaccatttcacctcaatttgactttgtttctcaagaagacaaaatttgcagtgtcttcttcatagggtttttaggagcatgaaatgtgttaatgggtgctaaagtgcactgtaaactatgaaaatctacatgttgttttttttttttttttaaatacaaatgctccccggtagaacaggtaagactatagaattagtaatgtaatatacacattacctcacttaattggcctgaaaaacttcaattgcaraagaaatgttacattccaagatctctaatttttcctctgtcattaatatttgataattttataagttattttcttccatagagagaggatgttcatacttactgtggggcccagaatttgttctgattatcttgcttctgcacttcaacactgactttactgacagccccagaaaatactcatgttttgagtacctgcactcggtgtaaaacaatgggttcatgcagtgagtgcgatggtgaataagacacatccagagccttccatcaaacatcaaact

SEQ ID NO: 894205 - DNA, 638 bp, Homo sapiens
aatcccaacaggccagagatgaatgatttctaaaagtaggtaacaaatgcaagtttccaagacatgagatttcttgctactttcctcttactaggtcttactggcatgagmaaatcagtgtggtaaaccaatgtgtcctgagggatatgagagaatcaaatttcctgcagactaattatagcacagagttgatataactctgatgtgagagaataaagttgtgctcttgccaaagtcaggtgaaagaaacctgttaaactttgcctattagtatagaggaaaatacactcaaaatattgatagctacatatcaaatgttagtgattatgctggttttctctagtaaggagactgcaattgatgtcactcactaattaaatgtataataaccgtggtcattcatcaaggcatgtttatttttgcatagtccatatttggttatttgaaaggatatgtgataggtataaccaccccacatattttaagcaactgatgatggaactaatctctgagagggtcccatgagtgaaatattgcatttgttttattattctcaaagaatgggtaggtcctgggtcttcactttctaaagctttcacttaatgggtcaaagaatcaataaaggaattctcaacttt

SEQ ID NO: 894206 - DNA, 612 bp, Homo sapiens
gcatatgaaatgattttgaaatttcatattgccttgtggtttttaatctaatcaactgcattaaatttaattacactaattaattacattattgtattgattaagcatacacagattaggaaacacagcctcttctctgttgaagcctgaaatacagttagtaataataggatatcggctttaaaagtcactaataatataaaattattagaggcttattcatgagcataaaataagaccactaatatcaaaacctcttgaagaaagaagatattactgagggctaggactgtcaaaatagcttttgtgaaagttacacaacttctgaacaatgasagcacatggacacagggaggggaacatcacacgctggggcctgccagagggttgggggctaggggagacagagcattagggcaaatacctaatgcatacagggcttaaaacctagatgatgggttgttagaggaacaaaccatcatgacattacatgtatacctatgtaacaaacctgcacattctgtacatgtatcccagaatttaaagtaaaatttaaaaaaagtagccctcatcaaatagaaaatactataataaggaaagagaaacatagag

SEQ ID NO: 894207 - DNA, 612 bp, Homo sapiens
gcatatgaaatgattttgaaatttcatattgccttgtggtttttaatctaatcaactgcattaaatttaattacactaattaattacattattgtattgattaagcatacacagattaggaaacacagcctcttctctgttgaagcctgaaatacagttagtaataataggatatcggctttaaaagtcactaataatataaaattattagaggcttattcatgagcataaaataagaccactaatatcaaaacctcttgaagaaagaagatattactgagggctaggactgtcaaaatagcttttgtgaaagttacacaacttctgaacaatgacarcacatggacacagggaggggaacatcacacgctggggcctgccagagggttgggggctaggggagacagagcattagggcaaatacctaatgcatacagggcttaaaacctagatgatgggttgttagaggaacaaaccatcatgacattacatgtatacctatgtaacaaacctgcacattctgtacatgtatcccagaatttaaagtaaaatttaaaaaaagtagccctcatcaaatagaaaatactataataaggaaagagaaacatagag

SEQ ID NO: 894208 - DNA, 680 bp, Homo sapiens
ctaatgtattagccctttttgatagtttgtcagtatgtctcaagcccctattatgttcaccaaccatgtggatttactaggggcattaaatgaataatgcacatgaaaacaactttggaaggaataaaaaaagtaggttgattatacaggtaaaaccatgtctttaccaaagagatcataaaatgtcaragaatttatcaggagccactggtaggttttaaaatttcatacaacatctagatgaattttggcattttaggtggtaaggatgattgtgttgaattttagagctttcattgtgggaagcattaatgagtttattgaattcaaagttttataaagcagagggaggcagtaatatggcttatgtgactgtcagtttaacaaagatgagtggtcattagacagaattccaagaccaacactgtggtttattatataaaatactaaccatgaaagtttttgagaaagtcttcttttaccatttgacctgtctttttttttccctgcctttctttaagtgttgctattccccattccagggctttatctcttcttcctctataccctctccctatataattttaatcaggaccagggcttcagtcatttatatttcaataacttccaaatctttgcttgtactgtggactactatttgtaaatacatgggtgtgttc

SEQ ID NO: 894209 - DNA, 563 bp, Homo sapiens
taaaattgtgcttctaatgaccattggatgaccatcctgataaaaacttacatcaattttccccccagaacctaagtgtcatttacttcttttacattagccctgttatattccagtgaggcgggttttggaaaaggtcagtgttccattttgagacagactctggctagtgatttttttctagattgcacagatagggcaccagaggttgtatcacaaatggcatctctatctctcatctctccccactgactcactaagtatgcaaattacagaagtccctcccagggcaagacaggactccagcaccactccctgcacacacactgtaatacacagggctgctgctggtaaacagggaggaattattttatctccccttctgatggcytgagactgcaaagatagtatgatcatttatcaatgatgagcacatggaacacagagaacaagaactaattctgggccctttaataatagaatgatagttttgttctttcagctctggaactacaggaattttccctgaaggaccagatgttaaatctcactcatctacacca

SEQ ID NO: 894210 - DNA, 627 bp, Homo sapiens
atgtaacttccacaaagtcagagatctttattttcactgatgaataccagatcagtgcgtattacacaacaggcactcaaaaatgtttgtagaataggaaataaaagcactgcttaatctccagatatctctcacctttgtattgtttttgtctcaaattggcatgtttttattaataactactaactctggggttttcagacaaagaagaaaaagagacaaagcctcctttggtacatgggccttaagctaagaagtcactcttggttgtgtaaaaagccctagtagtgaagatgctttgtcctgaggctttactcaggaccaaggcacctttccttcatccatttcttgctctcactgtgagccgaggccccttaagcaacacacaggggaaaagcagatgaaactaaatggctgataactaaggtagggccaatgagaagtggcaggtyctgttgacagaagaggatacaatgttcaggacaggagtaacccctaacttgaggatgaagactttcaaaagcaggtggtataagggtaatagtatggataatccattctcttcacactattcaaggtagacactgtatggttgctaataggaaacttgaacctgaattaaagaac

SEQ ID NO: 894211 - DNA, 679 bp, Homo sapiens
aaccctttaagccagaagagattgggagccagtattcaaaattcttttttaaaaaagaaattccaaaccaaaattttatatacagccaaactaagattcgtaagtgaaggagaaagaagatcctttccacacaagcacatgctgagggaatttgttactatcagatgtgccttacaagagctcctgaaggaagcactaaatatggaaaggaaagaccattaccagccactacaaaaacactaaagtacacagaccagtgacactataaagcaaccatataaataagccttcaaaataaccagctaacatcataattatgggatcaaatccacacatatcagtattaaccttaaatgtaaatgggttaaatgccccaattaaaagayacagagtggccaattggataaagaaccaagaccgagtggtatgctgtcttcaagagacccatctcacatgcaatgacacataggctcaaaataaagagatgaagaaaaaatttaccaagcaaatggaaaatggaagagcaagggttacagtcctagttcttgacaaaacagactttaaaccaacaatgatcaaaaaagacaaagaaaggtattacataatggtaaagtgttcaattcaaaaagaaaatctaactatcctaaatatacatccaccccaatacaggagcacccag

SEQ ID NO: 894212 - DNA, 501 bp, Homo sapiens
tatttagtgtgctattttggtaagtttacacacacacacacacacacacacacacacacacacaccccatcaccaataaaaataatgaacatattaggtcaggagtggtagctcaagcttgtaatcccagtactttgggagggtgaggcaggcggatcactcgaggtcaggagttcaagaccagcctggccaacatggtgagactcccgtctctactaaaaaaatataaaaattagctgggcatggtggtgcttgcctgtaatytcagctacttgggaggctgaggcaggagaatcacttgaacctgggggatggagattgcagtgagcttagatcacgccactgcactccagcctgggcaacagagcaagattctgtctcaaaagaaaaaaaaaagaacatattcatcatcctcaaaatattcatcattcctctttgtaatccctttccatccctaggcaaccactaatttgttttccatcactgtagattagtttgcat

SEQ ID NO: 894213 - DNA, 602 bp, Homo sapiens
gtttttctaatgggtacaggaagggactgggtttggggaggaagcccccagaggcgaagtgccactgtcactccactgtattgggcacaccctgtcacctgactcaccgtgaggctgagctggcccctgctgggttgagwccccccctccatgctgtccgctttgggaggaagtcgctctgcagccctggcctcggggtgggggttgtgctctacctcctggaagacacagcagtgacagagactgtttggaatcctgctgggaaaggagctttgtctcttctccccgtgtatgtgtcgctcatgcgccggtgttggtctggacagatggatgtttagtttacacacagcgttacttgattttggtgccgaaactgttccagcattggccgctgggagttcttgcagttgcccccagctccctttggccccattgacgtgggggtcgtatttttagctctttcccactgccgagcaccaacaggtaacccaggcgcatcttggacatctcctgccagtcctgctgtttctctagggagccctggcccctgtattgcaggaggtgtgagaccctgagatctggggctcggtgcgcctgtccca

SEQ ID NO: 894214 - DNA, 602 bp, Homo sapiens
gtttttctaatgggtacaggaagggactgggtttggggaggaagcccccagaggcgaagtgccactgtcactccactgtattgggcacaccctgtcacctgactcaccgtgaggctgagctggcccctgctgggttgagaccccccctccatgctgtccgctttgggaggaagtcgctctgcagccctggcctcggggtgggggttgtgctctacctcctggaagacacagcagtgacagagactgtttggaatcctgctgggaaaggagctttgtctcttctccccgtgtatgtgtcgctcatgcgycggtgttggtctggacagatggatgtttagtttacacacagcgttacttgattttggtgccgaaactgttccagcattggccgctgggagttcttgcagttgcccccagctccctttggccccattgacgtgggggtcgtatttttagctctttcccactgccgagcaccaacaggtaacccaggcgcatcttggacatctcctgccagtcctgctgtttctctagggagccctggcccctgtattgcaggaggtgtgagaccctgagatctggggctcggtgcgcctgtccca

SEQ ID NO: 894215 - DNA, 570 bp, Homo sapiens
ctttctcgtccttgattagaatgtttttctctagtatagggacggtatctttcacatgggaattttctctgttttttttttgagacgcactcttactctgtcgcccaggctggagtgccgtggtgcgatcttggctcactgcaagctccgcctcccgggttcacrccattctccttcctcagcctccccagtagctgggactacaggcgcccgccaccacaaccagctaattttttgtatttttagtagagacggggtttcaccagtttagccaggatggtctcgatctcctgacctcgtgatccgcccacctcggcctcccaaagtgctgggattacaggagtgagccactgcacccggccccgaatttcttctgctgttaagacatagcatgaaggtcagaatgatcttcttgcacctgctgtttttcatgtgcttttaatttactgtttatgccagggtggtacatttttaactccttcaaaagccagtccccttaagcagagcttttcctggagactctcactgcctctacagtgtacggaatttttagaagtacattaaaataat

SEQ ID NO: 894216 - DNA, 570 bp, Homo sapiens
ctttctcgtccttgattagaatgtttttctctagtatagggacggtatctttcacatgggaattttctctgttttttttttgagacgcactcttactctgtcgcccaggctggagtgccgtggtgcgatcttggctcactgcaagctccgcctcccgggttcacgccattctccttcctcagcctccccagtagctgggactacaggcgcccgccaccacaaccagctaattttttgtatttttagtagagacggggtttcaccagtttagccaggatggtctcgatctcctgacctcgtgatccgcccacctcggcctcccaaagtgctgggattacaggagtgagccactgcaccyggccccgaatttcttctgctgttaagacatagcatgaaggtcagaatgatcttcttgcacctgctgtttttcatgtgcttttaatttactgtttatgccagggtggtacatttttaactccttcaaaagccagtccccttaagcagagcttttcctggagactctcactgcctctacagtgtacggaatttttagaagtacattaaaataat

SEQ ID NO: 894217 - DNA, 664 bp, Homo sapiens
gggatgattttgacaatagcagaggagcaagagttaggatagaaagagaattctagaagtgacagcatgaacaaaagcatgcagaaaaataaaatccagcacataaaataaggaagacttttttgtattcaagaaatttgtttttacagcagcatctcagtgcctcaaagattatctttaaaaacagctgttayccaacaactacttaaagcttgaaataaaggaaaacattcccacgccaactctgcactctaaatagaagctgaaaagatagatacaaaaataccaaggccactatggcagcctgatttgaagctttttataaaacaaaaagttctgtggtctcctgaaaggctcactcctcttgtttgcacaattgttcagtctctcctgagcccccactgtcgggatagcagggagggaactgaggaaaagcagccgtcttgaaccagagccagcctccaatccctctgcacccatgcaagtgtgccttctcagggacaaggactatgataaaataagaacattatcactatcatgcattgggtgtttaacatggctagaactatccaaagcatcacacaggttatgtcatttccaaccaccccaacaagtgactggtactgtaatctccatttcacagatgaagaaattgagccagaga

SEQ ID NO: 894218 - DNA, 660 bp, Homo sapiens
tttgggaacaaggaacattttttttttaagaactcttttacactgttggtgggagtataaattagttcaaccattgtggaagacagtgtgacaattcctcaaggttctagaagcagaaataccatttgacccagcaatcccattactgggtatatacccaaaggattataaatcattctactgtaaagacacatgcacacatatgyttattgcagcactatttacaatagcaaagacttggaaccaacccaaatgcccatcaatgatagactggataaagaaaatgtggcgtatatataccatggaacaaggagcattctaagggatacagcttggatgctaaaacgttggtatttctgggacatttcaaacaagtacgagaacactatctaccttagatgctgggctgcgctcaaaagcccaggctgttcaatgctttatttaggagaagcctgcactccccgctggcctaacctttctcttgtctccttcactccactaactcacatatttagagcatttatcagaccaagaaggtattaagttacaaccttttttgtaaatgaatcaaagtagaaagtggctgcagggagagtctaggaatcctagggtagactttcccctgagttatccagttcagtcttcaaagacaggtcctcc

SEQ ID NO: 894219 - DNA, 611 bp, Homo sapiens
gggacttgctcccagcagaaatgagttcataacatcttgtcatataagatagcaaggaaggcataatactagaaactactaacaccatgtcaaagacaccggagacaaactgaagagaattctacaggccaaagatagaaaaatgtgatcaacaaaaataactgcaataagttaacttcgttatccgttacacttattttacacataaaatgtgtttacagtggtgagtttataataaaraaaaataactggtcacctttggagtataacaggatatcaagttattgttttgaaacttagaaaacgcaggtgatgtgtttttacattatctgtggtatcagatacacaagactatgtgtttgataaaatttcgtagaactaaatacatgcacagatgagtgtaagtaaaactggggaagtctgaataaaatccgtgaattgtatcaatgtcaataatcctgggtatgatattgtacaatcattttgcaagatgttaccactgaaggaaaatggcataaaatagacagcaaagaatctttcttcattatttcctgcaataacatatgaaactacaattatctcaaaataaaaagtttaatttaaaaatcttc

SEQ ID NO: 894220 - DNA, 627 bp, Homo sapiens
agaacaaaacagaggacccagaagcaaagttgcacatctacaactacctgatcttcaacaaatttaacaaaaacaagcaatgtggacaggactccctattcaataaatagtgctgggataactggctagccatatgcagragattgaaactagaccacttcctcacaccatatgcaaaaatccactgaagatggattaaagtcttcaatgtgaaacccaaacctacaaaaaccctagaagaaaacctgggaaataccattttggacataggccctggcaaagatttcatgatgaagatgccaaaagcaattacaaaaaaaaaaaaagaacaattgttacctacccaaaaaactttctgcgcagtgaatgaaactatcaacagagtgaacagacaacctacagaatgagagaaaatatttgcaaaatatgcacccaacaaaagtctattatccagagcctataaggaacttacaccaattaacaggcaaaaaccaaacaaccccattaaaaaatgggcaaaagacacgaacagacacttcttaaaagaagacatacaagaagccagcaaacataaaaaaatgctcatcattaccagttatcagagaaatgcaaatcaaaaccacaatg

SEQ ID NO: 894221 - DNA, 627 bp, Homo sapiens
agaacaaaacagaggacccagaagcaaagttgcacatctacaactacctgatcttcaacaaatttaacaaaaacaagcaatgtggacaggactccctattcaataaatagtgctgggataactggctagccatatgcaggagattgaaactagaccacttcctcacaccatatgcaaaaatccactgaagatggattaaartcttcaatgtgaaacccaaacctacaaaaaccctagaagaaaacctgggaaataccattttggacataggccctggcaaagatttcatgatgaagatgccaaaagcaattacaaaaaaaaaaaaagaacaattgttacctacccaaaaaactttctgcgcagtgaatgaaactatcaacagagtgaacagacaacctacagaatgagagaaaatatttgcaaaatatgcacccaacaaaagtctattatccagagcctataaggaacttacaccaattaacaggcaaaaaccaaacaaccccattaaaaaatgggcaaaagacacgaacagacacttcttaaaagaagacatacaagaagccagcaaacataaaaaaatgctcatcattaccagttatcagagaaatgcaaatcaaaaccacaatg

SEQ ID NO: 894222 - DNA, 583 bp, Homo sapiens
gttcagtttccatgtagttgagcagttttgagtgagtttcttaatcctgagttctagtttgattgcactgtggtctgagagacagtttgttgtgatttctgttcttttacatttgctgaggagagctttacttccaactatgtggttgattttggaataagtgtcatgtggtgctgagaagaatgtatattctgttgatttggggtggagagttctgtagatgtctatcaggtccgcttggtgcagagctgagttcaattcctggatatccttgttaaccttctgtgtcactgatctgtctaaaattgacagtggggtgttaaagtctccaattattattgtgtgggagtctaagtctctttgtaggtgtataaggacttgctttatgaatctgggtgctcctgtattgggtgcgtatatatttaggayagttagctcttctcgttgaattgatctctttgccattatgtaatggccttctttgtctcttttgatctttgttgttttaaagtctgttttatcagagactaggattgcaacccctgcttttttgtgttattttgttttccatttgcttggtaga

SEQ ID NO: 894223 - DNA, 656 bp, Homo sapiens
cctggctttgaacttgggacagttttttatcctctttgaattctagttccttcatttataaaacagtaataatacagtaataatgtctactctggaggcttataaggaaatgagataatgtaagaaaagaggccggtgatgtcactcaataaggcaaatatctgcttagagtcgtaataataatatatattatatatataaaactaatatataatgtatataagtaatatatatataacatataattatatataatacatatttagccactgtgcctggctaaagtggtaataatatagtaactgaaagatagaaaatttaaatgtccaacaatagattgaccaactaaattatagagcaactgtataatgaaatattatatttgtaattatatttgaaagagcataatgggtcaggtgtggtggctcatgcctgtaatcccagcgctttgggagagactraggcaggtggatcacttgaggccaggagttcaagaccagcctgcccaacatggtgaaaccctgtctctactaaaaaaatacaaaaaagttagccaggcatggtggcacacacctgtaatcccagctactcaggaagctgagggacaagaattgcttgaactcaggaagcagaggttacagtgagccgagatcaca

SEQ ID NO: 894224 - DNA, 586 bp, Homo sapiens
tcaaaacaaaacaaaacaaaacaaagtgcataatatataaggaagtatttgtcatataaagttatatgaccagaccagaataaataatgcatacaaatataatatttaaaaagaaagtttatacatcaaaatgttaaagtgattgtagtttagactgagagattttggttttctttttacaaaaaaaacccataaacacgaattttggtagctttctgagttttctatgatgagaattgcttttataagaatatggaattttaattggagataataaatagtgratgttttcatgtcactggtgttacccttatcagtgtattgttcttatttgctgttccccaaatccacctctggctttacccctgggaaaatggcaacaatccagcagaaaccaaatctgtggacctagaggaattaaaaggatttttcttcatttactttgggtggttttgtctggctgggtgtgcctcatactgacaggaagtgtgtgtcaccagaaaagaatttaattctttgcagcaaaaagatggttagtggaaagagagaaaaacactcatgagtgcttctcacagattcggcttca

SEQ ID NO: 894225 - DNA, 500 bp, Homo sapiens
ccagcagaaaccaaatctgtggacctagaggaattaaaaggatttttcttcatttactttgggtggttttgtctggctgggtgtgcctcatactgacaggaagtgtgtgtcaccagaaaagaatttaattctttgcagcaaaaagatggttagtggaaagagagaaaaacactcatgagtgcttctcacmgattcggcttcattgtgtcaaactggctccccttcccagttggacccacccagagaagaggtgcccccactcagaatccacactgttccaacagaccaggaatgtgtaggggcctcccagtccaccaagaggccagcttgtttgacccccggtgtataaacctggctttgcctcttgaaagagtaaccacccctctctgtgcctcagtttctcaactgtaaaacttatacgtctgccacccccactaaaaagtgagtccctgtgagcacaaggacagagctttatacctttctgtatccgtacagcttag

SEQ ID NO: 894226 - DNA, 681 bp, Homo sapiens
gatagataaaacaaaaatgagttaaataagatactgcgcttgcattggagccaaactggaaaatgcgaactggacttgaaggctcttggacctgggttcaattcttggctccacctagccacttaatcctaggcaattcagtgactctcagtttactcaactggaaaagaaaagtaatgaaacttatctccaagagttgttatagtgattacatgataatgaggaagctcctgagtcctggtgcaatcaatattgagttgaagagtaggaaagactacattgtttaaaatggtccaagggctccccaaaacctttagtgaacggttcagtatggcttcctttcctccaagagcccagcttatttccacagcttccctcctaccctctgcctcttcacccctacctaaccggggtcagcttctgatttgtgacacttttagaatcaacatcctgawtgctgagactcagtatttcattctgtaacattttctgaagaagactttaactcaccgaggggagttgacccttcaaaggcccttctttagcacaagccgccaagctaccttttccgcggttagcccttggccctgtgggggtgagcttgatcaccccagacatcacttgacaaggagcatgttgcatttctcttaaaacacaaaacaaaaatttgctggctggctg

SEQ ID NO: 894227 - DNA, 602 bp, Homo sapiens
tgcatcttcctgcccgctgtttttctgtgttctggccatactgggtatgtttctactccttgactgtgaagcactttacctgctcaggggcttttgtacgtgaggtccctttttttggtcaaccgttttttttttttttttttgagacggagtctcgctctgtcgcccaggctggagtgcagtggcgcgatctcggctcactgcaagctccgcctcccaggttcacrccattctcctgcctcagcctccccagcagctaggactacaggcgcccgccaccacgcccggctaatttttgtatttttagtagagacggggtttcactgtgtttgctaggatggtctcgatctcctgaccttgtgatccgcccgcctcggcctcccaaagtgctgggattacagacgtgagccgccgcgcccggccctggtcagccattcttcatccactttcctctttgcttatttattcttccagtctcagtttaaaagcagcttcatcagggaatttccctaggccctgtagactaagttagatcccctgttacatgttcctgtggggccctgggcttccccttcctaacattcactgcactgttgtcattt

SEQ ID NO: 894228 - DNA, 602 bp, Homo sapiens
tgcatcttcctgcccgctgtttttctgtgttctggccatactgggtatgtttctactccttgactgtgaagcactttacctgctcaggggcttttgtacgtgaggtccctttttttggtcaaccgttttttttttttttttttgagacggagtctcgctctgtcgcccaggctggagtgcagtggcgcgatctcggctcactgcaagctccgcctcccaggttcacaycattctcctgcctcagcctccccagcagctaggactacaggcgcccgccaccacgcccggctaatttttgtatttttagtagagacggggtttcactgtgtttgctaggatggtctcgatctcctgaccttgtgatccgcccgcctcggcctcccaaagtgctgggattacagacgtgagccgccgcgcccggccctggtcagccattcttcatccactttcctctttgcttatttattcttccagtctcagtttaaaagcagcttcatcagggaatttccctaggccctgtagactaagttagatcccctgttacatgttcctgtggggccctgggcttccccttcctaacattcactgcactgttgtcattt

SEQ ID NO: 894229 - DNA, 662 bp, Homo sapiens
acaatttactgtgaagttcaatcagggaattttttatttctcatattgcattttttgtatatgattcaattccatttggttctttttttaatttctatttctctagtgtaatttcctatttgttaattcattataagtctattctcatgtccttaaccacggttataataactactttaaaattctcgtcaactaattccaacatatggttcatctcagagcttgtctctattagccctttctcttaaatatgagtcatgtttccctgtttctttataataattttggattatgtcttggacattgtgagtgatatgttgtarggactctgtcttttgttacattcatccaaaaagtgttatttttatttgtttgtttgttttagccagtaattaacatggctaaattcaatctctatctctcactaaaacagacaccaagtgaaatctctgtttagttgttttggccttagttgggctgcttgacgtctgtcttacacatgcatagttcagagaattgccagagacttaggtagagttttatacataaaattttgggctccctttccattgttttatcctttcttggatcctcctgcccttgatcccaatttacagctgctatagttaccctgaatgcttccctcttattcttctatttgg

SEQ ID NO: 894230 - DNA, 582 bp, Homo sapiens
ggtgacactgaggtgaattcggcaagcttcccctttatctcccttatatctcagactgggaaccagggtcttggactttgaaactaacaacaggcgcagaccaaaagagaataggaaaaacaaacaaacaaaaacaaacctgggccgggcacggtggctcacgcctataatcccagcactttgggaggccgagaygggtggatcatttgaggtcaggagttagagaccatcctggccaacatggtgaaaccctgtctttactaaaaacacaaaaattagcagagcagtagtggtgcacgcctgtaatcccagctactcatgaggctgaggcaggagaatccttgaatccaggaggcagaggttgtggtgagctgagattgtgccactgcactccagtccgggtgacagagtgagactctgtcaaaaaaaaaaaaaatctggcttctctctggacaaagtggcgggaaagggacagaccagcagaggcctggcagggagatccatgcctgggcacacgtggggaagagcaggcctccccagccacaacagcctgagcagctgccctccccagccgccctcccc

SEQ ID NO: 894231 - DNA, 547 bp, Homo sapiens
tgctagctacattaacaaagaaaaaaagagagaagatccaaataaacacaaacagaaatgacaaaggtgacatcacaactgatcccacagaaatatgaaagatccttagataactattgtgaacacctctacacacacaaactacaatatctagaggaaatgaataaattcctgaaaacacacaatgtcccaagtttaaatcaggaaaaaactaaagcactgarcagaccaatattgggttccaaatggaattagtaataaaaaacttaccaaccaaaaagaaagccctggccagagagattcacagctaaattctaccagatgcacaaagtagagctggtaccaattctactgaaactatttcaaaaaatcgagaaggaaagactcctccctaactcgttttctgaagccagtatcaccctgataccaaaacctgtaagagataccatgagaaaggaaaactataggacaatatctctgataaacacagacacaaaaattctcaacaaaacactagcaaaccaaatcaaacatcaaagttaattta

SEQ ID NO: 894232 - DNA, 616 bp, Homo sapiens
atcataagctttacccacgtggtaacaccaattacagctgttgtaccagatgtagttgcattgcttgagtgcattaacgcatgccctggtatccggtatgcagctattgatataatacgtgctttttccttttcacctgttagtagagtccactaaagctgtttacgttcagcttgcaaaaccacaatatgcctttattttcatacctcaggagaatattaactcttcagccctatgctaaagtttagtccacacyacaatacacatttattttcataccttaggagaatatcaactcttcagccctattctatagtttagtccacaccacagtacacctttattttcataccttaggagaatattaactcttcagccctatgctgtagtttagtccataccacaggacacctttattttcataccttatgagaatattaactcttcagccctatgctatagtttagtccacaccatagtacacctttattttcatatcttaggagaatattaactcttcagccctatgctatagtttagtctacaccacaatacacctttattttcataccttaggagaatattaactcttcagccatatgctatagtttagtcc

SEQ ID NO: 894233 - DNA, 603 bp, Homo sapiens
ggaaaccctgtctctactaaaaacacaaaaattaatggggcttggtgtaatccagctactcagaaggctgtgatcccagctactcaggaggctgaggcaggagaatttgcttgaacctgggaggtggaggtttcagtgaactgagatcgcaccactgcactccagcctgggcaagagtgagatttcatgtyaaaaaaaaaaaaaaaaaaaaaaaaaaaaagacatgtctggaactaagaagaaaatgagatttcatggacttacagttccacatggctggagaggcctcataatcatggcagaagggaaggaggagcaaatcacgtcttacatggatggtggcaggcaaagagagagagcttatgcctggaaacttccatttttaaaacagtcagatctcatgagacttattcactagcacacgaacagcatgagaaagaccatgattcaattatctcccaacgggtccctcccaccatgtgggaattatgggggctacaagataagatttgggtggggacacaaagccaatccatatcattctgtctctggcccctcccaaatctcatgttttcacatttcaaaaccaatcatgcctttcca

SEQ ID NO: 894234 - DNA, 603 bp, Homo sapiens
ggaaaccctgtctctactaaaaacacaaaaattaatggggcttggtgtaatccagctactcagaaggctgtgatcccagctactcaggaggctgaggcaggagaatttgcttgaacctgggaggtggaggtttcagtgaactgagatcgcaccactgcactccagcctgggcaagagtgagatttcatgtcaaaaaaaaaaaaaaaaaaaaaaaaaaaaagacatgtctggaactaagaagaaaatgagatttcatggacttacagttccacatggctggagaggcctcataatcatggcagaagggaaggaggagcaaatcacgtcttacatggatggtggcaggcaaagagagagagcttatgcctggaaacttccatttttaaaacagtcagatctcatgagacttattcactagcacacgaacagcatgagaaagaccatgattcaattatctcccamcgggtccctcccaccatgtgggaattatgggggctacaagataagatttgggtggggacacaaagccaatccatatcattctgtctctggcccctcccaaatctcatgttttcacatttcaaaaccaatcatgcctttcca

SEQ ID NO: 894235 - DNA, 565 bp, Homo sapiens
agagagaaagcttgtgcagggaaattccctttttcaaaaccatcagatcttgtgagacttatacacaattatgcgaacactcccatgattcagttatctcccactgggtccctcccactgcacgtgggaattatggaagctacaataggagatttgggtgaggacccagagccaaaccatatcatagsctttctataaaatgtattttctgttgatgcaatttatctttaattaaaattaactttaatatgtattgtcaaaatcgtggtctctaaaatagttatatatatatgaagatacatgtatacaataataagagttttgttatatatccactccaccttaaaataaacacaaacagtacagttgaaacttcctgattacttatttccagttgaagaatatcataatttttaatttcatgcatacttatatatttttaaatgatataatgtggttttattttttaagttttgcaaatgaaattctatgcaaattctttggcaactttatttttctgaaaacctaattgtaattttcatacttggagactacattagttttc

SEQ ID NO: 894236 - DNA, 581 bp, Homo sapiens
tgtaaattggtacagccattatggaaaacagtaggcaggttcttaaagatattaaaaatataactattatataatcctacttctagatatatactcaaaggaaatgaaataattatcttgatatttgcaatctcatgttcactactgcattattcacaatagcgaagatatgaaaacgtgttgacagatgaatgaataaagaaaatgccacacacacacacacacacacacacacacacagaggaatatttttcagacttaaaaaagaaaatcctgccatttgcaactctgtgtatgaacctgtagcatgttaggctaagtgaaatcagatgcagaaatacaaatactgcatgatctctctaattgtggaatctaaaaaagttgaactcacacaaacagagagtagaatgrgggttgccagaggctgtggggtaggaaaaacagggagctgttgatcaaagggtacaaagtttcagttacttaggatgaataagttctggaaagctaatgtagaacatggctactatagttgataatatagtattgcatgcctcaagtttgataagggaaaagatattaag

SEQ ID NO: 894237 - DNA, 599 bp, Homo sapiens
taagtaaagaatagtgatatggtttggctgtgtgccaatccaaatctcatctggaattcccacgtgttatgtgggggacccggtgggaggtaattgaatcatgggaacagttctttcctgttttgttctcatgatagtttgtctcgggagatctgatggttttacaagggagagttgccctgctcaaattccttcttctgttgtctgccaccatgtgagacatgcttttcatctactgccataattgtgaggccttcccagccacgtggaactgtaagtctaataaacctctttcttttgtaaattgcccagtctcaggtatgtctttatcagcagcatgaaaatggattaataaagtcacccttgattttgccattattaaaataaagaatatayattagtttgctcataaaataaaatactatatgagagttaaatgtatttatatgtccaacataagtaacatttaaaaatgtagtattggatgatgtaagcaagtcttaaaatatatatattgtaatgataagatacaattggccattgaacaccacacgtttgaatagcacaggttcacttttttgcagactttattctgcttc

SEQ ID NO: 894238 - DNA, 663 bp, Homo sapiens
tttcaagaatgtattacatgtatccaaacatcacacagtaataaataaatatgtataattattacatgtcaattagaaataaaatgctacttaaaaaataaaaaaattaaatctaaagcaaaatattgacaagaagaatctaacaatcattctcaaaattatttggccaagtagagwtattcttcagtaatatgaagctgattttataccaacatatttatgaatataatatgtaagtaaagtagaaaatcaaatgattatattcattgatgctaaaagacatttaataaaatatagaagccactttcaaaaaaattataaatagaagaaaactttaaatgaatacacaataatttggtaaaaccaatagcagtgtttattctaaatggtaaacctcaaaatttatttttataaattcctaaagaaagaatctttttgtctgatgtcaacttaactattctacacctttgaggtcaaaggaaatatagagaaaaataaaatacttttcaatattttgtaatacaaaaaggaataaaattgtctcatgttgtcatgtaattacacacctacatggaagaaattctagtaaatgtctacaacacggaagagaccctagtaaattaataatgaaattattaataatgaataatgaaatgtatgctt

SEQ ID NO: 894239 - DNA, 625 bp, Homo sapiens
gtaccctcagacgtttggctcattgccaagctaaacaaaccttcacaatttgcagaaagtaaacttaaatatcgttgttgtcaacttaaaatcagtgagttgggtgaaaacaatcaagtaccaaagtcagaagtgtacaacgactgtcacattagtgccatgagacatggcctyatttggtgaaactgtgtgtattttttaaagcagctgtaggcaagcaaatacttcatgacgttaaatcaaccacataaggaaactgaaataagtaattactctagggaagtgagcaattaacaactgagcacacatacggatttctttgaatgtaagtcaataagactttatgtttccagagaagaattctctcccaattatatttctccctaacagtaagaacagtagggtgggaagagtcaataatacatgctcaataaacatgatttgaatgaataaattggtatttgttaaagaactataaaaactacagtaataatggagaaaattttctcatactcctttagatatttttgattattttttcttcccccatgcacttgctaatagtttctctcatgtcttagtccagtcaggttggtataacaaattaccatagactgagtggcat

SEQ ID NO: 894240 - DNA, 625 bp, Homo sapiens
gtaccctcagacgtttggctcattgccaagctaaacaaaccttcacaatttgcagaaagtaaacttaaatatcgttgttgtcaacttaaaatcagtgagttgggtgaaaacaatcaagtaccaaagtcagaagtgtacaacgactgtcacattagtgccatgagacatggcctcatttggtgaaactgtgtgtattttttaaagcagctgtaggcaagcaaatacttcatgacgttaaatcaaccacataaggaaactgaaataagtaattactctagggaagtgagcaattaacaactgagcacacatacggatttctttgaatgtaagtcaataagactytatgtttccagagaagaattctctcccaattatatttctccctaacagtaagaacagtagggtgggaagagtcaataatacatgctcaataaacatgatttgaatgaataaattggtatttgttaaagaactataaaaactacagtaataatggagaaaattttctcatactcctttagatatttttgattattttttcttcccccatgcacttgctaatagtttctctcatgtcttagtccagtcaggttggtataacaaattaccatagactgagtggcat

SEQ ID NO: 894241 - DNA, 643 bp, Homo sapiens
aactcacatatgcctgtgtattttaactttataccttgaatgtactctatttacaatttaggcaatataatatgactagcataatattacatgaaattatattttcaaaatggaaattatttctcagggattttttttaaaagaaggtttcaaaaagtattttcagttttaaagaaaaccaatgtttttccttttttctgagatagtacgtgtatagctatcacttgcaaggaataaaaccacagaaattaataggacatgtgcctgaaaaaaaatatttggaagatatagggcagtgccatcaaatatacataaaatgttatccacatatggaattttaagtcatctagcagtcacatyaaaaataagaagaacccggtaaaattatttttataattgcggtaccataaaaacgtatttggtcttctcttctggtttctggcacagcactccactggaagctgagtctccagaaagaccaaccctttgttagaagtttggaactttcagctgcaccccctcaacctcagagaagggagaaaggctggattgagttcaagcaccagtggccaatgatttaatcaatcatgtctacatagtggaagctcataaaaatccctaaatgatggggattggagagttt

SEQ ID NO: 894242 - DNA, 643 bp, Homo sapiens
aactcacatatgcctgtgtattttaactttataccttgaatgtactctatttacaatttaggcaatataatatgactagcataatattacatgaaattatattttcaaaatggaaattatttctcagggattttttttaaaagaaggtttcaaaaagtattttcagttttaaagaaaaccaatgtttttccttttttctgagatagtacgtgtatagctatcacttgcaaggaataaaaccacagaaattaataggacatgtgcctgaaaaaaaatatttggaagatatagggcagtgccatcaaatatacataaaatgttatccacatatggaattttaagtcatctagcagtcacatcaaaaataagaagaacccggtaaaattatttttataattgcggtaycataaaaacgtatttggtcttctcttctggtttctggcacagcactccactggaagctgagtctccagaaagaccaaccctttgttagaagtttggaactttcagctgcaccccctcaacctcagagaagggagaaaggctggattgagttcaagcaccagtggccaatgatttaatcaatcatgtctacatagtggaagctcataaaaatccctaaatgatggggattggagagttt

SEQ ID NO: 894243 - DNA, 570 bp, Homo sapiens
aatatatagagaccatgaaaacattaaaagttaatgttacaaagcaacaagatactgtcaaattaaattataggaatcctttctaatccactaagagataaatatttgaaaatattcacatgtatctacagtcacataaccaaatttaaattagcttgcgtcttctactttctcattttggcccactggtccatggttattacacaccagcagcattaattttgcaggtaaaatctcttaaattttcttttcaactttactttccatttccaggcctgtacccacagagacacatgacacaacactcctagtgctataggaacaatgaatactaaatagctgctataaatacaggcatcataacatcaaatttagtgccacgtgatttcagttggttttcatattcttatgcaactcacctctctatatatggcttccagtttttaataaatccattrctatattttatgtttgcaaagggttattacaggttacctaacacagtagactggactggaaggttaataacggatttgctttgcaaaatgtcacacaaattgatgcaatcag

SEQ ID NO: 894244 - DNA, 620 bp, Homo sapiens
ctgtacccacagagacacatgacacaacactcctagtgctataggaacaatgaatactaaatagctgctataaatacaggcatcataacatcaaatttagtgccacgtgatttcagttggttttcatattcttatgcaactcacctctctatatatggcttccagtttttaataaatccattactatattttatgtttgcaaagggttattacaggttacctaacacagtagactggactggaaggttaataacggatttgctttgcaaaatgtcacacaaattgatgcaatcagacaagacaggccatggtccaaargtaattcatttataaaggtactaatactctaatcaattctaatccaaaaatatctgaaaatgacatttgtcctgtaatcttgtgaacattatgtagagtggaaaagccagcatggaatgaacagagaatttgtttagcaaacactgtaatcactggagtcggaatagtcaaagaaaaagatatatatttgagtgtggtttaccacttatttaaatcaatctcatgaatggaacaaaaaataacacattttatgatgaatttcttatcttaggtatagggttagctcttccaatagaggctga

SEQ ID NO: 894245 - DNA, 620 bp, Homo sapiens
ctgtacccacagagacacatgacacaacactcctagtgctataggaacaatgaatactaaatagctgctataaatacaggcatcataacatcaaatttagtgccacgtgatttcagttggttttcatattcttatgcaactcacctctctatatatggcttccagtttttaataaatccattactatattttatgtttgcaaagggttattacaggttacctaacacagtagactggactggaaggttaataacggatttgctttgcaaaatgtcacacaaattgatgcaatcagacaagacaggccatggtccaaaggtaattcatttataaaggtactaatactctaatcaattctaatccaaaaatatctgaaaatgacatttgtcctgtaatcttgtgaacattatgtagagtggaaaagccagcatggaatgaacagagaatttgtttagcaaacactgtaatcactggagtyggaatagtcaaagaaaaagatatatatttgagtgtggtttaccacttatttaaatcaatctcatgaatggaacaaaaaataacacattttatgatgaatttcttatcttaggtatagggttagctcttccaatagaggctga

SEQ ID NO: 894246 - DNA, 593 bp, Homo sapiens
gaatgccaagagttatgataaagcatgagttcaagaaaaggtgtttcattattttgtctaaggcaggattcctaattatttttgcatggggtttggataagaatctgtcaaggaaacaactccaagctgtgatgaagtcagggtcagtcagcctttttattataagtgatcagaaatatcaagatgaggatacraagcagagcatggagtactgaaatacttgttttctagaaacttaagggactcttcaaatcatacatcatatttatgtatcatttttaaagggatattttattgctatttgaaggaataatattttcacatatattaagtcagtatgccttgaatgagcttattgaatgtactttattcttccccactactttccctcaaactggaggagacagcgaaggatggaatcatgaataagaagtggttggaaaaacataatcccactttttattcctggatactgcacagtcttttgttattaagtttagcaaaaagttctgaaacacagttctagatttctctcattgaacaatagacttaattatcttaattttatttatccaaagtttgagagttaattt

SEQ ID NO: 894247 - DNA, 563 bp, Homo sapiens
atatcaagatgaggatacgaagcagagcatggagtactgaaatacttgttttctagaaacttaagggactcttcaaatcatacatcatatttatgtatcatttttaaagggatattttattgctatttgaaggaataatattttcacatatattaagtcagtatgccttgaatgagcttattgaatgtactttattcttccccactastttccctcaaactggaggagacagcgaaggatggaatcatgaataagaagtggttggaaaaacataatcccactttttattcctggatactgcacagtcttttgttattaagtttagcaaaaagttctgaaacacagttctagatttctctcattgaacaatagacttaattatcttaattttatttatccaaagtttgagagttaatttagaaacacgatgaattattaataagtttgtatcaaaaagcactcaaatacataaacttgagtttcttagtataatacttatcttttaatgtctatgcattaatatctattaatgcatgataataatataataacaaccacaagac

SEQ ID NO: 894248 - DNA, 622 bp, Homo sapiens
ctaggaacttgcccacagatgaatatcttcttgtttgtctttaaaagtgaggtggaaggagataacaggaaaaatgtcctctcttttgtcagacaccaggaagagctctttatctagaaggtatttatctttgcatcagaggacaaaaaacataacatttcatgtgaagaaccaatgaccacaatatttagggataacaacrgaagtcatttcctgcatccttcaattcattgacatgataatataaattctcattctcctcctcttagttggcatgagaaaccaaagcttttttcagcttcagagtaagttcagctgaggcctcctttgtgactgtgtcacggctcaatttctttctgctcaatttctgtcccttccctcactggtgttgatcccaagagcaattcctaatgaacccattacacactaatcttcacctcagagttagtttcccagaatatccaaggactaacgggagtcttctaataaacattcatgggctagctcatccacgagattgtaggcttctcaagcaaatttaacttagatgaatgttatagaagtactttaaatagaaaagtgaagtgatcatctgataaaaattgatttgaaatggcagagt

SEQ ID NO: 894249 - DNA, 622 bp, Homo sapiens
ctaggaacttgcccacagatgaatatcttcttgtttgtctttaaaagtgaggtggaaggagataacaggaaaaatgtcctctcttttgtcagacaccaggaagagctctttatctagaaggtatttatctttgcatcagaggacaaaaaacataacatttcatgtgaagaaccaatgaccacaatatttagggataacaacagaagtcatttcctgcatccttcaattcrttgacatgataatataaattctcattctcctcctcttagttggcatgagaaaccaaagcttttttcagcttcagagtaagttcagctgaggcctcctttgtgactgtgtcacggctcaatttctttctgctcaatttctgtcccttccctcactggtgttgatcccaagagcaattcctaatgaacccattacacactaatcttcacctcagagttagtttcccagaatatccaaggactaacgggagtcttctaataaacattcatgggctagctcatccacgagattgtaggcttctcaagcaaatttaacttagatgaatgttatagaagtactttaaatagaaaagtgaagtgatcatctgataaaaattgatttgaaatggcagagt

SEQ ID NO: 894250 - DNA, 622 bp, Homo sapiens
ctaggaacttgcccacagatgaatatcttcttgtttgtctttaaaagtgaggtggaaggagataacaggaaaaatgtcctctcttttgtcagacaccaggaagagctctttatctagaaggtatttatctttgcatcagaggacaaaaaacataacatttcatgtgaagaaccaatgaccacaatatttagggataacaacagaagtcatttcctgcatccttcaattcattgacatgataatataaattctcattctcctcctcttagttggcatgagaaaccaaagcttttttcagcttcagagtaagttcagctgaggcctcctttgtgactgtgtcacggctcaatttctttctgctcaatttctgtcccttccctcaytggtgttgatcccaagagcaattcctaatgaacccattacacactaatcttcacctcagagttagtttcccagaatatccaaggactaacgggagtcttctaataaacattcatgggctagctcatccacgagattgtaggcttctcaagcaaatttaacttagatgaatgttatagaagtactttaaatagaaaagtgaagtgatcatctgataaaaattgatttgaaatggcagagt

SEQ ID NO: 894251 - DNA, 525 bp, Homo sapiens
actgttaaaataatgatgacttttttcctccttgctatttcagttttcattattgttaatataaatgatgaatgtggcacaaccataattgaattatcccagtttatcacccctatttgtcttaaaaactattttccttatatgtttcagtttacaagatgtttggtcatttatttaaaaaactctctagcatttatctgaggaaaaaaaaacactcaatggcctaagttgatataaaattaatttataactgtgctctgatttattggttattagttttatttctgtgaagaaataagtttaaaagtacatcagatakatgtacatcagatacaaagaaagaaagcttttactttaattctatatcctgagggacttgaaatgcctaaatgactaagaatatgattgataatccaaatgtttctttttattaaaaaaaagataaatattttcacatactgcttatggacttgaaaggttaaaaatgttccaagtttgtttccccttaagatatatggatgtaac

SEQ ID NO: 894252 - DNA, 580 bp, Homo sapiens
acagaagtaagatctctggattttattttgccatgtatatctcataattggtgtgggtaaactggactggtaacccacccagcatggccaaggggttcagaacaaaaacagaaagcttcaagaaaaattgatctgtttagccaaaaggccaagaaagggacatcctagcaagtcagaacattttcatacaataatcactctacctacccatgcaccacaatgtttgagggaggaagtagcccctattcccaatgcaccagtgaatacctactgggtaaccaaascttacacccttaccaggcagaaattaggcacccccacctgtccttttgggatggtgacataacaggttgaataggaagtcacaacttagcagtgtcagaacagtctatgtggtaagcctggacttctactccttccttgcagtaaaagtcagtgatatggtttgccaaatcacattttaatctcagacattttaatctcagtgattaacattcactcaatgccaaaatgtcatcttccattgtaatccccacaatacccaggtgtcaatggtgggatcaggtggaggtaattggat

SEQ ID NO: 894253 - DNA, 602 bp, Homo sapiens
tgggaaaaactatttatttctattcttgtcacataacactttaaaaaacacaatggtttcaaatcatgaaaccacctggtatctcttgcacgtagctcaatcactcacatctaataagaaccaaatggcatggtggcaggtgcctgtagtcccagctacttgggaggctgaggcaggagaattgcttgaacccgggaggtagaggttgcagtgagccgagatggtgccactgcactccagccygggcgacacagggagattccgtctcaaaaaataaaaagaaccaaatgaatactttttgtataaactaagtttatagaattttagagaaaatatgtgtaaacatctttgtttttttccacagaggtagtcaatagtataaaaagtgcattaaagatattcgttattatattagagagtaaaaatgtaaaacattgaaatccattttaaagaaatattaagggcttttatctacaaaataacttgtattattttctttgaaataaattaaaattagcaggactttttattagcttttatttacttaaaagttagtgggcactttttaattcaaaccacaatttaaaaccagcatctaaaac

SEQ ID NO: 894254 - DNA, 602 bp, Homo sapiens
tgggaaaaactatttatttctattcttgtcacataacactttaaaaaacacaatggtttcaaatcatgaaaccacctggtatctcttgcacgtagctcaatcactcacatctaataagaaccaaatggcatggtggcaggtgcctgtagtcccagctacttgggaggctgaggcaggagaattgcttgaacccgggaggtagaggttgcagtgagccgagatggtgccactgcactccagcccgggcgacacagggagattccgtctcaaaaaataaaaagaaccaaatgaatactttttgtataaactaagtttatagaattttagagaaaatatgtgtaaacatctttgyttttttccacagaggtagtcaatagtataaaaagtgcattaaagatattcgttattatattagagagtaaaaatgtaaaacattgaaatccattttaaagaaatattaagggcttttatctacaaaataacttgtattattttctttgaaataaattaaaattagcaggactttttattagcttttatttacttaaaagttagtgggcactttttaattcaaaccacaatttaaaaccagcatctaaaac

SEQ ID NO: 894255 - DNA, 602 bp, Homo sapiens
tgggaaaaactatttatttctattcttgtcacataacactttaaaaaacacaatggtttcaaatcatgaaaccacctggtatctcttgcacgtagctcaatcactcacatctaataagaaccaaatggcatggtggcaggtgcctgtagtcccagctacttgggaggctgaggcaggagaattgcttgaacccgggaggtagaggttgcagtgagccgagatggtgccactgcactccagcccgggcgacacagggagattccgtctcaaaaaataaaaagaaccaaatgaatactttttgtataaactaagtttatagaattttagagaaaatatgtgtaaacatctttgtttttttccacagaggtagtsaatagtataaaaagtgcattaaagatattcgttattatattagagagtaaaaatgtaaaacattgaaatccattttaaagaaatattaagggcttttatctacaaaataacttgtattattttctttgaaataaattaaaattagcaggactttttattagcttttatttacttaaaagttagtgggcactttttaattcaaaccacaatttaaaaccagcatctaaaac

SEQ ID NO: 894256 - DNA, 602 bp, Homo sapiens
tgggaaaaactatttatttctattcttgtcacataacactttaaaaaacacaatggtttcaaatcatgaaaccacctggtatctcttgcacgtagctcaatcactcacatctaataagaaccaaatggcatggtggcaggtgcctgtagtcccagctacttgggaggctgaggcaggagaattgcttgaacccgggaggtagaggttgcagtgagccgagatggtgccactgcactccagcccgggcgacacagggagattccgtctcaaaaaataaaaagaaccaaatgaatactttttgtataaactaagtttatagaattttagagaaaatatgtgtaaacatctttgtttttttccacagaggtagtcaatagtataaaaagtgcattaaagatattcgttattatattagagagtaaaaatgtaaarcattgaaatccattttaaagaaatattaagggcttttatctacaaaataacttgtattattttctttgaaataaattaaaattagcaggactttttattagcttttatttacttaaaagttagtgggcactttttaattcaaaccacaatttaaaaccagcatctaaaac

SEQ ID NO: 894257 - DNA, 615 bp, Homo sapiens; identical to SEQ ID NO: 883252

SEQ ID NO: 894258 - DNA, 615 bp, Homo sapiens; identical to SEQ ID NO: 883253

SEQ ID NO: 894259 - DNA, 626 bp, Homo sapiens
tggccatttgagttgctggagttcttgtgttggttctttctcatgtctacgtgtgggtatttctttgactgctgggttgcctctaattaaagtggtcaggcagaggaagagtggttgtgttggagtcccaggctcagcagccctgctcagtgagaagtgaggaccaggacctatgtggagcacagtctggccacttttccatgaggtgggtgctttgtgctgggagtccagatcagcccctggtccccatggctctctggarcctgaagacagcaagggcaagggctgtgagacggaaaacatggtaacccatctatattagttcattcttgcactgctttaaaaaagtacctgaaactgtgtaatttataaagaaaacacatgtaattggctcacggttctgcaagctgtgcaggtaggatggctgggcaggcctcaggaaactttcaatcatggcagaaggtgaagcggaagcaggcatgtcttacatggctggagaagaaggaatagagagaaaggggaggtgctacacagttttaaataagtagatcttatgagaactcactcactattacaaaaacagcaagggggaagtctgcctccatgattcattctcctcccaccag

SEQ ID NO: 894260 - DNA, 641 bp, Homo sapiens
aggcagggtcaattcttcatcttacaaaagagcttcttagctttagcaatgtggttagccacttacaataatgttctcaatgcagacacattcgatgaagtggtagccttcaataattggttcttttcatgttcacgttttttttttcttttgaaaaaacttcaaaggcttgtcttttaatgtggggtgctttgtctccacgtagtgaagcaattttgaaggtttcattacttygttagataaccggtggccacatgttatacaaagcagacttggagaatgtgaatcacttgttacaatgaactcataatttaagtatgattcttggtattttcttttaaaggaagctttctttttgttttcagtcttagagtattctgctttctcatcactgggtctttcccccttttcataaaagctctccagtgaaattgttttttactcattttggctaggattagcttctgggcttaatcaaaactgtgactgagacaagtgtgcagtgtaggaaagagtcaagaatggaagtagtaaataaaataatgggtaggccacatgtggactaaaataagtgtcagattcggacttaaagcctgccatcagatacagctatacaaatgaagtacatcaactcacttgcc

SEQ ID NO: 894261 - DNA, 586 bp, Homo sapiens
ttagaatagctttagccattcttggtcttttttggtttcatataaattttaggttttttttttctatttctctgaaaagtgccattggtattttgatagatattacattgaatctgtagattattttgggtaatgtggatgttttaacaatattgactcttctaatccatgaacgtggggtatctttcccttttttggtgtcctcttcaatttccttcaacagtgttttatggtttttattagagagatctttgacttctttggttaattcctaggtatttcattttatttrtagctattgtaaatggattacttttctgatttatttttcagattgtttacttttggcacataaaaatactcctgatttttgtatgttgttttgtgtcctgcaactttactgaatttgtttatcagttctaatagtattttggtggtgactttaggtttttccaaatatagtatcatatcatctgcaaacaatgataattttatttttcattttccatttggatgcctttgatttccttcattgttattcaacataggacttcacagtacttgttgaatatcagatcaatgcccc

SEQ ID NO: 894262 - DNA, 635 bp, Homo sapiens
tatgcctgtgtattttaactttataccttgaatgtactctatttacaatttaggcaatataatatgactagcataatattacatgaaattatattttcaaaatggaaattatttctcagggattttttttaaaagaaggtttcaaaaagtattttcagttttaaagaaaaccaatgtttttccttttttctgagatagtacgtgtatagctatcacttgcaaggaataaaaccacagaaattaataggacatgtgcctgaaaaaaaatatttggaagatatagggcagtgccatcaaatatacataaaatgttatccacatatggaattttaagtcatctagcagtcacatyaaaaataagaagaacccggtaaaattatttttataattgcggtaccataaaaacgtatttggtcttctcttctggtttctggcacagcactccactggaagctgagtctccagaaagaccaaccctttgttagaagtttggaactttcagctgcaccccctcaacctcagagaagggagaaaggctggattgagttcaagcaccagtggccaatgatttaatcaatcatgtctacatagtggaagctcataaaaatccctaaatgatggggattggagagttt

SEQ ID NO: 894263 - DNA, 635 bp, Homo sapiens
tatgcctgtgtattttaactttataccttgaatgtactctatttacaatttaggcaatataatatgactagcataatattacatgaaattatattttcaaaatggaaattatttctcagggattttttttaaaagaaggtttcaaaaagtattttcagttttaaagaaaaccaatgtttttccttttttctgagatagtacgtgtatagctatcacttgcaaggaataaaaccacagaaattaataggacatgtgcctgaaaaaaaatatttggaagatatagggcagtgccatcaaatatacataaaatgttatccacatatggaattttaagtcatctagcagtcacatcaaaaataagaagaacccggtaaaattatttttataattgcggtaycataaaaacgtatttggtcttctcttctggtttctggcacagcactccactggaagctgagtctccagaaagaccaaccctttgttagaagtttggaactttcagctgcaccccctcaacctcagagaagggagaaaggctggattgagttcaagcaccagtggccaatgatttaatcaatcatgtctacatagtggaagctcataaaaatccctaaatgatggggattggagagttt

SEQ ID NO: 894264 - DNA, 675 bp, Homo sapiens
tcctttatttatgacctaaggggataaaaatatgaatccaaaattcgtaggaatacaaaatggctgactcatgcttcttgcaaaatgtatgctttccatatgaccattaagaaatagtggctctacccctaggtctctaccgctatttctctcctctctatctcttcragcttacttacccttgtactcattcttccttaaaattccttttcgtatgctagatgttgattcatctcttgtcattttctacttaattcttgcctcccaatagatgttacattcagaaaaaacatatttcagttacagaaacatgcaactctttcttacctaaacatttttttcacttcaaccaccctattcctttttattttcctttaaagattaacatatttgagaaaccatctcttaaactgtctcattttgggttaggtggaggatttctagataaaactcaagacacatagtaaaatttgaatttcagataaacaataattttttagtatattacaaacagtgcatgggtgtgttttttgtggatattcaggggaggggggtggagagaggaaaatttcccacaatgaatgtaaacttgtgagcaggatagaccctatgaagtataaaattagctcaatgtgaattaacttgtattgcaatacaatggcatttccaaataca

SEQ ID NO: 894265 - DNA, 675 bp, Homo sapiens
tcctttatttatgacctaaggggataaaaatatgaatccaaaattcgtaggaatacaaaatggctgactcatgcttcttgcaaaatgtatgctttccatatgaccattaagaaatagtggctctacccctaggtctctaccgctatttctctcctctctatctcttcaagcttacttacccttgtactcattcttccttaaaattccttttcgtatgctagatgttgattcatctcttgycattttctacttaattcttgcctcccaatagatgttacattcagaaaaaacatatttcagttacagaaacatgcaactctttcttacctaaacatttttttcacttcaaccaccctattcctttttattttcctttaaagattaacatatttgagaaaccatctcttaaactgtctcattttgggttaggtggaggatttctagataaaactcaagacacatagtaaaatttgaatttcagataaacaataattttttagtatattacaaacagtgcatgggtgtgttttttgtggatattcaggggaggggggtggagagaggaaaatttcccacaatgaatgtaaacttgtgagcaggatagaccctatgaagtataaaattagctcaatgtgaattaacttgtattgcaatacaatggcatttccaaataca

SEQ ID NO: 894266 - DNA, 581 bp, Homo sapiens
tcccagatgacccttttattcactcttatggtatgcctcacttctcctttttagcacttagaaaaatttcaagtaagtatttttgagtgcatttaaaaagttttctcagtgttttctaatctccctaagaattgaactattatttcattcactgttataaagtcaatgttgagaaattcatgtgtgtgtaaagatagtatctttagacaagttaaaatgtgcttccaaatttgctttatattagtacataatttctcacacttccctttttctattcctctagacttatttacttgcttcaggatagtttgggtaagaattcaaaaagaaataagtgcttagtcaatcttgaatacatacattaatttttttttcttttggtctgtgtcrtcatcaacaacaaaaataatccttaaagtcaggtttttttttttttatggcagaaaagtagtatgttttagtaaaaattattttagctctcatcaaaaaaaggcctgaaagacagagtcataaaattttactgtaagccataacataaaaatagtatagggctgcttcaggcgcatagaaagaattgcaaa

SEQ ID NO: 894267 - DNA, 612 bp, Homo sapiens
atatcacacttgattaatttgaaagtgggcactggccaaattacctgagtcagagttcttgcctgaggtttttcaaatgctaccctagaagaaaagcaatttctttatggtgacgaaagttataagtcataaaaacactggcatgttcactggttatgtttcctgctatttagagaaaacagctttaaagtgaaagacagtaaagccagcatattgaaagaaaaataaattagtaccaagagagttctgattgcatttttgtccctggtccagttgttcataaattygttccatctctgccatctgtattttggttgttacattttcattgaattctctgaagaaatgttcttcatttttctccccaaattagtttgagttaggtttatgtcagttggcatttaagaatcttaagtaatttgaaaaagttgaatgcccgtttatactcactaatgactctttattgaattttctcagagtaaagttgacaagtattgccatagcagctgaagttcacttcagattaaacacaatgtctttgactgtgccaagaatataattttatgttttgtcaattattaggtaataagtaattctgggattctgaggttg

SEQ ID NO: 894268 - DNA, 551 bp, Homo sapiens
ccgggtctgtccatatttattgatgcaattttatgcacaaataactttcagccatttggacttaaaaagtaaaactaggctttgtgaaagccttgtttccagggatagaaaaatacttaactcctatggttagaattgccttgagctacaagtrttaattaatcataatcaacagtgtttcagtgatgatgtatcaccagttatttctaaaaataacaaaaaaatacaccaataatatttaccagatgggaactaactttaatgattgactggattgggggtccaagctcaagagcaataagtagtatagtcagtcatacataaccattttgttcaaacttcctgcttacccttgcaatgataatttacctaatataattataaaagttgatgactgatggctgtaataaaaaatcaatctttgaagtagagaataatgacaaagtttccaagttctgtgatgaaagtacttagaaagaatgtacagtgactccatacattctgttatccattaatagctccttgttttgaccttaaacatgtctctcttt

SEQ ID NO: 894269 - DNA, 586 bp, Homo sapiens
ttaggataccttggaagacctgtctcctctgcctcctcagtgcagtatgctccctgtgacctcatctaagcagccctctgattgctttctgcctcattatttgtaaaagcagcatatgcttccagacttctgttttaatgaatatttatggtataactcacagtggtgtgaggcacacaatagctccttttagcattgttaaaagatcttgaattttgtatacagtgggggcagtattagtgtctattttccctggttgccattaagaaaacgtacactgtaaagtttagtggagtgagactccagggactgattcactcaacacagaaacacctttgcaaaggcttgtttttgtctttcagtttcacattttgctccaagaaaagtgctgatcccatttggcttaaatattaactttagaacattttagcmactcattaaatctctttctcacttcacttgcaggtggagttcattataatcaaactaaagggagtcctaccctaaatacacacacacactaacactctccttgcaagaagcacgtgatagaatttgtattgtgtgtgtagactactgcttctta

SEQ ID NO: 894270 - DNA, 641 bp, Homo sapiens
tgagactgcatccagtggtgtgctgataaacgtttaacaacgggctctctgggagaaaaaggaaccctgatttgtagcatttgctgattttcatggtgtaaatactaccactgctgctggctccaagctaccaacgtggcattactgatcatagagttgggaggagttgttaaagattggctttcctgagccagcatgagccagctcctgcacattgctgactctatcccttgtcagaggtcttactatgtattctggaatgttcycccaccttgctcccttcctgcagtgaacagagcagaatcctacagaacctaagaagtaatgggagtatggggagcccaaggagtgataagtcagattattttcacggcagttggagcacccccacaatgaacattgggagcctggagcagacaccccgtggaccacagccaagggcagcctcttttcagagaggcctgagtgtgcctgcctgtgggtcacagggaaaggctgttggtttgatgtgttactctctctctttttttttttttttttaacagatggggtctccttttgttgcccaggctggtgtgcagtggtgccatcataacttaactcactgcagcctagaactcttgggctcctcctgcttcagt

SEQ ID NO: 894271 - DNA, 624 bp, Homo sapiens
tccgtttaacatatgcaaaatgaacacagctacagaaattaaactatttttctgttgattgagagcagatatacagaaatggttataagtcacagatctggcttttaataaagccagatttcttaattaaaagcagtatgtttaaacaytgtagttagaaaaaaaagagctgtacaaacgaaaatctcatattatatgcatcccaagtgtatttaacacattacctgaggccaagctaaattaaaatctagacttttcttttgtaaactctaagcaactgccatgaacatataaacaatttttattcaatgatgaatttttagggcagaggtcaagggaaagaaaaaaagatttctctttggcattcaaaaatatctttccacattttagatgtgagttcgttgcttctatttataaaccagtatttttggtttcaaattggttgcagatttcaatactacaccgttcagaatggtactcttaatcttagacttttattaagagaaactgaaagatggacaggagaatactactgagcaagaacttaaaagaacctcataataatttgtatgtattttgcatttccttttgggaccatgcttaaacgagaaatgctacagtgat

SEQ ID NO: 894272 - DNA, 633 bp, Homo sapiens
taagtctttcctgtgcagttctcatgatagtgaagaagtctcacgagatctgatggttttaaaaaggggagtttccctgcacaagctatctccctctttgcctgctgccatccatgtaagatatgacttgtccttccttgccttccaccatgattgtcaggcctccccagccatgttgaaatgtaagtccattaaaccctttttcctgtataaattacccagtctcaggtacttctttatcagcagcrtgaaaatggactaatacagtggtgtcctctgggagggagagaaagagactggggcaggacacaggtgactcttggggtacttgtttagtgccattttttcacttggttgatggttgcctgagtgtttgaattattatttatttttgaacagtaaatgtgcgaagaggacatcttttttttttttttgacatttgttaaaactgaaaaacaacaaaaacaaaacaaaaaacagccttatcacagaagactttcccttacatctcattgggtggaatgctctcatatgcgcatttttgaaccaatcactggcttagggaatagaattactaggccagccaaaatgtatttctggaaagtggagatgaagctgggcctctcttagagg

SEQ ID NO: 894273 - DNA, 541 bp, Homo sapiens; identical to SEQ ID NO: 881568

SEQ ID NO: 894274 - DNA, 618 bp, Homo sapiens
actctgtatctcataaacatatacaattgtatggcaactaaaaagaaaaacgaaacaataaataaacagatagaagcatggagcctggagttcaggctgtggactggcccgccttgccaccctgtggattcaggctgaggtgtagacaaccaaactcctctgggtgtttcagatatgtwgctgacaaatctcatcccccatcctgtctcaatgccttctgattctagaaacagtagttcccacatattcctattcagtttcatctcatgtcctacccataactccagtctattgaaatagctttgtatcatgtttatttcatagcaaggggttacgagtataggttctggagccagatggcctgaggttgaatcttagttctgcaactggttatctcagtttcctcatctgtaagatgagaataacaatgtgaagtacctcattgggctgctacaaaaattaaatgccaacacgtgatgtgtttaagaaaagtgccaagcatgtggtaagtgctgtagtatgttagctgttagctattttttaaaaagtattactactatactggtatttattaccccttgtagctttaggtcattcacagattttattagtatatcc

SEQ ID NO: 894275 - DNA, 598 bp, Homo sapiens
ccaggtatattctgtagtttcaaagaaagtttcctatgagtatttgacataaaataataagactttactcttttttagatgttttgcagagaaagattttagtataccacacattcacagggttcccaggtgtgccagggaaaagacatcctgaacatagggtcaagcagtatgttgatggtccattctgcctggaaggtaagttagtatgcagtcaaaaattatratgacaaccaggaagatcataaagggtgagtggtgtggaagagagttagaaagagtagagagaggaacagggcctggcaaacagtagacgcctgcctctaaggggtggtgcaatcactcggtcccatggctattgaagagttaagggataacccagtcctgaaagatttacagtcagttcacaatgaaaggcattttttcccctaaatgcttggggaaaagtaacttcccaatgacaacaagtggtcattccagccagcccctgttggttggtctgtgaattttatagatcataaggtggtatcttatcttattatttcatactttttacagtatccttataataaatatgtaacagtaaagataaaatgag

SEQ ID NO: 894276 - DNA, 598 bp, Homo sapiens
ccaggtatattctgtagtttcaaagaaagtttcctatgagtatttgacataaaataataagactttactcttttttagatgttttgcagagaaagattttagtataccacacattcacagggttcccaggtgtgccagggaaaagacatcctgaacatagggtcaagcagtatgttgatggtccattctgcctggaaggtaagttagtatgcagtcaaaaattatgatgacaaccaggaagatcataaagggtgagtggtgtggaagagagttagaaagagtagagagaggaacagggcctggcaaacagtagacgcctgcctctaagggktggtgcaatcactcggtcccatggctattgaagagttaagggataacccagtcctgaaagatttacagtcagttcacaatgaaaggcattttttcccctaaatgcttggggaaaagtaacttcccaatgacaacaagtggtcattccagccagcccctgttggttggtctgtgaattttatagatcataaggtggtatcttatcttattatttcatactttttacagtatccttataataaatatgtaacagtaaagataaaatgag

SEQ ID NO: 894277 - DNA, 574 bp, Homo sapiens
aaaaaaactcaatagaaaaacaaacaaaaaacaaaacaaacaaaaaacaaataatctgatttaagaattggcaagaacctggttagacacttcttaaaataagatatacaaatggtcaacaggtatataaaaatgctcaacatcactaaccatcaggaaaatacaaatcatagccataatgagatactacctcactccagttagaatagcgatctcaraaagttaaaagataacaagtgttggtaaggatgtggagaaaagggaacccttacacacttctggtggggatatagattagtacagtcattatagaatgcattacagagtttcctcaaaaaattaaaatgttaacaaaactaccatatgatccagcaattccactactgggtatgtattcaaatgcgatgaagtcactatgtcaaagagatatctgcacttctgttacaggacagatgagcccccaaattgggacttagcccaggaaaaattttggctttactcaggaaagaattcaagagccagcagtgggagaagaaagcaggtttattgaggtgacagtgttacagccccatga

SEQ ID NO: 894278 - DNA, 651 bp, Homo sapiens
acactctgcacacgtatcctggaacttaaagtaaaatttatatgtgtgtgtgtgtgtgtgtgtgtgtgtgtgtgtgtgtgtgtgtctcttttagtgcttaagcacaatatcacttggtttgtgtcacttggaatcaaaaaagcttaagtaatataccacagcacctgcaggactgtktgaagccgccatgtcatatcaacacatgcctggctcagaaaggcttgtcgccaagtacacagagtattttccaacataattttctaacagagcacacagcaggtcagtcaacaggtactgctactcagaagaccctaggctctaaaacctttcttgaagtccttctgacaggtgtttccaaccagaatcccaggcatttatcatcagagtttttgtagttacaaccaagtcccaatactgcactggaaacaaaaggcttggaatgtgccactggaactgtgtctgggaaactttggtgaattacaagtgcaggggctttacaaatccgagtcccacacagaacgacactaaacagtacctcactgagcacgttcaggttctgtgcttgcctctgctgcacagaaacgacatgcaaaaatgggtgttgactgtgttgggtggctggcacttcttttttctctttcattatcacca

SEQ ID NO: 894279 - DNA, 632 bp, Homo sapiens
ttagctttacatctcaacagacattcttttcagttcttttatcagcgctctttcattctgtaccattatggcctacaaaggatggtatttcattgaacaaaacagtgaacagaaaaacagtctgtagaaacttctcaaaaagcttagtgattaaaaaaagaaacattcaaatttctgaatctagaaattatatcaggacaatggaaatccttcaaagtttcctcaaggtcttccaataagccatattcacattccattacaaatttaacttaaataaaatgttacttacaaaaacagtgaaatgaataactttttcatgaaaaagtcccttaaaatataacattgaaaaatgctttgttttctttttgtttaaggcttacagtctgatttttctaatagttttggaaaataattyagcatgtgtttacgtgaagtttttgctttgacttctagctagaccaggggtgtccaatcttttgacttccctgggccaccctggaagaagaagaagtgtcttgggccacatgtaaaatacactaacaacagctgatgagcttaaaaaaaaaagcccatgtataaatctcatatatatatatatatatatatttttttttttttgagatggaatgtca

SEQ ID NO: 894280 - DNA, 583 bp, Homo sapiens
tatcagttactcaaaatattatgcattcatggttatttcacaataaccatgaaaatcaaggaattcattttgatatgtaaaattccacttaatgtgaatagagacagtgactttatttggagataggttcttgcagatatagttagttaaktcatatggcagcatgataggcccctaatccaatatgattgttatctggtgtctatataaaggggaaacttggagacagacacacagagagagaagattatgtgatgagactcagggaagacagccatctacaagccaaagagagaggccttgaattcatccttttcctaaagtctgcaggacaaactaacactgccaccaccatgattttggatttctaacctctagcactgtgaaaaaataaatttctgttggttaagccatgagtttgtgatactttgttatattagtcctagcaaattgatacagcagtattgtggtttccatttctaaattcacggtgacaatctttcctacaggtatccaatgattcatacaatctgaatctctcatttcagaaaaataatctatgggctgttaatttataccaaac

SEQ ID NO: 894281 - DNA, 594 bp, Homo sapiens
tgtcaaaaaacacaattacaacaaatttagcttaaatatctcaattggctttattgtgattctagaacagggcaacacttcattccataaaataaaataagtgttccagtgaactgaacaggggaggttggctttatatacataaaaggggatgaagaaaggaraaacaaagaacgaaaatgaattggccatttcaaagttaatttccttgcaaggcagggatagggagacagaacaatctgaggggttaacagcaggttacttcgggtcagtctgttgtaaggattaaaacagagggaatatcattttcatgctgattgaagattgaaactcgtctctttgggaaattgggctatctctctcttctgatttcttggaaggccagataacaacaactcagggtgggtttggtgagcatgggtgattccatcttgatttttagtctggtctgttggaacccagtgcaggagtttagtccaaaacaatggcctcgcatagtttttatttaataagagggaggaagcatgaaggtcaaggtcacctaatgaaataaagattgggagtagaaataggagggataattgaagttcccag

SEQ ID NO: 894282 - DNA, 646 bp, Homo sapiens
acttaaatagacatgcattagtcccttttcatgctgctgataaagacatacccaaaactgggaagaaaaaaaagaggtttaattggactcacagttccacatggctggggaggctgcagaatcatgataggaggcaaaaggcacttcttacatggtgacggcaaaagaaaatgagaaagaagcaaaagaagaaaccccaataaacccatcaggtcttgtgagacttattcaccatcatgagaacagcgtgggaaagactggcccccatgattcaattacccgcctgggtccttaccacaacatgggggaattctgggagatacaattcaagttgagatttgggtggggacacagctaaaccacatcattccaccccrgcccctccaaatctcatgtcctcacatttcaaaaccatgatgatccaggatcatcccctcatctcaatatccttagtcacatctgcaaagaggtagtcccagtagggattctgtgtgggagcttcgaccccacatttcccttccacactgccctagcagaggttctccatgaggcctccactcttgcagcaaacttttgcctggacatccaggcatttccacacatcttctgaaatctaggcagaggttcccaaacctcacttcctgac

SEQ ID NO: 894283 - DNA, 629 bp, Homo sapiens
acttcttgacaccgtctacctcacaccccatagctgggtgtggtgtctcatttaggtatgcatgtacagatatatcctttgtatgtgtgtatatacatatatatcacttattacaatgtatactaatcatagcactattacaaagtatcactgtttttactgtgtctttcaatcggctgaaagctatttcagggcaaagatcatttaacagtcaattttatatccctaacatctaacataatgcttcacttatagtcattgcttttaaatgtttagtaaatgaatagctagataaacaaatagtcaagggcagggacaggttgtcctgttcctaaagtacatyatggaagtggccacctcctgctgcaaaaagtgagccattcctgattttcactacattctgtacttgtagtcaagagaagtaaccattcagagatagagatagatgggtcaatggatggaaggatggatggatggatggatggatggatggatggatggatggatggatagatagatagatagatagatagatagatagatagatagatagacagacagacagatagatagacacagattctttgtagcctaggaacaaacagcctaaaatatctttttaaatatcc

SEQ ID NO: 894284 - DNA, 552 bp, Homo sapiens
ggacacaagcagcccagagtcaaagcattaacagttgggcctagatagacacagaggagacgctgtcatcctttaacaagtaagcttctagccattagagaaaaaaggagcgggcaggctgcagatgtaagcatggatggatggtggagacagaatggaaggaacgacttgggtacagaagagagcccttttatttatttcacaggctcttactgcaatgaattgggggccagaagctgttttttttttgttgttgttgttgtttttttgagacggagtctcgttctgtygcccaggctggagtgcagtggtgcgattttggctcactgcaagctccacctcccgggttcacgccattctcctgcctcagcctccccagtagctgggactacaggcgcccaccaccatacccaactaattttttttgtatttttaaatagagacggggtttcaccgtgttagccaagatggtcttgatctcctgacctcgtgatccacccacctcggcctcccaaagtgctggaattacaggcgtgagccaccgcgcccggc

SEQ ID NO: 894285 - DNA, 668 bp, Homo sapiens
aaatttgtgctaaaagagaaagtgctgcaggtctcctctctattgccatgtttggctgatttcaacatagcaaagcaatgtgaaatctacagttttaacagggccatgttatcctttggggaaaacttcaattatgctaataatgataccagatatggttctaaattttaaaaatataagacrattgtattattttccacatgctctttcattgcagactcctctacttgccatcctcatagcattttatttttgtttagctgttcacacaaaaaaagaaaaccaattaagcttcttttgtttgtttcatttaaagtaggtgtttcaaagtgcaaacagctgcagtgaatgtaaataacgaatgttggccccaagtactgccagtttgagctccatacttaaagacacaagaggtctttcactcctcgtttcactgatggcttttatttggtgaaacataaggaacattataccaaatagtcactaaaacatgcatgtctctaaaattgcatatgttgcagtaattttcactgtctaggccacttgtaaatggaagcatttccatacagattgtccaaagataaaatgtaaattagccaaataaaattgagcatggtagagaaaaagctgaagttctgaggtgttttagaaaaagcacacctggtttt

SEQ ID NO: 894286 - DNA, 662 bp, Homo sapiens
ttctgtgagctgtccaagcaaactatcaaactaaggagaggggctatggaaactccaatttataactggataggtcacaatctgggacttgcaattggcatttgaaataggggacagccttgtgggactgagcctttawccctttaaaatgtgaaatctgatacaatttccagattacagtgtcagaattgaactgaattacaggatactcaggtgctttctgctggcaagtcgcttggtgtgggaaaaaatccccacaaatctgttcacagaggtgttctgtgttgagtagaatgtacaaagaacaaaaacattttggtttttccttttacataggtattcttttattttcctagaggagggaagggttcaatttattaaagttacaaatttaaaactagttctcaaactttaaatttcagattacacgttattctattgataagtgtatcacatttaagtacttttaaaaaatgtttaataattttggtcccatttataaactttgttaattcaacatcttcaaacactttaaaccatgtttgtcaacttaatatgtcagatattgtttaatttctgcaattgtctaagttacataaatcttattttagtgtcttatatccttcaaacataataaatctaaagctgtcttagacattcca

SEQ ID NO: 894287 - DNA, 656 bp, Homo sapiens
gtaatcccagctacttgggaggctgaggcaggggaatcgcttgaacccaggaggcggaggttgcagtgagccgagatcgcaccactgcactccagcctggtgacagagcaggactctgtctcaaaaaaaaaaaaaaaaaagaaaaagaaaaagaaaaagaaaaaaattagtattctgatatttgttactaattttaaatatcagtcagattttcattatttcctatatattaaattaccgattatctatatcattcatgagtataattagttggttctacctagatatactcatatcaatatgtgattgaaaactggttcttctgaattattttgaactcttacaataaaataacatataggttgtctaaaattacaaaacaagtcatgtttcattttactctcgttacataggttattgtatagcatcttgtttttccttgaatagcattttgtttttccttaaataaacaaaaccatcttgctttccttaaattmtttttccacaagaatctcttatctttagagattattaccgatatgtgataaataggtctgtaatgccattttgatgattaacattacgtgtcaacttgaatggaatgaaggaagcctaggctggtaaagtattgtttctagatgtgtctgtaaggtgtt

SEQ ID NO: 894288 - DNA, 593 bp, Homo sapiens
ctttaaaaaagtgttccattacaacattcgtttcagaaataactcagaaaaacaactgttcatatgtaatatttcctatcatgataatactttacaatattaactcacattagattccctagaaacaaggattcacctgtacatgaataagtgaagtaktgccctcaggaagaaggagaagagcagaatagggcaagaaaaaagggaagaaactaagcaatgatgtattctcagtctgatccaactgtatgctctgaaacatgaacaattgcccagggttggtctgactttgaggtaagaggcctggatttttgtactcctgtgttagccattcactggctaaagactgccagtggagagtcagcaaggtgtttaacctcatggatgaggtggtttccatttgaccaggcaattctccagagagagagggacagctgtgagttgttaacaaccaacactccccataactgaggatgagtaaaccagctggtaaagaggatatgggtggaacatcaacagtgtccactacaacttccaaataattgcagttgaatgtaaagttcactaacacagcgggatgcagcaaaccagag

SEQ ID NO: 894289 - DNA, 639 bp, Homo sapiens
aggaggcatcctgccgttattgagcaagttctgtgcgccagaaattctgcttaacagtttacctacattctgtgctttgctcttcccaaatcttgcgcattccatacatcatagtagtttaataggaaaggaaactgcgaatagagagattaatctgttcaagatcatgtagctagtaagtgagcccagttctgcaggtttggagggttgttttatgaaaaattaacctggaaaatattaattctcatttatatgtagaagtgagtaaacyagattaaaagtaaagaccaaactgaatggaatcaacaacatctgtagcatttgtactgccatcaataaagcaatgctaatgttatacatgcttagtacttcccttgccccaattctggaccattggagcctagcaaataatttatttcagtgataaatatccctttaatggaccaaaaatgtaagatgtatgtattttatggaacaccatgacgtccaccaaataacatttttataaaatgaaaaactgtatcacaaagcattttctataagtctttaaacatcatttgttttcaaggtttggatttagtcttgttcagagcagcaagctgatgtctatatgacctcccaaagtcctttccagtcctg

SEQ ID NO: 894290 - DNA, 682 bp, Homo sapiens
tcagtggttagttcctttgtattgttgagtagaagaattccattgtgtggtataccacaagtttatccattccccaaatgatgaagatttgggttgtttatagtatttagctactaggaataaagctgctacaaacattcatgaacaggcctttgtgtggacatatgttttcctttctcttgggtaaattactaggagtgggattattgtatcatatggaaagcatagcaagtatatgttaaacactatttttaaaaatcccccaaactgtttccaaaatgactgtgccattttacattccaatcagcaatatatgaaagtttcagttgttccacagctcctctagcacttggtattatcattgtttgtaattttagcaatttgagcgtataacattatctcatcgtagctttaattttcatttccctaatgacwttgaacaccttttcatgtcctactttgccatctgcgtatcttctttgataaagtgtctgttcaaatcattcacccatttaaaaattatttgtcttaatgatatgtagctaattagaatatattctggatacaaactctttattaaatatgtgctttgcaaatactttttctcagtctctagtttgtttctttaaaagtcctaaaagtctcattcaaagagtagaaagttttacattttggtgaattt

SEQ ID NO: 894291 - DNA, 646 bp, Homo sapiens
ctagccatctcgggagcatcacctcaactttcagcttgcttatattaaccatgtacacccttggtattcaaagggtggtccaggggccagcagcatctgcacccactgagatcttgttagaaatggagaatcacaggtcccatctcagacctgatgaatcagaatctgcatttgaacaagatccccgagtaattcttgtgtactagaatgtctagaatgcactagatgcagtgttttatgtaatcatggcttctgtgtttttttgcagtcgactttgtatttaatgagattaaaaactttcaaagtcaaaatattgtgaaggtaactctactgtaaggaaaayctggtggggtggggggtatagtgcacagaattaaggcatttaaatgcattttctagttaaattatcaatttagttgaacaattatcattgatatgcttatttaaaacttattacttttcaacttttttttttgagctctgtgctcctagcatttaaaaacattaactctttcttgtagcagggaattttctggtgctttctctcataaagagatttctttttagacctattgctgtgatgggaacatttgtataccccccagaattcatatgttgaaacccaacccccaaagagatggtttta

SEQ ID NO: 894292 - DNA, 584 bp, Homo sapiens
aagtccctcagctaataaaacacgttagaactgggctttggttcttgatttctgactttgaagccagtgttctttctagtccaaaaccaaaatccaaacaagggaatgtgacaaatagcttttctgcctcaatcctgttatcacagagcatcatcttcctgatgacctctcatcttacgggaaggagagcctgaagtcttcagcacagctcartttggacacttgagtgtttggaatcctcttacatatctcactagtgcagcaggatataaaatttaggaatctggccggccagcaaagaaccttccaagaaaacagaaatacgtatcagaacaatgggtaacaataagcttttaaattttgttcatttttatatagcatgtctgtgggtgtacatatactcttttgcatataattttcaattccctcctatatggaatggttcatgcatttttaattttccctgcgtcatagattctggtcacaaacctctgttccttctgctacttttcagtgtacaatgattgtacgtaagatttatatcatctgtaataacataaatagcgataatggagtatctcggg

SEQ ID NO: 894293 - DNA, 563 bp, Homo sapiens
gggataaattccccataccttataccataggcgggggagctggatttaagagaaagaaaacacacatagagagggaggtacttgccactaggagaaatcgacatctcccgggcaactggatgtctgctgggatgcagaaaccttgagccttgtgaaataaggagttcagggccgggcacggtggctcacacctgtaatcccagcactttagaagggcaaggtgggcagatcgcttgaggtcatgggctcaagaccagcctggccaacatggagaaaccccgtctctactaaaaatacacaaattagcygggcatggtggtcagtgcctataatcccagctattcgggaggctgaggtacgagaatcccttgaacccaggaggcaaagattgcagtgatctgagatcatgccactgcactccagcctgggtgacagcaagactccatctcaaaaaaaaaaaagaaaaaaaaaagacagagagagaaaagaaagagacaagcactaagtcaacaatgacctcccagcacaaaggctagaggagtactatcacacacaaaagctga

SEQ ID NO: 894294 - DNA, 623 bp, Homo sapiens
acattttagtgggagaatctgacaagtaaataggtagttatgatagagtgtaataaactttcatctcatcatcttctggaaaccatcccaagccatgttggctcctcagaactaagatattactcttaattacacttaattatattactaatttcatctgtttccctgtcagtgatacattttaatttgttaatcttatttacttgattagattataaactccttaarggcaaaaagtaaattttgtatagctgaatatacctcatagcccctagcccacaatattttatataaaagtacatattcaatatccagcaatttattttattttatttatttattttttgagacggagtctcgctctgtcacacaggctggagtgcagtggcgtaatctcagctcactgcaggctccgccccccgggttcacgccattctcctgcctcagcctcccgagtagctgggactataggcgcccgccaccacgcccagctaattttttgtatttttaggagagacagggtttcaccaagttagccaggatggtctggatctgctgacctcgtgatccacccgcctcggcctcccaaagtgctgggattacaggcttgagccaccgtgcct

SEQ ID NO: 894295 - DNA, 623 bp, Homo sapiens
acattttagtgggagaatctgacaagtaaataggtagttatgatagagtgtaataaactttcatctcatcatcttctggaaaccatcccaagccatgttggctcctcagaactaagatattactcttaattacacttaattatattactaatttcatctgtttccctgtcagtgatacattttaatttgttaatcttatttacttgattagattataaactccttaagggcaaaaagtaaattttgtatagctgaatatacctcatagcccctagcccacaatattttatataaaagtacatattcaatatccagcaatttattttattttatttatttattttttgagacggagtctcgctctgtcacacargctggagtgcagtggcgtaatctcagctcactgcaggctccgccccccgggttcacgccattctcctgcctcagcctcccgagtagctgggactataggcgcccgccaccacgcccagctaattttttgtatttttaggagagacagggtttcaccaagttagccaggatggtctggatctgctgacctcgtgatccacccgcctcggcctcccaaagtgctgggattacaggcttgagccaccgtgcct

SEQ ID NO: 894296 - DNA, 649 bp, Homo sapiens
cagtttcctccatactgttcttgtgatagtgaataagtctcacgagatctgatgggtttatcaggggtttccacttttgcttcttcctcattttctcttgctgccaccatgtaagaagtgcctttcacctcctgccatgattctgaggcctccccagccatgtggaactgtaagtccaattaaacttctttttcttcccagtcttaggtatgtctttatcagcagtgtgaaaatagactaatatagtaatttggtaccagtagagtggggcattgctgaacagatacccgaaaatgtggaagtgacattggaactgggtaacaggcaaaggttggaacagtttggaaggatcagaagaagacaggaaaatgggggaaggtttggaacttcctagagatttgttgaatggctttgacaaaaatgctgatagtaatatggacaataaggtccaggctgagatggtctcagatggagatgaggagyttgttgggaactggagcaaaggtaactcttcctatgttttggcaaagaggctggtggcattttacccctgccctagagatttgtggaactttgaactcgagagaaatgatttaaggtgtctggggaagaaatttctaagcagtaaagcattcaaaaggtgacttgg

SEQ ID NO: 894297 - DNA, 649 bp, Homo sapiens
cagtttcctccatactgttcttgtgatagtgaataagtctcacgagatctgatgggtttatcaggggtttccacttttgcttcttcctcattttctcttgctgccaccatgtaagaagtgcctttcacctcctgccatgattctgaggcctccccagccatgtggaactgtaagtccaattaaacttctttttcttcccagtcttaggtatgtctttatcagcagtgtgaaaatagactaatatagtaatttggtaccagtagagtggggcattgctgaacagatacccgaaaatgtggaagtgacattggaactgggtaacaggcaaaggttggaacagtttggaaggatcagaagaagacaggaaaatgggggaaggtttggaacttcctagagatttgttgaatggctttgacaaaaatgctgatagtaatatggacaataaggtccaggctgagatggtctcagatggagatgaggagtttgttgggaactggagcaaargtaactcttcctatgttttggcaaagaggctggtggcattttacccctgccctagagatttgtggaactttgaactcgagagaaatgatttaaggtgtctggggaagaaatttctaagcagtaaagcattcaaaaggtgacttgg

SEQ ID NO: 894298 - DNA, 623 bp, Homo sapiens
ccccttataaaaccatcagatctcgtgagaactcactcactatcagaagaacaacatggaggtaaccaccaccatgattcaattacctcccaccaggtcgcttccacgacacgtggggattgtggaaactacaattcaaaatgagatttgggtgggaacatagccaaaggatatcaaatattatatccaaaaaggtagaatttagaattttattgaatttatcattggctaccagactagaaaatacacattcactaatattttacaaactgaaaaattaattttatgagaggtaaattttaattagaaaaaagctgcccaagggataaagtattctggaactatcatgtagtgggggagaggatagcactgtcttggagcctggatgaggcaatagtaaacacrggctgtgggcagagaaagctgcccagtaattatacagagtgtccctaaataggtagatatgggtgaggttatgtcaataatttattttaaatttagtcaacttttggttaataatttgaaaattatatggcatatggaatttaaaattattataaaggaacaatatgcaacatcagtatatgatgatagaaactaccacaacaaacccattgactgct

SEQ ID NO: 894299 - DNA, 642 bp, Homo sapiens
ctaaattcagctcaaacctttcagtttgatattcttatttttaacgattatccaaatcagcacctttctgattttttattcaaggtcctgagacaggcacgcctttctttcattagttcctgcatttacccatcagataatatcatctgcagcttaaaacactgcagcacagcaaagcatggaaacaattactgcattatgaaaaagttcatgcataattcgtggactccattataatgcttatgttgatcttaaggcaaaaataaaaaagactatgcttttagttttacatcgtattcaccttgcttcatctgctgaaggttatgcattgtattaaataatgtagtcttttgtcaattccttataaaataattgctaatctaaaacagtgacaagtacagtaacatcatgttaaggaagagaataaaaaactcaattgtctcttaaaaagagccttctagaatgtcacttatataacaaatatagttcattsaaactaatcttaggtccttgctccactgcttctgctcattctctcgtaaaattctcactatttatatcaggggtcctaagtcctaaatgtagcctgatgaatagatacaactcataacatcagctgaattaactgtcactcctacatac

SEQ ID NO: 894300 - DNA, 678 bp, Homo sapiens
aaaaccacctgtaccccaaaagctattgaaataaaaaattttttaaaatgcccactgtgcaaaggtggccaatggatgataattgcacagtctaaatttggtggaagttcagaaatttggtcattttgaaaagggattaaaggtttgggtctgactaggcttgaaagrcctcaggtccagccagtcatgctggggtcatctgatccacaggaatgaccctcctgaagtcctccaagacaaacagcgataagtttgagagggacagcattgaaatcttcacggtggagacgctggatctgggagacctgtggaaagtccggcttggccatgacaacacaggtgtggcttccctcccctctgttccttgctaagactttaaggaccatggacaggtccttgtgggcatctgggaaagattctggaaatttgaatgccatctgtcttctgtaatgacacagcttccttaatccctttagcccagtagagccgagagagtcctcagctgcacacagagtttctggcctaattagtctagagctgtacctggacactggtgatttttaaagcctttatcaaccccagtgtcggtaattttaatgcacagccagatatgaaaatctccgatctaactcagtagttctttgagtgtgcaacaggatcacctggggggttattaac

SEQ ID NO: 894301 - DNA, 610 bp, Homo sapiens
ttggccaggctggtctcaaactcctgacctcaagtgatccacccacctcggcctcccaaagtgctgggattacaggcgtgagccactatgcccaaccccaaacctatgtatttcttcaatgtatttgattgaggtctcttgcctctctaaaatgtataaaaccaggctgcaccccaaccaccttgcacatgtgttctcaggacctcctgagggctgtcatgggccgtggtcactcatatttggctcagaataaatctcttcaaatattttagagttcgactcttttcgtcaacaggtgggaatagatgatgccctgccagtgtcaggggtcaccctaggccgttggccccctgaggtcaccagcactttcctggatttctctcacaagttctccctcattctggctcaggaagagagaytgcttctctcacccctaaacactcacagacactgaggccctttcttatcctggagcaagcagaagctcttgacaagcccaataaagtcaaaaagcagttacctaaaaagagaaaggaaatgcaccatcctcttcctgcagctgcctccccggaacaggcctcatcagccctacctctggctgtggcaatag

SEQ ID NO: 894302 - DNA, 608 bp, Homo sapiens
aaaaaagactaggggaaataaattttgtggtcatatttagtgcataaaaaatgtatatatatttttaattttaattcaacacattttctttaaggagctcatattatttaatagaatataaataaagagaaaatagcatgttcagaattcatcatacttgagctaaaagaatcaatatctttggctttgctctgctggcattaaagctttccaagtatctattttaaagaagtaggacactgtttctggctggttatgttctctgcacactgactgttgtgctaaggggttgactagaagatctccatggcccctattcaaaaacgcaatgacttttytggttcaggaagctcagtcaaagcagcccgccaatcctgctggtcagccttgccctgggatgcaagtcttgtcaactggggtacatttcagaagctttctttccctaattttttaaataactttttttaaatcacaaaagtagtccatgcttgtaacagaaaatatggaaaactctaaaatataaaaaggaaattagaaaatgtctcataatctcatgattcagagtcctgatttttcatttccaagaattccaggaagcaagtcattta

SEQ ID NO: 894303 - DNA, 482 bp, Homo sapiens
tgctacattccattggttttggcatactgtttttcgttcttattttttccaagacattttatttccttaatttcttcattgatgcaatagttgctcaggaccatgttatttaatttccatgtagttgtacagttttcaatattctttctattaaatattgttcaataatgttattgaatcaatatagaataaaacttgtcttattctattgctatatcctcctgctaatatgatttatttttcaatatatgaccttgtctcttcagtttttcatttaaattgttttctataggtacagttacttttttttttytgcttttggtttccatttacatggaatatctttttttatcccttcactttaaatctatatcggtctttataggtggagttagtttcttatcggtggcatatagctgagtcattgttttaaatgcattcatctagtctacatctcttaattggggaattctgcttacatt

SEQ ID NO: 894304 - DNA, 614 bp, Homo sapiens
ggaactgctgcctagacaggaagaatccagtcatagcagggctcatcacctgctgactaaagagcccttaagcccttaataaccaacagtgatgtcaagttagtatgccaaggacctagagccctgagatgttgtggcttcagatgtgatccagcacattcccagctgtggtggctatgatgaaagactccttctgtttgaggaaagcagagggaaaagtaaaggggmctttgtcttgcactttaggtaccagctttggccacagtggggtaaagcaccaagtggacacttggagtcactgagtccaggcatataatcttggatagcatgtctggacctgccattgtccagacgggaacccactgccctgaagtgtgggtctcaggcctgacagcatttaccaaaagctgacagaagagcctttgggctttaagtgaatatcagtggtggcctggaagaatcccgtgtgggctggtggtagtggtggccacagggagaggctcctctgtctatggacaggggagggaagagtgggaatgactcttttgtggtttgagtgccagcttaaccatagtagaagagaacatcaagtaaatttctaaggtttttgactt

SEQ ID NO: 894305 - DNA, 607 bp, Homo sapiens
gttttaggtgtgtcttttaatagcatgtgggtgcctcctatgtttgttcatatctaactattttcatgctgctgataaagacataatcggggctggaaagaaaaagaggtttaattggacttacagttccacatggctgggaaggctcagaatcatggtggggcaaaaggcacttcttacatggcagtggcaaaagagaaagagagatgcaaaagcacaaacccctgataaaaccatcagatcttgtaagacttattcactaccgtgaaaacagcatgggggaacctcctccatgattcaaattatctcccgccaggtccctcccacaacatgtaggaattatggaagtacaattcaacatgagatttgggtggggacacagagccaaaccatatcacttaccaatttgaaatattttsccttttccaaggagggtttggcttgttcatatttgttgtcacatacaaaataattatcatgagatatttgaagcaaacagggtctggctttgaatattgatactgtttattagctatattacaaagttgtatgaagattttaatttaatggtagatataaaatacttaataaaatgcctgccacagag

SEQ ID NO: 894306 - DNA, 561 bp, Homo sapiens
ctgtaacaatttgctttgtatctcacataagcctagaagagttcttgactctgaagcttatcaggacccagccggaaagcaaatacacataaactgctggtaaaagaaaagtgaagggcatttcttggaaatgggaaaaggctcttcctccttcccctcctgcccctacttaggggcagaaccatcccaaaatgtaatcaagaagaacagtttgaatactcaaggttttatccttcctcattaatatgttttccattatttgtacttccattatttgttcagttctattttcccctaatttgttgcttcttggagtcagcagtgagtaggaaatgccaatggctgatgattcctcaaatagccctgaagatttaatcytaagttctgatgacccaagtatgtgtggtaaagagatgactgctttcctcttgccttcaaagtggttttcagcagtgctggtctcagctctcttgaacctgcaggacagacagtggcaacactcttgtcaaggagccagagtctcagattataacatcttggtgataatatattttgcctgtt

SEQ ID NO: 894307 - DNA, 560 bp, Homo sapiens
aattttaaagagggtaggtagcttcagtatgtagcatcactccctctccctatttcttttttctttttttttttttttttgagacatagtctctctcttttccccaggcatgatctctgctcactgcaacctctgcctccagggatcaagcaattctcatgcctcagcctcctgagtggctgggattacaggtgtgtgccaccatacccggctaattttttttttttgtatttttagtagagatggggtttcaccatgttggccaggctggtcttgaactcctgacctcaagtgatccacccacctcagcctcacaaagtgctgggattacgtgcrcacacacctagctaatttttgtattttagaagagacggggtttcaccatgttgactgatctcgaactcctgacctcaagtgatccacctgcctgggtcacccaaagtgctgggattacaggcatgagccaccgcgcctgcctggcacctctccccattccttgtttttgtttgctgcaccaactcctagttttgcacaaagcatgctttagggaatgtggtttg

SEQ ID NO: 894308 - DNA, 645 bp, Homo sapiens
aaaaaaagaataaaaaagatgaagcatttctacaatagctagacaatatcttcaaaagggcaaatctaagagttatttctcttaaataaaaggtaaagagagatagagtagaaagtttactcaaagggttaatatcagagaatgtcccaaacctagagaatgatataaatattcaagtacgggaaggttatacaactcgaagtagattgaacccaaataagactacctcaagatatttaatgatcatacccttgaaagtcaaggataaagaaaggatcctaaaagyggcaagagaaaagaaacaggctgggcatggtggctcacacctgtaatcctagcattttgggaggccaaggtgggtggatcacttgaggtcagaagtttgagaccagcgtggccaacatggtgaaaccctatctctactaaaaatacaaaaattagctgggcgtggtggcacattgcctgtaatcccagctacttgggaggctgaggcaggaaaattgcttgaacccaggaggcagaggttgcagtgagccaagagcatgccactgcactccagtctgggcaacagagtgagactccatctcaaaaaaaaaaaaagaaagaaaagaaagaaaagaaacaaataacatacaatgaagtacc

SEQ ID NO: 894309 - DNA, 645 bp, Homo sapiens
aaaaaaagaataaaaaagatgaagcatttctacaatagctagacaatatcttcaaaagggcaaatctaagagttatttctcttaaataaaaggtaaagagagatagagtagaaagtttactcaaagggttaatatcagagaatgtcccaaacctagagaatgatataaatattcaagtacgggaaggttatacaactcgaagtagattgaacccaaataagactacctcaagatatttaatgatcatacccttgaaagtcaaggataaagaaaggatcctaaaagcggcaagagaaaagaaacaggctgggcatggtggctcacacctgtaatcctagcattttgggaggccaaggtgggtggatcacttgaggtcagaagtttgagaccagcstggccaacatggtgaaaccctatctctactaaaaatacaaaaattagctgggcgtggtggcacattgcctgtaatcccagctacttgggaggctgaggcaggaaaattgcttgaacccaggaggcagaggttgcagtgagccaagagcatgccactgcactccagtctgggcaacagagtgagactccatctcaaaaaaaaaaaaagaaagaaaagaaagaaaagaaacaaataacatacaatgaagtacc

SEQ ID NO: 894310 - DNA, 588 bp, Homo sapiens
aaatagtgctaccatgaacatacatgtgcatttatccttatgatagaaaaatttatatttctctgggtatgtacccagtaatgggactgctgagttgaatagtagttctgttttaagttatttgagaaatctccaaaatgcttttcacagtggctaaactaatttacattcccacccccagtgtataagcattcccttttcatttcaaccttgccagcatctgttattttttgactttttaggaatagccattctgagtggtgtgagatagtatctcattgttgttttgaattgyatttgtctaatgattaatgatgccaagcattttttcacatgtttgttggctgagtgtatgacttcttttgagaagtgtctgtttgtgtcttttgcccatttttaaatagggttgtttgactacagtcaataataatttgttgtacttttaaaaatacgtaagagtataagaataattggattctttgcaacacaaagaaagggtaagtgcttgaggtggtggatacaccattttccctgatgggattattatgcattgtgtgcctgtatcaaaatatctcatgtacctcatca

SEQ ID NO: 894311 - DNA, 593 bp, Homo sapiens
gagccacctgaaactgcaagaggcaaggaagagctcttttctagagggagtgcagccctgggcgtattgccctagtagcaccttgattttggacttctggtctctaaaattgtgacagaataaatttctgttgctttcaggtactaagtttttggtaataagttgcagcagccttcggaaactaatacatatatcaaataggcggaggaccagtatgccaaagaaaggaaatgatttgttggctcttcatgctgagtagggaggaagaaaacaagctatccagtrtgttcatctccactgctctcctctaaaaggagataagtctctaccagtctctactatcaagatataaaatctttaattgttaattttttattgagatataacatctatcatataaagtaccaaaatctcaggtgatactttttgcatatatatttatgtattaatatgttcaagtttctacacacacatacaattgtgtaacagtaaccaccactcagatggacacagaacatttccagcataaaagaaagttccctagagtccatatcctgtcaaaacctacctatccacaatagcctctgaaaaca

SEQ ID NO: 894312 - DNA, 593 bp, Homo sapiens
gagccacctgaaactgcaagaggcaaggaagagctcttttctagagggagtgcagccctgggcgtattgccctagtagcaccttgattttggacttctggtctctaaaattgtgacagaataaatttctgttgctttcaggtactaagtttttggtaataagttgcagcagccttcggaaactaatacatatatcaaataggcggaggaccagtatgccaaagaaaggaaatgatttgttggctcttcatgctgagtagggaggaagaaaacaagctatccagtatgttcatctccactgctctcctctaaaaggagataagtctctaccagtctctactatcaagatataaaatctttaattgttaattttttattgagatataacatctatcatataaagtaccaaaatctcaggtgatactttttrcatatatatttatgtattaatatgttcaagtttctacacacacatacaattgtgtaacagtaaccaccactcagatggacacagaacatttccagcataaaagaaagttccctagagtccatatcctgtcaaaacctacctatccacaatagcctctgaaaaca

SEQ ID NO: 894313 - DNA, 627 bp, Homo sapiens
tgtagaaagaaacatttgtagtaaaaatacattaaaggaaacatttaaagaagttgaaataataattattgtatttgactataggaggcttaggaaaaacactagcaaataatttaaatatgagcattagaaggaacaaactagtgtgactatgaaaacttgtttagcatctctgaacrtatgtttaatattgaatataatttgttattagccattaaaacaacctcttctgggatagcctagttcaatgtatacttgtttacacatgttgaccttggtaatatgctttgtaaatgtgttgtcaagttgtatttattagtcatggactaaagaatatctattagtcacaggataattagaatgctttcagttataaggctagaaacctagtggaaccttcttctggcagacacacagagagagagagagagagagtgagagaaagacagagagaaaggaatttttcagaaagagtttttgttttacaataacaaagctttgtttattgttcatgttacattttggctttagctctcctccacatatcttctcattctggggcacagtttgaaggagcagcccctatctcagacttgtggaagaggaaaaaaataatcatagaacaag

SEQ ID NO: 894314 - DNA, 600 bp, Homo sapiens
cagcttcactcattctctcaccctcctcaatatccagttagttatttggcctggcaattcaacttccaaaaatccctctcaattcagtatctcctttccatcctgagctaccgctgctcatgttctagctcatgaatttaatcccaacactaatgaggctccctgcttactggatcttcctttcttaataactcatcactctaaatccattaggtcattgttcttaagaatcttaatggagaaaatattcacaagaggttaacataatgcaaaagatggtgaaacgctctggaataaggatggaagcttaatgggaaacaaataccccatcctatttttgcatgtcctctgatctcctgctggggccacccactgccaraaacaaccaaaagttagagggcaagcaaaagagcatgggtgataccatctatctacaacagttagcttcttagggtacagactaggtggagagataccatggtggggaaaacgacatgtggacgccattcagcacagttactttttctgactctcccaagaagaacgcattttcccctcattgatattccaagagaaatatcattttattggtacctcaac

SEQ ID NO: 894315 - DNA, 503 bp, Homo sapiens; identical to SEQ ID NO: 886294

SEQ ID NO: 894316 - DNA, 668 bp, Homo sapiens
aatacaataatggggctcaaaaatttaatagagggtttcaataccaatctatataaagcagaagaaagaattagcaaacttgatgacaagtcattagaagtcatccaatctaagaagtcaaaagaaaaaagaatgaaaaagggtgaagacagtgtaggggatttgtgggacaccattaagtggaataatatatacattatcagtgtaccagaaggagaaaagaaacagaaagggacagaaaacattcaaggaaataatggcagaaaatttcctaagtctggaaaagaaaatagaaatccatatccatgaagctcaatggtctgttataggataaattcaaaggracacacaccaagacacattacaatcaaattgtcaaaagttaaagacaaagagaatattgaaagcagtaagggaggagtgacttgttacatacatgggacctctagaagactgtcaatggattttccacagaaatcctgaagggtagaagggaaagggatgatatattcaaaactgaaataaaaaaaagaaccctgccaaccaagaatactatacccagcaatcctgtcccttaaaggtgaagaagagataaaaactttctgagacaaacaaaaggtgagggaatttatcaccattagacctaccttacaagaatgctaacaata

SEQ ID NO: 894317 - DNA, 478 bp, Homo sapiens
ttgtcaaaagttaaagacaaagagaatattgaaagcagtaagggaggagtgacttgttacatacatgggacctctagaagactgtcaatggattttccacagaaatcctgaagggtagaagggaaagggatgatatattcaaaactgaaataaaaaaaagaaccctgccaaccaagaatactatacccagcaatcctgtcccttaaaggtgaagaagagataaaaactttctgagacaaacaaaaggtgagggaatttatcaccattagacctaccttacaagaatgctaacaatagtccctcaagcttaaggaaaaattgttaagtagcaacatcaaagtrtgttaaaacataaaacttactggtaaaagtaagtatgtagttaaactcagaacactcttagattggaacagtggtgtgaaaataaattttgtttctagcatgaaaattaaaagacaaaactataaaaacaactgta

SEQ ID NO: 894318 - DNA, 602 bp, Homo sapiens
gtcaatggattttccacagaaatcctgaagggtagaagggaaagggatgatatattcaaaactgaaataaaaaaaagaaccctgccaaccaagaatactatacccagcaatcctgtcccttaaaggtgaagaagagataaaaactttctgagacaaacaaaaggtgagggaatttatcaccattagacctaccttacaagaatgctaacaatagtccctcaagcttaaggaaaaattgttaagtagcaacatcaaagtatrttaaaacataaaacttactggtaaaagtaagtatgtagttaaactcagaacactcttagattggaacagtggtgtgaaaataaattttgtttctagcatgaaaattaaaagacaaaactataaaaacaactgtagttacactaacttgttaagggacacaaactaaaaattacaaaacatgtcaaaaaaacaaatggagaggaataaaagtatagagtttgtgcaagtgatcaaagttaaatcattatcagcttaacaagggatgttcttagcatatgatgttttatataatcctcatagtggccaaaaaaaaaaaaaaaacaactccttagtggatacac

SEQ ID NO: 894319 - DNA, 563 bp, Homo sapiens
ctagaactgctatgagattcatgtgcagattttattgtgaacacaagttttgatttctctgatttaaattcccaggaatgcaattgcttaatcatatggtaagtatgtgtaattttataaaaaaatgttaagttgttttcaagagtgactttaccattttgcattcctgccagcaatatacaagagttacagatggtctgtctccttgtcaaataaaattgtttatttttagccattctaatagaygtgtggtgatatctgctagtgattttaatttgcatatccctaacaactaatgatcaatgttaaatatcttttcatgttcttttgaatcatctgtataccttctttggtgaagtttctgttcaagtctttgagttttaaaattggattattttcatactggtgagtttacaaggttctttatatgttctggatacaagtacttgttggatatgattttcaatattttctcttagtctgtagcttatctttttagcctctcagtggtgtttttcacagagtgaaagtgtttaattttgatgaaatatggtttatgagtt

SEQ ID NO: 894320 - DNA, 554 bp, Homo sapiens
ttttgttgattacattagtagtgtctccaaaggaacacaatgcttgaaataaaagattcttttcataatggaaaatgacttacttataaaaaatattctgtaaaccctaccatcaatctggcttatctccaagcacagaaaagcaagataattaagagaactgagacaatgtgaaaaacagttaacgactagatgaaacggacaccaaaccaatcagaagagacgtagagctagattctttgctagatcattgggaggtcaggaggacccagcagtggtatgggaggggatttgggataattctaagggtaccaaagcatttcagtattttaatacacagtcacaccagctaaatacaagccctgaagrtaaccaacatttcttataagtcatgtcttataatagaaatatttaataaagtttttagagccaaggaaagagccatatctgagacccttctcacttgttaaaggctccttactcattatcaacctacatctgtcaaccaaatgaaacaaagtataaaataagaatcctcctacatcttttctcgt

SEQ ID NO: 894321 - DNA, 554 bp, Homo sapiens
cttgtgccaatatcatggtcaattcacataaaaattaaataatgaatttatctaaattgttcaatataattattgtattaattcatttcaatttggcaaaacaatagtttcaggtaagtactattttaaggctacttatgctgtactaggagaaaaggattagtcattgaaatcattgtattctgcatgtaatacagaaggcaggagcccaggttgagcttaactgctcactctcagcatttaaaggactgagctcggggagcggctctaccaagattttctttgcatgagagactaagaagtctcctaggcaaggttcatcctaggggaagaaagagttagaattatgttcccataaaaatgtcccgggtttcwgaggagaatataattgttttaatataataaaagcacaatacctatcactagaatttgcctaaagattatgaattgaaacatttacagtatccaaaactgtaaaatggggataataataatacctatgccatgggtttgagaggattaaatgtaagttaaatgtaaattgcttagaacag

SEQ ID NO: 894322 - DNA, 617 bp, Homo sapiens
aacctcttacttgtaaaatagaagctattccatgttaagattatgacaaccatttgaattattttataaatatgataatttcaaaagtatttaaaataattaacggtttcaaaagaaataatgaatgaattctaatgccgaataaggatttcaggaacacatctttcttccaccttggtatcctgctataatattcagaaaatccaaattccaatcttaggtcaaccaggtattagctaagtgactttgtgaacactgtgtaagcctctttacctctttaacttttgggtaaaagcttttttaagttgtataataatttctgctgttacttcagggttttaggtgtcaaaggaaataaggaaggtgmaagcatttaaacatttgagaaccctacttgggagcacatgatgtgtcctccaaacactatggtcttgttaattgtcaacacctgactcagagcaggcacaagctatgttaagcacttataatgaattagaaaataaagttgaccccaaaggtgaaaaggatctgggcctttttttcttcccaatatgcaagtgtgttcacaacatgagtgatcagaagtcaggggatgctgggctatcccacgtaactct

SEQ ID NO: 894323 - DNA, 601 bp, Homo sapiens
ctgacatttcatgtctcaactgttttttattcataacctctctttttcctgacatctactggatgtattaaattaatacatgatgacaaaataaactggctataattaaataacaaatcttaacttgcacaaaacagacaaaaccatatcactgatgatgttataaaattatcaataaaatgatgtctacttaaaacattattatagtacacaaagtaaaacaataaaagaataactctttttagttcctttataatgaaggcaatttattttgtatattattttgcatattktgtcaaacaatatagtccattagatagcgatgtgttaatatctccagtaaagatttcatgtcaataaccaatcttgaaatctcttgcccacaactatcacttagtacttttaaaagacataactggacaactggacaagaggaagagcatcagtattgccaaatctgacgaatactcacgagaggatattcccaatataagcgtagtaggagcaacagtagggcgtggttccatcacagcagtaagatttgcaatctttgccacactgagcaaggcaatcatctacaaaacaaaaaccacttgtgagc

SEQ ID NO: 894324 - DNA, 626 bp, Homo sapiens
aacactgcccagtctttagagttaactgctgttagattcagatttcttgattaaagccggaagcaatttaaaattttaaagttgggccagaggaaggtcttattcatacctttgccctaacagaaagcgaattcatatatgccacaccaaattatgggcatatatttataatattgaaaactaattctatttctttgtctttaaacatcttgttcagtaaacctgctgaatactgtgcaaaggatttggatttttataaaatcaagaactcttcaagtatttcctctaccaatcaagttttcatttctgttctgaagactcagttatcttttacttcttacatcagttagctattgctgagtaacaaattactctaaaaggtactgtcttaaagcaacaatcatgtattatttctcatgagtttacaggctggctgagcttgcaagtttacagggtgtgctgattttttttttttttttttttttttttwaggtggagtctctctctgtcacccagctggagtgcaatggtgcaatctcagctcactgcaacttccacttcctgggttcaagcgattctcttgccaaagcctcctgagtagctgggattacagttgcccaccacca

SEQ ID NO: 894325 - DNA, 529 bp, Homo sapiens
aacccccaagaaggcactttgattttgagatgcatcaatttcccacactccagatcatctagaactcagagtgctgttaaaggaagaccctctagtgtccagggtgcatgatggaacgttagtgaaagtcatggaaccaggtgtatgcaatagttcagagagaggaagtaagactatcattctaccttggcacaataaaaatactagctagcactcatttgaagcktgttaaaatccaagaactgtattaggtatattgaatgtattaacttaatacatttctaaagtacttttttctctcccttttatagattcagagcctgaggcaatagattaggtaacctgtctctgctaacacagagtcaatgtaatatagccacttgaacactggcattgttcttttgaatcttttcatcctattcactcactatgctgcgtctgaaataacatcagagctgatgggtttgagcacttagctttgaaatcacctttcgttattagaggcccaatgcactctccgtcacactac

SEQ ID NO: 894326 - DNA, 622 bp, Homo sapiens
ttaatccatgtgcggtcatttatatttggcatgcataaatgtcatgaagaacagggaaaaaatataattcatgagcaaaatgcattttatgctactgtccccttgccaaattaagtattatagttggaaatttagggtggaggctcactttgggaaaaaagaatcaaattgtytggggattttgctttcatcaccaaagggattttatgtgtttggaaggatcatcaattcctgacttggtggtagacaatactcttacttcacgcaggtcctgcagaattctaatatggcttggttgaaatttcttcttttgactagaaacttttttcacattttttttcagtattccctttgatgcagtcaaaataggtggacaaatacgttgtctacactgaaacaaagcttgcttgaattcacctatatgatgatgtcttcatgagcttgctttgcctttccaaatctgtctttaaaagattcactaatctccagattttaaaacatagaggaatgttccaacagtacatttttcaagtgatgtaaaaagttcttggaattaatttgtcatcagccttgctctaaggacggtgttgtttcagccatggccatttaggaactgatcatt

SEQ ID NO: 894327 - DNA, 622 bp, Homo sapiens
ttaatccatgtgcggtcatttatatttggcatgcataaatgtcatgaagaacagggaaaaaatataattcatgagcaaaatgcattttatgctactgtccccttgccaaattaagtattatagttggaaatttagggtggaggctcactttgggaaaaaagaatcaaattgtttggggattttgctttcatcaccaaagggattttatgtgtttggaaggatcatcaattcctgacttggtggtagacaatactcttacttcacgcaggtcctgcagaattctaatatggcttggttgaaatttcttcttttgactagaaacttttttcacattttttttcagtattccctttgatgcagtcaaaataggtggacaaatacgttgtctacactgaaacaaagcttgcttgaattcacctatatgatgatgtcttcatgagcttgctttgcctttccaaatctrtctttaaaagattcactaatctccagattttaaaacatagaggaatgttccaacagtacatttttcaagtgatgtaaaaagttcttggaattaatttgtcatcagccttgctctaaggacggtgttgtttcagccatggccatttaggaactgatcatt

SEQ ID NO: 894328 - DNA, 667 bp, Homo sapiens
ctgattttatttttgctcatgtgtctcatgatgacaaaatttgagacaggtcaacaagaaatatttactagatctagtagttgttactacatttaaattgatagtttctaataatgatgttttgcataggtcataaggaattttctgtgagaaatattaggaataaaaggattttcttcactcttcacatgtgttctacagatgttcacagactagtcttccttttataggctctgaataaagataaaatatggtggaaatcaaccaattcgtcattgctgttttatgctgtagaaattacccttmattttcacttacctttgtgttcaaggtcaaagccacccccatgaaaactcccaaactacacaccaaaaaaacaaatcaaacgaaataaagcattgcaagaatgtgaaatttgtgttgaaaacatctggctgactattctcccaggctatgctcggcactcattattcatataaattgtgagaaaggtttggtgtctgaacgtacctctagcccctatgatgtgcgtatgtgatttttgcccaagtagtcatcaccacaatcctgtataagaaaaataaatttgaatttgctgtgagtcagcttcatcttttaaattaaatatgatgataatacctgctttaattatcttagggcttcttat

SEQ ID NO: 894329 - DNA, 656 bp, Homo sapiens
atattcctattgtaatcatgtcataaaattaaggggaaattgaatgccttgcagagtccgataaagacaagttcattctttcttgtgcaatgatttcctataacatttggagttatatcaaatctaaatttgtattctaagcagaaattacatgtgtttttcccgaacatgtgttttcttatgctcctaacctgtgaaataggaacttataaactattcttttaaaggcaagcatatcaatttagatgtcttcctttgcagagaaaatcagatacaaataatcctatgaaaatatagttgcataagagtgaaccatcttattgtttatttcagattygctcataccagcttgtgtatattgttgagacagctcactgaatggcattattcaatggtttctctttgtggctcatcgcctttgagaccatacttataaagtacacctaatggaagtgtcttagagccttcttaagtgttttgctgagccaggagaggaactgaattatagatcaaaagaactaacgtgtttcagttggcaaaaggttgtcttagtcttcacagacttgccaatctcttcttccaccaatgaagtatttcactcagttagctataggaaagcatttgtttgttatgaacaaattactttaaattcaact

SEQ ID NO: 894330 - DNA, 657 bp, Homo sapiens
tccatggtattgcactcttaactgtgttatgtcccactagaatgtaatgtttttgaggtcaggaactgtgcgtgtatggtttgttgttgtatataatgtgcagtataatacctggtgcttattatgcattcagttcatgtttgttaaacaaatgcatagaatcattgtctttaggcactaccctacttataacgaattgaagaaatgataaaatccattattattacagctatttgtatggtatagaacagacctaattttctattatgtgatttggcttctgaaaatttatttactcaattcctttctgtagttaggttcacatgcacccatattacatgaatatattcatgccatctcagagatcattaggatgmcaaaaaaaaaaaaaaaaaaaaaacatataacggctatcaattttccccaaaaaccagcaggtataagcaattgttattcacattgttcattttataagcaatataggaactctgcatttaaataggaaaattgagtgatttctaaaatcagaagctaatatattttggattattattttaaaaagtttaaaggatacatatatacatctgtaggtttcctggagtctccaaatcagggatgccagccatcctagagtgtcactaaagtgagaggcagcat

SEQ ID NO: 894331 - DNA, 589 bp, Homo sapiens
tatatttcaacacatgtatacattgtgtagttatcaaaccagggtatttgactgttcatcacttccgatatttatcacttctttttggtgtaaacatacaaaaccctttcttctggctattgatatatacaatgccttattgagaaccatagtcaacctactgtgaaataggacaacagaatatattcttcctttgrgtgttacttctttttaaaaaaatgtaagttgaatttaatctttattaaagtcttgacagtagagcacttattagggatgccaaccagagctggtaactctgtggtagggtttgagggaaggtgtgaagcccctctttctcaataatatctgaatcacaggtttcacgcgtgtctgtgtgaagagaccaccaaacaggttttgtgtgagcaacaaggctgtttatttcacctgggtgcaggcaggctgagtccaaaaagagagtcagtgaagggagataggggtggggccgttttataggatttgggtaggtaaaggaaaattacagtcaaagggggttgttctttggcagacaggggtgggggtcacaaggtgctcagtgggggagcttttt

SEQ ID NO: 894332 - DNA, 589 bp, Homo sapiens
tatatttcaacacatgtatacattgtgtagttatcaaaccagggtatttgactgttcatcacttccgatatttatcacttctttttggtgtaaacatacaaaaccctttcttctggctattgatatatacaatgccttattgagaaccatagtcaacctactgtgaaataggacaacagaatatattcttcctttgagtgttacttctttttaaaaaaatrtaagttgaatttaatctttattaaagtcttgacagtagagcacttattagggatgccaaccagagctggtaactctgtggtagggtttgagggaaggtgtgaagcccctctttctcaataatatctgaatcacaggtttcacgcgtgtctgtgtgaagagaccaccaaacaggttttgtgtgagcaacaaggctgtttatttcacctgggtgcaggcaggctgagtccaaaaagagagtcagtgaagggagataggggtggggccgttttataggatttgggtaggtaaaggaaaattacagtcaaagggggttgttctttggcagacaggggtgggggtcacaaggtgctcagtgggggagcttttt

SEQ ID NO: 894333 - DNA, 589 bp, Homo sapiens
tatatttcaacacatgtatacattgtgtagttatcaaaccagggtatttgactgttcatcacttccgatatttatcacttctttttggtgtaaacatacaaaaccctttcttctggctattgatatatacaatgccttattgagaaccatagtcaacctactgtgaaataggacaacagaatatattcttcctttgagtgttacttctttttaaaaaaatgtaagttgaatttaatctttattaaagtcttgacagtagagcacttattagggatgccaaccagagctggtaactctgtggtagggtttgagggaaggtgtgaagcccctctttctcaataatatctgaatcacaggtttcacgcgtgtctgtgtgaagagaccaccaaacaggttttgtgtgagcaacaaggctgtttatttcacctgggtgcaggcaggctgartccaaaaagagagtcagtgaagggagataggggtggggccgttttataggatttgggtaggtaaaggaaaattacagtcaaagggggttgttctttggcagacaggggtgggggtcacaaggtgctcagtgggggagcttttt

SEQ ID NO: 894334 - DNA, 660 bp, Homo sapiens
taaaagcataaccactacaatggaatattatttgaccataaaaaggaatgaagtatgtactgatacctgatacaacagagatgaatcttgaaaacattacactaagtgaaaaaagctagtcacaagagaccatttgatatatgattctatttatgtgaaatgtccagaaaaggcaaatctgtacagaaagttgtttagtggctgcctagggctgggggatagaaggattggatgtgawagctaaagggcatgaattttttgtggggtaatgaaaatattctagaattttttgtggtgatggttgtacaactttgtgaacatgctaaaacccataaatcatacaatttaaatgggtgaattatatgtatataattcatataattatttgtatgaatttatatgtataatttatatccttatgtacatataattatatgtataatttgtatccttatatacatgtaattcaataagactattaccccaaaataaccatcaatacagcattttgtatctactagagatgtacttttgatatttttagtgacatgaaagcacattattaatataaagttgtgcaaaatatgaagacacagaaatgactacacaatgtgatgtgaagtatatttatagacagacagagaggtctaaaataaaatg

SEQ ID NO: 894335 - DNA, 660 bp, Homo sapiens
taaaagcataaccactacaatggaatattatttgaccataaaaaggaatgaagtatgtactgatacctgatacaacagagatgaatcttgaaaacattacactaagtgaaaaaagctagtcacaagagaccatttgatatatgattctatttatgtgaaatgtccagaaaaggcaaatctgtacagaaagttgtttagtggctgcctagggctgggggatagaaggattggatgtgaaagctaaagggcatgawttttttgtggggtaatgaaaatattctagaattttttgtggtgatggttgtacaactttgtgaacatgctaaaacccataaatcatacaatttaaatgggtgaattatatgtatataattcatataattatttgtatgaatttatatgtataatttatatccttatgtacatataattatatgtataatttgtatccttatatacatgtaattcaataagactattaccccaaaataaccatcaatacagcattttgtatctactagagatgtacttttgatatttttagtgacatgaaagcacattattaatataaagttgtgcaaaatatgaagacacagaaatgactacacaatgtgatgtgaagtatatttatagacagacagagaggtctaaaataaaatg

SEQ ID NO: 894336 - DNA, 491 bp, Homo sapiens
tggtgttacagcaatatactagctttatattgtcgggccctggcctggggtggggcagtggtatgttcattgcctgccacaaatacaaattctggatttgtgttaaggtccaaggtggacactggaagggctggccttggagttayatggcttgcccacgagctctagcgatacatcatatggacttgaggttgaacaaatgtatgcacaagaggaaaaaatcttccttggaaatcaagtttcttagacctaagcaatttcttataaagagatggtaaaatcagacacaaggcccagaactgaaaacatatgctgaagggaaagtgtggaactggtaacacaggtggtcaccatagcaaatttctcatcttggaccaaaagaagcaatgaatcaaatatgacttagagaagtattgcatgcacaaggagcttttctccccccagacatggccaatatacaaaaaaatcaaaccaaatttgtaaatgttcta

SEQ ID NO: 894337 - DNA, 695 bp, Homo sapiens
tagatattattagaaagaataatatttggcatttctgagttgcaattgcaagttacatgattttaattgtgctatggtgttacagcaatatactagctttatattgtcgggccctggcctggggtggggcagtggtatgttcattgcctgccacaaatacaaattctggatttgtgttaaggtccaaggtggacactggaagggctggccttggagttacatggcttgcccacgagctctagcgatacatcatatggacttgaggttgaacaaatgtatgcacaagaggaaaaaatcttccttggaaatcaagtttcttagacctaagcaatttcttataaagagatggtaaaatcagacacaaggcccagaactgaaaacatatgctgaagggaaagtgtggaactggtaacacaggtggtcaccatagcaaatttctcatcttggaccaaaagaagcaatgaatcaaatatgacttagagaagtattgcatgcacaaggagcttttctcccyccagacatggccaatatacaaaaaaatcaaaccaaatttgtaaatgttctatgaattaatctcaagctggaaaaattattttcttcttgaatgtaaattctcagcttctggattcttgaccactggcattgaccaactggcatctcgttgagcctgaagccaatatctttttctcttttcc

SEQ ID NO: 894338 - DNA, 587 bp, Homo sapiens
tgttatgtggggtagtgacgttgtcagggtaaggaagaaacagacttctgcaatttatttaaagtcaaggcaaaaatagaaaagtataataatatagatacccataatatcgacatttagaagccatagtaattggtttttactggaaatgagtgtgtktgtgcgtatgtgtgtgtgtatgtgtgtagtagaatagtagcagcagaattgggccatctgcttgacaaattagaccttttaactgcatagagctttgttaggaaagatgattgaaagacaacctggctgaagaattatatggcaaagacccagagacatgagcatttagaggaaatctggcctttgtgtcagaatcatcagtgtgtttgatcaggtatagcagttgcacatgtggctagaaaagttggttggaatttagataagtacctgtcatctgctagattccagaggaaggcatgcactatggggtcaaacactgagctgcaaatattctttaaagtgtggaatcctcacaagtgagaatccactgtatttctaaatacaatagtgttttggaattttgttgctttgacctagtaatgttagct

SEQ ID NO: 894339 - DNA, 683 bp, Homo sapiens
accggattaagaacttgtcttcccgcttggcatgctttcctctgactgatcaccacccttagcctattttacatatacctaccctttcctaattgtttttctacactgtcgtgcccacctttgagtggtgtttttgcttcaaacttttttgcatactcacaaaccaatcagcatgcactccccattttgagtccataaaagctccaggctcactcatattgggggactttcctgcttttaggtaggggaagcaccccccgcccttctttctctttgctgagagctttcctttcatttaatacattctactccactcactctctggtgtctgtgtgcctaattcttcctggtcatgagacaagaaccygtacctagctgagctaaggagcagaaaaaaatcctgcatcaaccccaataactggattgtaatcttgttcattctgcttataggcctaacatggtagcctttctaataatccactctagattgagattattccttgttttcgtgtgtacattcattttctattactaccataacaaatgccaatcattcagcatctttaccaaacctatttataatatcacagttcatagatatctaagctcagcagagctcagctgggcctctgctctgggtttacaaggctggaaccaaggtatcagcagtgctgcattccttt

SEQ ID NO: 894340 - DNA, 642 bp, Homo sapiens
catgaaactggaaacctcatggagttgtcccaccatcatggcgcaaaaagcacagcaaattattttaaactagcctttgatacggaacagatacatacaatgataagatctagatattgaacattcacttatttgctttttcaatcactcaacaaatatttatcaagtgcttaacatgaaaaagccactccacaaaaggaaatctcaatttctgkcaagctttcaaagctataaactatgacatcatcctttctcaaacaaaccaaccattataaacatcccagaataggctttatgaagccttctctggagaagggctcttaacctagggcatgtgcagaggctccagtagtctgggatttcctgttaactgcatgacaaattgtgcatgtctgtgtgtttggggggcaggggagaaggtccattgttttcatctagttcaaaaaggggtctataatccaccgaaggttaagcgtggcagctccagggtatcactgtttaggatgctaaagaccttactgcccagtttctccatttcgctccagaaaatttccgtgaaactaagcaaatggtattaagtacttgggctcaccccttgagttactgacacaccatcacatcccttgcttttctgcttctctc

SEQ ID NO: 894341 - DNA, 598 bp, Homo sapiens
aagctataaactatgacatcatcctttctcaaacaaaccaaccattataaacatcccagaataggctttatgaagccttctctggagaagggctcttaacctagggcatgtgcagaggctccagtagtctgggatttcctgttaacygcatgacaaattgtgcatgtctgtgtgtttggggggcaggggagaaggtccattgttttcatctagttcaaaaaggggtctataatccaccgaaggttaagcgtggcagctccagggtatcactgtttaggatgctaaagaccttactgcccagtttctccatttcgctccagaaaatttccgtgaaactaagcaaatggtattaagtacttgggctcaccccttgagttactgacacaccatcacatcccttgcttttctgcttctctctgctcacttattaccctactaatgagcgcagatacctctgcttaactatgttctgtgtgacaaaggaagattaagagttagacaatggcagaacttgaatatcagttcttcaagttctaaaatctcctttccttttcctaccctgaacaattcctattttgatagtcccattccctctatt

SEQ ID NO: 894342 - DNA, 598 bp, Homo sapiens
aagctataaactatgacatcatcctttctcaaacaaaccaaccattataaacatcccagaataggctttatgaagccttctctggagaagggctcttaacctagggcatgtgcagaggctccagtagtctgggatttcctgttaactgcatgacaaattgtgcatgtctgtgtgtttggggggcaggggagaaggtccattgttttcatctagttcaaaaaggggtctataatccaccgaaggttaagcgtggcagctccagggtatcactgtttaggatgctaaagaccttactgcccagtttctccatttcgctccagaaamtttccgtgaaactaagcaaatggtattaagtacttgggctcaccccttgagttactgacacaccatcacatcccttgcttttctgcttctctctgctcacttattaccctactaatgagcgcagatacctctgcttaactatgttctgtgtgacaaaggaagattaagagttagacaatggcagaacttgaatatcagttcttcaagttctaaaatctcctttccttttcctaccctgaacaattcctattttgatagtcccattccctctatt

SEQ ID NO: 894343 - DNA, 642 bp, Homo sapiens
aaagacttttgtgtttatgtttataaggtatattggtagttttcttttttttttattattatttatactttaagttttagggtacatgtgcacaatgtgcaggttagttacatgtgccatgctggtgcactgcacccactaactcatcatctagcattaggtatatctcccaatgctatccctccccattccccccaccccaccacagtccccagagtgtgatattccccttcctgtgtccatgtattctcattgtwcaattcccacctacgagtgagaacatgcggtgtttggttttttgttcctgcaatagtttactgagaatgatgatttccaatttcatccatgtccctacaaaggacgtgaactcatcattttttatggctgcatagtattccatggtgtatatgtgccacattttcttaatccagtctatcattgttggacatttgggttggttccaagtctttgctattgtgaataatgccgcaataaacatacgtgtgcatgtgtctttatagcagcatgatttatagtcctttgggtatatacccagtaatgggatggctgggtcaaatggtatttctggttctagatccctgaggaatcgccacactgacttccacaatggttgaactagtt

SEQ ID NO: 894344 - DNA, 693 bp, Homo sapiens
ttgatagctagtgtgtatgtatatattataccatctttttaaaaatatagatgttttaaatcatttctttaaaagcatacatcctcctaaggagaaaatttaaagtaccgccattctacaatactgtttgatagggaaattcagcatttgaaatgtacgctaaaaagtaatgattccaggtttaaaaagaattaatgctcctaggaagcttaatgttataaatgttataaaatagacttttgctagtcaatttcaggttgttttttttttttwaatttctatgcttgcattattatctcaactctttaactttgtatctggactaagtttagacataaaaattaaaaatgaagcagtagattatgttgcttgctgtttctaatttaacaccagaattttaatagtatgcaatcttcaagggttggtagtctggtaaaaacttgaagcaatagtttcatagaactttaactaagataaagtattaattgtctatgccaaagagggtgagcaatgatagagattataaagagcctagggcttccctgagacccaccttggtgctaccactgttaagagaaaattaaaaataaatgaacaatagtttccaactctaaaacatattatatgcagtacatactttaacctagtttacaatttatatttattatgcccactgaacccacaaaagcagtg

SEQ ID NO: 894345 - DNA, 663 bp, Homo sapiens
aattggaagtcactcagaggagagtcataagtccatgactaagctatatatccagatgtttcatcactgagtactttaccctgaataagagcatggctcagaatattactatatataaaaacataggactgattagcaggttcttgtggacagggaattctatatatttatacatatataatataccttatactaaccatataattacactcctataatacaagtgataaattaatatattatatataatagaaacaataaaattagattattgtcataatattcatacaattatgtagatctcattcaatgaactgttttttgagtaattttattaatttagctctcatgttgacactgctaaagatacaaaagaagggtatgacagtccccgattcatccagaactcttaaaatgaaagtgttatatatggttccaccaggctagagggatataatacagctaaatcgcttgaataatttttttttttttgagacagggtcttgctctgttgctaggctggagtacagcagtgacattacagctcactgcagcctcaaactsctaggctcaagcaattaggctcaagcgattctcccacctcagcctcccaagtagctgggactgcaggcacatgccaccacgcccagcaaatctgagtaa

SEQ ID NO: 894346 - DNA, 577 bp, Homo sapiens
ttgttttccagtccagatatttcatttcccaagaccactctgacctgccacgccacccatcttgtgcctatgaaaactctggagaccctagcaggcaggcacacaagtggctggacatcaagaggagcggatcggtggaagaagatacaggtagctggacgtcgagagcagcacatcagtggaggaacagatgggcagttggatgtggagaggagcgcatcaacaggcaccgatacactggcaggccacygaccagcagaagaacaatgcagagtttgacttggggcagtaggaggagagcccagtgccatgtggcactgagaagaatgtatatactgttgatttggggtagacagttctgtagacatctactggtttcacttgatccagtgctgagttcaagtcctgaatatccttgttaattttctgtctgggtgatctgtctaatactgacagtggagtgttaaagtctcccactattattgtgtgggaatctaagtctctttgtaggtttctaagaacttgttttatgaactgggtgtcctgagatatcctgagatatcttgtattgtgtgcg

SEQ ID NO: 894347 - DNA, 584 bp, Homo sapiens
taacataaaactttattttttagtaaagatacatgtctagtgcagattggaaatggagctctgctcattatggttcaattcagtgggtttggatctcaacaaatgattctgcaattaccatggcagagaaaaggaaatacagtatactgactcggaaaattccatttgaaagtgacacatttatctcatttattctttattggccaaacaactcacagggccacctttatcaaggcaggtaaaagggaggatgacacatcatgcaccttctaccttgaagtgatagatgtggctatcactcatacttaactggccaacactacgtttccacatttaatattaaagaggacaaggaagtgtaattygcctgcctagctaggagaggagaattagatcacttgtgagtagtcactgcactacaaattgattaaaaataagttcatctttgattttcaaggcattattctattgcgttgtatcatccagtaaactttgagtgccgttcttttgtatgtgatctgttttacccagatagggtaagatttcaggattgtctttttatctctggtgttgtgaaacttgtg

SEQ ID NO: 894348 - DNA, 623 bp, Homo sapiens
ttcaacctagcaatcccattactgggtatatgctcaaaggaaaataaatgttctaccagaaaaacacacgtctcagatgttcattgtaacactattcacaatagcaaagacatacaattaacctaggttcccatcaccattgggccggataaatgtggtacatatatatcatggaatactgcactgccatataaaagaatgrtattattttttgcagcaacatggatgcagctggagaccatcatcctgagcaaattaatgcagggacagaaaaccatacactgcatgttctcacttataaatgggaactaagcattgagtacagatgaacataaagatgggaacaacagattcttggggctatttgaggggagggtggggggagggtgagtgttgaaaagctatctatcagtcgccatgctcactgcctgcgtgatgggatcactcatacagcaaacctcagtgacatgcaatttgcccatgtaacaaacctgaacatgtactccctaaaactaaaatgagttgaaaaaaaatttaagatagttctgagaaattcccagcaaacctttggcttgcttgttgggtttgtgagtctacacccactttcttttttacctctttta

SEQ ID NO: 894349 - DNA, 623 bp, Homo sapiens
ttcaacctagcaatcccattactgggtatatgctcaaaggaaaataaatgttctaccagaaaaacacacgtctcagatgttcattgtaacactattcacaatagcaaagacatacaattaacctaggttcccatcaccattgggccggataaatgtggtacatatatatcatggaatactgcactgccatataaaagaatgatattattttttgcagcaacatggatgcagctggagaccatcatcctgagcaaattaatgcagggacagaaaaccatacactgcatgttctcacttataaatgggaactaagcattgagtacagatgaacataaagatgggaacaacagaytcttggggctatttgaggggagggtggggggagggtgagtgttgaaaagctatctatcagtcgccatgctcactgcctgcgtgatgggatcactcatacagcaaacctcagtgacatgcaatttgcccatgtaacaaacctgaacatgtactccctaaaactaaaatgagttgaaaaaaaatttaagatagttctgagaaattcccagcaaacctttggcttgcttgttgggtttgtgagtctacacccactttcttttttacctctttta

SEQ ID NO: 894350 - DNA, 548 bp, Homo sapiens
ggtctgtggattcagctaacactggatggaaaatatttggaaaagagaaaattccaaaaaccaaaacttggatttgccttgtatcaaatactatatatatttatatttatatagtatatatatttatatttatatattatatatatttatatttatatattwtatatatatatatatatatatattttttttttttttttttttttctgagatggtgtctcactctgtcacccaggctggagtacagtggtgtgatctcagctcaccgcaacctccgcctcctggaatcaagcgattttcccacctcagcctcccgagtagctgggattacaggcacatgccaccacgcctggctaatttttgtatttttagtagagacagggtttcgccatgttgggcaggctggtctcgaactcctgacttcaggagatccaattggcctacctcggcttctcaaagtgctgaaattacagatgtgagccaccatgcccagcctcaaatactgctttgaatccatatgaagaaagtaatatgtaggcattgtgtta

SEQ ID NO: 894351 - DNA, 594 bp, Homo sapiens
tccatttgtgcaagaaagccagcagggttgttttaaatttacattttagaccatggagttttcttttatgtttcttcccacgtggcatcaacactccttatcgcttgtctggaaagacttgaggattaactgctaataaattacattatctccaaagtaaatttaagtgtagtcatggattctaagtctcrtttctctgctttcaaattgtttacatattggttgtctgaactttgtaatcccattcgaattttaaaaagtgattttcatgatttattacaatgactgcattttaaatacatcctagaactcaagaccgcagagaaagttatacaacctggagtttctcaggctcttcaacatctgaaatgtttaacatgagagagattgtacacatcaggatctcttatccctgataaaatcttagaatgtctactctttacatatagcacaaactaaaaaaaagactaaatcaatcccattaaagagtgattttaataaataggttggtgcaaaagtggttgcgatttttgccattactttaaaaaacaaaacaaacaaacaaacaaacaaaaaaaaaatgacaaaaaccgc

SEQ ID NO: 894352 - DNA, 594 bp, Homo sapiens
tccatttgtgcaagaaagccagcagggttgttttaaatttacattttagaccatggagttttcttttatgtttcttcccacgtggcatcaacactccttatcgcttgtctggaaagacttgaggattaactgctaataaattacattatctccaaagtaaatttaagtgtagtcatggattctaagtctcgtttctctgctttcawattgtttacatattggttgtctgaactttgtaatcccattcgaattttaaaaagtgattttcatgatttattacaatgactgcattttaaatacatcctagaactcaagaccgcagagaaagttatacaacctggagtttctcaggctcttcaacatctgaaatgtttaacatgagagagattgtacacatcaggatctcttatccctgataaaatcttagaatgtctactctttacatatagcacaaactaaaaaaaagactaaatcaatcccattaaagagtgattttaataaataggttggtgcaaaagtggttgcgatttttgccattactttaaaaaacaaaacaaacaaacaaacaaacaaaaaaaaaatgacaaaaaccgc

SEQ ID NO: 894353 - DNA, 618 bp, Homo sapiens
gcaaacaaagcaaagtccataatatcatgatgcttactttctggtgtggacatggagatgggaggcaaacacagaaatgcatgaataaaataccttgtccaagacggtaagagtaacagagaaaagtgaaaaggggaaaggagagaagagaactgaagtgcagtgtggctgcattttatatgagtaatcagcaagcttaagtgataaggtagcattgaataaaggccagaggaaaggaaggagtgacccrtgaggatctctgaagaacattctggtagagggaatggtttatggaaacaaacaaacaaaactacaataaacaaaaacttgtttttctctaatcatggtatatatatatatatatatatatgtagattagcatgctttagaaatttacttttctttaaataatatataactggatataaaacaaagtgaagattttactaacattaggtttggttaatcatacctatagtaaccctcaaagtaaaacacacactctattgccctccttatcccagcatgatacttacaagaacagaaaatagtccaatgcatgttaacatttgaaactaaaacctaaaaaagaatgataaatgatataatactcttccc

SEQ ID NO: 894354 - DNA, 618 bp, Homo sapiens
gcaaacaaagcaaagtccataatatcatgatgcttactttctggtgtggacatggagatgggaggcaaacacagaaatgcatgaataaaataccttgtccaagacggtaagagtaacagagaaaagtgaaaaggggaaaggagagaagagaactgaagtgcagtgtggctgcattttatatgagtaatcagcaagcttaagtgataaggtagcattgaataaaggccagaggaaaggaaggagtgacccatgaggatctctgaagaacattctggtagagggaatggtttatggaaacaaacaarcaaaactacaataaacaaaaacttgtttttctctaatcatggtatatatatatatatatatatatgtagattagcatgctttagaaatttacttttctttaaataatatataactggatataaaacaaagtgaagattttactaacattaggtttggttaatcatacctatagtaaccctcaaagtaaaacacacactctattgccctccttatcccagcatgatacttacaagaacagaaaatagtccaatgcatgttaacatttgaaactaaaacctaaaaaagaatgataaatgatataatactcttccc

SEQ ID NO: 894355 - DNA, 586 bp, Homo sapiens
gttgccttgagcaagtctcatgtttctttctcccgcttacgcagtcaagcacatacatagatacgtaataaatattgattaaggttctgtattaggctgtgtttttatcagtaaggattaataggcataaatgagagacatgatccctaccctggagcctaaatggcatgtgttataaagacgctttcaggctgaccagttcttctagtgcagctgagaagacagccatgcctcctcattagcccactttatagggaagaaatggagactcaaagtatctaaatcacttgtctgagataaaacagagaacccagagacagagctgggactccactcagatctttgactactgaagccaaagaygcctaatcaataaaacactgaattattctcagtgatgctattggataattatttacgtttaggttttatatttgtgtttttctgcttaggaggtaagaaacgtgtcaggaacattaatgccatacttaagaactgacatttaactactgaattctgttttactgcggcaatattgtgaattatgcaattacactgtaccttggattagaagttatttaactcc

SEQ ID NO: 894356 - DNA, 629 bp, Homo sapiens
agaaacatgcccggcctgtcagagtcagaacatatcaacagtttatttctcaattgcatggtgcctggtgactctgtgctgactcttctgctagtagctacacttggcttgtaaattctctaccatcaggggaagagaaagaggaggcacacaagcttttaactgacttgttccagaagrtacacacaacacttccacacacagaacatctactgaaagtctgttgatcagcaggagacacagtcctgacggttaacttcaaagaggtctggggaatgttgcagaaggccatggcctattagataatctctgtcacattcagaaagcaataaagttctttgttcaaacgactaagacctccacaaacaatgattcaaattcactttctatcactcaccagcaaataatcagacatgtggaaatgaccattacggaattcaaagctagaagtgatgcagaaagctcctctccttagaggggcagcttgagactttattttcctcaatttgatgtattctgattcatcaggtgatagctggaagcttcgagtcttatacctcagcctgtctaacccttgtttgggatagtgatgtactctctttcgggtatcctctgttctgtttagtttc

SEQ ID NO: 894357 - DNA, 561 bp, Homo sapiens
tttgaaaaactcatcccagcaaaagcccatcattgacactccattctagagtacaaatttgttctagcaaaaactttcaaataaaattgatttctgtggtgttgcccacatgcaaatgcttattctaaactgtggctttgagcatatttgcgtagttgttttagcttttggtgttgctrtaatgtttgttccactgtgttttcactcactgaagaataatacacatgatctttcttagggctgatttttcctacctaaagtatatgttgaaattcaatttcatgttaaacttttggagttaattttaagtaaatctaaaactgacttgtggtgatgggtgagatgggcatcaggaagtagaataacatcgaaaatttatcaacacaattaatgtatacctttaagggcctagaatagtaatataaagaggcgtattcaggttggttaatatgattaatttttttgtatttcgaaatagaaaagagatgagctctatatttttttgatttttaactttgttctatttcattattttcttaaagacagctgttctggaagagg

SEQ ID NO: 894358 - DNA, 658 bp, Homo sapiens
taaaatggcttaggagttcatgattagaatgtataaagaaaataaggcaacttcgagcttatactacattctactaaatgataacaaacttttggaattactatttgttctatatcagatagagttttacatgttataaaacaaaaaaaagttgatcaattttaaaacaatctttctatttatggttaagttatatcatgacaaattccttctaatgcagagctttctgattttcttagaaaatatgttccaaggttttaatgccaaaacagcragtaaataatactccttaagcagtcaactggcacacaactaccaatccatcaagagttacagcaaaaggaagtagaataagccttggtatttataaaagaaagagcaatcaactcggagagtaactagatctggctctttcactaattgaagctgcagaacaaggaccaagtcatttgacactaaaattaccgccctcacaaatgcaactccaaggtcacatctctattttttttttctttaagttgaggtcggacagggtggcagagacattagtacttgttcatttttagttttcatttattgtgcatttgaaggttatacttctctgtctccttttagttaggtggagctgaagtgatgtgtgtcacatccaggaagagcc

SEQ ID NO: 894359 - DNA, 484 bp, Homo sapiens
gtggagctgaagtgatgtgtgtcacatccaggaagagccatttaattgcttatgtgagactctagcaatctcttggaaattgtagaggaagatcatgttacaagggagttgccacaagattgaaacattcttgatttctaggtcaccaaatggaaacaagttgtcctggatagtcactgcgattcacagtaaactttctatgaacaggaaacaaactgtaaakggattaagtcactcagattgtgttctgttttgctactacagcatgatttaggttatcctgatgaattcagatattggaactagagttagtatgacactataaaaaaaatttgaaacgtaaggcactgacttagttgttgggcaatgttcagcttctaggaatatggcatgagaggctataagtaagacaaaggactgcattagttacggcacagcaagcaccattgttttggctctttttgtaccccgaattcaatggagg

SEQ ID NO: 894360 - DNA, 615 bp, Homo sapiens
tcaatggaaaggtgcttttattgagtacaaaataaggtcatattccatttctgctctcatttctcagcccgctctttcctagtatgtaaaataacttacagagttgcttggaacattaaacaaaataatgtcatatggcaagcactcartaataacattatgattacttgtcctgagaagctggtcatatgttgtgtgtatgtttgagaatggtgattgcgaaattgaagaaaccattttacttggagggacctgtggggaatgtgggcagccttaagcatagatctgaaatcactcaagggaaaacattccttctactttggcactctggcagcaacagctgctgtggtaagcactgaggtcctggaagcaacaaggctgaagtggccgtgaggagtagacaggagtgggatgaagaacaccttgagcttccagggagtttctggggagagaaagaatgaatgattttaagtcccaaagtagggccttgagagcagcataacatggtgctgagctgatagactctgaagttcagcaggatcagtactaattgtgtggccttggacaagttatttaaccttttgaaatctgttatcttgtctgtaatgtaacgag

SEQ ID NO: 894361 - DNA, 659 bp, Homo sapiens
aactatctttgccccttcagcatgtgttctgaaggtagagggattgaagtactctaggtgggctccagacttaaatgaacaaatgatatgcatgtcatctctgatactctgcaaaacttgtgattccatgatcctatgagctgtatgcctttacagtctcttggtgatcactaaaagggaccaactctttttttttttttttttttttgagayggagtctcactcagtcgcccaggctggagtgcagtggctcgatctcgctcactgtaagctccgcctcctgggttcacaccattctcctgcctcagtctcccgagtagctgggattacaggcacccaccaccacgcccagctaattttttgtattttttttttagtagagacagggtttcaccatgttagccaggaccaactctttatttaacactttgagagtgaatattggaagtttttgtatatacaattttattttgggttgcctgagacacatctcagtgcttctaatgaagacaagaacttgaatgaatgtaccatgaaaactgaggactattgaacaacagatgtgaaattgcaaggtgtattaatttgcattgtgtgacgatcacacagatgtgtttcttgtttatattcagtccattaagatctgtttagttaattta

SEQ ID NO: 894362 - DNA, 612 bp, Homo sapiens
gtcataatttattgtgcaaaggccagacagaaactcaagggaggtctcttttgcctcaatgttaatttctaacaaatgcaataaacatttcaaattttgaaggaggcaaacaaaattctgtttctttgtatttctcccaccacaaaatttcaaggttgacttgaagtcatacaaggttagtaattttctgagtgtttttttttttcctattttcttaagcatttgctatatagtgaaataacttccaaagaacaggatgttctccacagctaaagaactgctctagctaggcaaatactcatatcgtcaattaccattttaaaatatctcagagaacactctttgaagtaatccttcctcaaatcctatttgaaactggattcgtataatgggtaagtgggtaaacattttgtggaatkaaatgaatgaaggggaaaatgaattttgtcacgtataaagttgttatctttaaaggaatgcctgagtgttacttcttctcaaaattctgggaaaaccagatagagtattgttaaccaagtaattcctaactcatggtttgaaagtctgtgagggtttatgagaattagggttaagtgaagaaaggcactgaaa

SEQ ID NO: 894363 - DNA, 604 bp, Homo sapiens
ttcccatgtaattaaaatgccctctgggtcaatagaatcaaatatttaaaccaattaatgaaataaataattatacacatctatcactgtatacagtaaaataaatattatttgcattgttctttagtcagtgaacaacgacctcctcttttcttgagttgatatgaaagttgcaaggtcgacagttaactcattaaagaaaaaaaatcatagagattaagataagggataattatatagttttatgtgtatttacctgaaatgttgttaaatattaactactcttctacgcttttttttttttttttgagacggagtcttattctccctcccagtctrgagtgcagtggcgccatcttggctcactgcaagctccacctcccgggttcatgccattctcctacctcagcctcccaagtagctgggactacaggcacctaccaccatgcctggctaattttttgtatttttagtagagagggggtttcaccgtgttagccaggatggtctcgatctcttgacctcgtgatccgcccacctcagcctcccaaagtgctgagattacaggtgtgagccagcatgcccggcactcttctactcttac

SEQ ID NO: 894364 - DNA, 604 bp, Homo sapiens
ttcccatgtaattaaaatgccctctgggtcaatagaatcaaatatttaaaccaattaatgaaataaataattatacacatctatcactgtatacagtaaaataaatattatttgcattgttctttagtcagtgaacaacgacctcctcttttcttgagttgatatgaaagttgcaaggtcgacagttaactcattaaagaaaaaaaatcatagagattaagataagggataattatatagttttatgtgtatttacctgaaatgttgttaaatattaactactcttctacgcttttttttttttttttgagacggagtcttattctccctcccagtctggagtgcagtggcgccatcttggctcactgcaagctccacctcccgggttcatgccattctcctacctcagcctcccaagtagctgggactacaggyacctaccaccatgcctggctaattttttgtatttttagtagagagggggtttcaccgtgttagccaggatggtctcgatctcttgacctcgtgatccgcccacctcagcctcccaaagtgctgagattacaggtgtgagccagcatgcccggcactcttctactcttac

SEQ ID NO: 894365 - DNA, 654 bp, Homo sapiens
caattattagtgattgagtcctctgagttctatcttcaaaaatatttataatgtagccaaacaattctgatctcttatgtggaagataaaatagtagagcctgtcaactagtctcagtatgttcactctcaacacaatctgtctagtcaattccctgttaagtcttttcccttcagtagatacaacaatcaaaggagcttgaatatcaggtcttgttagaatccttcctaaaattctgcaatgactgttcaaggtactttggctaaatctaggggcatttttttttctatagcccaaattataaacttctgccttccttttaaaatatttctcctgttctcaaaatccttctttcagtttctgggaatggccagctctctcctatcacagggcctttgcacagacccctgttcctagaacacttttcaccttacctgmcttttgctcagatataaaatatcagcttacattcaattattttttaccatttgctttagatatcaacttacacttcacctcttgtgaaacattttctctcactccatgatttacactaggttccatctcaaaacacatccttattatttgtttcttcataggtttataacattttggaattatttattgccggttcacttttatattcctttctct

SEQ ID NO: 894366 - DNA, 500 bp, Homo sapiens
tactcaagatgcaaaccatacacatgtgcctcaccaagtgagccagctgggtgtctccctccagcaggccagaagcagggccaagtgtgtaccaaccagcagttgcttttagtaatgtggggtggaatttgaactgaatttctacagtccttcaatatatgcactggaataattaaaaagatgtaaataacagctatcagaatggtgccagactcttcactccactgtcctgcaactgtcctcccctgttcatcaccagaatagtttcctgtgggtctctgttttcccaagcaggactttcagatttggaagaaagaatgcattcagactgacttgcttagrtacatttgctccagagttcacagggactaatggatgtgtataccagctgaagaagatcacaattagagtgcagtttttttaagctgaaaagactagatttatttataaaatgaagtgaaagtcattattaggaaagtcatcattggaaagtcattgtc

SEQ ID NO: 894367 - DNA, 594 bp, Homo sapiens
catgaactgtccttggctttttctgtacctcaaatctaccatgatgctaacaagttttcctctgctattttgttgttattttcagtgacgttcaccagacatggcctgactgctatctcttttcttctatccatatccaagattctcgattgacctgtgaattgactgctcttgagttaatgctgaatcctggtccaagtggttgcttttagagggaagtcagatcacgaggggcagcatctctgctgagagggctcccttctatataaaactctctgaccagccagtgttccttaaacagaggagcaaacatgtaagctgatatgcacygtctcctctttttatcaatgagggctttcaggtactttttcacgcatcttaaaaatccaggactgtatctggcacttgaaaagttccaaccaagtcaggtaattttctatctttttatactaattttactaggtaattaactacaacacacatatatatttaaaaatatgtttatcgtaaataacaattactatgtattatggaatattcgtttttcacacttatttaatacatcagtttatatacatttcttcatggtctaca

SEQ ID NO: 894368 - DNA, 613 bp, Homo sapiens
gaaccctttatcattatataatacccttctttgtcttatttttctgttgttggtttaaagcctgtttaatctgaaataagagtggctactcctgctcacttttgttttctgtttatatatcttttttcttctaatttactttgagtctgcagctgcctttagccagtaagtgagcctcttacatgcagcagatggttgagttctggaatttttgtttgttttctttgttttgtcttcttttgttttgttttttacagtttccactctatgtttttagagtagagcattcaagtcatttatattcaaggataatgttgataggtgagattttatgtttatcatagtgttgttagctagttgccttgtggtttcattgtgtagttgctttatgttatctgtgagctttgtatttctgtcawcttttatgatggtgtgggtcattctttcatttccatgtgtagactgcacatttgttggtggtctggtctagtggtgacaaattcccttggtgtttctttgtcggggaaaggttatatttctccttaatttatgaagcttagtttggcagaacacaaaattcctggctggcttttttgtttctttaagtgggcta

SEQ ID NO: 894369 - DNA, 613 bp, Homo sapiens
gaaccctttatcattatataatacccttctttgtcttatttttctgttgttggtttaaagcctgtttaatctgaaataagagtggctactcctgctcacttttgttttctgtttatatatcttttttcttctaatttactttgagtctgcagctgcctttagccagtaagtgagcctcttacatgcagcagatggttgagttctggaatttttgtttgttttctttgttttgtcttcttttgttttgttttttacagtttccactctatgtttttagagtagagcattcaagtcatttatattcaaggataatgttgataggtgagattttatgtttatcatagtgttgttagctagttgccttgtggtttcattgtgtagttgctttatgttatctgtgagctttgtatttctgtcatcttttatgatggtgtgggtcattctttcatttccatgtgtagactgcacayttgttggtggtctggtctagtggtgacaaattcccttggtgtttctttgtcggggaaaggttatatttctccttaatttatgaagcttagtttggcagaacacaaaattcctggctggcttttttgtttctttaagtgggcta

SEQ ID NO: 894370 - DNA, 593 bp, Homo sapiens
cagcttatttttttgtatttttagtagagacggggtttcaccgtgttagccaggatggtcttgatctcctgacctcatgatccacccgccgtggcctcccaaagtgctgagattacaggcgtgagccaccgagcccggccttaacagacttcttaatagacccttaatattaagaaaaacttaatagagcytctttagatttgttattagaatactgaattcattggaagaaattctagcattgttcttttgattgtgtgttttctggaaagaactttacttccacagtagttaaaataacatacagatgaagaatatatatgcttgttaatcttatgtgttgtgtatgtgtgtgttgtgtgtgtgtttggttcttttgtgctgtgatttgttttaaaagaatttcagtacaatcagagaataacaatcttagaagacatattacagttcacataattaaacctctcactgttggaggttcttgcacagatgttgtaaaaaataaaaacaaaaacaaaaaatgaaacatctttgtcagatgaaaagtgccattgctagtctttcttcagtaatgttactaaataaatgtcagg

SEQ ID NO: 894371 - DNA, 593 bp, Homo sapiens
cagcttatttttttgtatttttagtagagacggggtttcaccgtgttagccaggatggtcttgatctcctgacctcatgatccacccgccgtggcctcccaaagtgctgagattacaggcgtgagccaccgagcccggccttaacagacttcttaatagacccttaatattaagaaaaacttaatagagcctctttagatttgttattagaatactgaattcattggaagaaattctagcattgttcttttgattgtgtgttttctggaaagaactttacttccacagtagttaaaataacatacagatgaagaatatatatgcttgttaatcttatgtgttgtgtatgtgtgtgttgtgtgtgtgtttggttcttttgtgctgtgatttgttttaaaagaatttcagtacaatcagagaataacaatcttagaagacatattacagttcmcataattaaacctctcactgttggaggttcttgcacagatgttgtaaaaaataaaaacaaaaacaaaaaatgaaacatctttgtcagatgaaaagtgccattgctagtctttcttcagtaatgttactaaataaatgtcagg

SEQ ID NO: 894372 - DNA, 600 bp, Homo sapiens
tgaatttactatacatctacttaaatctttttgattcctttttttatgtgtcaatataaagtttatttaccaactcaagttttgaaatcactaagctatttatcatgtttgaacactgtgtgtatgtgtgtttgtgcacacacacacacctatgaacaatcaatagcactgcatttctcgctatttatatgtttataattttataaatttgattgggcagtttgcttttttcaatcaacattgatctatccttctacttattagtaatgtaacatacatacatgcatatggttcacgcattttaactatagtagcttattatcttatacattgggtcttattttcaagctgtgtgctggtaaatatttatggaaattttcctatggtgcacatcaagaatcagaattctgagcatttgcaggtgggtgcaggtagcctcagctactctggakgctgaggcaggaggatcacttgagccccgaagttcaaggctgtagtgtgccatgatcacacccgtgaatggcctttccattccagcctggtcaacacggcaagaccgcttctcaattcaaaaaagagagtcatttgaactaaacattg

SEQ ID NO: 894373 - DNA, 763 bp, Homo sapiens
agatccttttacacccctcccactgaaagcaagtggtctatgttccttctttttgaatctgggaaattccataatggattatgggagaatggaggctgtgccaagtttcaggtttagtctttaaaagattgtcagtttctagtgggttctgtttgttggaatactagtttttgaaaaccagttatcaggctgtggaaagttcaagtgatgtgaagaaaccacatgtagacaatttggacattatttccagctaaactcccagccaaagcccacatcaactgccaggcaactgattgtgctatgctgggacatccaacccaattccagctgtcatctgatagcagctacacacaagaatccgtgagaatgcccatcagaggctactcaacccattagactgtgagagataaaaataaatcattgtcttgtgtcacaagataagggcataaaattgacatggtataaattattatattaaatactcaacagtaggagtttattgataatcaaagtggtttttactttacttattaacacttttatactattattgcagcttattttgagagaaatgtcagtgtattctgagctgtctttttatgttttgtttatatttgctttgatgyacatacatagtgaagttattagcacaaagatgtgttaattaaagataattaacatatctattatctcacatagttatccaatctattgaggacaaagtttttgtctaatttttaaattcatttttttatatcactat

SEQ ID NO: 894374 - DNA, 608 bp, Homo sapiens
tacctttgctcattataatacctggtacatcatgttataattaagattgtgtcactctttccattataaatcactattttaaagactcataaagcagctgtaaaaatgagctccaggctcaacttggcatgtaaaatattaacccaagagaatttatgttttttatttttattttacttttgtacaaaactgtctttcaggccttcttaaaataaagcaaaatttcaagtagattttttctttcaggtgcctttttggcacttcataaatcaaaaccagtcttgcttgttaaaaaccaaatcttgcaagcacttggtgaattaggagaggtaatcattttgagtgcttcaaatgactcttttaaaagtgycttaaatattttaaacattacatgtgatcactaaatatctgaagagttttataagccacctaccaggaaaatttttgcttctttcctttccagatggcattaaaaacattaatgatgccaaagtatagtgtaagacactttgctattattggtgtgattcactatttcagaatttagtttccataagacagctccctatggcaagccattccagcctaataatccccttgtgtaatat

SEQ ID NO: 894375 - DNA, 608 bp, Homo sapiens
ctcctgcctcagcctcctgagtagctgggattacatgcacctaccaccatgcctggctaattttttttgttgttgttttttgtatttgtagtagagacagggtttcaccatgttggccaggctggtcttaatcttctcacctcaagtgatctgcctgcctcagcctcccaaagtgctgggattacaggtgtgagccactgcgcccagccaggggatggatattctcaaagtccagacatcaccaccacacaattcatacatgtaaccaaaaaacatttgtatacctgatggtattataataaaaagactaataakaaaatgttggtaaagatttatttgacttttagatagagatctttatttaaaacacaaagtctgaaaagatataattaatcaagactgaaaaaagacagaaggatgattgtataaaaaatcctacttcataaaaatatggttgaataatcacaaagaggtacagatacatacttactagacagttaaagatatagagccaccgttttcttatacattgccaacgaagtataattggttcaactttggaacatattttgacattatctactaaggaaaaagatatacagttctta

SEQ ID NO: 894376 - DNA, 608 bp, Homo sapiens
ctcctgcctcagcctcctgagtagctgggattacatgcacctaccaccatgcctggctaattttttttgttgttgttttttgtatttgtagtagagacagggtttcaccatgttggccaggctggtcttaatcttctcacctcaagtgatctgcctgcctcagcctcccaaagtgctgggattacaggtgtgagccactgcgcccagccaggggatggatattctcaaagtccagacatcaccaccacacaattcatacatgtaaccaaaaaacatttgtatacctgatggtattataataaaaagactaataagaaaatgttggtaaagatttatttgacttttakatagagatctttatttaaaacacaaagtctgaaaagatataattaatcaagactgaaaaaagacagaaggatgattgtataaaaaatcctacttcataaaaatatggttgaataatcacaaagaggtacagatacatacttactagacagttaaagatatagagccaccgttttcttatacattgccaacgaagtataattggttcaactttggaacatattttgacattatctactaaggaaaaagatatacagttctta

SEQ ID NO: 894377 - DNA, 609 bp, Homo sapiens
ttcccatgtaattaaaatgccctctgggtcaatagaatcaaatatttaaaccaattaatgaaataaataattatacacatctatcactgtatacagtaaaataaatattatttgcattgttctttagtcagtgaacaacgacctcctcttttcttgagttgatatgaaagttgcaaggtcgacagttaactcattaaagaaaaaaaatcatagagattaagataagggataattatatagttttatgtgtatttacctgaaatgttgttaaatattaactactcttctacgcttttttttttttttttgagacggagtcttattctccctcccagtctrgagtgcagtggcgccatcttggctcactgcaagctccacctcccgggttcatgccattctcctacctcagcctcccaagtagctgggactacaggcacctaccaccatgcctggctaattttttgtatttttagtagagagggggtttcaccgtgttagccaggatggtctcgatctcttgacctcgtgatccgcccacctcagcctcccaaagtgctgagattacaggtgtgagccagcatgcccggcactcttctactcttacattaa

SEQ ID NO: 894378 - DNA, 609 bp, Homo sapiens
ttcccatgtaattaaaatgccctctgggtcaatagaatcaaatatttaaaccaattaatgaaataaataattatacacatctatcactgtatacagtaaaataaatattatttgcattgttctttagtcagtgaacaacgacctcctcttttcttgagttgatatgaaagttgcaaggtcgacagttaactcattaaagaaaaaaaatcatagagattaagataagggataattatatagttttatgtgtatttacctgaaatgttgttaaatattaactactcttctacgcttttttttttttttttgagacggagtcttattctccctcccagtctggagtgcagtggcgccatcttggctcactgcaagctccacctcccgggttcatgccattctcctacctcagcctcccaagtagctgggactacaggyacctaccaccatgcctggctaattttttgtatttttagtagagagggggtttcaccgtgttagccaggatggtctcgatctcttgacctcgtgatccgcccacctcagcctcccaaagtgctgagattacaggtgtgagccagcatgcccggcactcttctactcttacattaa

SEQ ID NO: 894379 - DNA, 640 bp, Homo sapiens
ccttgaaaaaaaaaaaaaaatccctccttaacccctgtaggtactgcttctcctactagatctgtttctttgattgaatcatcccgacccagtaggttctgtctctttctgtctctaagttacctattgcctggcacattgttttaaagtaacaagcttgggcaaattagtgatttgtcacaatttgtacttacagctcttttatatgccctctaaacactatcaactttaatttctttttataccacatcttttgttctataacaaatttccataaattcttgctgagatattagttggacatgtaacagacaacagataggatgttaactaaaagaatgtcaatgtcaccaagaaactgaacaagagccaagtttctaaggaatgcaaacaamatgggcagatgacaagtgacgggtctaatatttttatattagccattatttttgcacagactcaataaagaattaattaaatacccctttggaaccagggccatttcagtgagttacagcacttgaaactaaaattgaacattttaaaatgaacatgtcccatgaggtaaacattctctactgaaatatggtcagctactatgaaaacctaatgatttatcttttgagacccataattaaataat

SEQ ID NO: 894380 - DNA, 617 bp, Homo sapiens
catgaggtaaacattctctactgaaatatggtcagctactatgaaaacctaatgatttatcttttgagacccataattaaataataagtctcaaaccaatagtattgagataaacaaatatttataaattctgggtcattgaatgatagaagacatagtatcttaaatttagctgactgatttaacgtgatcaagccatttgtaagtggataccaatattaatgaatatcttttattaaaccctaatactacttttgtttatttaatatatatatttcttaagtatatgtagctgtttattttatatatatatttattaagtatatgtagctatacatttaatatatatacatatactttaatatatataatttagaaatcmtatctttatatctatacctatatctcccatgaagttgaattaatctcagaaaactgaggcaacatctgtatttgtcagtatgaattcctgtatgctacagtaacaaacagttccccgtatatcaggcagaagttagtattttgctcatgccacataccccatgcgcattagcagctgcctctgctcacacagggcacacattagcagctccagtctgcttgatggaggctctacc

SEQ ID NO: 894381 - DNA, 630 bp, Homo sapiens
atcttttgagacccataattaaataataagtctcaaaccaatagtattgagataaacaaatatttataaattctgggtcattgaatgatagaagacatagtatcttaaatttagctgactgatttaacgtgatcaagccatttgtaagtggataccaatattaatgaatatcttttattaaaccctaatactacttttgtttatttaatatatatatttcttaagtatatgtagctgtttattttatatatatatttattaagtatatgtagctatacatttaatatatatacatatactttaatatatataatttagaaatcatatctttatatctatacctatatctcccatgaagttgaattaatctcagaaaactgaggcaacatctgtatttgtcagtatgaattcctgtatgctacagtaacaaacagttccccgtayatcaggcagaagttagtattttgctcatgccacataccccatgcgcattagcagctgcctctgctcacacagggcacacattagcagctccagtctgcttgatggaggctctaccacctcaatcacaaggtttcatggttgtgtgctgcctcatagctcatcatcttgtaactataccatcttcaa

SEQ ID NO: 894382 - DNA, 662 bp, Homo sapiens
tgctctgaatggagctttatgcttgaacagttatgttctctgtctctcttttgaagaattttttttttttttttgagacggagtctcgctctgttgcccaggctggagtgcagtggcgtgatcttggctcactgcaaactccgcttcccgggttcacgccattctcctgcctcagcctcccgagtagctgggactacaggcgcccaccaccacgcccggctaatttttttgtatttttagtagagacggggtttcaccgtgttagccaggatggtctcgatctcctgacctcatgatccacccacctcggcctcccaaagtgctgggattacaagcatgagccaccgcgcccggccaggatatcttattagtacagccacccyaccttctcatataaagcatcattaactcaggctcttgttagtttccttcatattacttctcaattaatatttatttatttgcttctgtggttattgcctatttcatccatttgaatttaactttcaagcgggcagggatcttttctgtttttgtaccatttttcccagcacctaacactgtgtggcacacaatgggagttcaataaatcatctgttaatgaagtgattattataattattgatgtaactttatgcagggcttcttggtgagctgaccca

SEQ ID NO: 894383 - DNA, 662 bp, Homo sapiens
tgctctgaatggagctttatgcttgaacagttatgttctctgtctctcttttgaagaattttttttttttttttgagacggagtctcgctctgttgcccaggctggagtgcagtggcgtgatcttggctcactgcaaactccgcttcccgggttcacgccattctcctgcctcagcctcccgagtagctgggactacaggcgcccaccaccacgcccggctaatttttttgtatttttagtagagacggggtttcaccgtgttagccaggatggtctcgatctcctgacctcatgatccacccacctcggcctcccaaagtgctgggattacaagcatgagccaccgcgcccggccaggatatcttattagtacagccaccccaccttctcatataaagcatcattaactcaggcycttgttagtttccttcatattacttctcaattaatatttatttatttgcttctgtggttattgcctatttcatccatttgaatttaactttcaagcgggcagggatcttttctgtttttgtaccatttttcccagcacctaacactgtgtggcacacaatgggagttcaataaatcatctgttaatgaagtgattattataattattgatgtaactttatgcagggcttcttggtgagctgaccca

SEQ ID NO: 894384 - DNA, 609 bp, Homo sapiens
ctcctgcctcagcctcctgagtagctgggattacatgcacctaccaccatgcctggctaattttttttgttgttgttttttgtatttgtagtagagacagggtttcaccatgttggccaggctggtcttaatcttctcacctcaagtgatctgcctgcctcagcctcccaaagtgctgggattacaggtgtgagccactgcgcccagccaggggatggatattctcaaagtccagacatcaccaccacacaattcatacatgtaaccaaaaaacatttgtatacctgatggtattataataaaaagactaataakaaaatgttggtaaagatttatttgacttttagatagagatctttatttaaaacacaaagtctgaaaagatataattaatcaagactgaaaaaagacagaaggatgattgtataaaaaatcctacttcataaaaatatggttgaataatcacaaagaggtacagatacatacttactagacagttaaagatatagagccaccgttttcttatacattgccaacgaagtataattggttcaactttggaacatattttgacattatctactaaggaaaaagatatacagttcttag

SEQ ID NO: 894385 - DNA, 609 bp, Homo sapiens
ctcctgcctcagcctcctgagtagctgggattacatgcacctaccaccatgcctggctaattttttttgttgttgttttttgtatttgtagtagagacagggtttcaccatgttggccaggctggtcttaatcttctcacctcaagtgatctgcctgcctcagcctcccaaagtgctgggattacaggtgtgagccactgcgcccagccaggggatggatattctcaaagtccagacatcaccaccacacaattcatacatgtaaccaaaaaacatttgtatacctgatggtattataataaaaagactaataagaaaatgttggtaaagatttatttgacttttakatagagatctttatttaaaacacaaagtctgaaaagatataattaatcaagactgaaaaaagacagaaggatgattgtataaaaaatcctacttcataaaaatatggttgaataatcacaaagaggtacagatacatacttactagacagttaaagatatagagccaccgttttcttatacattgccaacgaagtataattggttcaactttggaacatattttgacattatctactaaggaaaaagatatacagttcttag

SEQ ID NO: 894386 - DNA, 750 bp, Homo sapiens
cccctcccactgaaagcaagtggtctatgttccttctttttgaatctgggaaattccataatggattatgggagaatggaggctgtgccaagtttcaggtttagtctttaaaagattgtcagtttctagtgggttctgtttgttggaatactagtttttgaaaaccagttatcaggctgtggaaagttcaagtgatgtgaagaaaccacatgtagacaatttggacattatttccagctaaactcccagccaaagcccacatcaactgccaggcaactgattgtgctatgctgggacatccaacccaattccagctgtcatctgatagcagctacacacaagaatccgtgagaatgcccatcagaggctactcaacccattagactgtgagagataaaaataaatcattgtcttgtgtcacaagataagggcataaaattgacatggtataaattattatattaaatactcaacagtaggagtttattgataatcaaagtggtttttactttacttattaacacttttatactattattgcagcttattttgagagaaatgtcagtgtattctgagctgtctttttatgttttgtttatatttgctttgatgyacatacatagtgaagttattagcacaaagatgtgttaattaaagataattaacatatctattatctcacatagttatccaatctattgaggacaaagtttttgtctaatttttaaattcatttttttatatcactat

SEQ ID NO: 894387 - DNA, 609 bp, Homo sapiens
tacctttgctcattataatacctggtacatcatgttataattaagattgtgtcactctttccattataaatcactattttaaagactcataaagcagctgtaaaaatgagctccaggctcaacttggcatgtaaaatattaacccaagagaatttatgttttttatttttattttacttttgtacaaaactgtctttcaggccttcttaaaataaagcaaaatttcaagtagattttttctttcaggtgcctttttggcacttcataaatcaaaaccagtcttgcttgttaaaaaccaaatcttgcaagcacttggtgaattaggagaggtaatcattttgagtgcttcaaatgactcttttaaaagtgycttaaatattttaaacattacatgtgatcactaaatatctgaagagttttataagccacctaccaggaaaatttttgcttctttcctttccagatggcattaaaaacattaatgatgccaaagtatagtgtaagacactttgctattattggtgtgattcactatttcagaatttagtttccataagacagctccctatggcaagccattccagcctaataatccccttgtgtaatatt

SEQ ID NO: 894388 - DNA, 549 bp, Homo sapiens
ttcaacctacatttttctttaaaataaaacatactatttttagatagcagaaaacttggtgttgtttttcaattcgttctgaaaatacgaattttacttggattaattcattaacaattaatgtaactactgatatggttatgttgtgggtggtttcctaygttttctgcttttttctctgtcttaacttggttcttttttcttttttcttttcttttcttcttcttttttttttttgatggagttttgctctgtctcctaggctggagtgcaatggcaagatctcggctcacagcaaccttcacatcccgggttcaagtgattctcctgcctcagcctcccgagtagctgggattacaggcacatgccaccatgtccggctaattttttgtatctttagtacagacggggtttcaccatgttggccaggctggtctcaaattcctgacctcgtgatccgcccgcctcggcctcccaaggtgctgggattacaggtgtaagccaccacgcctggccagaaaaacatccttttcatctactcagatagtt

SEQ ID NO: 894389 - DNA, 632 bp, Homo sapiens
agtaaataggaacccacagaattggagaaaatattcaaaactatgcacctgcaaatgtctaatatccagaatctacaagcaactaaaaaaaaaacaagcaaaaaacaaataactttattaaacaataggcaaaggatatgaatagacacttctcaaaagatgacatacaagtggccactaacatatgaaaaaatgccccacatctctattcatcagggaaatgcaaatcaaaaccacaatgagatgccatgtcaaccagtcagaatagttattattaaaaactaaaatatgacaaatgctagttaggttgtagagaaaaatgaacatttatacattgttggtggaaatgtaagctaattcagccactgtggaaagcagtttggagatttcttaaagaacttaaaacatccatttgactcagcaatgtcattactcagtatataccaaagaaaagtagatcattctaccaaaaagacacttgcaytgacatgctcatcaaagcactattcacaatagcaaagatatggaatcaacttaggtgcgcatcaatggtgtattggataaggacaatgtggtgcatatacagcatggagtactaggtcattatatgaaagaaaggaatcatcatttac

SEQ ID NO: 894390 - DNA, 657 bp, Homo sapiens
tcttctctccaagtcattctccatgctatcgtcagagatccagtccctctccgtattgagcaactagtacctttgtcattgtatgagccatactccaagataggtctttcttgacccatttaatagatgagatgaatgaagcttaaagaagtaatctgtgcaaggtcacaaaagtagttagtgggaaactatctcarcttactctacctcaaaaacatcttcagtaggcccagcccggtggctcacacctgtaatcccagcactttgggaggccgaggaaggcagatcacgagatcatccgatcgagaccatcctggctaacacagtgaaaccctgtctctactaaaaatacaaaaaattagccagacgcgttggcgggcgcctgtagtcccagctactcaggaggctgaggcaggagaatggcgtgaacccgggaggtggagcttgcagtgagccgagatggcgccactgcactccagcctgggtgacagagcaagactccctctcaaaaaaaaaaaaaaatcttcagtagtaactcattctatatagagtatctgaaaggctcccagtacgacctgattccaaactacatttcaacctgaatttccactatttctctttaatactttatgctcaacccatgtaaacagctcccta

SEQ ID NO: 894391 - DNA, 657 bp, Homo sapiens
tcttctctccaagtcattctccatgctatcgtcagagatccagtccctctccgtattgagcaactagtacctttgtcattgtatgagccatactccaagataggtctttcttgacccatttaatagatgagatgaatgaagcttaaagaagtaatctgtgcaaggtcacaaaagtagttagtgggaaactatctcaacttactctacctcaaaaacatcttcagtaggcccagcccggtggctcacacctgtaatcccagcactytgggaggccgaggaaggcagatcacgagatcatccgatcgagaccatcctggctaacacagtgaaaccctgtctctactaaaaatacaaaaaattagccagacgcgttggcgggcgcctgtagtcccagctactcaggaggctgaggcaggagaatggcgtgaacccgggaggtggagcttgcagtgagccgagatggcgccactgcactccagcctgggtgacagagcaagactccctctcaaaaaaaaaaaaaaatcttcagtagtaactcattctatatagagtatctgaaaggctcccagtacgacctgattccaaactacatttcaacctgaatttccactatttctctttaatactttatgctcaacccatgtaaacagctcccta

SEQ ID NO: 894392 - DNA, 657 bp, Homo sapiens
tcttctctccaagtcattctccatgctatcgtcagagatccagtccctctccgtattgagcaactagtacctttgtcattgtatgagccatactccaagataggtctttcttgacccatttaatagatgagatgaatgaagcttaaagaagtaatctgtgcaaggtcacaaaagtagttagtgggaaactatctcaacttactctacctcaaaaacatcttcagtaggcccagcccggtggctcacacctgtaatcccagcactttgggaggccgaggaaggcagatcacgagrtcatccgatcgagaccatcctggctaacacagtgaaaccctgtctctactaaaaatacaaaaaattagccagacgcgttggcgggcgcctgtagtcccagctactcaggaggctgaggcaggagaatggcgtgaacccgggaggtggagcttgcagtgagccgagatggcgccactgcactccagcctgggtgacagagcaagactccctctcaaaaaaaaaaaaaaatcttcagtagtaactcattctatatagagtatctgaaaggctcccagtacgacctgattccaaactacatttcaacctgaatttccactatttctctttaatactttatgctcaacccatgtaaacagctcccta

SEQ ID NO: 894393 - DNA, 572 bp, Homo sapiens
tgaccggacctcaaacattaaaaaaaaaatggcgattaacaatttcccatacacttgcaaacatttatgacatgttctttcatcattccttgtgaatgaaatatgaaaatatagaaaatcctaccatttatttaaccccaaattactccagtcagattccttttatgaagattacagtgcagataaaaatataaaaagcttgagggcagtaaggatgctatataattctacctgtagatctttcctttcctaagtagtattaatcatttgtgctgtacttcatatacagacctcaygaagtcaatctccctgcctctttgcacattgctttgctttgactagatgtggacttgtgactaggtcttcctgatgaagtttgagggtagggggagactccaagctcccttttattctagcatgtcaatcagcaaaatcggcagcaagaagagactgacatgagtagaaccatgcttctctcaatatgagattgacattagcttacataggaaataatagatagtattttaagtcactcaagactttgaggttgcttattgaagcacaatggaaat

SEQ ID NO: 894394 - DNA, 583 bp, Homo sapiens
agacctcaaactataagaatgctagaagtaatcctaggaaacaccattctgaaaatcagccttgggcaagaatttatgactaagtcctcaaaagcaatttcaacaaaacaaaaattgacaagtgggacctaattaaactaaagagcttctgcacagtaaaagaaactatcaacagagcaagcaaacaccccacagcatgggcgaaaatattcacaaacaatatgttcaagaaaagtctcatatctggaatctataaggaacttaaacaattaaacaagcaaaaaaygaataacttaattttaataatgagcaaaaccatgaacagatacttctcaaaagaagacatacaagtggctaacaaacatgaaaaaaaatgctcgtaatcactgatctcagagaaatgtaaatcaaaaccaaaatgagatatcgtctcacactagccagagtggctattattaaagaactccaaaaatgtttagtaatatcttttattgaaaagttcctgccaaggctatagaaaaaggggaatgtttatacactgttggtgggaatgtaagttagttcagccactggggaaagtagt

SEQ ID NO: 894395 - DNA, 583 bp, Homo sapiens
agacctcaaactataagaatgctagaagtaatcctaggaaacaccattctgaaaatcagccttgggcaagaatttatgactaagtcctcaaaagcaatttcaacaaaacaaaaattgacaagtgggacctaattaaactaaagagcttctgcacagtaaaagaaactatcaacagagcaagcaaacaccccacagcatgggcgaaaatattcacaaacaatatgttcaagaaaagtctcatatctggaatctataaggaacttaaacaattaaacaagcaaaaaatgaataacttaattttaawaatgagcaaaaccatgaacagatacttctcaaaagaagacatacaagtggctaacaaacatgaaaaaaaatgctcgtaatcactgatctcagagaaatgtaaatcaaaaccaaaatgagatatcgtctcacactagccagagtggctattattaaagaactccaaaaatgtttagtaatatcttttattgaaaagttcctgccaaggctatagaaaaaggggaatgtttatacactgttggtgggaatgtaagttagttcagccactggggaaagtagt

SEQ ID NO: 894396 - DNA, 658 bp, Homo sapiens
ggggcatatgtgctgctttgttacttggatatattgtctgatgttaaggtttggggtataagtgatcccatttaccaaggtactacacatagtacacaaaagcaggtttttcaacccttgcctctactcctccttcactccacctgctagctgtacccagtgtctatttttgccatctttacgtttatgagtayctaatatttagctccaatttataattgagaaaagactgtatttggttttctgttactgcattaatctgcttaggataatggcctccagctacatctgtgttgctgcaaaggacatgattttgttatttttatggctgtgtagtgttccatcatgtatatgtgccatgttttctttatccattccaccattagtgggcacctaggttgatttcatggctgctattgtgaataggactgcgaggaacatatgagagcctatgtattattgctaaaacaatttgttttcttttggatacataaccagtaatgggattgctgggtcaaatcgtaattcccttttaaagtctttaaaaaatctccaaactactttccacagtggctgaactaatttagatttccactgaaagtgtgcaagcattcccttttctccatagccttgccagcatctgttattttttgatgtt

SEQ ID NO: 894397 - DNA, 624 bp, Homo sapiens
tagctccaatttataattgagaaaagactgtatttggttttctgttactgcattaatctgcttaggataatggcctccagctacatctgtgttgctgcaaaggacatgattttgttatttttatggctgtgtagtgttccatcatgtatatgtgccatgttttctttatccattccaccattagtgggcacctaggttgatttcatggctgctattgtgaataggactgcgaggaacatatgagagcctatgtattattgctaaaacaatttgttttcttttggatacataaccagtaatgggattgctgggtcaaatcgtaattcccttttaaagtctttaaaaaatctccaaactactttccayagtggctgaactaatttagatttccactgaaagtgtgcaagcattcccttttctccatagccttgccagcatctgttattttttgatgttttaataatacccattctgactgatgtgagatggaacctcattgtagtgatttgcatttctctgatgattagtgatgagaattttttatatgtttgtaaaccacttttatgtcttcttctgagaggtgtctattcatgtcttttgttcatttgtattcattgttttatg

SEQ ID NO: 894398 - DNA, 582 bp, Homo sapiens
gggcatgtcagaggtctttatggcagcccctcccatcacaggcccagaggcctaggaggaaaaaatggtttcataggttgggtccagggccttgctgctttgaacactctccaaacttgctcccctgcatcccagccatggctaagaggagccagtgtatgtagatcaggtcattgcttcagagggtgcaartctcaagccttggcagcttacatgtggctttgggcctccaggtacacagaaatcaagaattgaggtttgagaacctccacatagatttcagaggatttgtggaaatgtctggatgtccaggcagaggtgtgctgcaggggcagagtcctcatggaaaacctcatgttagcgcagagtggaagggaaatgtggagtcaagcaccctctggggcactgcctggtggagctgtgagaagagggccaccatcatctggactccaaaatggtagatccactgacaacgtgcaccatgcacctggaaaaactgcagacactcaatgccagctcatgaaagcagccagaaggggagctgtaccctgtaaagacacaggggcagagctgcctaaggtc

SEQ ID NO: 894399 - DNA, 584 bp, Homo sapiens
ctgctagtagtcagcgactgagggatatttgttttcagggtaactgtagaacttgagacagggtgatgagaataggcagcttaaaataccacaaagcttacagctcttaccataatttagcctttctcttttgtttttttgtttattaaataaattattttcagattcctcaaagtatttggctaatttccagagttttaaaagagctgattctgattatttttgcacatttttaattgtttatatggaggagataatttgcmtatgccctcacatcatcatttgtattgctatcactcttctttttcatattacggtcaaatgtaatatcactagaagtaaaaatattttcatgatcacttgctaataagataaaaataagatatctattacgtatataatttaaatccaatttaagatcaagattcagccttaaacttgaccttttcagaaatgctttttaatattcagaaggtagtggttccttcctaaataacacaatgtagctgtaaacaattggatccgtttcctttccttacccatttcattgaacaaatgtcttttccctcaactcccttatattt

SEQ ID NO: 894400 - DNA, 584 bp, Homo sapiens
ctgctagtagtcagcgactgagggatatttgttttcagggtaactgtagaacttgagacagggtgatgagaataggcagcttaaaataccacaaagcttacagctcttaccataatttagcctttctcttttgtttttttgtttattaaataaattattttcagattcctcaaagtatttggctaatttccagagttttaaaagagctgattctgattatttttgcacatttttaattgtttatatggaggagataatttgcatatgccctcacatcatcatttgtattgctatcactcttctttttcatattacggtcaaatgtaatatcactagaagtaaaaatattttcatgakcacttgctaataagataaaaataagatatctattacgtatataatttaaatccaatttaagatcaagattcagccttaaacttgaccttttcagaaatgctttttaatattcagaaggtagtggttccttcctaaataacacaatgtagctgtaaacaattggatccgtttcctttccttacccatttcattgaacaaatgtcttttccctcaactcccttatattt

SEQ ID NO: 894401 - DNA, 662 bp, Homo sapiens
gttgcaagaagatgcaaaatattttttttcctctaaggagaagctgatcacttaccttctggcttcttcttaatatattcacatatattaattagcatcaattttgaaaatcaaagtaaatatttatttactatgtggatgatgggaatatgaaaaccacaaaggctcaccattactctggccaatattcttatagtcaataaacatatttccttgagaaaactacaatggttacccctattcaaggaggaactatagaattttgagatataatggaagttgtagagtagtatttcattgagtaaagakctcttcaaggggcaataataagagaagcttataacatacaaaataatgatgatgtagcaactgagaaaactcctttaatactctgatatttcttccccccttcctccctgctgctcttctcatttcttcatttttcatgcatcattcttacattctccttctgcatctgccttcttttctcttcctctgtggttctgcatgatgtttctattttccctctttatatggcttacgtatgttttggatgtctcttctttctgttcacatcacgtgtatttgattttcaaagccaaatccaaatagtagtatcctttttcttctaaattgaaatagtgcttacatgtcctgaccat

SEQ ID NO: 894402 - DNA, 580 bp, Homo sapiens
ggctaacattcaaattcacgaaatccaaagaaccccagtaagatactccatgagaagatcaaccccaagagacataatcttcagattctccaaggtcgaaatgaaagaaaaggtattacaggcagccagagagaaagaacaggtcacctataaagggaagctcatcagactaacagcggacctctcagcagaaaccctatgagccagaagagaatgggggccaatattcaacattctttaaaaaaaaaatgtccaaatcagaattcatatccagccaacctaagatgcataaatgaagaaaaaaataagatcctttwcaggcaagcaaatactgagggaacttgtcaccatcaagcctgccttgtaagagctcctgaaggaagcacaaaatatggaaaggaaaaaccattaccagccactaaaaaacacactgaagcacacagaccactgacactatgaagcaaccacataaacaagtctgcaaaataaccagctagcatcatgatgacaagatcaaactcacacataacaatattaaccttaaatgggctgaatgctccaatttaaagacactgaatgg

SEQ ID NO: 894403 - DNA, 521 bp, Homo sapiens
aggtaggacagcgaaggcgtattgccagccttgccagctgaaagccaactgcttctggtgggtctcatggacaggaaaatggtgtttgccaggtgaacagctgcatgccaggtaccagtagatgtgttcattggctcaaactgatacagcagctgccattggagtcaccagctggttaagcctacaataatccactgtcattttccaagatccatctgtcttctgcacaggccaaacaggagggttgaatggggatgtggtgggaatcaccacacttgtgtctttyaggttcttgatggtggcactaatctctgcaatccctgcagggatgcaatattgttttagatttactattttcctaggtagaggcagttctggtgacttccacttggtgtttccagctatgatggccctcattccatgagtcgaggacccaaatggggattctgccagctgctgtggatatctattccaattatgcatctggaacaaggaaataaccataggatgggtttgagaac

SEQ ID NO: 894404 - DNA, 554 bp, Homo sapiens
ggccttgtgggctccagctcatgctcattggttccagcttgtccttgttcttcctcattttataacctccttcccttcccaaatgccatcagatgcaaagataagagccattgagagacctcttagtcagatcccacagtttgacccaaaaggccaaatcctctaagcaatcccttttaaacacacacacacacacacacacacacacacaaacacgcacacaccacatcattatagcaagtggaacacaaaaccaaatgagtgctcagcatggaggaaccttgaggacactatgctcagtgaaatatgccagttacaaaaagrcaagtactgtatgattccactgatatgaggtccctagagaagtccaaagtagtcataaagacgcaaagtagaatggcaggtgccaggggctaaggggcgaaggtgaagggttgggagttagtgtttaatgggtagagaatttcagtttgggaagatgagaacattctgaaaatagatggcggtgaaaatagatgattgcatgacagtgtgaatgtacttaatgccactca

SEQ ID NO: 894405 - DNA, 606 bp, Homo sapiens
ttaaatagattttttaaaggatgctctaaaatagcacaaatcatgaaggtgcagttgataaatctgactcaattacaattaaggatatctattcatcaagacatgatagaggagtaaaaaaaaaagtctagtcatgaactaggaaaagatatttgaaacccatgtaactgacaaaggattgctataaaggataggtaaagaactccttcaaaccagtgagaaaaagacaaataacatgattttttaaatatacaaataggattgccactgaaaagaaaagctaggtagtcaataaggatatggaaagaagctcaacctcacaaaaagtcaaggaattacaaataaaccaatgttaaaatatcactttacttaacatcagattgcactgattaccaaatgtcgacaagttgtggagaaatagaaactcttatgcmaatctggcaaaaaggtaattgacacaccctctttggcaagcattttgacaacagccagtaaattgaagaagtccgtattgttctgatagaaagaaactggaaacattatacctagttgcctatcaattggggattgaatcctgtggaatattatacacatgttaaaatgaat

SEQ ID NO: 894406 - DNA, 584 bp, Homo sapiens
catctgaagggtggtctctgctttactcagcctagtgacttaaatgttaatctcattctaaaaaaataccttcacagtgacatctaaaataacatttgacccaatacctgggtactgtggcctagccacgttgacatgtaaaattacccatcatagacggtgatcattgtaataaaacaaacacatcatccacacttcctgagtcctgagcactttgcacacgctacttcattttgtgctcatgggaacctttctgctgaggttgtcccggacattctcaagtacatacatgaccagatgctgggtctccatggcaacaacatggtctcacttctgttcaagccgtgctttccttcccctrcaggatgtacaccttcagtctagccacagacctgaactccagaaaggatggtgaagccagcagcagatgcagcggggaatttcttccacaaacggcaaggagtcttagcagcttacaggccttgcaggtaatagaacattcccttttttcttttaagtaaactaagcaaaactacactttgtattaacttcacggtggacacagcttcgtaggtgtagctttt

SEQ ID NO: 894407 - DNA, 416 bp, Homo sapiens
gctatcatgagaacagcacagaaaagacttgcccccatgattcaactacctcccaccagctccctcccataacatgtgggaattcaagatgagatttgggtggggacacagccaaccatatcattgtgcccctgccccctcccaaatctcataatcatgtttcaaaaccaatcatgccttcccaacagtcccccaaagtcttaactcatttcagcattaacttaaaagtccacagtccaaagtctcatctgagataaggcaagtcccttccaygtatgagcctgtaaaatcaaaagcgggttagttacttcctaaatacagtgggggtacaggcattgggtaaatacagccatttcaaataggagaaattggccaaaacaaagaggctacaggctcccatgtaagtctgaaatcca

SEQ ID NO: 894408 - DNA, 638 bp, Homo sapiens
taaaagcaagcctcaaaaagatcaacctcatctgcaagtaactttattacttgccagaacaaatgtcaacactatttataaaggaaaaaaaaatctatacgtttatcaatgttatattcaaaatgcctgtcacccaataaaatatggtgagatatgtgaagcaaagattgtgatccataactaggagaaaatatcagtccatcaaatcaggcccaggaatgatgggaatgatagaattagtagataaaagaattttaaatggctattataaatatgctcaagcatgtaacagaaaacatgaatgcaaacggaagagaaaaggaaggtattgaaaaamaaatgggatgtctagaaatgaaaaataatttttcaactgaaaagttcactagaggggatcaacagcagattaaaaactgcagaaaaaaagatcagtaagcttgaagacagggcaataaaacctgtcaaaacagaagtatatagaggaaaaagactggaaaaaatgaacagagcctcaggaatgttgtctaacatgcttgtaattggaattcaagaacaaaagaagggtgagagagagtagcgagaaaatgcattaggaaaaataatggcccccaaagttgtcaaatttgataaaaagtgta

SEQ ID NO: 894409 - DNA, 665 bp, Homo sapiens
gctgagagatattgccagtaatatttcctttcacttcccagtcacaaatgtagagaaagacagataagtcaggctaatttactgaaaaggagaactttgaaggaagtagcacctatcaaatgccaattcttctagagatttcttacgtttttgagatacagaaatttatatgttgcacttatctgttctggggttcttaatcaggagtgtatcctaaacttgagggtttktgtgtgtgtgtgtgtgtgtgtgtgtgtgtgtgtgtgtgctgttattgttgttagaggcaagagtctcactatgttgctcaagctgaacttaaactcaggctcaagctgggactacaggaacatgtcactgtgcccagcttcaagaaaatgtttttaaaaatgttcaggccttattaggtctattacatcaaaatcctcaggggaaagcctacaattgtagatttttaacaaaatgtcctcaggtcgctgtaatgcacaattctgagaattagtgcagcaatcacttcagtctcatctctcacccgcatggctagttccctttatcagttggacatgtggccaaaaagagaaaagagtaagagatagtgtcatttattaaagctccagttaagtttcctgggtatgggtagaacacaaacaagtaaactgaaaatc

SEQ ID NO: 894410 - DNA, 680 bp, Homo sapiens
aatggtatttctagttctagagccctgaggaatcaccacactgacttccacaatggttgaactagttcatgtcctttgttgggacatggatgaagctggaaaccatcattctcagcaaactatcacaggcacaagaaaccaaacaccgcgtgttgtcactcataggtgggaattgaacaatgagaacacatggacacaggaaggggaacatcacacactggggcctgttgtggggtgggggtgggggtagggatagcattaggagatatacctaatgttaaatragaagttaatgagtgcagcacaccagcatggcacatgtatacctatgtaactaacctgcacattgtgcacatgtaccctaaaacttaaagtataataaataaataaataaataaagtgacgacaggagagatcatcagtgtatgttaatatgcacaaggacattgattaccccaaagggtaggaaatgaggagaggaggggaggggaagtgagaggttattaacttcttaaaatcatgttaaatttttcccttgtataatcagcatatattatcattgtgattaaaaaccaacaaaaaaaatatttttttctagataaattctgtttctcaccctaaaaagttattattcaagatcaaattgactttcaacactgcacgaaacatggtatactatg

SEQ ID NO: 894411 - DNA, 599 bp, Homo sapiens
ctttcaagataaccagaatccttagatgaccaaagacttgtctcagcaaaaagatgtaaacatattctttcctcattgctcctgaataatactgttttcccacagattgtaactgatggctggaaccagctttcaggtcattcaaagatttctcagggaactggaaagtgttattgacattttacttccctaggacctaaaggcaacatctcattttaaagatgactagaaacctcattattccaaactctactagacttaggaacagaggccagcaataacagctgttgcttctgggataaccaatgacacagtgtctcrgagttacatgcagaggcatgaaaggagctctagtcaaggcttcatgacttactgagacacagagaggtctcagtaaatgaatactaaccactgtattcatctttctctttgtgaagatccagaagctcatcaccatgtagaatacaatctatagtattttatttctctacatattagctatataatgtggacaataatcccaactctgggtttatctgtgaaaatgacgagattcacttatctgaagatgtatatggcaaataagattatgccacata

SEQ ID NO: 894412 - DNA, 617 bp, Homo sapiens
agttgccttggaaacactcactctgaatattctaaattttctataatggaaaatcttgcctttaccttataatttatagtctctctcatttttggattttgctgagaatacataatgagatccaaatgctgataaatgtmattttctgaggacataattgttatattcatgtattagttttgttataaactcattgttgtcagtcaggcttctgaaggacaattatctaataaaaaataaaattttaactaaggctatttaaagttgtgttttaactgccctctgtatagtgtccatttcttttttacttgtacattttaaaatattagtttttttattatctcttccctcataaatcagaattaaagctgtcatttccacatttgtgtttgtagaactgttaggcaacttcttttttaatgtcattaaataccaactagccttaataattcagaacatctggttccaaaaacccgattacagggcacagtcgtaacacattgcattttctactagactcagcatagtctccattagttattgttcctgtttactcagttttgagctagactctcccagagtaccaattatgtcctgagagcaagtcagcacacaca

SEQ ID NO: 894413 - DNA, 617 bp, Homo sapiens
agttgccttggaaacactcactctgaatattctaaattttctataatggaaaatcttgcctttaccttataatttatagtctctctcatttttggattttgctgagaatacataatgagatccaaatgctgataaatgtcattttctgaggacataattgttatattcatgtattagttttgttataaactcattgttgtcagtcaggcttcygaaggacaattatctaataaaaaataaaattttaactaaggctatttaaagttgtgttttaactgccctctgtatagtgtccatttcttttttacttgtacattttaaaatattagtttttttattatctcttccctcataaatcagaattaaagctgtcatttccacatttgtgtttgtagaactgttaggcaacttcttttttaatgtcattaaataccaactagccttaataattcagaacatctggttccaaaaacccgattacagggcacagtcgtaacacattgcattttctactagactcagcatagtctccattagttattgttcctgtttactcagttttgagctagactctcccagagtaccaattatgtcctgagagcaagtcagcacacaca

SEQ ID NO: 894414 - DNA, 617 bp, Homo sapiens
agttgccttggaaacactcactctgaatattctaaattttctataatggaaaatcttgcctttaccttataatttatagtctctctcatttttggattttgctgagaatacataatgagatccaaatgctgataaatgtcattttctgaggacataattgttatattcatgtattagttttgttataaactcattgttgtcagtcaggcttctgaaggacaattatctaataaaaaataaaattttaactaaggctatttaaagttgtgttttaactgccctctgtatagtgtccatttcttttttacttgtacattttaaaatattagtttttttattatctcttccctcataaatcagaattaaagctgtcatttccacatttgtgtttgtagaactgttaggcaacttcttttttaatrtcattaaataccaactagccttaataattcagaacatctggttccaaaaacccgattacagggcacagtcgtaacacattgcattttctactagactcagcatagtctccattagttattgttcctgtttactcagttttgagctagactctcccagagtaccaattatgtcctgagagcaagtcagcacacaca

SEQ ID NO: 894415 - DNA, 375 bp, Homo sapiens
tcccaggctcaagtctcaagtgctcttcccacctcagcctcttgaatagctggaaccactggtgtgtgccaccacacccagctaatttgttctgtttttggtagagatggggttttgccatgttgcccaggttggtctcaaactcctgagctcaagcartccacctaccttagcctcacaaaatattgggattacaggcataagccaccatgcttggcctgggattacatttcaacatgaaatttggaaaggacaaatatccaaatcatgttaataattgtctcaaggggagtttttttttttttctctctctctctctttctctttctctgtctcatgaagtagagcctcagtctcttatccagtaagaattct

SEQ ID NO: 894416 - DNA, 554 bp, Homo sapiens
attttcagaagaggaaggcaatgtttttatttaaaaatacaattaaaaatagtatccacatgtgaatacacacattgtggattgtctgtgacaaatatatcatctctagctatcttttttccatgacacttcatatttaggtaagccataattctattagcatatttattgatatggcttagatctgtgtcctcactcacatttcatgttgaattataatccccaatgttggcagcagggcctggtaggatatgattgggtcatgggggtggatctccctcttggtgctgttttcatgatagtgagttcttgtgagatatggttgtttaaaagtttgtggcacctacccaactctcttccttctgctccagccatgtaaracatgcctgcttccccattgccttccaccacgattgtaaatttcctgaggcctccaccgaagcagaagttggtatacttcatgtacagtctgcagaacaatgagccaattaaacctcttttctttataaattacccagtctcaggtggttctttatagaaatgtgagaaaaaac

SEQ ID NO: 894417 - DNA, 544 bp, Homo sapiens
cttttagacagtcaatcttctaaaaattagagtccttttgagtgacgacataatgtctggtgataaatacctgatttcctttcttcacattgctgaaacttctgagtcaaacttctggctttgtccccatgggcacatccagcagaaatccttcaggtatcatcatcagctttgacatctctgcagttgaaacttgcaggattttagatgagttagtcattgaaaccagcctccatcttaccactgaccccactgctgagggaaatttaccytcttgctcttcaatcctatggagtaactttccatgagagttttcatgactactgctgttgctggagcaatcatggtagcccctggctggcaagtgaattaagagagaaaaaataaaaattaaatacatgttggtgtctctggtttttcacattatctcttccaatattaaaaccaaaggaaagaaaatagtcttttctgcgtcatattctttggtttttaacctttgcattcttttgctttcttggctgtatttccttgaattctgtctgtg

SEQ ID NO: 894418 - DNA, 459 bp, Homo sapiens
catatttgcctatgcagttgttgtcagagcaagatttggagaaaatttgaattttttcatagtttaagtatcccacatgctttccctgctctgtgctgagctaaaaagtttgacatgctcccttaggtaaggaggaagggcgaactttttaaagatgttttgaaatagtgatggagtaatagcaggaaccctggttagcgtcacatgtatctccgctcctgcctctttcaggtaccctgagycagtggttcatgtccctggctatctgtttcctctgtactatgagaataataacaacttccacaaattttgttgtggtgattaagtgataatgtacactaaaatgccttaaaacctgtagagtttgtccaaaaagacttcatttattatgtatttaactatcttttgtgactgccaagtagaagtagagggagatggacacataaccaagtacgtctt

SEQ ID NO: 894419 - DNA, 618 bp, Homo sapiens
gcactggaaagacctgcccccatgattcaattacctcacactggatccttcccacaacatgtggttatttaagatgagatttgggtgaggacaccaccaaaccatatcatcccatctctggcccctccaaaatttcatgtcctcacatttcaaaaccaatcatgccttcccaacagtcctttaatgtcttaactcatttcagcgttaactcaaaagtccacagtccaaagtctcatccaagacaaggcaagtcccttccatctatgagcctataaaatcaaaaacaagttatttgttgcctagatacaatgggggtacaggcattgggtaaatacagccattccaaatgggagaaatttgccaaaacaaaggagctacaggccacatgcaaatctgaaatccagtggggcagtmaaatcttaaagctccaaaatgatctcctttgactaatgtctcacatccaggtcatgctgatgcaagaggtgggcttccacggccttaggcagctctgctttggtggctttgcagggtttagaccctctcctggctgctttcactagctggcattgagtgtctgcagcttttccgggtgcacagtgcaagccgtcagtggatcta

SEQ ID NO: 894420 - DNA, 602 bp, Homo sapiens
cacaatggaatgctattcgccataaaaggatgaaatcttatcatttgcaatcacatagatagacctaaggacatcatgttacgtgaaataagccagacacagaaatacaaataccacatgatctaactcatatgtggaatattaaaaataaaagttgacatcatagaagcagagagtggaacagtgtaacagtggatacctgaggctgaggaggggagcaaaggaggggaggatggggagaggatgatcaacaggtacaagctacaattcaataggagcragtctattgctcagtagagtgactatagttaacagaaaggtattatatattacaaatagctagaagagaggctttttaatgtgcttaccacaaagacatgataaatgcatgagatgataggtaaactaagtaccatgatttaattattttacaacatatatattcatggaaacatcaaattgtaccacacaaatatgcacatttaaaaatcaaattaaaaaaattaaaacaacgactatggacaaatgagcttatgcagccccacttgccctaagagaaatatagatttatgatacccaattataataaagataaatatgct

SEQ ID NO: 894421 - DNA, 592 bp, Homo sapiens
attgaaagtaacaagaaatgctcataaaacagctctttatgcagagaggagccagtttttgccttgttgctaaggtcccgattgtttcctggctgtgttttgtgtgtctgtgtcaggccattctgtgggctcctttcaggaagttagtgatattggcctgcagataattagatcagtgtcatcactttcactgtccccctttttattctgctgggacaatttgcatgaaaatagaagcgggtgatattcctttcccattaataaggctcagtctcttacttggggggctatccacatataggggatttggaaaaawatcccaaatctacatataagtgagcctttttttaaaaaggccttaaagacccaaatgttcagcccaaccatccccttgccaaaatggctttaaaaaaggttccctcataaggtagaagatcttcatctgggatgcaggtttttcaagagaaatgtttaggaggcctgtattctgcagtgaaatttactctgatgttaataaatatatattagtttttacaggtcttctctcagcttacagcttatcaaagaactagacccattagaaatcttactt

SEQ ID NO: 894422 - DNA, 611 bp, Homo sapiens
atcatgtggtttttgtctttggttttgtttatgtgatagactatgtttattgatttgtgtctgtcaaaccagccttgcatcccagggatgaagcccacttgatcgtggtagataagctttttgatgtgctgctggattcagtttgccagtattttattgaggattttcacattgatgttcatcaggaatattggtctaaaawtttttttttgttgtgtctctgccaggctttggtatcaggatgatgctggcttcataaaatgagttagggaggattccctctttttctattgattggaatagtttcaaaaggaatggtaccagctcctctttgtacctctggtagaattctgctgtgaatccatctggtcctggactttttagttggtaagctgttaattattgcctcaatttcaaaacctgttattggtctattcagagattcaacttcttcctggtttagtctcgggagggtgtatgtgtccaggaatttatccatttcttctagattttctagattatttgcataaagatgtttatagtattctctgatggtagtttgtatttctgtgggatcagtggtgatatctcctttatctttttttattgca

SEQ ID NO: 894423 - DNA, 676 bp, Homo sapiens
ggtacctactgagctccaattacttgtgaaaatgacacagggctaatttgtccgtacttcatcatttatccaatttgttccatgaagaggtatgactgttggctgtatctggtgtattatgttgaataaccaagatagaaggtctaataaggcttgatttctgacattaagaaatgagaggtctagtgtatgtcttactttactactttaggtgaatatttcatgacaagtaaatattttttaaaaactttgacttctcaggccacagagaaactctcaagaaaaccaagtttagcttacaggtatttctagcatctgtgagttgttaaagactcccaaaccataaaattagatctttaaaaacatgcaaaaaggaacagacawgctgaagggttaataatgagaagcacgtgcttactctctgtgctttaaccacatggacactgttgtcactgctactaatgctcacgttttcaggtttctatttctggtgtgggtgacactgctctttctttagaaaacatactttaaatggcttagggagtaaatgtggtaaaatgaatacaaaataagtaggaagatgaatgaacaattcaatattatattccagagaagataaaaataaaaagctaagcaattaacactacacttaaaagatgagtgtgttgtagttgac

SEQ ID NO: 894424 - DNA, 676 bp, Homo sapiens
ggtacctactgagctccaattacttgtgaaaatgacacagggctaatttgtccgtacttcatcatttatccaatttgttccatgaagaggtatgactgttggctgtatctggtgtattatgttgaataaccaagatagaaggtctaataaggcttgatttctgacattaagaaatgagaggtctagtgtatgtcttactttactactttaggtgaatatttcatgacaagtaaatattttttaaaaactttgacttctcaggccacagagaaactctcaagaaaaccaagtttagcttacaggtatttctagcatctgtgagttgttaaagactcccaaaccataaaattagatctttaaaaacatgcaaaaaggaacagacaagctgaagggttaataaygagaagcacgtgcttactctctgtgctttaaccacatggacactgttgtcactgctactaatgctcacgttttcaggtttctatttctggtgtgggtgacactgctctttctttagaaaacatactttaaatggcttagggagtaaatgtggtaaaatgaatacaaaataagtaggaagatgaatgaacaattcaatattatattccagagaagataaaaataaaaagctaagcaattaacactacacttaaaagatgagtgtgttgtagttgac

SEQ ID NO: 894425 - DNA, 551 bp, Homo sapiens
agacagaagtgcctgtgcctataacatgagtgagtgcaggttaaactgttcaaatctgaataagattggcgaatcgatcgatgccattttcctggttgtgatattgtcctatattttgcaagacattgcaattggggaaatctgaagagttcaggggatctccctgtattgttttctgcaactgcagatgaatttacaattatcctcaaattaagagacgtaaaaactagaatgakgacgacatactgaacataacacaccaaggcaaggcaagtgactgtgaaaggacgcatgccactaacaaaatggcctatgaataaggaaagcaaaataatccaaaccagtcagtaggaaataccaagttcctaagctgactgtgatgacaattccgatggaattcagaaatcctcataaattaagccctaagtttgaaaaaacaaaaaaaacccaaaaaactgtttttgacttcagggatcttagttaaatatttgtgcctttattttcatttgatgtatccctcatacccttgttatatctgtgtattttttctt

SEQ ID NO: 894426 - DNA, 635 bp, Homo sapiens
aaagcaaggtctaattccaaaacctggatgttaatccctgctggactgagtctcaaaatgaggaaaaaatgcaggttaggtattaattcaagactcttctctgtccacacccccccacacacacacctacagctattttataaaccaagagtttaattttaggatatctagaaamgtttaataataaagttcagcccaattgtcccagattactgtaagtgcttgccaccacccactccaacacacagctatttgctctttgccacttgccttgtcttaatactcaagacaaagttgaatataggtatagatagaaaggtgttcagtgaactgagaggactggcactagtcaaaaattcaaaatactttacttttctttgttatgttccctttcatttctgaaaaaaccatcctgtccctttcttctgctttttttctcagaaatctttccctgtcttcttgttatctaaagtgcactccatcatggtccacagtgtcccacactccagattttctctagctacccaaatcatcctatacactatattgtaggaatgcaaactaataacactacactattataataaattgataatgcagctgtttgtttcttactaatagacttacctgtaccc

SEQ ID NO: 894427 - DNA, 635 bp, Homo sapiens
aaagcaaggtctaattccaaaacctggatgttaatccctgctggactgagtctcaaaatgaggaaaaaatgcaggttaggtattaattcaagactcttctctgtccacacccccccacacacacacctacagctattttataaaccaagagtttaattttaggatatctagaaacgtttaawaataaagttcagcccaattgtcccagattactgtaagtgcttgccaccacccactccaacacacagctatttgctctttgccacttgccttgtcttaatactcaagacaaagttgaatataggtatagatagaaaggtgttcagtgaactgagaggactggcactagtcaaaaattcaaaatactttacttttctttgttatgttccctttcatttctgaaaaaaccatcctgtccctttcttctgctttttttctcagaaatctttccctgtcttcttgttatctaaagtgcactccatcatggtccacagtgtcccacactccagattttctctagctacccaaatcatcctatacactatattgtaggaatgcaaactaataacactacactattataataaattgataatgcagctgtttgtttcttactaatagacttacctgtaccc

SEQ ID NO: 894428 - DNA, 614 bp, Homo sapiens
ctgcatcccagccactccagctgtgactaaaaggggccaatgtacaactcgggccatgacttcagagggtgcaagtcccaagccttaacagctttcatgtgttgttggtcctgtgggtgcacagaagacaaggatggaggtttaggaacctctgcctagatttcatggaaatgcctgcatgtccaggcagaggtgtgctgcaggggtagagccctcatagagaaccttagctagggcagaggagatgtgagattggagcccccacacagagttcccactggggcactgcctagtggagctgtgagaagagggccactgtcctccagactccaaaatggtaggtccactgacagcttkcacccacacctggaaaagctgcagacactcaactccagcctgtaaaaggaggcagatagggagctgtaccctgcaaagccacagggtcagagctgcccaaggccatgggagcctacctcttgcatcagcatgacctggatgtgagacatggtgtcaaaggagatcattttggaacttgaaggtttaatgagtaccctattggattttgaacttgcatgaggcctgaggccctttgttttggccaatttctcccattt

SEQ ID NO: 894429 - DNA, 627 bp, Homo sapiens
tttttttaaagaaaaaaagtttcttttttttttaaattatactttaagctctgggatacatgtgcagaaagtgcaggtttcttacataggtatacatgtgccatggtggtttgctgcacccatcaacccatcttctacattaggtatttttcctaatgctttccatccccttgcccccaccccccaacaggcactggggtgtgatgttcccctccctgtgtccatgtgttctcattgttcagttcccasttatgagggacaatatgtgctgtttagttttctgttcctgtgttagtttgctgagaatgatggtttccagcttcatccatatccctgcaaaaacatgaactcattcttttttatggctgcatattattccatggtgtatatgtgccacattttcttcatgcagtgtatcattgatgggcatttaggttggttccaagtctttgctattgtgaatagtgctgcgataaatatacatgtgcatgtgtctttatagtagaatgatttataatcctttaggtatatagccagtaatggcattgctgggtccaatggtgtttctggttctagatccttgaggaatcgccaaactgtctttcacaatggttgaactaatttaca

SEQ ID NO: 894430 - DNA, 627 bp, Homo sapiens
tttttttaaagaaaaaaagtttcttttttttttaaattatactttaagctctgggatacatgtgcagaaagtgcaggtttcttacataggtatacatgtgccatggtggtttgctgcacccatcaacccatcttctacattaggtatttttcctaatgctttccatccccttgcccccaccccccaacaggcactggggtgtgatgttcccctccctgtgtccatgtgttctcattgttcagttcccacttatgagggacaatatgtgctgtttagttttctgttcctgtgttagtttgctgagaatgatggtttccagcttcatccatatccctgcaaaaacatgaactcattcttttttatggctrcatattattccatggtgtatatgtgccacattttcttcatgcagtgtatcattgatgggcatttaggttggttccaagtctttgctattgtgaatagtgctgcgataaatatacatgtgcatgtgtctttatagtagaatgatttataatcctttaggtatatagccagtaatggcattgctgggtccaatggtgtttctggttctagatccttgaggaatcgccaaactgtctttcacaatggttgaactaatttaca

SEQ ID NO: 894431 - DNA, 627 bp, Homo sapiens
tttttttaaagaaaaaaagtttcttttttttttaaattatactttaagctctgggatacatgtgcagaaagtgcaggtttcttacataggtatacatgtgccatggtggtttgctgcacccatcaacccatcttctacattaggtatttttcctaatgctttccatccccttgcccccaccccccaacaggcactggggtgtgatgttcccctccctgtgtccatgtgttctcattgttcagttcccacttatgagggacaatatgtgctgtttagttttctgttcctgtgttagtttgctgagaatgatggtttccagcttcatccatatccctgcaaaaacatgaactcattcttttttatggctgcatattattccatggtgtatatgtgccacattttcttcatgcagtgtatcattgatgggcatttaggttggttccaagtctttgctattgtgaatagtgytgcgataaatatacatgtgcatgtgtctttatagtagaatgatttataatcctttaggtatatagccagtaatggcattgctgggtccaatggtgtttctggttctagatccttgaggaatcgccaaactgtctttcacaatggttgaactaatttaca

SEQ ID NO: 894432 - DNA, 583 bp, Homo sapiens
tgtttactggtaaccccttccttccctacaacacttatgcatattcaaagactatatcccctgcttcccacctccagcctggattgtaagttcctcaatagcatggctgtgttttttaacatcaagtctccatgtgagaatagttcctggcatataataaatgctcaatcaacatttgtaagtgaagaaagctattcagtggtgtctgctttaatattaagagrtggcttgcccaagattgaaaagcaccttcattgtctaaaatggaactagattctgtgggtagcaggtccattggtgccactcacaggtggccacaaaggaaccgaccttcaccagaaatgtgtgggtgcctttatttacctccagcacagagaggtaaaatggaatattcttatgacgcagatatttcgtgaatctcatgttcacctatgttatgttgcctctccttcggtattttttcatgctgtaggccattcctacttcacaagaagagtccatggttatccatgagaccagggccccctgtggacccaggatacaggctgctggcatggctcctatgcagcgcttgatgtaagga

SEQ ID NO: 894433 - DNA, 665 bp, Homo sapiens
tccaggatgcttccctcttgcatcttcaccttctggaaaacttaagggacttgtttttgacataaaagaaggagaaagtagatagcaatgcagagtattctttaacatccaaccctggaagtggcttgtatcatttcacttacaagtattagtctatgttkggtcatttgaccccaaaataattgaggtagaggctgaaaaatgtagtctccctgtatgcctaggaagtggaaatcatgtagttaattcatagcaatgccgctgccaaacctggagagagaatctaattcattttttctcttctgcagtacctcggccatatctttggattgtaggacttaagccaatatttgttgaatgtgtgattcagtgtacctagcatgctaacttccctgaaggttcttgaaaatttcattatttctgtttacttagccaaaatcatagtctccaatatagcaatagggcttcaaaacaatcatttttttattacttccaccttaaaaagttttatgaaggaaatagaaaaaaaagtgttgaaagaaaacagaggagacactgtaatggaattatcttttttattttctgagaaattatggaatctatatgagaatattcaagtcatttttcaaatataagaaaataagtcagaatggtagataaaacta

SEQ ID NO: 894434 - DNA, 665 bp, Homo sapiens
tccaggatgcttccctcttgcatcttcaccttctggaaaacttaagggacttgtttttgacataaaagaaggagaaagtagatagcaatgcagagtattctttaacatccaaccctggaagtggcttgtatcatttcacttacaagtattagtctatgtttggtcatttgaccccaaaataattgaggtagaggctgaaaaatgtagtctccctgtatgcctaggaagtggaaatcatgtagttaattcatagcaatgccgctgccaaacctggagagagaatctaattcattttttctcttctgcagtacctcrgccatatctttggattgtaggacttaagccaatatttgttgaatgtgtgattcagtgtacctagcatgctaacttccctgaaggttcttgaaaatttcattatttctgtttacttagccaaaatcatagtctccaatatagcaatagggcttcaaaacaatcatttttttattacttccaccttaaaaagttttatgaaggaaatagaaaaaaaagtgttgaaagaaaacagaggagacactgtaatggaattatcttttttattttctgagaaattatggaatctatatgagaatattcaagtcatttttcaaatataagaaaataagtcagaatggtagataaaacta

SEQ ID NO: 894435 - DNA, 622 bp, Homo sapiens
tggagtgcccatgtagcaatgcatgtcaggctgttgcctgccctataatctgtccatctcctccattctgctcctgcttttgtaagatgctttcctcccctgtgtatgacccagcaaccctacagatcccctaatagtcctcatctactgcccttccccaccctagtatatcctgtggtcctgtggatgctggtgctggatcaatgggctggaatggttttaacatgaaagctggggaagcgcatattgataaggcagggactcatgcattggtaattctggcccctgactgtaatctaactttgccttcatgtattagtccattttcatgctgctgataaagacatacccaagactgagtaatttataaagaaaaagaaggttaatggactcacagttccacgtggctggggaggcctcacaatcacggtggaaggcgaaaggcacrtcttacatggcagcaggcaagacagactaagagccaagtgaaaagggaaaccccttataaaactatcagatcttgtgagacttattcactaccatgaaaacagtatgggggaaactgcccccgcaattcaattatctcccattaggtccctcccacaacatgtgggaattatgg

SEQ ID NO: 894436 - DNA, 641 bp, Homo sapiens
tttttaatattattaagcagaagtaaagttaatagatcagaaaacacaagttatccataatcctctcccttttcctatttaactgatagataattgcctgtttccaaaccttttctgtttataaacaatggtgaattatattacacatagtcttcagtttcayttttacttaagagtttcatcaactatttattacttttaaatgaataagaatgtttgaaatcatttaaacatttaaataaatgcatgaaatataagcaatgggctgtgtgtggtggccacgtctataatcccagcactttgggaggccgaggcgggcggatcacttgaagtcaggagtttgagaccagcctggccaacatagtgaaaccctgtctctactaaaaatacaaaaattagccaggcatggtgatgggcatctgtaatcccagctactcgggaggctgaggcaagagaatcacttgaacccaggaggtggaggttgcactgagccaagattatgccactgcactccagcctgggcaacagagcaaaaactctgtctcaaaaaaaaaaaaaaaaaattctaagcaacaaaataaccacttcttttttcttgtttataccagcattaaatatgtgagcagttgaatgccacctgt

SEQ ID NO: 894437 - DNA, 644 bp, Homo sapiens
tagtttttaatattattaagcagaagtaaagttaatagatcagaaaacacaagttatccataatcctctcccttttcctatttaactgatagataattgcctgtttccaaaccttttctgtttataaacaatggtgaattatattacacatagtcttcagtttcayttttacttaagagtttcatcaactatttattacttttaaatgaataagaatgtttgaaatcatttaaacatttaaataaatgcatgaaatataagcaatgggctgtgtgtggtggccacgtctataatcccagcactttgggaggccgaggcgggcggatcacttgaagtcaggagtttgagaccagcctggccaacatagtgaaaccctgtctctactaaaaatacaaaaattagccaggcatggtgatgggcatctgtaatcccagctactcgggaggctgaggcaagagaatcacttgaacccaggaggtggaggttgcactgagccaagattatgccactgcactccagcctgggcaacagagcaaaaactctgtctcaaaaaaaaaaaaaaaaaattctaagcaaaaaaataaccacttcttttttcttgtttataccagcattaaatatgtgagcagttgaatgccacctgt

SEQ ID NO: 894438 - DNA, 582 bp, Homo sapiens
tgccgaaaatgttcagatattttggcattttcaaaggcaaggaacaatacaattactcctagatttttgccattatagcaacatctgatttattgacttttcagtaactaaataatatcacaccaaaagttataaaatgacttcccaactctcttctgttgatatagaccccacctaaatgtatattattatcatttattatttttatttttactctccacaggttcttgtgtactatgtttaacattgacaagaagataattaggaaataaatatatataaatacaggaacataaagagaaataaagaggaagcaccacagtcaactaaaaaagagagattcccagcaacctacacaaccatttctataggctctcagctgatgcttagtgtttggacaactcayacatgcagattgacagatgaccaacttataaaagagatttttaataattcttaatgatttcacagggtgttgtcaatggaaatatggattcttctacagcaaacatgtacatctatatcatgtggaacaaggatagtgggaaaacctctgattgtgaggacgtagaactgagaaga

SEQ ID NO: 894439 - DNA, 632 bp, Homo sapiens
catgctgttccacatagaatataatgtttgtaaattaactcaagaccaacagtttctttgccttctgaacaaatttgaaacatctgttctaggcctgtgttcatgtgcaatttttgaatttagatactgtattagtctgttctcatgtggctatggagaaatacccaagacttggtaatttataaagaaaagaggttcaactgactcaacaggtctgcattgctgaggaggcctcaggaaacttacaaacatggcagaagggaaagcaacatgacctacttcatatggtggcaggagagagaagaatgagaatcgagcaaatagagaagccccatataaaaccatcagatctcttgagaacttactctctatcaagagaataatatrggggaaaccacccctgtgattcaattatctccacctggtcccgcccttgacaggtggggattattacaattcaaggtgagacttcggtaggaacacagagttaaaccaaatcattccacccctggccttcccaaatctcatgttctcacatttcaaaacacaattatgcccttccaacagtcccccaaagtcttaactcattccaatattcacccaaaagtccaagtccaaagtctcatttgaga

SEQ ID NO: 894440 - DNA, 623 bp, Homo sapiens
tataggggaaaccacccctgtgattcaattatctccacctggtcccgcccttgacaggtggggattattacaattcaaggtgagacttcggtaggaacacagagttaaaccaaatcattccacccctggccttcccaaatctcatgttctcacatttcaaaacacaattatgcccttccaacagtcccccaaagtcttaactcattccaatattcacccaaaagtccaagtccaaagtctcatttgagacaaggttagtccyttccacctatgagcctgtaaaatcaaaagcaagttagttacttcctagatacaatgggggtacaagcattgggtaaatacacccattccaaatgagagcaattggccaaaacaaaggggctacaggccccatccaagtctgaaatccaatagggcagtcattaaaccctaaagttccaaaatgatcccctttaactcatgtctcacattcaggacacgctgatgcaagaggtgagctcccatagctttaggcagctccacccctgcggctttgcagggtacggcccctcttccagctgctttcatggctagcgttgggtgtctgcaggttttccaggtgcatggtgcaagctgtcagtgga

SEQ ID NO: 894441 - DNA, 661 bp, Homo sapiens
caggacctagggctcaacacagagttcttagacttgacacctaaagcgtgatacatacctaaaataatgatcaattactcctcatcaaaactaatcactttttctctgcccatgcttttgtgaaacagataaaaagacaagttacaaactgtatgaaaatatttgtagatcaaatattgacaaggactagtttagaaattatataaagaattatcaaaagtcaacagcttaaaaaaaagcccaattgaaaaatatccaaaagacacgaatacacatttcaccaaaggtgataagtagaagaaatagtcaatataatcatccatcagggcaatgaatactaaaaccactgaagcatcactgtatgcctgtcagaatgcgtaagaatttttaaaataatgacaccaccaaattctgaaaaaaatcrgaaaaattagatcacttatattttaattgggataatgtaaagtggtacagtcactccaaaaaaatgttaaattttttcaaagctaaatgtgcaattagtttctgtcccagcaataacactcctgggaatttatgacagataaatgaagacatattcacacaaaaacttatacactatattcaagcagctttatttgtcatagccaaaaccttaaaacatcccagatgctcttcaaca

SEQ ID NO: 894442 - DNA, 625 bp, Homo sapiens
actaagcctttagcctggtacaccatatacaaagtatagccctgaaacaaagtacagccgttggatcctgacacaaaccctagctgccatcctcaaaaattctggcttagacacaaaactggctcactctcaccagtatatcccttggtatttgctttctcaagttccttttggagtccacttaaaacctctgcgaccagtttcaaaaactcatctagggagcactttctaggaaaataaactttaattctagttttctgttgtatccacatccatgcaaacatcgattctttcaaaaattatttatagtttaatatcttcatgatttgttcatttattctttggacccaaagaaatgtatctccccgcatttgcctgggagcttctgcaatgaagttaccacaatttaaatcatctctacagtgactttatttaaaatgttgattgaataaatccaaamtcaattaatgtgccagaaaaaaaggaagccaccccactagctaaagagtaaagccctttctgcattcatctttcttactctcacccactctcccaccgcccagccctacgccaggcgagggagcagtgcggtgggcggtaccccaagtccgctgggggcgtggcc

SEQ ID NO: 894443 - DNA, 525 bp, Homo sapiens
ttaaaagggacaaacatacagctcaggccattgcttcagaggctgcaagacccaaggcctggcagcttccatgtgttgttgagcgtgtgggtgcacagaagtcaagaattgaggtgtggggacctcctcctagatttcagaggatgtrtggaaacacctggatgtccaggcagaagtttactgcaggggcagagccctcatggagaatctctgctagggcactgcagaagggaaatgtggggttggagccccacaaaagtcttcactgggaccttgcctagtggaactatggaagagggctactgtccttcaaaccccagaatggtaggtccaccgacagcttgcaccatgcacctgaaaagctgcagacactcaacaccagcctgtgaaagcagccaggaggggggctgtatcctgaaaagccacaggggcagagctgcccaaggccatgggagcccacctcttgcatcagcatgacttggatgtgagacttggagtcaaagcagatcattttggaactttaag

SEQ ID NO: 894444 - DNA, 537 bp, Homo sapiens
cctggtaaatttgaggtcagaccacttctctgctcttgaaccctgttttctgttgttatgatgtttatcaagacaatacattcacagctgaacatagaccctcatcagtaattctaattttgccctttgctttgtgatcttgtttttaccctttgccttgtgatctttgctggacccttatcaggagttcctgattttgtccttgccctatttcctcrgaagcatgtgatctttgctctgccttttgccctttgaagcatgtgatctttgtgacctactccctgttcgtacactccctccccttttggaatccctaataaaaacttgctggtgttgcggctcaggtggccatcacagacctaccaatgtgtgatgtcacccctggtggcccagctgtaaaattcctctctctgtactgtttctctttatttctcaggccagctgacacttaggggaaatagaaagaacctatgttgaaatattgggggcaggttcccctatagatggcttgctgtttcccacagctgaactcattgg

SEQ ID NO: 894445 - DNA, 632 bp, Homo sapiens
taaaagacacagactggcaaattggataaaaagtaaagacccattggtgtgctgtattgaggagacacatctcacgtgcaaagacacacaggggctcaaaataaatggatggaggaatatttaccaaacaaatggaaagcaaaaaaaaaaaaaaaaaaaaagggttgcaatcctagtctctgataaaacagactttaaaccaacaaagacaaaaaaagacaaagaaggacattacataatggtaaarggatcaatgcaacaagacaagctaactatcctaaatatataagcacccaatacaggagcacccagattcataaaggaagtttttagagacccacaaggagacttttactccaacacaataatagtgggagactttaacacccactgtcaatattagacagatcaacgagacagaaaattaacaaggacattcaagccttgaactcagctctggaccaagcaaacctaatagacatttacagaagtctctactccaaatcagtagaatatacattttctcagcacattgcacttattctaaaattgaccacataattggaagtaaaacactcctcagcaaatgcaaaagaatgaaaatcaaaacaaacagtctctcagtccacaac

SEQ ID NO: 894446 - DNA, 592 bp, Homo sapiens
gtagaatattcagaccacagaatctattttggaggtgaaatttagaaaaaatgttttattaattgttctttgaattttgtaggaattctaccttcattgagttaatttctagtctgacatttaaaaagtattgctcattttgttaagtttttcattttactgccacatatttataaactatagtcttttggtttgcaaagttattgttgaataggtttgatagactcctcatcatttctaatttttatgtgtttttcttcatttttcactgatatttgtgtcagaagtttccctgttttatagcttctctcaaaaagccaaaagtggaattatgtacttgtttgatatatttatcttcctgatttattaattctgcttaatacctagtgtgtgtgtatatatatatatatatatgtatgtatgtatatacacacayacacacacacatatatatatatttatttatttattattttttttgagacgaggtcttgctctgtcgcccagattggagtgcagtggcgcaatctcagctcactacaaccttcgcctcccaggttcaagcaattctcatggtgcctcagcttccttg

SEQ ID NO: 894447 - DNA, 642 bp, Homo sapiens
caagaacacaaacttaatgaaaaaccagcttttgttgagatggtttcactccagtaaccttggaagtgttggcgagtaatttgagttttagtgacaagattctgttgctgctagggatggttttggccatttgataggctgagtttttacaagaataatttactgtgtttacagacagcttaggtcttattagggaatattaacccttcccccaagtttaggttctatgtgtgcgtaaattaagagatctatttctgttttggaaagcacacagtatattttaaatataatttttaaatgtaatttttaaaagaaaggctctattttagccttctaaattatatcttctatatacacttggtattgctgaataaccaaaattagctttcgcttttcttgctggaaatttgtaattttcttaacatattctttctgttctgagtaaaagtaaataaaggtaattaaaatacagtattttttwaaaaacttttgaaaaggttcatcttttaaattcttcaatgatatgtaaaagtttctacctatgaatttattttttgttactgataaatttgtattaaataattgatgcctaaaatatatatttagtagaataaagaaattagctataaaacaaaattagaa

SEQ ID NO: 894448 - DNA, 642 bp, Homo sapiens
caagaacacaaacttaatgaaaaaccagcttttgttgagatggtttcactccagtaaccttggaagtgttggcgagtaatttgagttttagtgacaagattctgttgctgctagggatggttttggccatttgataggctgagtttttacaagaataatttactgtgtttacagacagcttaggtcttattagggaatattaacccttcccccaagtttaggttctatgtgtgcgtaaattaagagatctatttctgttttggaaagcacacagtatattttaaatataatttttaaatgtaatttttaaaagaaaggctctattttagccttctaaattatatcttctatatacacttggtattgctgaataaccaaaattagctttcgcttttcttgctggaaatttgtaattttcttaacatattctttctgttctgagtaaaagtaaataaaggtaattaaaatacagtatttttttaaaaacttttgaaaaggttcakcttttaaattcttcaatgatatgtaaaagtttctacctatgaatttattttttgttactgataaatttgtattaaataattgatgcctaaaatatatatttagtagaataaagaaattagctataaaacaaaattagaa

SEQ ID NO: 894449 - DNA, 576 bp, Homo sapiens
cagtaaaatttaatctacttaatctgctcttataattatattctgtgatgttttccaatacaaatagttattccaaccacttttagaacttgtttcctttccaatgtcctttcatagcatcttttagtataaaacaacctttgggataaatattaataacatcaagtcaacacacagagtgcctattcatctttgttcattatatcacttgctctatttagatgaaaatcatataatcaaaaatgccaatatattgtctgtgtgacaaagtgtctccaatgacacatttagtataaaagccatgttgtactaatctgagaatagaatagatctatatctcattctaataataattctcaatgaatagtgtggctctttcaactgatgcattaaacagayaaagatatttcttggagagttcagtcagttggctatgccgccagttataacagaaaccaattttcaagccgtgagttcttgttttttgttttttaccaaaggtactgtttccgtacactggtattaaaaaaatggattattctttttgatataactaagatgaaacattttttcatt

SEQ ID NO: 894450 - DNA, 667 bp, Homo sapiens
aaaaccaaggtactgtgaaatctctctactggagcattttaaagtaaagtataggcactaacagaattaattacagatttttgtttattttcccctatgttctactaggactacaaaaaccataaaactcaccagaatcttacattattttattcaacaaatgtagaagtattgcttgatcaagtaatgtggtgcttgatttttaayaatttactgtagactttgttatcaatatttaactagtttacttcaatattaaacagatcaataaccatttgttatttaaacaaatgtttaaccacaaacatacctatatgtatatggatgtgtgtgtttgtgtatgtatgtataattgagctgcttatatatcatgtagttttttaaacaaaaaaatagataatagcatcttaaaattaaatcttgagacattgggttataagtttcaattttgcttttctttctgcgtattcatggtctgtagaggagactagacttccctaatgttttagtttccaaatattttgccaagtatgaatgaactaggtcaacgaaggaaaacattctttctgaagcctacattaatattctactgtttgaaaaactgggctaacccttcaatcattttgttaatatttgtagcttctcacagagttgtaaaacctcataa

SEQ ID NO: 894451 - DNA, 613 bp, Homo sapiens
ttgtttaggtacttaggtttacaagcttattctgagtgaaaaggcaagttagaagactttcctcccctccttactcactgtcggcatttttgcagttgcctagcccagaccctccccacatttgagttgaagccacttcatcccaattgcagaagctgttgggttgcctggttcaatttctgactaaaatttatctgtatttaagcccctgtccttttataaagctaactccccaaatagcttcagctgtgagtattttgttttgcttatttctcttgttcaacctctcactcaacaagggagctctacctcaacctctggtttcaagcaaacagcatgaatgtctctggtcccccaamtcatgtggaagatactttgtttcctccttttaccacaggaggctgaagttttggccacctgtgttcactgtgggcttagccctgcagctccacttgccgatttgcatttctctgctgattttcagtcattgagttttcattctgttcttaagcctggatttgtcttttggatttttttattcttatactttatttacattgccatgtgtttgaagtggaaataatattttaaattatgaatgctgtaccatctt

SEQ ID NO: 894452 - DNA, 634 bp, Homo sapiens
tctttttcatagaatgctttgttttcttttggctatatagccagtaatgggatcgctgggtagaatgatagtccaggttctttgagaaattaccagactgctttccacagtggctgaactcatttacattcccatgaccagtgtgtaagtgttcccttttcccgcagycttagcagcatctgttgtttcttacttttagacaatagccattctgactggcctgagacagtacctcattgtggttttaatttgcatttctgtgatgattagtgatgtggaacattttttcatatatttcttggccacttgtatgtctttcaagatgtgtctgttcatgttttttgcctactttttaatagcttttttaattattcaattgtataagttccatatagatcctggatatcaggcctttgtttgatgcataatttgtaaatgttttctcccattctgtaggttgtctgtttcctctgttgatagtttcttttgctgtgcagaagctctttaggtcccactttgtcaatttttgtttatgttgtgattgcttctgagaacttagtcataaatttttttcccaaggccaatgtccaaatggtgtcgcctaggttttcttctagcattcttatagtttgaa

SEQ ID NO: 894453 - DNA, 637 bp, Homo sapiens
cagtttagataaatagttatgtatttacatttgagtagggaagtgagaatgctactgaatgtaaacaagtggctacagcttcatgcagttcactttgcatatccacatatgtctattgtgtattcatttgtctgtattaaaaatgcacatagatatttttgtgagtgaataatcaataaagcaagccccataggtatatatgtctacctacctccatctcatatttattaaacacaygtaagcagtcactgaaaaaaggactacaacattgctaaggctacttacaactgtttcttaataaataaatacatgcttcatataaaaatattatttttaaaactgtaatgtaaaaatttcagatgtatggtaaatatgcaaatgcaacaatattagaaaaaactggtctatattctcagtttactgtttacagttgtgagaactgagtgagagtccttattctcccagtgtaataattattacacattatgcttcctgccaaaactagctgactgccttagtcctttgagttgtgaatatcagtatcaattcaaaaacaactatttaataacaactttcttaaagaaaggaagaaaatataattttatgaaatgaccacttttattattcttgagtgtct

SEQ ID NO: 894454 - DNA, 626 bp, Homo sapiens
cagtcactgaaaaaaggactacaacattgctaaggctacttacaactgtttcttaataaataaatacatgcttcatataaaaatattatttttaaaactgtaatgtaaaaatttcagatgtatggtaaatatgcaaatgcaacaatattagaaaaaactggtctatattctcagtttactgtttacagttgtgagaactgagtgagagtccttattctcccagtgtaataattattacacattatgcttcctgccaaaactagctgactgccttagtcctttgagttgtgaatatcagtatcaattcaaaaacaactatttaataacaactttcttaaagaaaggaagaaaatataattttatgaaatgaccacttttattattcttgagtgtctcagaaamtttagtgtaaagtgtcctttgctatccaggatataacagctggttccagataacatggtatgtctcattagagagatactagatctaattatgcaacatataagcaagatcattatagaaacattatctcgatgaggtaagtaaagtacatgtgaaatctaactctgctgtttgaaagaatttttgaaagcaaatgtaaggaattaataattacttaagtgtat

SEQ ID NO: 894455 - DNA, 542 bp, Homo sapiens
tttgctatccaggatataacagctggttccagataacatggtatgtctcattagagagatactagatctaattatgcaacatataagcaagatcattatagaaacattatctcgatgaggtaagtaaagtacatgtgaaatctaactctgctgtttgaaagaatttttgaaagcaaatgtaaggaattaataattacttaagtgtatgaagaaagctgttgcaaactacttatgaatctttgacatgtaatgaaaaaatataatagaawgataagtaccctgattatttgtgctagagataaaaatgaacttctgggcaaatatcttttgctaccgacaaattttttttctaaacagtaaaaatgagtgccttttcatagcatttctactgtgtcagaaattctcaaactttagagtgtaactgaaacacagagagggcttattaaaacaaagattgccggtctccaatctcagattctgttcaataaggctaggtagagccagaaaatttgcatttctaaaattcccaactggtgttcatg

SEQ ID NO: 894456 - DNA, 611 bp, Homo sapiens
ctgttatttattaacagttatttaaggacttgtaccctataaacagaaactatacatttttcaagcatctatgatttaccaaaatagactagtattagttaagaacaagataataataataaataacagaaatttcaggaattacataaggtcacaacttaataatacaaaaaaaataatcttttcataaaaacattccccaaaaatattaaaaacaaacaacaaatcaataacaacattaaaataagcaaaccatttgcctaaataactgttgtgacaaaaggcaaactaaaccataactgtaggccatttaagarcctactaaattacagcaccacgtttcaacactgatgtattaccaaagctcttcttagagacaaattcataggctttaacagtctattaaaaagaagtataaaagaatcatgtctttatcacaggaacttaactggactacaataaagcaaagatgaaacttagaaagaacacaaatttaattgcattagagaaattggaaaatcaacaagtaaatcacagaactaatatttttaaagaaaaaaattcgttactattttaaaaggaataagcagcaggaaaaaaatgagaaagaa

SEQ ID NO: 894457 - DNA, 611 bp, Homo sapiens
ctgttatttattaacagttatttaaggacttgtaccctataaacagaaactatacatttttcaagcatctatgatttaccaaaatagactagtattagttaagaacaagataataataataaataacagaaatttcaggaattacataaggtcacaacttaataatacaaaaaaaataatcttttcataaaaacattccccaaaaatattaaaaacaaacaacaaatcaataacaacattaaaataagcaaaccatttgcctaaataactgttgtgacaaaaggcaaactaaaccataactgtaggccatttaagaacctactaaattacagcaccacgtttcaacactgatgtattaccaaagctcttcttagagacaaattcataggctttaacagtctattaaaaagaagtrtaaaagaatcatgtctttatcacaggaacttaactggactacaataaagcaaagatgaaacttagaaagaacacaaatttaattgcattagagaaattggaaaatcaacaagtaaatcacagaactaatatttttaaagaaaaaaattcgttactattttaaaaggaataagcagcaggaaaaaaatgagaaagaa

SEQ ID NO: 894458 - DNA, 610 bp, Homo sapiens
accagcacgtacacatccagatggccggttcctgccttaactgatgacattccaccacaaaagaaattaaaatggcctgttcttgccttaactgatgacattatcttgtgaaattccttctcctggctcatcctggctcaaaagctccccaactgagcatcttgtgacccccactcttgcctgccagagaacaaccccactttttcctttacctacccaaatcctataaaacagccccacccctatctcccttcgctgactctctttttggactcagcccrcctgcacccaggtgattaaaatctttattgctcacacaaagcctgtttggtgatctcttcacagggatgcgcatgaaagaatgtgccacagaaaatgagacacatcaatgagggtaggtttgaaataccaatttaaagcagactttcaccgtttggccaggctataaacattaaaaatccataactaagatcttactatatattcaggcattttaagaactctgcatatataattacatttgacccttctaatgcctttatcagataggttctattattgctcttttttaaataaagaagataaactttgaagagattaataaattaat

SEQ ID NO: 894459 - DNA, 610 bp, Homo sapiens
gagataacatctgaatagagacccagatgacaagaaaaaaacagccatcaaaaaatctagaaaggtgatggcaggtagagaggatgaaaggtacaaacacaatgaactgagaatattagacagccaggatggctagaacctagtaagcaaatgggaaaaaatgtagggaataagttagaggcagggaggcagatagggactaaaattacatatgggaggctctgtaaggcatttgaatgttattcatgtggaaaaagttatagccaaagggaggatgctatgattttctcaagttgggttaggtaccccttgggttatgttttaatttgactgcttttgttgcagccagaaggttgtagaatgaggtggagtatttcccatgggagctgtggttctgggcagataaaasaatgcacaattctattctcttcacaattctgttcaagtacttctgttataaatccccttaacagtaagtgcccccattgtcaatcacagtggccactgctcttccaaaaccagctttatctaggttttattttctaccagttttcaatatcttaaattttcttctcttttatacaattttaaggctgtttaaaagggctag

SEQ ID NO: 894460 - DNA, 605 bp, Homo sapiens
ggccaataccttaaattcatcctggtgagatatgagcagagaactcagctatgccatgctcagatttctcacctgtagagcagtaaattaataagtgagcattatttgaagctgctaagtttgtggtgatttgttacacaycaagagaaaacatatgctgtatatattattagatttttcctttatattggtgggtgtatttgttatctattacttcctaacaaatcgacaataattaagtgtcttaagacaacacatatttattacctcatagtttctgtgggtcagaaatctgggcatggtttatgtgagttctttgatttaaagttgttggcaaatctgtaaacaaggaagcagtcaggaccgaggtctcatctgaaagtcaacttgggatgggtctgcttccagcctcacttaacataacagctggcaggattcagttgctcttgggtagttggattgatggcctcagataactaggtagctattagctagatttcaccctcagtttgttgccgtgtgggcctccctaaggtggcaatttacttcatcaaaaccagcaagggagagagttggctacaatctctagtaatgtagctacagaa

SEQ ID NO: 894461 - DNA, 605 bp, Homo sapiens
ggccaataccttaaattcatcctggtgagatatgagcagagaactcagctatgccatgctcagatttctcacctgtagagcagtaaattaataagtgagcattatttgaagctgctaagtttgtggtgatttgttacacatcaagagaaaacatatgctgtatatattattagatttttcctttatattggtgggtgtatttgttatctattacttcctaacaaatcgacaataattaagtgtcytaagacaacacatatttattacctcatagtttctgtgggtcagaaatctgggcatggtttatgtgagttctttgatttaaagttgttggcaaatctgtaaacaaggaagcagtcaggaccgaggtctcatctgaaagtcaacttgggatgggtctgcttccagcctcacttaacataacagctggcaggattcagttgctcttgggtagttggattgatggcctcagataactaggtagctattagctagatttcaccctcagtttgttgccgtgtgggcctccctaaggtggcaatttacttcatcaaaaccagcaagggagagagttggctacaatctctagtaatgtagctacagaa

SEQ ID NO: 894462 - DNA, 605 bp, Homo sapiens
ggccaataccttaaattcatcctggtgagatatgagcagagaactcagctatgccatgctcagatttctcacctgtagagcagtaaattaataagtgagcattatttgaagctgctaagtttgtggtgatttgttacacatcaagagaaaacatatgctgtatatattattagatttttcctttatattggtgggtgtatttgttatctattacttcctaacaaatcgacaataattaagtgtcttaagacaacacatatttattacctcatagtttctgtgggtcagaaatctgrgcatggtttatgtgagttctttgatttaaagttgttggcaaatctgtaaacaaggaagcagtcaggaccgaggtctcatctgaaagtcaacttgggatgggtctgcttccagcctcacttaacataacagctggcaggattcagttgctcttgggtagttggattgatggcctcagataactaggtagctattagctagatttcaccctcagtttgttgccgtgtgggcctccctaaggtggcaatttacttcatcaaaaccagcaagggagagagttggctacaatctctagtaatgtagctacagaa

SEQ ID NO: 894463 - DNA, 605 bp, Homo sapiens
ggccaataccttaaattcatcctggtgagatatgagcagagaactcagctatgccatgctcagatttctcacctgtagagcagtaaattaataagtgagcattatttgaagctgctaagtttgtggtgatttgttacacatcaagagaaaacatatgctgtatatattattagatttttcctttatattggtgggtgtatttgttatctattacttcctaacaaatcgacaataattaagtgtcttaagacaacacatatttattacctcatagtttctgtgggtcagaaatctgggcatggtttatgtgagttctttgatttaaagttgttggcaaatctgtaaacaaggaagcagtcaggaccgaggtctcatctgaaagtcaacttgggatgggtctgcttccagcctcacttaacataacagctggcaggattcagttgctcttgrgtagttggattgatggcctcagataactaggtagctattagctagatttcaccctcagtttgttgccgtgtgggcctccctaaggtggcaatttacttcatcaaaaccagcaagggagagagttggctacaatctctagtaatgtagctacagaa

SEQ ID NO: 894464 - DNA, 630 bp, Homo sapiens
gtagggaaagcggtagctaagatgtagttgaggctgggctgacagaatcaggtcaaagtgttctgctccattttgatgtgtcttaatatggagttactcagatgaagttaaatctgtgtaagtcctgagtttggataaaggaaaaacacttcagtgaacatatggagttcccttcagtartttagtttagtcacatatattgatcaaggttaccccaaataatcagaagctattaaaacttatcgaagcctccaaattatttaatgacaacagagttaggaggcaggaaccaaccaataaattctacatttaaaaaaatcaaactggttatttgtggaaataaatatgaaattcctgctactggtttatttatttattttaatgtaaaaattaactttttactttaaacttagatatacagaaaagttttcaagatagtacagaattcctagtacgttagtatggcacacctgtcacaagttatgaatcaatattaatacagtattattaactaaggtctatactttatttaaattttctgtttccctaacattgctttttctgttccagaatctcatgcaagataccatattacatttgttcagtatgtcttcttaggtttctcttagc

SEQ ID NO: 894465 - DNA, 630 bp, Homo sapiens
gtagggaaagcggtagctaagatgtagttgaggctgggctgacagaatcaggtcaaagtgttctgctccattttgatgtgtcttaatatggagttactcagatgaagttaaatctgtgtaagtcctgagtttggataaaggaaaaacacttcagtgaacatatggagttcccttcagtaatttagtttagtcacatatattratcaaggttaccccaaataatcagaagctattaaaacttatcgaagcctccaaattatttaatgacaacagagttaggaggcaggaaccaaccaataaattctacatttaaaaaaatcaaactggttatttgtggaaataaatatgaaattcctgctactggtttatttatttattttaatgtaaaaattaactttttactttaaacttagatatacagaaaagttttcaagatagtacagaattcctagtacgttagtatggcacacctgtcacaagttatgaatcaatattaatacagtattattaactaaggtctatactttatttaaattttctgtttccctaacattgctttttctgttccagaatctcatgcaagataccatattacatttgttcagtatgtcttcttaggtttctcttagc

SEQ ID NO: 894466 - DNA, 630 bp, Homo sapiens
gtagggaaagcggtagctaagatgtagttgaggctgggctgacagaatcaggtcaaagtgttctgctccattttgatgtgtcttaatatggagttactcagatgaagttaaatctgtgtaagtcctgagtttggataaaggaaaaacacttcagtgaacatatggagttcccttcagtaatttagtttagtcacatatattgatcaaggttaccccaaataatcagaagctattaaaacttatcgaagcctccaaattatttaatgacaacagagttaggaggcaggaaccaaccaataaattctacatttaaaaaaatcaaaytggttatttgtggaaataaatatgaaattcctgctactggtttatttatttattttaatgtaaaaattaactttttactttaaacttagatatacagaaaagttttcaagatagtacagaattcctagtacgttagtatggcacacctgtcacaagttatgaatcaatattaatacagtattattaactaaggtctatactttatttaaattttctgtttccctaacattgctttttctgttccagaatctcatgcaagataccatattacatttgttcagtatgtcttcttaggtttctcttagc

SEQ ID NO: 894467 - DNA, 637 bp, Homo sapiens
tctgctgctactacacaaaagttcaatcctgctacttttcttccaagaggaattggtaatcacctatctgggagaattgccctttgaaactgcaatctaaatgctagcctttgcttactcttgacaaatttatctaaaaactgtgtaaaggtcattttaacgttaccaatgagactaatgatagacgtgtacccccttggctatagtcayggctactactacctgggatatacattttcaactttaaaaatggtttatgagtgtgttatctgtccaacagttacatctgttagcaatgtactatataaactttacagttggtagaaaaactttaataaaggcttttgtatactgagattacatgggaaaggaaaataatattttagtgttgaaggccttctgggcctcttttcttttatttctctgagtcagcagcatgtgcaggctcatgtatttgagtggttagccaaactctgccaacattttgcccaacgtgaaatgcccatgtaacaaagaatctacgtcctttttaaatttaaaacatgttggtccatgtctacagatttaaaagcaacaatacaaattgctcaaatggaaaatccttaatttaaaaatacaatcaatgcaagccacaact

SEQ ID NO: 894468 - DNA, 617 bp, Homo sapiens
atcagttctctgctgagatctcagaatactaaaaatcaaggtgtcatctggtgatatgagttggctgtgtccccacccaaatctcatcttgaattgtggctcccataattcccttgygttgtgggagggacccagtgggaggtaattaaattatagaagagggtttttctcatgctgttctcatgatagtgaataactctcacgagatctgatggtcttataaagggcagttcccctgcacatgctctcttgcctgctgccgtgcaagtcgttctttgctcctcctttgtcctccaccatgattgtgaggcctccccagccctgtggaactgtgagtcgattaaacctccttttctttataaattacccagtctcaggtatatctttcagcagtgtgggaataaactaatacatctgggctgaatttttttatggagcttgaaatctttttctaaacatacatgttttgggcaagttttagttccatgcagttatagcacttaggtccctgtttccagctctcagccagaggccactctcagctccttgccaagtggcacctccaagttcaaagccagcagcatagtatttctttttcatccaatcaccctcacctt

SEQ ID NO: 894469 - DNA, 618 bp, Homo sapiens
cttgtatctattggtttttactgacccatgaaaatggctggagttagtctgatctcaccatgtagaaaggtcaggttcatggcttggatttgagaacagcagaatgaatcaactttgaggaagaagctgatttaaaaaaaaagaaaatgtctatttacattgagcttataagaaataggtagagatcaagaagaaaacaagtatggaattacttcaggatattttaaaagcacttccatttaggtatccttgactaaatctgtcaactttgtatccattttctcatgaagaaagtgttgaacttttcactagaagtacttttttttattcctcagttaaaacatgcctgttattctttttgtaatacttaagcaattttwttttaaagatatactacttagttcatccgtctccacttgttttttttttttttttgcaattatgtgtttgtttcctttaatacaactgctataaaagcaatcatgttcatggagaaataagtataattcataaaactagcatgccttgcagagatacaagtaaaaatatagttgtgtgtgtgtgtttatttactgagatgaatttaattcctggagattattttaagctttggaaatg

SEQ ID NO: 894470 - DNA, 691 bp, Homo sapiens; identical to SEQ ID NO: 882916

SEQ ID NO: 894471 - DNA, 610 bp, Homo sapiens
gccactgcacccagctgataatagctgctttgaggaaactcaatgatatctaaaataacacagagaaataattcagaatcctatcagataaatttaacaatgaaatggaaataactaataagaaccaagcaaagattctgaagcwgaaaaatgtaattgacatactgaagaatgcatcaaagtctctcaagaacagaattgatcaagcagaataaagaattagtggtcttgaagatgggctatttggaaatgcccagtcagagaaggccaaaaaaaaaagaagaatgaaacacaactacatgatctagaaaacagcctcaaaagggcaaatgtaaaagttattggtcttaaagaggagatagagagagagagatcagggtagaaagtttattcaaagggataataacagaaaacatctcaaacctagaaaaagatatcaatattaaagtacaagaaagttatagaacacaaagcagattttaccaaaataagactacatcaagacatgtgataattaaactcccagaggtcaagaataaagaaaagatcctaaaagtagcaagataaaagaaacaacatacaaaggagatccaataaatctaccagcagg

SEQ ID NO: 894472 - DNA, 610 bp, Homo sapiens
gccactgcacccagctgataatagctgctttgaggaaactcaatgatatctaaaataacacagagaaataattcagaatcctatcagataaatttaacaatgaaatggaaataactaataagaaccaagcaaagattctgaagcagaaaaatgtaattgacatactgaagaatgcatcaaagtctctcaagaacagaattgatcaagcagaataaagaattagtggtcttgaagatgggctatttggaaatgcmcagtcagagaaggccaaaaaaaaaagaagaatgaaacacaactacatgatctagaaaacagcctcaaaagggcaaatgtaaaagttattggtcttaaagaggagatagagagagagagatcagggtagaaagtttattcaaagggataataacagaaaacatctcaaacctagaaaaagatatcaatattaaagtacaagaaagttatagaacacaaagcagattttaccaaaataagactacatcaagacatgtgataattaaactcccagaggtcaagaataaagaaaagatcctaaaagtagcaagataaaagaaacaacatacaaaggagatccaataaatctaccagcagg

SEQ ID NO: 894473 - DNA, 525 bp, Homo sapiens
aaatcctcaataaaatactggcaaacagaatctagcagcacatcaaaaagcttatccagcacgatcacgttggcttcatccctgtgatgcaaggctggtttaacatacacaaatcaataaatgtaatctgtcataaaaactgaacaaaaacaaaaaccacatgattatctcaatagatggtgaaaaggyctttgacaaaattcaacaatgcttcatgctaaaaactctcaataatctaggtattgatgggatgtatctcaaaataataagagctatttatgacaaacccacagccaacagcatactaaatgggcaaaaactggaagcattccctttgaaaactggcacaagacagggatgccctctctcaccactcctgttcaacatagtattggaagttctggccagggcaatcaggcaggagaaagaaataaacggtattcagttaggaaaagaggaagtcaagttgtccctgtttgcagataacatgattgtatatttagaaaaccccattgtctcagccca

SEQ ID NO: 894474 - DNA, 597 bp, Homo sapiens
gaaaagagaattcataggcccttgaatattttctacatatggaaacaaatgacacatattgtctggctaaccaaaacccaaaagttaaaaacaaaatatacatctttaagggttagagaaaaggaaacagataggaatagccttaggaattcaaaattggaggaacaatgtagatcattgtgaggtggcttcttttttagcagttaatttggatacattaatcataatcaactctctttaatcagaaattgggatttcctgaggacttttcattaattgcaaaccagagcagtaggcaaattattcttcactgcagatcagagtattcctttgtgggttatgttcgtatcccacagaatgaagttcaaatagaatttttactgaattttgctatcatattaccacacatcccccattaattcattactgctaatagaatacatgtgtgttcctcwaatggtagaccatgaaatgactgagctaatgagtaaaactgagcttctacaggtatagctgggagcatgcaggggaatggtataagggctgttgttctattcagcacagaagcagttaagtcagcttcatattctcctctat

SEQ ID NO: 894475 - DNA, 658 bp, Homo sapiens; identical to SEQ ID NO: 882917

SEQ ID NO: 894476 - DNA, 658 bp, Homo sapiens; identical to SEQ ID NO: 882918

SEQ ID NO: 894477 - DNA, 610 bp, Homo sapiens
gtgaacataaatccaacctttccagtaaaagcattaaatgcaaatggatgaaacacttcattcaaaggacagagactgacaaaacaaataaaagcaaaaatgatctaattatatactatctacaagagacacacattagattcaaagacatataaattgaaattaaaggatgaaacagtgtatatcatgcaaatagtamacaaaagagaactcaagtagctatatcaacataaatcattcacacactcttccaaaaaaaagatgagaaacacttcccagtttatttgaccagtattaccataataccagtccaaagaaatcataacccaaaaaaataaataaaatagactgtaaaagaaaaagtgaaaccagagacaaaaatgggcatattgtaatgataaacaggcaagccatctggaagacaaagcaattaaaaacatgtatgcactaatgaaagcacctcaaatacatgaagcaaaaaaaaaaaccagtattgaatggagaaatgaacaattcaacaaaacaatttatgactttaatacctcactttcagtaatgggtagaaaaactaggcaaaatatcagccaggaaacagatgcttgaacaatac

SEQ ID NO: 894478 - DNA, 628 bp, Homo sapiens
ctatcagacaaacaacagattttttagcagaaaccctacaagctagaagtgattggggtcctatctttatcctcctttaaaaaaaaaaattatcagccaagaatattgtatccagcaaaattaagcttcattaatgagtaaaagataaagtctttttcaaacaaacaaatgctgacagcatttgtcactgccaaatgaatactaaaagaattactaaaaggggttccaaattttgaaacaaattctcaaaatacaccaaaatagaaacttcttaaggttcttaaagcacaaatctcacagggcctgtaaaacaataacmcaataaaaaaaaaaaaaaaaaaacaaggtattcaggcaacaaatggcatgatgaatagaaaagtacctcacatctcaataccaacattgaatataaatggtctaatcgctcaacttaagagatacagaatggcagaatggataaaaattcaccaagcaagattctgctgtcttcaagaaactcacctaacataaaaggatttacataaacttaaggttaaagggtagaaaaatatattccatgcaaatgaacaccaagagccaacagaagtatctattcttatattagacaaaacagactttaaagaaa

SEQ ID NO: 894479 - DNA, 590 bp, Homo sapiens
ggaatacactaccatcttcattgtgcttggagaccacgatgctcaggaaagatagaaaagacaaatgatattataaaaaaggcacctcagaaaactatctccctcagactaatcttccctagactaaccttctcaccatagctctactacatatttaaaacagccctttaaagctaggtttgagtccttttgaaatgatgtatggacagccttttctcaccaatgatttcttgctagacaaataaatctctgatttgctagacaaataaatctctgatctttggcccatttccaacaggaactggagcaactgtcagaggcccaatcccatgaatttgggccacttctattcaacccaggggacctagtactgatgaaggtacttccttcccttcctccctctataaacccagattggaagggactttacgctgtacttgtttccactcctacagcactgaaagtcactggaatatgttcttggatttattatacccaagtaaaggcctggaaagctcacagagttacctccatcaacccagaagaccaccgaaagtamcaatgtgaagagatcagagatctcaagttaa

SEQ ID NO: 894480 - DNA, 533 bp, Homo sapiens
aaaagaagtcattatacaaaaaaagatacttgcacacacatatttatagcagcacattttgaaatggcaaaaaatatgaaaatagcccaaatgcccatcaatcaatgagtagataaaaaaaattgtgtgtgtgtgtgtatatatatacatatatatataaagaaattgtgtgtgtatgtatatatatatatatacaccatggactactactaagccacaaaaaggaacaaaatartggtattagcagcaacttggatggaattggagacttattctaagtgaacaaactcaggaatggaaaacctaacattgtattttctcactcatatgtggaagctaagctatgagtgcacaaagacatgagaataatagactggactttggagactcaggggtaagggtgggaatggcaaaagataaaagactgcatattgggtacagtgtacactgctcgggtgatgggtgcacccaaatctcagaaatcaccactaaagaacttatccatgtaaccaaacactacctattccccaaaa

SEQ ID NO: 894481 - DNA, 607 bp, Homo sapiens; identical to SEQ ID NO: 882919

SEQ ID NO: 894482 - DNA, 577 bp, Homo sapiens; identical to SEQ ID NO: 882915

SEQ ID NO: 894483 - DNA, 564 bp, Homo sapiens
ctaaagacatagatttggaagttattggcatataggtcatgttggagtcatgtaagtgaatgaattatcaagggcagaaagaagagagaggaaaaaaggtagaactcctgagtaacaccaatagttatgggatgtagacagagaaattactagaaggaataaacagagaggttggaaggtaatctagacaccgtggtgcatgcagaaaacctaagaggagagaaaataattctaaagcgggaataatcaatactgccaaattctgcagaaggggaaaaataaggataaggacagaaaagtggccaatagagtctgtatcataaatccagagagagaagagaaaaaaaactaagactacaggtctattgtgccatcartgacttgagatattgccttaatactggctaacagagatattgtgtctaactgaacatcctaggaagttaatacagaggttacttcttcttatgcatatttgaataatattaaatatattcatatagctattaaaaagtataagacagctatatagtaaatttacactagtattttatgagcaggagg

SEQ ID NO: 894484 - DNA, 576 bp, Homo sapiens
cacggagccgaatgttaatctccaagacaatggggaaaatatctccagggagtatcagaggctgtcatggcagctcttcccatcacagtcccagaggcctaggaggaaaaggtggttttgtttccggccccagggtccccatgctgtgtgcagcatagggacttggtgccctatgtcccagctgctccagccgtggctgacaggggccaatgtagagctcaagctgcagcttcagagggtgcaagcctcaagacttggcagcttatacatgatgttgagmctgccagtgcacagaagtcaagaattgggctttgggaccctccacctaaatttcggaggttgtatggaagtgcctggatgttcaggcagaagtttgctgcaggggtggcactttcatggagaacctctgctagggcagtgcacaaggtaaatgtggggtcggaacccccaaacagagctcctacttgggcactgcctagtggagctgcgagaagaaggccaccatcttccagaccctagaatggtagatccaccaacagcttgcaccgtgcacctggaaaagccacagagactcaa

SEQ ID NO: 894485 - DNA, 653 bp, Homo sapiens; identical to SEQ ID NO: 882922

SEQ ID NO: 894486 - DNA, 606 bp, Homo sapiens
tctttttgcttcagattgctttatctatttgggctcctctttggttcctataaaatttaaaatagtttttttctaattctgtaaaatatgaccttggaagtttgataggaatagtgttgaatctgtagactgctttaggccatatgtccattttaataacattgacttttctaattcatgagcatagaatatttttccatttatttgtgtactctgtggtgtctttcagcggtgttttgtataatattctccttacagacatctttcaccttcttggttagatgtattcctaggtaactyagttttttgtggctattgtaaataggattgcattcttgatttgactcttagcttgaacaccattggtgtatagaaatgctactgatttttgtactttgcttttatatcctgaaacttttttctcatttgtctgaatcatctaggatttgttttagcagtgtcttgtagtccctttgtagagatccttcacctcctgggttagatgtattcctggatatttgcttacgtttttggtagctattgtaaatgggattgtattcttgatttggctctcatctcgaacattactgatgtatagaaatgcta

SEQ ID NO: 894487 - DNA, 680 bp, Homo sapiens
aagactggttcagcatatgcaaatcaataaaaaaaattcatcacataaacagatctaaagacaaaaaccacatgattatctcaatagatgcacaaaaagcctttggtaaaattcaacatcccttcatgttaaaaactctcaataaactaggtattaaaggaacatacctcaaaataatgagtcatttattacaaacccacagccaatatcatactgaatgggcaaaacctggaagcattccccttggaaatcagcacaagacaagkatgccctctctcactactccttttcaacacaatattggaagttctcaccagggcaatcgggcaacagaaagaaataaaagtattcaaataggaagagaggaagtcaaactgtctctgtttgcagatgacataatcctatatctagaaaaccccatcatctcaggccaaaagcttcttaagctgataagcaatgccagcaaagtctcaggatacaaaatcaatgtgcaaaagcacaagcatttctatacaccaacaacaggcaagcagagagccaaatcatgaatgaacttccattcacaattgctacaaagagaataaaatacctaggaataaagctaacaagggaattgaaggccctcctcaagaagaactacaaatgactgctcaaggaaatcagaaaggacacaagcagat

SEQ ID NO: 894488 - DNA, 595 bp, Homo sapiens
aaagtctcaggatacaaaatcaatgtgcaaaagcacaagcatttctatacaccaacaacaggcaagcagagagccaaatcatgaatgaacttccattcacaattgctacaaagagaataaaatacctaggaataaagctaacaagggaattgaaggccctcctcaagaagaactacaaatgactgctcaaggaaatcagaaaggacayaagcagatggaaaagcattccatgctcatggatagaagaatcaatatcatggaaatggccatagtacccaaaataatttatagattcaatgctattcccattaaactaccattgatattcttcagagaattcttagaaattcttagaaaaagctattttaaaattcatatggaaccagaaaagagttcatatagccaagaaaatcctaagcaaaaggaacaaagctggaggcatcatgctaccagacttcaaactatactacaaggctacagtaaccaaaacggcatgatattggtacaaaaacagatatataaaccaatgtgaaataatagagaactcagaagtaagaccacacatatacaaccacctgatcttcaacaaccccaa

SEQ ID NO: 894489 - DNA, 658 bp, Homo sapiens
aagagaataaaatacctaggaataaagctaacaagggaattgaaggccctcctcaagaagaactacaaatgactgctcaaggaaatcagaaaggacacaagcagatggaaaagcattccatgctcatggatagaagaatcaatatcatggaaatggccatagtacccaaaataatttatagattcaatgctattcccattaaactaccattgatattcttcagagaattcttaraaattcttagaaaaagctattttaaaattcatatggaaccagaaaagagttcatatagccaagaaaatcctaagcaaaaggaacaaagctggaggcatcatgctaccagacttcaaactatactacaaggctacagtaaccaaaacggcatgatattggtacaaaaacagatatataaaccaatgtgaaataatagagaactcagaagtaagaccacacatatacaaccacctgatcttcaacaaccccaacaaaaacaagcaatggggaaaggattccctatttaataaatggtgctgggagaactggctagccgtatgaataaaattgaaactgtaccccttccttacaccttatacaaaaattaacttaagatgggttaaatatttaaatataaaacccaaagctataaaagcactacaag

SEQ ID NO: 894490 - DNA, 662 bp, Homo sapiens
ggttcttaatcaggctgagatggctgaaatgatagaaatagaattcagaatatggacagaaacaaagatcattgacatacaggagaaagtgaaaacccaatccaaggaatctaaggattacaataaaacaatataggaggtgatagataaaatggtcattaaaagagagaaccacactgatctgacagagctgaaaaacacactacaagaatttcataatgcaatcacaagtattaacagcagaattgaccaaactgaggaaagaatatcagggcttgaagactctctctaaaacaactcagtcagagaaaaattttwaaaaaaataaagaatgaacaaaagctctgagaaatatgccattatgaaaagaaacacattctacgattcactggcgtttgtgaaagaaaggaagagaaattaaccagcttggaaaacatttttcaggatattgtccataaaaatttccccaaccacactagagaagccaatattcaaattcagaaaatttagagaatccctgtgaaatactaaacaagaagaccatccccaagacatatagtcatcagattctccaaggtcaaaatgaaagaaaacctgacaagaaagctagagagaaagtgcaggctgcctactgatatggtttggctgtgttcccacccaaa

SEQ ID NO: 894491 - DNA, 546 bp, Homo sapiens; identical to SEQ ID NO: 893785

SEQ ID NO: 894492 - DNA, 648 bp, Homo sapiens; identical to SEQ ID NO: 882924

SEQ ID NO: 894493 - DNA, 648 bp, Homo sapiens; identical to SEQ ID NO: 882925

SEQ ID NO: 894494 - DNA, 632 bp, Homo sapiens; identical to SEQ ID NO: 882928

SEQ ID NO: 894495 - DNA, 632 bp, Homo sapiens; identical to SEQ ID NO: 882929

SEQ ID NO: 894496 - DNA, 595 bp, Homo sapiens
tgatcatgctaccacactccagcctaggtgacagagtgataccttgtctcaaaaaaaaaaaaaaaaacagtacaagtggccaacagatatatgaaaatatgctcctgctcaacattactaatcatcagggaaatgcaaatcaaacccatctggtttttgaaagcaggatttatgctcctggattgagtaaacctgaagggttyttggacaatttgggatgaagaaatctcaagaaaaaaacatttattggcaccaataatagcaggttggaggtcccaaataattaactggagagaaagaaaggaattctagctaccttatactggagcatcagttcataacagctagattatagattatgggtttttttttttttttttttttttttttttcagaattagccattgataattcagtttcataaattgcctgttcttattctttgtcagtttttagcatacattctttcctaattgttgtgaaagttccttcatatattttggctcctattctaatttttaactcctaattgttttccttccttataaaatctaatctcgtttattttttctcaccattttttgtcagttgcaaa

SEQ ID NO: 894497 - DNA, 573 bp, Homo sapiens
tatttcctgggggcctgctttttgatttctcattggggatagggagctgggaattgatatttgaaaagtacaaagaagagcaagtgtgtatacttatgccatttctcattgttactaatttatcttgctgtattaatttccttagctctgagtacatattaacagtctatactgagtaacactcgtgggaattaaagaactaaaactcctagacaatgaagagcataatttctacttccctgtattttcttctctttctcagcaatatatatatatatatatatagctatatatatatatatacacatatatatagctatatatatayacacacacacatatatatatatatatatatttttttttttttttttttttttttgagatggagtctcgctctgttacccaggctggagtgcagtggcgcgatcttggctcactgcaacctctgcctccgggtttcaagcgattcttctgcctctagctgggactacaggtgcctgccaccacacccggctagtttctgtatttttagtagagacggggtttcgccatgtgggccaggctggtctt

SEQ ID NO: 894498 - DNA, 729 bp, Homo sapiens
agaaacctgtgttggtagaatcttgttttattgtggacgggttgtagtgaggccctgaatttcctagcagctattttaaataactatccgttattagatatgtttagattgctggttatatgggagaaaatggatatagaaaggatgagcgttagagttagaataccatattacccatagatgtttgatgcacaaagcattgcatcagttatttatttgctggtaatttattctaataaaggatttattggtagtttgaagaactggaagagaacaaggctcatttcattgaagactcccagaatgaaataatttgcaaaacttatttaaaagtccaattgatgtagtctccagagcacctggtcagattgaaaaataaacagatttgtttggaaaaatcaacagtgcagttaaatatgtgttgacccttattttaaaaatgtaagtaggagcagatgaaggggaatacaattaaatttgttaaggagttactaagaaagagtaaggtcatggttgataaccttagttgaagataccccactgaatatgataaatcrtgttgagccagttttgggaaacaatttgacaatttcttacagtgttaaaatatgtacagtcaccatatgatccagcagttactaagacaaaggaaagcatacgccagtgttcacatgagtgttcaagcagcattattcataatactgcaaaacaaaaatgcatttaccttta

SEQ ID NO: 894499 - DNA, 579 bp, Homo sapiens; identical to SEQ ID NO: 893733

SEQ ID NO: 894500 - DNA, 618 bp, Homo sapiens; identical to SEQ ID NO: 893734

SEQ ID NO: 894501 - DNA, 610 bp, Homo sapiens; identical to SEQ ID NO: 893735

SEQ ID NO: 894502 - DNA, 647 bp, Homo sapiens
aattaaaaaggagttttaggagttttagttgactggaaaaattcctggaaatggatctaaaagggagcagaaatgccttgcttttaaaccatagatgttttaacaaacaaaaaccttcaaatcccttataatcagatttcagccaggacaaacaaaaagtaggcctctcattcaatttgtttggttctaaaatgtgatttatttttcaattgtgtgtgcaaatatattaatttaggaattttaaatcaccctcatttttgccattgtgatggccatttgggggtcatcttgagtcatgtgggtccatttacataggtatttgccagatggagcttyataggtattacatgaaaacccagctagtgtttccaagggggattgtcccttcagggaaagctcagttttgatgagcagtttcccataattttagaaattccttttcaaatatgaccaaggccaggacagtgtatcaggttgaagtgtgctgttttgtgagtgtcacttctcaaagagtcaccagagagtcatgacttgcttttcatgtgtcttgtaatctctgatcaccttatggtggcagagtgttcaagacgccaggcaaccagccctcgcacgtaccttctggctgagctgaaagtcatcacaggtat

SEQ ID NO: 894503 - DNA, 631 bp, Homo sapiens
attctttgtatcacaaattctagaaccataaagataatgagtgagggtcacattgtgcaacttgtgataacattttaggtaatttatcaactagtctggaaactgcagagaagcaaagaaagaacaaaatgcctttaaataattgcccctgggaatgggtgcaccaggagtgtgctgaagtttcwtactcatgtctctctgggcctgattaattttacatacctcacatagcacagaccgctctgagctacttttctttctcactttcttctaaggagatcacaagtatttcatgtattaccttatgttcatgacattcttactattgtatatctgctttatattgtggcattgaaggttcatctccatggtggcagagatgaacatgactctgagagcaatgactttcccatcaatcatgaaagacatatttattcaccaccattctgtattagggatcctattgtgtactgagttactgcagtacccacaagggagtctctgaaaattctgacccccaggacctctatagggcacacttggcatcagatttaattggaaaagcataaggcaagccatgcagcatgccagaatgacagcatcaggcacccctttttaataagacttcttg

SEQ ID NO: 894504 - DNA, 622 bp, Homo sapiens
aaatactttaaagaaatagatttatagttgtacaatttgcagttgtactgtttcctgcttaaggcattgattgaaaatcagtgacttttttttttttttggctaaagaaacatcacatttctttcagtcactgggttgagagagccaaaatatacacacagaaaaactgagtctttggtttgccaaaattcaatgtcagttgaatttacagccttgccatgtgtctgatacaaagtttgggcattgatgttatcctcagcmaactaacacaggaacagaaaaccaaatgcctcatgttctgccttgtaagtgggagctgaacaatgagaacacatggacagagggaggggaacaatgaacactggggcctgtgggtcagaggaacaacggggacagggagagcatcaggataaatagctaatgcttgtggggcttaatagctaatgcatgtgggtgcagcaaatcaccatggcacacgttaacctatgtaacaaacctgcacgtcctgcacatgtatcctggaactcaaaatcaaattaaattaaaaaaaatctattactttgtcttgtttaaaaaaatgagttacaagttacatacaataaaatatgcccttttgaatgtg

SEQ ID NO: 894505 - DNA, 620 bp, Homo sapiens
agcaccatccaatcagctgagggcccagatagaacaaaaaggcagaagaaaatcagattcactctctctcttctggagctgaaacaactttcttttcctgccataggacatcaggaccccaggttctctggtcttgggactctgagacttgcaccaggaatcctgcccaggctctcaggcctttggactcagactgagctacttcactggctttcctggttctccagcttgaagatggcagatcgtgggacttctcagcctccataattgagtgagccaattccctggtaagtcccctctcacgtatttatatstatatccttatactatttgttctgtttctctgaaaaaccctgaagaacacagcagtaaaataacctggggctagcgaccacagagagtaacaagaaggtggaaggagtgtaccagactctggaggggacacttggaagagattcatgccctacccaaggtggggccatctgtagagggatgcagacaacccagggaaggacacaccctgacctcactcttctcttgccatctgattacctggcagtgccttctattggccaaacccaacagaagccagagaagaaaggtgaccattgatgtggttc

SEQ ID NO: 894506 - DNA, 620 bp, Homo sapiens
ttctggcagcagggagggcaatgtgttgacacaggttaaggctacagtcaggaaggccagctaggaatttttggtacaagtccaggcaagagataatgctgagctggactaggttgatgcagcatgtggacagcagatgtttaaattaatcatactgtgagtagtaataagcatttagtgctttaccaaattatctcagtgaacactccaaatttctattttttccaagaaaaagaataaattgacagattgtccagatttattccacaataaaggaaagttatgaaatatgatgctatttctggtttcttatttacagttaagttcatgttcaacttaaccaaaagaatcttagggaaagttgaagtgataatgcttaattaggaggtacatggcagtacagttagagtgaagaaaagaagaagtgagacagagaagtytaagaagcaaattcaaggtgatataccaagtgggccactgcttatggctctaaaaaaaaaaaaacactgtacctcagaacaacccaacagatggaaaattgtgggggaaatttatctgtgagctcactcatgtctcctgtctcctgttggctaaaggtcattccagagaaaatttacaac

SEQ ID NO: 894507 - DNA, 636 bp, Homo sapiens; identical to SEQ ID NO: 878433

SEQ ID NO: 894508 - DNA, 642 bp, Homo sapiens
cccgtataaattgggtaaattcttctcttcttgagttcccaaaataacttgaggttcctgggccggtcaagaaagtgacattctttacttaccacaggtcagaaattttgtaaagaaattgcttaggcaaggtaagaggccagtattttgaaggggytttttatcagttctattaattcacttcagttcctcaaagcagtctggtcatatgccactccagtcaaagccttggtaaaataaccagtgtttccaattgtgtcctgttacaaaagaaaacagattcttattgaatttatgcaaataactatattgccttaaattaagaatactcacaaatcatttcaaattctggagaaatctggtagagagaaagaaaaatgctttcattttgcttgcaaaagtatattttacccaatttgttgtaagttataaatagcttcaaagaaaaaaaagttctctttaccctggaaaaccaaacattaatagaatcagcaatgtttctaacaaaaaaagtcattaaatttatttcagacaatatgaataatcataccacaaagtaccaaaaggtataccagagtcactacaccaagaccagtcatatgcaaatgtttttcttccactaatgaaaactttgcagaggag

SEQ ID NO: 894509 - DNA, 627 bp, Homo sapiens
gtcctcttagtatttattcatgttcaagtacttcccaaccttaaaaaaataaccttgacccaacatcctctttacctcaacttcacttcataaaattttaaagacatcatacctcaaatccactatcctacctgtcttagtctattttatgttgctatcacagagtactacagaatggataattaataacaaacagttattgatttggcttacaatcctggaggttgggaagtccaagggcatggtgatagcatctggcaaggtagcaagacttcatgctgtgtgataacatggtggaaagagcaagaggatgtgagcaagcaaacaagagggggctgaacttgcttttataacaaaggcactctcatgataactaacccactccgtscataacattaattcatccgtgagggtagagtcttcatgacttaatcacctcttagtagactccacctctcgatgctgttgcttttgggattaagtttccaacacatgaacttcagggaacacattcaaatcatggtactacgttgcatccatattacaatctgttgtgatctacttttgctcccacaggtccattaaaactgtactccatgaatttctggttgctaaatacaatgaaca

SEQ ID NO: 894510 - DNA, 645 bp, Homo sapiens
aaattgtcagataagatcatttatagactccctaaacctgcaaagcaaaaccatatagacccactatttaaaaaaatatagctacttttcaaagcatccactcaagctagcagataacaaaatacttattttattgttgtaaaattaaaaatagtagacaagcatatatacagttcccaagcagagcaatacaaatatataaattattgcagttttcaaagaaaatrtaacagccaaataattgcctacttttttgaaacaaacttggtttttaccacagcagtttcattttctttttccaaaagtcttaacacaattttgtaaagtaaatttctaacaccagagagattaagttcaatgaccatagtatacgctactgttttaaagcaaggttcacacacacacacacacacacacacacacacacaaaatggaactgaacaaaagtcactacttaatactttctaaattgcctcttttggaggtacggtgaaagaaaaacattctagatgcgtctgaaagaaacaaggtacacacacttactaaaattcccctttgctttaggtgtagttgagggaagttcaactaatctttaaaccttttttgggagagggcaatactcatcttcatgaatttttgtttact

SEQ ID NO: 894511 - DNA, 645 bp, Homo sapiens
aaattgtcagataagatcatttatagactccctaaacctgcaaagcaaaaccatatagacccactatttaaaaaaatatagctacttttcaaagcatccactcaagctagcagataacaaaatacttattttattgttgtaaaattaaaaatagtagacaagcatatatacagttcccaagcagagcaatacaaatatataaattattgcagttttcaaagaaaatataacagccaaataattgcctacttttttgaaacaaacttggtttttaccacagcagtttcattttctttttccaaaagtcttaacacaattttgtaaagtaaatttctaacrccagagagattaagttcaatgaccatagtatacgctactgttttaaagcaaggttcacacacacacacacacacacacacacacacacaaaatggaactgaacaaaagtcactacttaatactttctaaattgcctcttttggaggtacggtgaaagaaaaacattctagatgcgtctgaaagaaacaaggtacacacacttactaaaattcccctttgctttaggtgtagttgagggaagttcaactaatctttaaaccttttttgggagagggcaatactcatcttcatgaatttttgtttact

SEQ ID NO: 894512 - DNA, 645 bp, Homo sapiens
aaattgtcagataagatcatttatagactccctaaacctgcaaagcaaaaccatatagacccactatttaaaaaaatatagctacttttcaaagcatccactcaagctagcagataacaaaatacttattttattgttgtaaaattaaaaatagtagacaagcatatatacagttcccaagcagagcaatacaaatatataaattattgcagttttcaaagaaaatataacagccaaataattgcctacttttttgaaacaaacttggtttttaccacagcagtttcattttctttttccaaaagtcttaacacaattttgtaaagtaaatttctaacaccagagagattaagttcaatgaccatagtataygctactgttttaaagcaaggttcacacacacacacacacacacacacacacacacaaaatggaactgaacaaaagtcactacttaatactttctaaattgcctcttttggaggtacggtgaaagaaaaacattctagatgcgtctgaaagaaacaaggtacacacacttactaaaattcccctttgctttaggtgtagttgagggaagttcaactaatctttaaaccttttttgggagagggcaatactcatcttcatgaatttttgtttact

SEQ ID NO: 894513 - DNA, 645 bp, Homo sapiens
aaattgtcagataagatcatttatagactccctaaacctgcaaagcaaaaccatatagacccactatttaaaaaaatatagctacttttcaaagcatccactcaagctagcagataacaaaatacttattttattgttgtaaaattaaaaatagtagacaagcatatatacagttcccaagcagagcaatacaaatatataaattattgcagttttcaaagaaaatataacagccaaataattgcctacttttttgaaacaaacttggtttttaccacagcagtttcattttctttttccaaaagtcttaacacaattttgtaaagtaaatttctaacaccagagagattaagttcaatgaccatagtatacgctactgttttaaagcaaggttmacacacacacacacacacacacacacacacacaaaatggaactgaacaaaagtcactacttaatactttctaaattgcctcttttggaggtacggtgaaagaaaaacattctagatgcgtctgaaagaaacaaggtacacacacttactaaaattcccctttgctttaggtgtagttgagggaagttcaactaatctttaaaccttttttgggagagggcaatactcatcttcatgaatttttgtttact

SEQ ID NO: 894514 - DNA, 555 bp, Homo sapiens
gggttccctccagccccacatggagtgatcttgcctccccacaagtccagatcacctcatttagcctctccagagtaaatgcaatccagaagagctgggccagaggcatgcaggctcgtcaccagtcagtgccatctgcagggatctgtgatatgtggctgtagtgatwgtagaaattaataacctgtttctattgtctcaggtacgaggcaacctttgctatgattactctgtcgagaaagcaaagcaagggaacagatgcgtagtgcaaaagctgaggttgatatacttttcataggttttcatggtagtagccacttagtctctcaaagtattgtcctccttgaccattgcattttatgtggccacaggtgatactttcataaatggtactatcaccaattattgaaattagtgattttttttttaacccaagcaagtcagataaccaatccaaacttcctcccagttccccaagtcattgttgctcacaatcactctggtaaagaaataaagtttcctaaattttcaaaaattgaattctgaagaattaca

SEQ ID NO: 894515 - DNA, 555 bp, Homo sapiens
gggttccctccagccccacatggagtgatcttgcctccccacaagtccagatcacctcatttagcctctccagagtaaatgcaatccagaagagctgggccagaggcatgcaggctcgtcaccagtcagtgccatctgcagggatctgtgatatgtggctgtagtgatagtagaaattaataacctgtttctattgtctcaggtacgaggcaacctttgctatgattactctgtcgagaaagcaaagcaagggaacagatgcgtagtgcaaaagctgaggttgatatacttttcataggttttcatggtagtagccacttagtctctcaaagtattgtcctccttgaccattgcattttatgtggccacaggtgatastttcataaatggtactatcaccaattattgaaattagtgattttttttttaacccaagcaagtcagataaccaatccaaacttcctcccagttccccaagtcattgttgctcacaatcactctggtaaagaaataaagtttcctaaattttcaaaaattgaattctgaagaattaca

SEQ ID NO: 894516 - DNA, 623 bp, Homo sapiens
ttcaactttctcctgaatctccattaaattttttgccctccagattctgtattctgtctgccattttagactacttacagaccattgatgatgttctggtaaacttggattaagggaacactctggccttttgaaccgcctaagttcttgtgctaattctttctcatcttggagggttgttgttcctttaattgtggtgtaatttaattacagtcagttggctttgtttatggatgtttctagagggctaaagctctgtatgtggtctttatttatggctgaattcttacccttggtttcatgggtcagtatattagcaaaatatttttggtgttgtagtttgggcaactatccagcagatggctatctagrgtaactgccaatagttaagttcttactcaaccatgtggctcctttgtaattcctgggtttgcagctgttctctgcagtgaggtgggggagagaggttacactctcaccaggtatgctcctgggcattggggaagtaccctcggatcactggcactgtgcttgggaatttattttgctccaaaagtggatattctggggtgtatttccttgagcagaggctggggcaggaagataggccacaccatttctgg

SEQ ID NO: 894517 - DNA, 623 bp, Homo sapiens
ttcaactttctcctgaatctccattaaattttttgccctccagattctgtattctgtctgccattttagactacttacagaccattgatgatgttctggtaaacttggattaagggaacactctggccttttgaaccgcctaagttcttgtgctaattctttctcatcttggagggttgttgttcctttaattgtggtgtaatttaattacagtcagttggctttgtttatggatgtttctagagggctaaagctctgtatgtggtctttatttatggctgaattcttacccttggtttcatgggtcagtatattagcaaaatatttttggtgttgtagtttgggcaactatccagcagatggctatctagggtaactgccaatagktaagttcttactcaaccatgtggctcctttgtaattcctgggtttgcagctgttctctgcagtgaggtgggggagagaggttacactctcaccaggtatgctcctgggcattggggaagtaccctcggatcactggcactgtgcttgggaatttattttgctccaaaagtggatattctggggtgtatttccttgagcagaggctggggcaggaagataggccacaccatttctgg

SEQ ID NO: 894518 - DNA, 623 bp, Homo sapiens
ttcaactttctcctgaatctccattaaattttttgccctccagattctgtattctgtctgccattttagactacttacagaccattgatgatgttctggtaaacttggattaagggaacactctggccttttgaaccgcctaagttcttgtgctaattctttctcatcttggagggttgttgttcctttaattgtggtgtaatttaattacagtcagttggctttgtttatggatgtttctagagggctaaagctctgtatgtggtctttatttatggctgaattcttacccttggtttcatgggtcagtatattagcaaaatatttttggtgttgtagtttgggcaactatccagcagatggctatctagggtaactgccaatagttaagttcttactcaaccatgtggctcctttgtawttcctgggtttgcagctgttctctgcagtgaggtgggggagagaggttacactctcaccaggtatgctcctgggcattggggaagtaccctcggatcactggcactgtgcttgggaatttattttgctccaaaagtggatattctggggtgtatttccttgagcagaggctggggcaggaagataggccacaccatttctgg

SEQ ID NO: 894519 - DNA, 610 bp, Homo sapiens
gaatgccaagagttatgataaagcatgagttcaagaaaaggtgtttcattattttgtctaaggcaggattcctaattatttttgcatggggtttggataagaatctgtcaaggaaacaactccaagctgtgatgaagtcagggtcagtcagcctttttattataagtgatcagaaatatcaagatgaggatacraagcagagcatggagtactgaaatacttgttttctagaaacttaagggactcttcaaatcatacatcatatttatgtatcatttttaaagggatattttattgctatttgaaggaataatattttcacatatattaagtcagtatgccttgaatgagcttattgaatgtactttattcttccccactactttccctcaaactggaggagacagcgaaggatggaatcatgaataagaagtggttggaaaaacataatcccactttttattcctggatactgcacagtcttttgttattaagtttagcaaaaagttctgaaacacagttctagatttctctcattgaacaatagacttaattatcttaattttatttatccaaagtttgagagttaatttagaaacacgatgaatta

SEQ ID NO: 894520 - DNA, 556 bp, Homo sapiens
atatcaagatgaggatacgaagcagagcatggagtactgaaatacttgttttctagaaacttaagggactcttcaaatcatacatcatatttatgtatcatttttaaagggatattttattgctatttgaaggaataatattttcacatatattaagtcagtatgccttgaatgagcttattgaatgtactttattcttccccactastttccctcaaactggaggagacagcgaaggatggaatcatgaataagaagtggttggaaaaacataatcccactttttattcctggatactgcacagtcttttgttattaagtttagcaaaaagttctgaaacacagttctagatttctctcattgaacaatagacttaattatcttaattttatttatccaaagtttgagagttaatttagaaacacgatgaattattaataagtttgtatcaaaaagcactcaaatacataaacttgagtttcttagtataatacttatcttttaatgtctatgcattaatatctattaatgcatgataataatataataacaacc

SEQ ID NO: 894521 - DNA, 520 bp, Homo sapiens
taaaataatgatgacttttttcctccttgctatttcagttttcattattgttaatataaatgatgaatgtggcacaaccataattgaattatcccagtttatcacccctatttgtcttaaaaactattttccttatatgtttcagtttacaagatgtttggtcatttatttaaaaaactctctagcatttatctgaggaaaaaaaaacactcaatggcctaagttgatataaaattaatttataactgtgctctgatttattggttattagttttatttctgtgaagaaataagtttaaaagtacatcagatakatgtacatcagatacaaagaaagaaagcttttactttaattctatatcctgagggacttgaaatgcctaaatgactaagaatatgattgataatccaaatgtttctttttattaaaaaaaagataaatattttcacatactgcttatggacttgaaaggttaaaaatgttccaagtttgtttccccttaagatatatggatgtaac

SEQ ID NO: 894522 - DNA, 585 bp, Homo sapiens
acagaagtaagatctctggattttattttgccatgtatatctcataattggtgtgggtaaactggactggtaacccacccagcatggccaaggggttcagaacaaaaacagaaagcttcaagaaaaattgatctgtttagccaaaaggccaagaaagggacatcctagcaagtcagaacattttcatacaataatcactctacctacccatgcaccacaatgtttgagggaggaagtagcccctattcccaatgcaccagtgaatacctactgggtaaccaaascttacacccttaccaggcagaaattaggcacccccacctgtccttttgggatggtgacataacaggttgaataggaagtcacaacttagcagtgtcagaacagtctatgtggtaagcctggacttctactccttccttgcagtaaaagtcagtgatatggtttgccaaatcacattttaatctcagacattttaatctcagtgattaacattcactcaatgccaaaatgtcatcttccattgtaatccccacaatacccaggtgtcaatggtgggatcaggtggaggtaattggatcatgg

SEQ ID NO: 894523 - DNA, 630 bp, Homo sapiens
tggccatttgagttgctggagttcttgtgttggttctttctcatgtctacgtgtgggtatttctttgactgctgggttgcctctaattaaagtggtcaggcagaggaagagtggttgtgttggagtcccaggctcagcagccctgctcagtgagaagtgaggaccaggacctatgtggagcacagtctggccacttttccatgaggtgggtgctttgtgctgggagtccagatcagcccctggtccccatggctctctggarcctgaagacagcaagggcaagggctgtgagacggaaaacatggtaacccatctatattagttcattcttgcactgctttaaaaaagtacctgaaactgtgtaatttataaagaaaacacatgtaattggctcacggttctgcaagctgtgcaggtaggatggctgggcaggcctcaggaaactttcaatcatggcagaaggtgaagcggaagcaggcatgtcttacatggctggagaagaaggaatagagagaaaggggaggtgctacacagttttaaataagtagatcttatgagaactcactcactattacaaaaacagcaagggggaagtctgcctccatgattcattctcctcccaccaggcac

SEQ ID NO: 894524 - DNA, 637 bp, Homo sapiens
agggtcaattcttcatcttacaaaagagcttcttagctttagcaatgtggttagccacttacaataatgttctcaatgcagacacattcgatgaagtggtagccttcaataattggttcttttcatgttcacgttttttttttcttttgaaaaaacttcaaaggcttgtcttttaatgtggggtgctttgtctccacgtagtgaagcaattttgaaggtttcattacttygttagataaccggtggccacatgttatacaaagcagacttggagaatgtgaatcacttgttacaatgaactcataatttaagtatgattcttggtattttcttttaaaggaagctttctttttgttttcagtcttagagtattctgctttctcatcactgggtctttcccccttttcataaaagctctccagtgaaattgttttttactcattttggctaggattagcttctgggcttaatcaaaactgtgactgagacaagtgtgcagtgtaggaaagagtcaagaatggaagtagtaaataaaataatgggtaggccacatgtggactaaaataagtgtcagattcggacttaaagcctgccatcagatacagctatacaaatgaagtacatcaactcacttgcc

SEQ ID NO: 894525 - DNA, 680 bp, Homo sapiens
tcctttatttatgacctaaggggataaaaatatgaatccaaaattcgtaggaatacaaaatggctgactcatgcttcttgcaaaatgtatgctttccatatgaccattaagaaatagtggctctacccctaggtctctaccgctatttctctcctctctatctcttcragcttacttacccttgtactcattcttccttaaaattccttttcgtatgctagatgttgattcatctcttgtcattttctacttaattcttgcctcccaatagatgttacattcagaaaaaacatatttcagttacagaaacatgcaactctttcttacctaaacatttttttcacttcaaccaccctattcctttttattttcctttaaagattaacatatttgagaaaccatctcttaaactgtctcattttgggttaggtggaggatttctagataaaactcaagacacatagtaaaatttgaatttcagataaacaataattttttagtatattacaaacagtgcatgggtgtgttttttgtggatattcaggggaggggggtggagagaggaaaatttcccacaatgaatgtaaacttgtgagcaggatagaccctatgaagtataaaattagctcaatgtgaattaacttgtattgcaatacaatggcatttccaaatacaacttg

SEQ ID NO: 894526 - DNA, 680 bp, Homo sapiens
tcctttatttatgacctaaggggataaaaatatgaatccaaaattcgtaggaatacaaaatggctgactcatgcttcttgcaaaatgtatgctttccatatgaccattaagaaatagtggctctacccctaggtctctaccgctatttctctcctctctatctcttcaagcttacttacccttgtactcattcttccttaaaattccttttcgtatgctagatgttgattcatctcttgycattttctacttaattcttgcctcccaatagatgttacattcagaaaaaacatatttcagttacagaaacatgcaactctttcttacctaaacatttttttcacttcaaccaccctattcctttttattttcctttaaagattaacatatttgagaaaccatctcttaaactgtctcattttgggttaggtggaggatttctagataaaactcaagacacatagtaaaatttgaatttcagataaacaataattttttagtatattacaaacagtgcatgggtgtgttttttgtggatattcaggggaggggggtggagagaggaaaatttcccacaatgaatgtaaacttgtgagcaggatagaccctatgaagtataaaattagctcaatgtgaattaacttgtattgcaatacaatggcatttccaaatacaacttg

SEQ ID NO: 894527 - DNA, 512 bp, Homo sapiens
gtgtattttattgaggaaaggaggacaactgagaatatatgcttgtattttactacatatacctttaaagaaatctggaagaaaacagaaatcctaagacacagtgttctcttgggtgtgttatgatgggagagttgccgatgttgagaaaatgtgctgttttgcacagaaatgagtggctgacttttcagtgcatgcttttttattttaattacttaagtagttggatgtaagaatagtaaaattaaatgaaaattgaggtaaaatataattaagatctctgcatataatttatgtcttgaaacctttgattataaagtgtttcctagaccctttcacagaaaaatctccatatagctaytaataagaggaaaatccattagcacacgaataacagattgtgaataaaaagctgaacaaatactcatctccattgctgaattcatactgtgcagtgttgcataccttaatccttgtcgctttattacaatgacaaaaaaagttgcacgcaa

SEQ ID NO: 894528 - DNA, 655 bp, Homo sapiens
aaccaaaatatgtcattcttcttcacacacattctgtcatgtttcacacacagcaatttcctgtcttaccttataatcatgtatggccacatgactgaactttagccaatgaaaaatggatggaatttatatgtactgattccaagtggggtctagtaaactttcctctcctgcttctccagactggttgcctttccactaactggttggagatgaccataatgactttgagcattacgtgttgagataggcaaagtatccatctgcttctcttactaagtgacaacatggagtagtatttctaaatcattggtgtgcgacagaatcatccacaaaattagtaaatcacagattattaggctctgccccagaatttcttgtacattaggtctaagaaagatctgagaatatgtgttcataacaagttcccaggtaataataatgctgttggtcaatgaaccacagtttgagaaccatttgcrtacagcagagtacttcctctctcctaagaaaaatcctgaatattattgagtgtgtaagagaaacaatttatctcttttttattgtatatatttgtcttgcttgttaaaaaggaaacgttacctgaattatcaatatggaacttcatgtaatataaaatggatagtcttctttg

SEQ ID NO: 894529 - DNA, 664 bp, Homo sapiens
caactgataagcagctttagcaaagtctcaggttagaaaatcaatgtgcaaaaaacaaatcatgaatgaactcccattcacaattgttgcaaaaagaataaatacctacaaatacagctaacaacaaaagtgaaggacctcttcaatgagatctacaaaccactgcttaaagaaatcagagaaaatagaaacaaatgagaaacattacatgctcatggataggaagaataaatattgtgaacatggccatacagtccaaagcaatttatagattcaatgctattctcattaagtygccattgacattcttcacagaattagaaagagtattttaaaattcatgtggaatcaaaaaagagcccacatagcaaagaaaatcctaagcaaaaagaacaaagctagaggcatcatgctgcccaacttcaaacagtactacaaggctgcagtaaccaaaacagcatgatactggtacaaaaacagacatataaaccaatggaacactatagagaattcagaaataaggctgcacacctaaaaccatctgatctttgacagacctggccaaaacaagctatggggaatggattccctatttaataaatgatgttgggacaactggttagtcatatgcagaaaattgaaattggaccccttcatagcatag

SEQ ID NO: 894530 - DNA, 692 bp, Homo sapiens
tatgtcaaagattattaccaacagaacaatatttgttcatcaacttagacggcagtagaaatgatgataattttgaaatagggccaaggcactagctcatgctctgtaagcatacttgtactaataggctgaagaccagtgttaaagttatcttttagaatagtaaaatagcatatgaaagatactgcagtggcaaaatatgaagttggaagttgacttgaatctgcaagagtggacctcaagaggttgtttctgggtgaaagtagagaataagtaatagaaatatttgagaatcattwaattggtagaactgttttattcactgtcataatgggtttggagtagaggaagttaaaaaggtgctacagggtgcaagtaggtcttcatgcttgcaggatgcaggcagagagagacaagaagtgagtaagacaaaagaatatcaaaccattttctaagcatggccattcagcctgtcagatctaagacagaggacagatgtgtaagacaagaaacatggttttcatttataatacatgtttcagatttaaaattattattaactgctataactaaaataaaaacaaaacactcaaagtaataaggtagtaattatattcatagataaatataatgcagtggaataattgtttgcaaattaaattaaataatgagaacaaagaaaaatatttctt

SEQ ID NO: 894531 - DNA, 638 bp, Homo sapiens
gatgggctccatctgttgacaaatagttttattttatattttcaatatttggctcactgactactgtattaagctgcgttcaaaggtttatttaaagcatcagctgggatctaatgttaggtaatcatttgtaggtattacaaatttwaaaaagtatttttatttgagtttatttccagtgcccttttttatactaatgcggctttcctctcttctagttttggacgataataagttatttgttcttgttcttcatatgtttacatattaccaaacttcattagttttaagccaggtatattttcatatattgccatgtttgaaattggattgggtcttacaatcaaaagcattgattttattgattgaaacagcaaatattttttctttcctgatgatcataaaaatcaagaaatcaaatgttaaacaataggacattttgcaattaatgacatcttagacctaaagaaatatgatatttcatgtgaggcagctctcattagccataaatatgtttcttttgccaatcttactgatgataccctgatttttacaaactccttcctaatttagtaattctttcaattctaaccatgccttctggtgccatttcatgtgtttgtgcatatttttctatg

SEQ ID NO: 894532 - DNA, 579 bp, Homo sapiens
tattgccttccttacattctttactagactgtgaaccttccagtttcttgaatatgccatactctcacttacctcacaatatgctcatatgcatgaacaatatgctcctgtgcatggaactttttttaatgatatgctccctgtaaaccttaaaatacctaagcttcctcacagaactcttccctggatgctggactaacttaattacagtaatttattttcccacaaggtgttgtatatttccttttataaaccccatcagaaatttttgacttaacacttctatcaaatatattgttaattttttgcatatttaaactatgttgtctttttttgttatcattgtcaagttgtcatattagaatttcagtatctttataaacttgttttaaactccggaaacagcacaaaactatatccacyggatatatttccctaatctcttgagacactaggaaaccacggagctgagattcatgctaatgttaatgtgtcatcatgagcaatgttctttccataacagtgtgttgtttcccaacccaaagcatttaaagaaagataaaaagaaaacagataagc

SEQ ID NO: 894533 - DNA, 586 bp, Homo sapiens
tcccagatgacccttttattcactcttatggtatgcctcacttctcctttttagcacttagaaaaatttcaagtaagtatttttgagtgcatttaaaaagttttctcagtgttttctaatctccctaagaattgaactattatttcattcactgttataaagtcaatgttgagaaattcatgtgtgtgtaaagatagtatctttagacaagttaaaatgtgcttccaaatttgctttatattagtacataatttctcacacttccctttttctattcctctagacttatttacttgcttcaggatagtttgggtaagaattcaaaaagaaataagtgcttagtcaatcttgaatacatacattaatttttttttcttttggtctgtgtcrtcatcaacaacaaaaataatccttaaagtcaggtttttttttttttatggcagaaaagtagtatgttttagtaaaaattattttagctctcatcaaaaaaaggcctgaaagacagagtcataaaattttactgtaagccataacataaaaatagtatagggctgcttcaggcgcatagaaagaattgcaaaatctt

SEQ ID NO: 894534 - DNA, 617 bp, Homo sapiens
atatcacacttgattaatttgaaagtgggcactggccaaattacctgagtcagagttcttgcctgaggtttttcaaatgctaccctagaagaaaagcaatttctttatggtgacgaaagttataagtcataaaaacactggcatgttcactggttatgtttcctgctatttagagaaaacagctttaaagtgaaagacagtaaagccagcatattgaaagaaaaataaattagtaccaagagagttctgattgcatttttgtccctggtccagttgttcataaattygttccatctctgccatctgtattttggttgttacattttcattgaattctctgaagaaatgttcttcatttttctccccaaattagtttgagttaggtttatgtcagttggcatttaagaatcttaagtaatttgaaaaagttgaatgcccgtttatactcactaatgactctttattgaattttctcagagtaaagttgacaagtattgccatagcagctgaagttcacttcagattaaacacaatgtctttgactgtgccaagaatataattttatgttttgtcaattattaggtaataagtaattctgggattctgaggttggctta

SEQ ID NO: 894535 - DNA, 602 bp, Homo sapiens
acctgcagttccattcatgctgttgcaaatgacaggatcccattctttttataaccaaatagtattccattgtgtataatgataatattttctttatctatttatctgtttctgatatggtttggctctgttcccacccaaatttcaccttgaattgtagctcccataattcccacgttgtgggagggactcagggggagataattgaatcatgggggcagttcccccatgctgttctcaaggtagtgartaagtctcacaagatctgatggtttttataaggggaaacccctttcacttggctctctttactcccaccaccatataggaagagcctttcaccttctgccatgattgtgaggcctcccccaccacatggaactgtgagtccattaaacctctttttctttacaaattaccagtcttgggtttgtctttatcagcaagatgaaaacggactaatacagtaagtttggagggctcagaagaagacaagaaaatgtagcaaagtttaaaacttactagagacttgttgaatggctttgaccaaaatgctgataattatatggacaatgaaattcaagctgaggtggtctcagatg

SEQ ID NO: 894536 - DNA, 568 bp, Homo sapiens
gcactcaaactgagaaaaatagaaaagggtgtgtttaaccaaaagaaggaccaaatttaaaaagaaaaaagaacaagatggaggacacagggtatctcacacaggaagggaatgacagaaaatcacaaaagtaaagaaaaatcccagggtggcagttatcaagaaarcagtgacttcttgagctgggaaatggagggaacaaaacagtgtatatgcatatgtctatagtagcacaactcacaaatgcaaagatttggaaccatcctaaatgcctatcaactaatgagtggataaagaacatgtggtagacatacaccatggaatactactcagccattaaaaggaatgaaatgtcttttgcaacaacttgaatggagctgggggccattattctaattgaagtaacacaggagtggaaaaccaaaacccataagttctcacttatacatggggactaagttatgagtacagaaaggcatgcagagtgatataatggactttcgagtctcagaatggggagggtgagagaggtactagtaataaaaaactacacggtgtgtacaaggta

SEQ ID NO: 894537 - DNA, 605 bp, Homo sapiens
tttgttctgtttttttcacttagaatagctttagccattcttggtcttttttggtttcatataaattttaggttttttttttctatttctctgaaaagtgccattggtattttgatagatattacattgaatctgtagattattttgggtaatgtggatgttttaacaatattgactcttctaatccatgaacgtggggtatctttcccttttttggtgtcctcttcaatttccttcaacagtgttttatggtttttattagagagatctttgacttctttggttaattcctaggtatttcattttatttrtagctattgtaaatggattacttttctgatttatttttcagattgtttacttttggcacataaaaatactcctgatttttgtatgttgttttgtgtcctgcaactttactgaatttgtttatcagttctaatagtattttggtggtgactttaggtttttccaaatatagtatcatatcatctgcaaacaatgataattttatttttcattttccatttggatgcctttgatttccttcattgttattcaacataggacttcacagtacttgttgaatatcagatcaatgcccc

SEQ ID NO: 894538 - DNA, 599 bp, Homo sapiens
aatatatagagaccatgaaaacattaaaagttaatgttacaaagcaacaagatactgtcaaattaaattataggaatcctttctaatccactaagagataaatatttgaaaatattcacatgtatctacagtcacataaccaaatttaaattagcttgcgtcttctactttctcattttggcccactggtccatggttattacacaccagcagcattaattttgcaggtaaaatctcttaaattttcttttcaactttactttccatttccaggcctgtacccacagagacacatgacacaacactcctagtgctataggaacaatgaatactaaatagctgctataaatacaggcatcataacatcaaatttagtgccacgtgatttcagttggttttcatattcttatgcaactcacctctctatatatggcttccagtttttaataaatccattrctatattttatgtttgcaaagggttattacaggttacctaacacagtagactggactggaaggttaataacggatttgctttgcaaaatgtcacacaaattgatgcaatcagacaagacaggccatggtccaaaggtaatt

SEQ ID NO: 894539 - DNA, 691 bp, Homo sapiens
aaaaaatattttaagaacttatccaacatctatttagacacccaaagtgaatattttattaagacttttttctcctaaaaacaaaagagagatttcttaggatagccatcgcaggtcatacatcttaattagaagttcctggatgggctgtgactgtgtgtatatgtttgtgcactaaggcaggtcatgaagccatgtgtgtatgccagtatccccttctctggggtgagagttctagtttaattgggacagggccttttttatcacctaataccttagcacaactattttcagcaccctcttcactttygtaagagttgtgagttggaagataaattatagaatcatcctacaaggagagaacaaaataaaggttaagagcattgatgaagtgagcagggtagaatttctagagaaatcagtggtgcaacaactgtcatatattaaagccaaggagccatcagacgaaataccgttatattccacactattaagaatgacaaaatgctgtcaattaatttctgatacattatccattttaataaagcaacctggtttcagagacattcagtagtgaaaagaatgtgggtcttatagtgaaatacaatgtataaatttagcttagaatgaattacaatttaagtaattagagtgaatatattcttgaaatgattgaaaatgtatatcttaa

SEQ ID NO: 894540 - DNA, 622 bp, Homo sapiens
tggttatttcttggaaaaaaaaatgctccccaaagtcaatacttcctgttgtaaaacaccaaagcagaaacttgattttatctgaacaaaggcagtttaagaggaaagtactattttttagcttgccaagaggccaggctatgccagatgatgaaagtccacttaaaataaaactcaatttccatcaagaagtcaaatttttcactaatacaattactgttggcggtatgtgtgggagtatcttttcacactgtctcttctctcagagtgacatttgtgatattgctgctttctgcaaaatttcaaaattcatagtgtggacagctccrataagaggttttattgcaggaacttttgtttttcttccagcaccctcaaaatcttttaatcccttttctatttgagcccgtatttatggctacctcattactgtattgacggtgggctctgtatagtgacataacttcccttatctgtttttatctagagcattcagttataggacacagtggctgctttttctatagagttgttcagggtctgtaaaaactgcttccaaggaaaggtttttctcttctcctaacatttgtttcagctggagaatcagccccagaaaattctt

SEQ ID NO: 894541 - DNA, 639 bp, Homo sapiens
acactcttaccacacaattgtactcagtgttacataaacaatgataggaagtcagtatgtatctcttttgtttttatagaaatgtataaagtcatatagagttttttttggtaattttgttgttttgttgttaacatttatttccatatcaatatatgttatataactgctctgcaacttgaattttttgcttcacttggtgacaataacagcacaataaaaacatatcataatcaaatagccactacggatgagtattaacattgttcatattgcttaactaatgcaaatatttcagtagtaaacattcatatatccttattactgattttttatttctgtgggatagttcactggataaaatattcaagtaaaaggaaaatcattttataaatattctcaatgcgtaagtagcttgagatctttgagaaagactgttggaaaataaaattggcaagtccaaatcttgtaggagattatagtccaaagtaaagaatttgytttatcctaggtgcacaaaaaattctctaggaggttttaggcaatgaggtgacaagaataaatgtctttaccaagatcctcgtggtggttatataaagaagtcccccaaaagttaataatcccctgacaattatggtg

SEQ ID NO: 894542 - DNA, 662 bp, Homo sapiens
acattctcttttgttctgtagtttatgtctagaaagctgatccctgcaggctctgttttccagattcctgggctagctgggttcagttgggtttgtttcatgacagggaccaacaggatttttggagaccagaaaaataagagaggccaagttaatctttttctctctttatcatagtgagtctttctagcagacattgacttcattgacttctctgtgtggctgtcttagtccaccttgtgctgcttttaagaaatacctgattgcagagagccgagatggccccactgcactccagcctgggtgaaagagcgagacttcatctccaaaaaaaaaaaaaggacctgaggtggcataatttatagagaaaagaggtttatttggctcgtggttcagtatgctctacaggagaygtgacactagcttctgcttctggggaggcccacggaagctttcactcatggcagaaagcaaaggggaagaggaatcacacggtgagaggaaggaagcaaagatgggggtaagaggtgccaggctgtttttagctgtctctaacaatcagttcttgtgggaactaatagagcaagaactcactcattatcaggcacaaagccattcataagggattcacctctacaacccaaacaccattcactaagctc

SEQ ID NO: 894543 - DNA, 650 bp, Homo sapiens
aattttaaacaaaaacttccataattttagatgccttcagaaaacgattgtattttatgtcacagaacatacatagagactagttagaatacatgtgtagagtaagtatttatgaaacaactaatctctttcaatacttkttataaaacttaagcttctcatgaatccattttgtatcccaaataactgaatagggctagcaagaatcctgaaataaagagtgttacagcaaacagctattgggaccattaacagcaacaaagttaatgacataatgcactaaagttcttaggcttaatttagtttaaatttctaatacattaatctaaatatataagatgcttcttgacttacggtggaattacatttggattaatttattatgagttgaaaatgttgtaagttgaaaatgcacttaatgtgcctaacccactgaacaccaaagtgtagcctagcctatcataaatgtactcagaatgcttacattagcctacagctggcaaaatcacctggtaacacagtacactgtagaatattattgtgaggctgactagagctttggctcactaccaccgctcagcattactagaatatcagatcactttatgctgaaggcttatcacttttacaaccattaggaagttgaaaaa

SEQ ID NO: 894544 - DNA, 570 bp, Homo sapiens
aacttagaactatatatatacacacacacacacacacacatatgtatactaatagttcatatatgtgtgtgtgtgtatatatacacatacgtgtgtgtgtgtatatatatgtgtatatatgtgtatatatgtgtatatatatgtatatatgtgtatatgtatatgtatacgtatatatatgtatatatatgtatatatgtatatgtatacgtatatatatgtatatgtatatacatatatatayatatatatatatatatatatatatatatatatagtattagtctgtttgcatgctgctatgaagaaatacccgaggctgagtaatttgtaaaggaaagaggtttaattgactcaaggttccacagggctggggaggcctcaggaaatttacaatcatgatggaaagaacctcttcacagtaaagcatgagagagaatgagagtgctgagcaaaggggaaagctccttataaaacattcagatctcatgagaactccctcactaccacaataacaacatgggggggaagctgctcctatgattcaattatctccacctggtcctgccc

SEQ ID NO: 894545 - DNA, 570 bp, Homo sapiens
aacttagaactatatatatacacacacacacacacacacatatgtatactaatagttcatatatgtgtgtgtgtgtatatatacacatacgtgtgtgtgtgtatatatatgtgtatatatgtgtatatatgtgtatatatatgtatatatgtgtatatgtatatgtatacgtatatatatgtatatatatgtatatatgtatatgtatacgtatatatatgtatatgtatatacatatatatacatatatatatatatatatatatatatatatatagtattagtctgtttgcatgctgctatgaaraaatacccgaggctgagtaatttgtaaaggaaagaggtttaattgactcaaggttccacagggctggggaggcctcaggaaatttacaatcatgatggaaagaacctcttcacagtaaagcatgagagagaatgagagtgctgagcaaaggggaaagctccttataaaacattcagatctcatgagaactccctcactaccacaataacaacatgggggggaagctgctcctatgattcaattatctccacctggtcctgccc

SEQ ID NO: 894546 - DNA, 616 bp, Homo sapiens
tattttcattagcatttggattgataacattcccaattacttaatattttcaaaattatttttttatttttcaattgttattttcatagtttctttttatatttctttagatttaagattttaatacatgcacctaagtttaaatattaccatttaatccctgcttagttgcattgctcaaatttcaatttgtagatgttattcattattcaacaataattgcaacaacaacaaaaaacaactctactttcctataggacaaaaagagagaagagtttctatatttatgatagtgttactttttccccctttcacctttgcatgattttgacattttactgaggcttccttaatcctcactgtgtcactgtgggctgcattaagctctgtgtgctggctttatgcttatttaaaaaggtgattgaaatacactatcatctagggtcaggccttctctaattaggcagaaacatctggtctycctcaagtgtctatgttaaatggtttattattaattttgtatgttaatgatttggaaccctttaattttatgaagccaggaggattattatttttgccaatgacccacattacatgaaaaaaagctataaattat

SEQ ID NO: 894547 - DNA, 655 bp, Homo sapiens
tttctatttttttttaaattatactttaagttttaggatacgtgtgcgcaacgtgcaggtttgttacatatgtacacatgtgccatgttggtgtgctgcacccattaattcgtcatttaacattaggtatgtctcccaatgctatccctcccccctcctcccaccccacaacaggccctggtgtgtgatgttccccttcctgtgtccatgagttctcactgttcaattcccacctatgagtgagaacgtgcggtgtttggtattttgtccttgcggtagtttgctgagaatgatggtttctagcttcatccatgcccctacaaaggacatgaactcatcattttttatggctgcatagtattccrtggtgtatatgtgccacattttcttaatccagtctatcattgttggacatttgggtcggttccaagtctttactattgtgaatactgccgcaataaacctacgtgtgcatgtgtctttatagcaacatgatttgtaatcctttgggtatatacccagtaatgggatggctgggtcaaatggtatttctagttctagatccctgaggaattgccacactgacttccacaatggttgaactagtttacagtcccaccaacaatgtaaaagtgttcctatttctccacatcct

SEQ ID NO: 894548 - DNA, 537 bp, Homo sapiens
gctaactactttcctgagtcatgaccattcctgcagggtataatcaagttctaccctctaactttaaatccacatactctttttgtctctaactctggttcttcaggtggctgtgaagcactctgaaagactttcttttcccggatttccaatcaagggggtagatttatcctcctttacactagaatgttcatgtttgcccaggggtctgtgtgtcactgccacagtaacagaagattaagagtcattcatccctttctcagttctttcccctctyactgggcttttccgccggcccgaaaatatttgtaagtgctttcccagccttttagaatgctgagtcttgttttgtgctttatggtaccactttgcaatttgagtttgccaggtgttggttattgcctttcccaattctcgagccattataaaaatgtctttccatttggtcctaggttgcaatacaataagaattaccactgttatggtttggctgtgtccccacccaaatctcaccttgaattgtaataatccccatgt

SEQ ID NO: 894549 - DNA, 640 bp, Homo sapiens
tgaccttgccttgaaaggactttggccagttcgtctaaatctgctcctggctctctggatcgtgtatgataggaaaaattccacaggagaggaccacaagggaatgtgttctcagttgaggaccaagtgctagtcaaaggaagcaggtaacagaaaattgtggtaaaaatgagaaagtggttaagtttatttccagtggtacaagggttccataaagcagaggaaaggactgaaggggaatccattttaggagcttccaggaaatggaagtttttgtgctctaaaaagataaraaaataagagggcataaaatttagaccagattgggaagaatggcttccaaaggaaggaaaagatgagggtaatgtttagaaatgactggattcaaatattttgtttctggcagatgttattttggggacagaatgactaagggttgatctcaaataatacttggtctatgaaactggtataatggatgacagtagccatgtccttaaatagagatgccctattctcatgaaagaaactgaggaacaaattagacagaactctttctgtgcaaagaatgtttcatggtgttcagaagaatagagagagtgtgtcttcaagtggcagaccctgttaaaacctgggagaa

SEQ ID NO: 894550 - DNA, 602 bp, Homo sapiens
agcctgtaatcccagcagtttgggaggccgaggcaggcagatcacgaggtcaggagttcgagaccggcctgaccacattgtgaaaccctgcctctactacaaaaattagtcaggcatgatggcatgcgcttgtaatcccagctactcaggaggctgaggcaggagaatcacttgaacccaggaggcagaggttgcactgagccgagatcatgccactgccctccagcctgggcgacagagygagactccatctcaaaaaaaaaaaaaaaaaagaagactgttcagagcaatattactcatgaggggaaaaaaactagaaacagcctaaattctcatcaatttgagaatgaataaataaattgttgatcattaaaatgatgaaatattgcacagtactaaaaataccaaatatacatacttcaatcacgataaattgtagaaatgtaaaattgagagaaaaatttcacagaaggctgcatacaattttctactgtttttataaacataaaataaataaaacatattttaagtacgcatatatatatttatatgtcataaaatgataaagaatcttgaggccatgataaaaacatcagcttggc

SEQ ID NO: 894551 - DNA, 680 bp, Homo sapiens
tgttaaagtaattattatattcctttagcctgttgtggaaaattcagttactttttcacaattctcccttttgttcaacctaatataaaagcatttaggttttgctagttctttgagtctttatttcattatgatggttcccatgtcatataaacttatattcaatttgtatgcttttcttctgttaatctatcttatgtcaatttaatttttaggctcagtcaggrtcccaagaagttaaaagtaaaatttgcctcccctgtctatgcatactaccctgcattaaaaatgtggattttgtaacttcgtgtttctcttctataatataatccactttgtgggtaggtgtcacttgtctttttgcctcagctggtgaaaattgaaatgcaaatgctaatattctggttattggtgttggagtgagtaataaactattatttgtttctaataaagattgtacatatctgaaactatggcaagctaacttattaatttgcaaatagggtaaaaaatttagatactttacagtttttaatatcatatcagagccattggggattgcaaacacagatgggacatttttacatgtgatattatcaatcatgttgatcaaaggaatagagaggaataaccaggttaagcaatgctgatctagaagttttaaatataagtcacaatta

SEQ ID NO: 894552 - DNA, 640 bp, Homo sapiens
ccaagccattgggtctcttgtatctgcataagggcccgctgaggatggatcccagtagaatagattacacaactttcatacaaactttaaccagagtaactttgcctttcttcatgttacgtgttgtatttttaaaaacacaagaaaagagctcttcagataatagaaatttacaaaccactgttccttcaaaattcaaaagctcactttattgagtgaagccaatatgtttataaggctttatctgttattaatctgatgacactagtaatcccgtacatatgtattcatttcttaaatttagagactattccaataaaattttcaccaagcagataacaggattacttttatttaaaaacctgtcattctaaattacagcagtctcctttagaggcaaataaactgcagraaggataaactaatatctcagtgtcttatttctgttattttaaatattaatattttagaactaacagtgatactccattgaatgaaaagcattttggtggggtacaaatgctcaaaaaaaattcaatggggttaatctttgaagcagaggaaaaataaactgcatgattgtcttactcctactgataaggttgatccactttgaaagcttatcagtacgtagtattgt

SEQ ID NO: 894553 - DNA, 650 bp, Homo sapiens
gggtcttaaatttaaatatttaatccagattgagttaatttttggatatggtgaaaggtagggttcacttttattctgcctatggctagccagttatcctagcaccactaattaaatagggagtcttcttaccactgtttatttttattggctttgtcaaggatcagatggttgtatgtatgttactttatttccaggttctctaacctgttccattggtctacatgtcttttttgtaccaataccatgccattttgatttctgtggccttacagtatagtttgaaggcaggtaatatgatgtctccagctttgktctttttttttttttttttttttttttgaggcagagtctcactctgtctcccaggctggagtgcaatggcgccagcttttttcttttaacttatgaccgctttgataatctgggctcttttttagttccacgtgaattttagaattttttttgaattttatgaaagaggatgtaggtagtttgatagacataggattgaatttgtagactgttttgggcagtatagccagtttaataatattaattctttccatccatgagtataagatgtttttctgtttgtgttatctcttatttctttcagcagtgttttgttgtgctccttgcagagatct

SEQ ID NO: 894554 - DNA, 587 bp, Homo sapiens
tgccttcagcttcgttctgtgtgctcaggatgctttttggctaccaggagtcttctgtgactccatgtgaattttaggattgttgttcctatttctgtgaagaatataattggtattttagtagagattctattgaatctatagatcacttttgatattacattcattttcacaatattaattcaatccatgaacatgggatgtgyttcacttttttttttctgtgacctattctatttctatcactactgatttctagttttccttgtaaagatcttttgtttctttggttaattttttatctaggcactttagttaatttttttggctaccgtaaatgggatcactttattggtttcttttcctgctagttcaccgttggcatagagaaatgctaccaattttgtatgttagtttcatatcctgcaactttattgaatgtgtttatcagttttaagagttctttgatgttgtcttttgtgttttttatatataatatcaggtcacctgcaaacaggtataatttggctttctcctcttcaatttgcatgccctttatttctttctcttgcctaattgccccgtct

SEQ ID NO: 894555 - DNA, 644 bp, Homo sapiens
cttgatatctcatggtaataatactatcttaacttccaaaaataccctcatattctctgattacttttttctcagagtaacctattatttgatagatattaccttttcgtgaatttttctaaaatactaattagaattayctaacttgtattatgtccctggattattttaggctcttctaatgttagttatctttttggttgttaaatttcctcataggcatacatttcttatttgtgtttttatattttaaaatacgaaaacaatggcttggttgccatagaggcttgattggaattgctattccttgtgaaactctgtttcggcatttggcctcttccttaaatgtaaggctcgaacttgacttctgtgaaatatactaacctattggttttacttcatgatatttgggctgggagcacagatttatgctttctccactgtccgtcctgtcttctcaaaataaacgtggcttaattctaaactgtcaatacctacactaggagttcaatcttacttggggtctttagactggatacacctgctttaacctgtacactcatgtcattagtgccactttttctattaaaattcagaaatttaactagtccattcccacttactggacctgctgacttcaatca

SEQ ID NO: 894556 - DNA, 644 bp, Homo sapiens
cttgatatctcatggtaataatactatcttaacttccaaaaataccctcatattctctgattacttttttctcagagtaacctattatttgatagatattaccttttcgtgaatttttctaaaatactaattagaattacctaacttgtattatgtccctggattattttaggctcttctaatgttagttatctttttggttgttaaatttcctcataggcatacatttcttatttgtgtttttatattttaaaatacgaaaacaatggcttggttgccatagaggcttgattggaattgctattccttgtgaaactctgtttcggcatttggcctcttccttaaatgtaaggctcgaacttgacttctgtgaaatatactaacctattggttttacttcatgatatttgggctgggagcacagatttatgctttctccactgtccgtcctgtcttctcaaaataaacgtggcttaattctaaactgtcaataccyacactaggagttcaatcttacttggggtctttagactggatacacctgctttaacctgtacactcatgtcattagtgccactttttctattaaaattcagaaatttaactagtccattcccacttactggacctgctgacttcaatca

SEQ ID NO: 894557 - DNA, 588 bp, Homo sapiens
aaaaattacctggttactaggtaaatctatcagtatatgatcgaggaacacttatattaacgtcatttactgataaataagaaatactaaataacaattacatgatgtgtttaataatcaaatgtataaattgcaagcacattatttatatgcataatactctagtgtttgttgtatgagacttgaatctcaattaaatgatgttaatatgagaccwtaaaaagtctgaaaagaggcattcactgtcttttcaaaataaattttatatgagaacataaagaaaacccatctcttccctcattttttgccagtatggcaacaaatagcctgcataactgaggcaatttgcaaactggtagaccctctatcattgtgttttatgagaaaaaaaaaagataatagcagagtatgcaccaattcagaattaactggattgaatgctgataattgtatgattctttttattcttaccctgttgtttggcttatgcatctctgttcaagtccatgtggaagacagcttgaggtgcatgatcaataaaatgttggaggacattgaacacagtagatttcctggtgatgtttaaga

SEQ ID NO: 894558 - DNA, 650 bp, Homo sapiens
attaaggttaaatataatttcatttcaaattaacacattagaaatgcacaaccaggtatactgcgtaatgtacttttaatcaataagccatgctggcaatatcaatagaagtatatacttttttggtaaatagtcctaaagacacaagatggcagtactagacttatgagttactggaaatatggtaacgcattcaaaaacttttaatgcgcttcccttgctttccttctcagtatttgtaatggagcttttatttctgtgcataaacattcacaagttttgtggatgtttttaaatgctattgagagtgtgctatttatttatttatgggtagccactgcatttagtaaaattcgcctttaaaacatcttagtttcctcatctatataatgatgatattggtccagatagcctttatggttctttcactactggatggccatataatttawtaaatcagaaaaatgagaacctgtacatttcaaatgagcattgaataccttaacgaataaacttactcaaaatttgagataaaatggcagtggacttcttccttgttcagtggtagaagaaagatcaagggtgattattacttagccttcactaaatttggaatatttagtttaccctaaattttatgtaagatgcta

SEQ ID NO: 894559 - DNA, 615 bp, Homo sapiens
taatcagtgcatatgtgtgaagaaactatcagaagctaagaaaatagccattagaaaaaattaaacagtagatcatacttacccacggtgagaaacaatgtctgttcccaataaccagagtgacaaacctcatatattatgagtaatcaggcagagtagtcagaaatattttgccttaatactggcaagatagccctaaactacacactactctgatcctatgtagcaaattttaaaagctatatccaaatgggcaaaactggctacaaaaaaattagctgtatccaaagttcaaatagtaatataaaaatacctggaatgggmacattttacaaaatcttgcatccagtaaaaaattagcagtcatgaaaagaggctgaaaaatgcaacttatattaataaggaaaatcaagcaactgaagctaataaaaaactgacaagttaaaagtagaagaaaattattaaaatcagagccgggtctgatttgctactgagagttctctcttcctcttcttcttttctttcttttacatacctactgatttttccttttttccctccatctagcaatgctactttcatttcttattttactctcttccttgtgatttactt

SEQ ID NO: 894560 - DNA, 615 bp, Homo sapiens
taatcagtgcatatgtgtgaagaaactatcagaagctaagaaaatagccattagaaaaaattaaacagtagatcatacttacccacggtgagaaacaatgtctgttcccaataaccagagtgacaaacctcatatattatgagtaatcaggcagagtagtcagaaatattttgccttaatactggcaagatagccctaaactacacactactctgatcctatgtagcaaattttaaaagctatatccaaatgggcaaaactggctacaaaaaaattagctgtatccaaagttcaaatagtaatataaaaatacctggaatgggaacattttacaaaatcttgcatccagtaaaaaattagcagtcatgaaaagaggctgaaaaatgcaacttatattaataaggaaaatcaagcaactgaakctaataaaaaactgacaagttaaaagtagaagaaaattattaaaatcagagccgggtctgatttgctactgagagttctctcttcctcttcttcttttctttcttttacatacctactgatttttccttttttccctccatctagcaatgctactttcatttcttattttactctcttccttgtgatttactt

SEQ ID NO: 894561 - DNA, 590 bp, Homo sapiens
aaaataatatatccactttggaaagcaatttagtagttctttaaaaaaaggcaaatatacgaatgcaacatgatacagacatttcactcctaggtgagaaatgaaagcacatgtttattcaagacatgtacattttatttctaatgtctcaaaacataaggaacacaagtgtctattttcagaatgattaaacacatttttgtgtattgatacaattgatacaatgcactcaataataataagaaagtaaactattgacatacgcaaataaacagatgggtctaaatataattatgytgagtaaaaaaacagattaaaaaagaatacacattgtatgattacacttctgtaacactagataatgcaatgtaatatcttcctcggaaaacagatcagtggctgcctaatgaggtccaggagatgagaataagaaaaaaggaatgcaagggacatgaggaaactcatgtgagtcatgcatatgttcaacatcttagtttttggtggcttcgtatgtcaaaatgtacacgttatatattttaaatgcgcacagtgttattctaattaaatctcaacacagctataacaaagaa

SEQ ID NO: 894562 - DNA, 654 bp, Homo sapiens
aaagacaattttaagaataaacaaacaagtaatttatttcttcattgctgaaatgaaaatcgtaaaattttgaaatgcactagtatggtaggcctctttattgttaaatttgcattttatttggtattaaaacattaagacaggctgggcgctatggcttatgcctgtaatctcaggactttgggaggccaaggcaggtagatcacttcatgtcaggagttcaagaccagcatggccaacatggtgaaaccccatctctactaaaaatacaaaaattagctaggcgtggtgttgcgtacctataataccatctactcaggaggctgaggcaggagaatcacttgaacacacgatgcagaggttgcagtgagccgtgattgcgccactgcactccagcctgggtaacagactgagactctgtcrcgaaaaaaaaaaagcccttaaaacagaaacctttacgtccactgtagtatgagactgtattatttggccaaaattatttctattttcttcaatcctgctatgacttccctgtgggttgatatgactttcacatactccactgatgaaatatgagacttatttggccaatggaagaaggacagaagtgaaaatcaaccagttctaagattattccttaagaagcataacaag

SEQ ID NO: 894563 - DNA, 579 bp, Homo sapiens
tgtttgtcacaagacacttttggttttctttttgtttttgaacctctatgacaaaattaaaagcgatttttataatgctgatagagtattacagtattctagacctgttgatatatttacctttaccagtaagctctatttttcttttgctttcatgttgctgtctacattccttttgttttaaactgaagtatttcatttagaattttttctaaggtagatctagtgatgataaaaatacttctgctgtttggaaaagtctttaattctttcatttttgaaggatacttttgctggataaagtattcttgactggcagtgttttttttttttttcatttgtttgttttcatcactttgaatatgtcattgttctgttttctggcctgcagagttttcgctgaraaaactgctgatggtattatggggtatttttgtacatgatgatgtacattttccttgttgctttcaacattttcattttctttgacttttggcaatttgattatgtgtcttagtataaacattttagattcattgtatttggagtttattgttttacttgaatctgggcatctgt

SEQ ID NO: 894564 - DNA, 594 bp, Homo sapiens
ctcatataactggctgatatgcaccgcacatgaggtcccctctcttggctttggagcccctcctccttcggtctctgtagggggagcttttcctgctttcttctcccttctttgctgcctgttaaactctcggcttcttagaaccactccacaggtgtccatgtcattttatctaatttgacatgagacaagarccctggtggtcctccactcatcagagctgtatcattgtcatgggtcttaagttatttgcattgggttaaaacatgctcctttagcctcagcaaagtttattacccaccttctgaagcctacttctgtcaatttgtccatctcatcctctgtccagtttggtgcccttgctaaagaggtgtttcaatcattaggagaagaagaggcattctggcctttgggttttcagcattttttcattggttctttctcatcttcatgagtttgctggttttgatcgctgaggctgctgacacttgggtgtggttttgattgggacttttttcattgatgctgttgttgctttttgtttgtttttctttcaatagtcaggttcctcttttgtagggctgctgtggtttg

SEQ ID NO: 894565 - DNA, 687 bp, Homo sapiens
agtgtttattcgctccttaataacgttaagtattaatcaaaatttctgaacttgcatatcaattttccatgatagcatttagcaaattatttttgacttgttttcctctacattattttaaaatttacattctattttaaaataaataaggtgagaaggcttgatttaagagaatatagaaagtgtggatggtattcttgaccaaaagaacgtcatgaatgagatgggctgttctagactgcatgggaccctaccagtgatgaagataggactataggctgtcatgtggttrtttgttccatgccaagcagctttgctttgatctctatcatatattggctgctgcacgcaattccacttggggaaaacaaaaaacaccactgaattctcccattggcttaggagttaatctgcattccatgaaggactcctagacttcatgcagaatttggaagggtcaaattttttattctgttgacctaatgcttcgtatttttgaaaatcttattctttggctctttacttcctgtggttttgattactttcatgtttagtaaatatgactttttttttcttctaatgataaattcttttctttaaatagaaaaaaattataatactaacaagcaaggtattgtagcagttaaaagacaaaaactttcaggagcatttttgtttcactttgtt

SEQ ID NO: 894566 - DNA, 730 bp, Homo sapiens
atgttcaatgcaaacattttaaaagaagagctgcacactggaaaaaaaaaatacccctgaaaatatttaatgtaaataagtccttgagatggtgctttttacaaaagtttatcagcaaatgccctttttttgtaggggacagggcagcaggagaatagggacaggatatcagacaactgatttttactgcaataagagcaacaaggaatctcaccgtcacatgccatctactttatgtaaaaaccaatccagcagaacgagcaacagtcaccctcaggaggtgatttagccccaagtacccagagaacagcctcaggccacgacttctgtgctgcttcactgtgcccagaaccatctgccaagaccaggaattcatctttggagtataacttgttttctctctttttttcacgtctcaaaaaataaaaaaagcttcataatacagccgaagggttaccatgtgtctaaaaggaggacaggttcccataaacaatgttgtcagcttgagtgggggtaaacacagraaggaacaccataaattaaagcagaccctgactcttcagaggctctgcggtgatgtctgggggccagatctgccagtggctgcatttccagcactagcatagtgttgaggactatgaggaaatatatatatatttctagtagtcattctaaaccatgacagatttgattgtcataatgataagatgatgacagttggtacctgcta

SEQ ID NO: 894567 - DNA, 730 bp, Homo sapiens
atgttcaatgcaaacattttaaaagaagagctgcacactggaaaaaaaaaatacccctgaaaatatttaatgtaaataagtccttgagatggtgctttttacaaaagtttatcagcaaatgccctttttttgtaggggacagggcagcaggagaatagggacaggatatcagacaactgatttttactgcaataagagcaacaaggaatctcaccgtcacatgccatctactttatgtaaaaaccaatccagcagaacgagcaacagtcaccctcaggaggtgatttagccccaagtacccagagaacagcctcaggccacgacttctgtgctgcttcactgtgcccagaaccatctgccaagaccaggaattcatctttggagtataacttgttttctctctttttttcacgtctcaaaaaataaaaaaagcttcataatacagccgaagggttaccatgtgtctaaaaggaggacaggttcccataaacaatgttgtcagcttgagtgggggtaaacacaggaaggaacaccataaattaaagcagaccctgactcttcagaggctctgcggtgatgtctgggggccaratctgccagtggctgcatttccagcactagcatagtgttgaggactatgaggaaatatatatatatttctagtagtcattctaaaccatgacagatttgattgtcataatgataagatgatgacagttggtacctgcta

SEQ ID NO: 894568 - DNA, 584 bp, Homo sapiens
aaaaaattctgtcaatttctgtttttttaaattcatatttcctcatatttgtacatattcttttatcatttattatattttatctactaaaccttatccagcttgattcacccagcatttgtggttcagatctggtcaaacagaagtgctttgaatccaatatgactgtaatttactggaattgtacaccctgagtcaggatttagagctcagtattcttatcttgactgtttttgaatccagtgaaaacatcaagggttctctcctggtgtttttagtgaaaggttcacttttataactccctattattgtagaagattgttaaagctcatactgaattggaaatgttctaatatcctattgcagttttagttgttttaattaataataatgcatgctgcaatatcaaacaacartatttcagtgacttaataggtggagaggccaaaggaaaacttcccctttgccctctgggcagtccctaaaaatcaagtttcaaaaggtgaaaaggaaataaggaagtactttagaggagtaataaaagatttttaggggaattcagtcggcttggagagcacacagtg

SEQ ID NO: 894569 - DNA, 635 bp, Homo sapiens
ctgagtagaataaaatggctgactcttcaaactgagacatcagctagtttcctgcttttaaacagaacagaaatggtggcttttcctgtgtgtaaagtctgctggtttttgagctggcttttgaaccatcagttctcctaagtctctaacttgttgaatcacccagaaaatcrtgggatgtgtcagcctccataatcttatgagcagtttccttctttataatcaatttctccctatgtatatagatattataagggactagcttacaataaatattaatatttaaatagtaaaatactatatatgtgtatatgtgtgtgtgagtatatatatatataccactgccatatatatattttatatataattatatattaatgatattaatatatatatatatatatatggcagtgagtgtgtgtatttgtgtgtgtgttttctattggttctgtttctctagagaactataatacagtatggatgtgttgaacaccacctttccccccattatattgaccagaaccagatttatggtcttgtctaaaagaaagggtggtaagtagtatagtttttcatacatccagaaagaaaatttaaatggctttataattaataataatatttctgcctcattc

SEQ ID NO: 894570 - DNA, 635 bp, Homo sapiens
ctgagtagaataaaatggctgactcttcaaactgagacatcagctagtttcctgcttttaaacagaacagaaatggtggcttttcctgtgtgtaaagtctgctggtttttgagctggcttttgaaccatcagttctcctaagtctctaacttgttgaatcacccagaaaatcgtgggatgtgtcagcctccataatcttatgagcagtttccttctttataatcaatttctccctatgtatatagatattataagggactagcttayaataaatattaatatttaaatagtaaaatactatatatgtgtatatgtgtgtgtgagtatatatatatataccactgccatatatatattttatatataattatatattaatgatattaatatatatatatatatatatggcagtgagtgtgtgtatttgtgtgtgtgttttctattggttctgtttctctagagaactataatacagtatggatgtgttgaacaccacctttccccccattatattgaccagaaccagatttatggtcttgtctaaaagaaagggtggtaagtagtatagtttttcatacatccagaaagaaaatttaaatggctttataattaataataatatttctgcctcattc

SEQ ID NO: 894571 - DNA, 581 bp, Homo sapiens
accatttgcttgtcttcttttaagcaatgtctactcagatcttttgattgttttaaaaatattgctattgaattatttatgaatttcttatatattctggatattaaaaccttatcagctgaatagcttgccattttttctgcattctgtaggttgtctcttcattttcttaattgtttactttgctgtggcagtagctttttggcttgatgtaatctcatttgtctatgttttcttttgttgcctgtgcttttggggtcttatccaaaaaattcttgtgcagaycagtgtcataaagtgtttcttttatgttttcttatagtaatattaccatttaggatctcacatttaatactttaataatttttagttgatttttgtttatggtgagacctaggggtttatcttcattcttcactgcatgtggacctccagttttccctgaaccatttactgattagagtacctttctccactttgcatttttagcaccattgtccatagtaagttcactgtaagtgtatggaattcttctgtgttctctattctgttcctttggtctatgtgtctattttgatgcc

SEQ ID NO: 894572 - DNA, 560 bp, Homo sapiens
tgctataatctatcacatttggtacgtttttcttagatgcgttttctggatctactgagagtttttcttttttttttcctataatcaattaatgtggagattttaaatgataacttaaaaatattaacctattttgcattcctagggtaaattgyactagtgtaagctttaaatttttattttgtaaataatacatagttttctatataacaaataagactatctctatcccatctatttccctaaaattagattttaataatatgtggaacatgtacattgtcaggggaaaagtttagactatagatttggtttttgaaaggctatttttttgttggaatttttttttattattcataaatcactcttatactcttaataattgtattagtttgctgcagctgcataacaaattaccagaaacttactaggttaaaacatcacacattttcttatcttacagcttccatcaaccaggagtctgtatatgctttacctggttcctctgctcagggtgtccaaaggctgtggtcaaggtatgtgcggaggcatattgtcaa

SEQ ID NO: 894573 - DNA, 573 bp, Homo sapiens
agatgcgttttctggatctactgagagtttttcttttttttttcctataatcaattaatgtggagattttaaatgataacttaaaaatattaacctattttgcattcctagggtaaattgtactagtgtaagctttaaatttttattttgtaaataatacatagttttctatataacaaataagactatctctatcccrtctatttccctaaaattagattttaataatatgtggaacatgtacattgtcaggggaaaagtttagactatagatttggtttttgaaaggctatttttttgttggaatttttttttattattcataaatcactcttatactcttaataattgtattagtttgctgcagctgcataacaaattaccagaaacttactaggttaaaacatcacacattttcttatcttacagcttccatcaaccaggagtctgtatatgctttacctggttcctctgctcagggtgtccaaaggctgtggtcaaggtatgtgcggaggcatattgtcaaaagaggtctaactgggggaagttaagctttcaggtttcttgggttgg

SEQ ID NO: 894574 - DNA, 560 bp, Homo sapiens
tgctataatctatcacatttggtacgtttttcttagatgcgttttctggatctactgagagtttttcttttttttttcctataatcaattaatgtggagattttaaatgataacttaaaaatattaacctattttgcattcctagggtaaattgtactagtgtaagctttaaatttttattttgtaaataatacatagttttctatataacaaataagactatctctatcccatctatttccctaaaattagattttaataatatgtggaacatgtacattgtcaggggaaaagtttagactatagatttggtttttgaarggctatttttttgttggaatttttttttattattcataaatcactcttatactcttaataattgtattagtttgctgcagctgcataacaaattaccagaaacttactaggttaaaacatcacacattttcttatcttacagcttccatcaaccaggagtctgtatatgctttacctggttcctctgctcagggtgtccaaaggctgtggtcaaggtatgtgcggaggcatattgtcaa

SEQ ID NO: 894575 - DNA, 557 bp, Homo sapiens
ttagttgcctccaagtttcaacaattatgaaaaagtgttcataaatgtccctatggaggtttatgtgtgagcatagtttttaactcatttgagtaaatactaagtagagctattgctagattgtattggtaagattgtgtctaattttgtaaactgccaaattatacaaattattctccaaactttctatagcatttttcatttccaccagcaatgaatgagagttcctattactctgcatcctcatcagcatttggtattgtgttctggattttggccattctrataggcataaaatgatatctgatggttgttttactttgccatactctaatgatatatgatgttgaagatcttttcatattcttattttccatcatattccttctttgatgagacatctatttgggtcttttgtccatttattaacatctttgttcctgttcttgttaagttttaaaagttgcttgtagatttttggaaaacagtcgtttatcagatgagtcttttgcaaatattttttccagtctgtggctgttcttttcattttcttaaca

SEQ ID NO: 894576 - DNA, 667 bp, Homo sapiens
tgtcagaccttgatgccagttggccctgggcaaaggataaaaagaacaaagtaaaggatgaagcaacttagcctgctatacagacctaagagacttgacaaggctattgtaaagttcttgcatcaaaatgtcccatcaaagaagaaccatatcaccctcctgaatgagatcacctttaacacccttgccttattcaatcgttggcacagagaaacaacagaaagcattcccttggcacaaatgactaattttagagcataatatctgtaattggcagttaattacatccctcacaaatggagatctgacaggcatgcatcaattctgtctctacctattgaagtacaggggcttctttattcatcgaactatgctaaacacctacaagagtacatggrtcacagtaataatcaacaaatgtattagaataaatgaattgtctctggcaaaaaaagatgtttgtattttctctaatgtcttcttggaaattagtcttcttccaagagctactggtcatctggaattatagactaccttgggggatgtctgaatcttcttgaaaacttcacaatagggcaagaaaaatttttttaaaggagctatttgaccagaaaccagagaagtgtccttgcagaacacaaattatccctaacaccagtcactgaaa

SEQ ID NO: 894577 - DNA, 658 bp, Homo sapiens
aaggttgataacagtggagagtgtgctaaagttttgcagagttattgatttcctcagcagacaggtgaactgagttgggcctatgtgacccagagctctttgttctggcaactcaggctgtgagcaacctttgacacatcaatttttgtcacggattattatgttttctgtgtgagccatgatatgaaattgctgggaatcaataatttatgataatacattgaaagtatcctgagcaatggggaatccacgtggagtaaagcaccaggctgtggggaatcctcagaggtcatcatatttctttacaacgtccccaaagtgataactggcaatatttcacttacagttgataataacttttaraggtggatactattatattgcttattttatagatggactaacagaggtcattcaaagacctctgctgaataacctttcatctttatagaggcagccaaaccacaatttttacaggggtaaaatgcacccagacaaaggattagattttctgagaatcagttgtaaagacaggtgattgaattttccaaagatgacaaacagtatctcctacaaaatatgattttctggaaatatgccactactcctctttaatctgcaaaggtttatgtatgcgtgcaggaagaggctgcattca

SEQ ID NO: 894578 - DNA, 602 bp, Homo sapiens
tatggacaggaatgaagatcattgagattcagaaaaacattgagacccaatctaaggaagctacaaattatgataaaacaatacaggagccaaaagacaaaattgtcagtgtagaaaataatctaaccaactgaatagagctgaaaaatactctacaagaacttcacaatgcaatcacaaggattaacagcagaatagacaaagctgaggaaagagtctcagagcttgaagattggctttctaaaataagaaaataaaataaaaataaagagaaaagaaagaaaaggaatgaacaaaacctttgaaaaaatatgggattatgtagagarcaaatctatgactcattgccatccctgaaaaagatgaggagaatggaaccaactattttaggatatcaaccatgagaacttccacaacccagccatagaggctaacagtcaaattcaggaaatgcaaagaacccctgcaaaatacttcacaagaagatcatctccaagacacaatcataagattctccaggatcaaaattgaagaaagaatgttaaggaaaaatttaccagagagaaagggcaggtaacctgcaaagggaagcctgtcagact

SEQ ID NO: 894579 - DNA, 621 bp, Homo sapiens
ataatggtaaaggttaattctacaagaaaactaactatcgtagctatgcatgcacttgacacaggtgcacccagattcataaagcatgttcttagagaccttcaaagagacttagactcccacacaataatagtgggagactttaacactccacagacagtattagacagataattgaggcagaaaattaagaaagatattgaggacctagactcaactttgggctaaatggatctgatagacatctacagaactctccaccccaaaacaacaaattatacatttttctcatctgaatatagcaagcacatactctgaaatcaaccacacaatgggatataaaacaatccacaggaacttttaaaggacacaattataccagccatgctctcaggccacagcacaataaaaataaaattcaatacaaagaaaagcactcgaaactatacatttacyggaatattaacctgctcttgaatgacttttgggcaaataatgaaattaaggccaaaatcaagttatttgaaactaataagaacaaagatacaacataacagaatctctgggacacagctaaggcagtcttaagatgtcaatttaatcactaaacactgacatcaa

SEQ ID NO: 894580 - DNA, 635 bp, Homo sapiens
ggtcctgtgggtgtgcagaagacaagaattgagttttgatcgcctctgcttagatttcagaggatgcatggaaacccctggatgtccaggcaaagtttgctgcaggggcagagccctcatggagaacctctcctgtggcagcgtggaaaggaagtgtggagttggagtctccacacagaattcccactgaggcactgcctagtgctgtcctccagacagcagaatggtagacctcctgaaacctcacactgtgcacctggaaaagccccagacactcaatgccatctggtgaaagctcccaggagagggtttgtaccctgccaagccacaggtgcagaactgtccaaggtcgtggaagcccagctcttgcgatcagcatgatctggatgtgagacatagcatcaaaggagatcattttggaactttaaggttcaattactgccctatgagatttcagacgtgcatrggccctctagactctttgttttggccaatttctcccaaaaataaacagtcatatttacccaatacctgtatggccgttgtatcttggaaggaactcacttgtgtttgattttacaggctcataggcaggagggactagccttgtctcagatgagattttaaacttggac

SEQ ID NO: 894581 - DNA, 581 bp, Homo sapiens
atttatttctaactgattatgcttctatgattttttcgctatctaaatttatgtctttcaataatttgaggtgtatgggtcatcaccttttaacatattttctctgtatgttttatttatccttttcttttgggtctctagttacatctatgttaagtatttttatattgcctcacaagttcctgatactttgttcattattatttctaatcttacttctttttgtacatcagattagataactattttattgatctgtattcattctcacttatttttctgtcctcctaatsttctgctagggtcacttggtgatttttttttttttttctataattttctgtactgtgtctttcagttgtttaacttctgcttttcttttgtaacaatttttttttttttgtctttgagcatactttctggcgtactgattctaacaccaaagtcaccactgggttggccttcattttcattttccttgagtatgggtcacacttgctgttactttatatgcatagaaattggtatcctgtcttagatattatgaatagtaaagtttgaagactttggattctgttttt

SEQ ID NO: 894582 - DNA, 581 bp, Homo sapiens
atttatttctaactgattatgcttctatgattttttcgctatctaaatttatgtctttcaataatttgaggtgtatgggtcatcaccttttaacatattttctctgtatgttttatttatccttttcttttgggtctctagttacatctatgttaagtatttttatattgcctcacaagttcctgatactttgttcattattatttctaatcttacttctttttgtacatcagattagataactattttattgatctgtattcattctcacttatttttctgtcctcctaatcttctgctagggtcacttggtgattttttttttttttkctataattttctgtactgtgtctttcagttgtttaacttctgcttttcttttgtaacaatttttttttttttgtctttgagcatactttctggcgtactgattctaacaccaaagtcaccactgggttggccttcattttcattttccttgagtatgggtcacacttgctgttactttatatgcatagaaattggtatcctgtcttagatattatgaatagtaaagtttgaagactttggattctgttttt

SEQ ID NO: 894583 - DNA, 676 bp, Homo sapiens
actggtcttcctaggttttttgttttccttgcaatttactaaaagttaacagaaatgatcagattcgggaaaaatagaacacaactaatttgtattcagacatgttcttctgtttctgctttcattgcagaaagtttaacagagttttgacagatacagttatatgcctgtggttgaagtcacagtagctctgtctgctaagcaaatttatgtatgtcaaatgtcttatcctgcccagctcaatacatgcaataacatcctgaaatgaatttagtcatttcatttcaaatgagaatttctgaatcatatctattctcctgaggttgtttcagaatcttcctcttatttgaaattacttttttattatactttaagttctggggtacatgtgcagaatgtacaggtttgttacctaggtatacacatgccacagtggtttgctgcaccyatcaacctgtcactacattaggtatttctcctaatgctatccctcccctagcccccccacccccaattaggccccggggtgtgatgtcccctttcctgtgtccatgtgttctcattgttcaactcccacttatgagtgagaacacgcagtgtttggttttctgttcttgtgttagtttgctgagaatgatggtttccagtgtcatccatgtccatacgaaggatataa

SEQ ID NO: 894584 - DNA, 589 bp, Homo sapiens
ggctgcaaattttccaaacttttatgctgtatttcccttttaaaactgaatgcctttaacagcacccaagtcacctcttgaatgctttgctgcttagaaatttcttctgccagataccctaaatcatctctctcaatttcaaagttccacagatctctagggcaggggaagaaatgcttccagtctctttgctaaaacataacaagagtcacctctgctctagttcccattaagttcctattctccatctgaggccacctcagcctggaccttattgtccatatcactatcagcatttttgtcaaagtcattcaacaagtctctaggacattccaaactgtcctacattttcctgtcttcttctgaatcctccaaactgttccamcctctgcctgttacccaattccaaagtcacttccacatttttgggtatcttttcagcaacgcccctctctactggtaccaatttactgtattagtccattttcacattgctgatagagacatacctgcgactgggcaactgtacaaaaaaaagaggtttaattggacttacagttccacatggctggggaaacctcataatcac

SEQ ID NO: 894585 - DNA, 596 bp, Homo sapiens
ctgcctgtcgtagtgtgctcaagctggccataacaaaatatcaccgactggggtggcttaacaacagaaatgtatttcctctcggttctggagtctggaagttcaagagcaggatgccagcatagttgatttctggtggaggctctctttttgctgtgtcctcacatggtagagagaggaatctctctggtatttctctttataggggcattaatcccgttatgatagctccasccttatgacctgatctaacccttataacttcccaagagccccatcttcagataccatcacaaagtgtgtcacagcttcaacagataacatttgagggatcacaaacattcagtctctaccactgcctaatagtttaaataaaactagttaggattaatggaaataatagtgtaacctttgaagtgccatctgattccattttagtattactacttagtcattaatggatgcagaacacacacataccacacacacaaacacacatgcacacacacacacacacatatgtctgtatattagcttacaagcattattcatagagtagacttttctataggtcatcaagaagattggaactgtcc

SEQ ID NO: 894586 - DNA, 632 bp, Homo sapiens
catggtgaccattagagatatgcttgagcttaggaaagcagataattttcaagttaggtgtaccttccctactgtaaggcccttggatggggctgaaaaataaggtacttaaaattgttttcctgttcctgtggtccttcaaattggaagttgaaatcttcccaatttctgagtctgggaatgagacgacatatgtctttgaggggaaaaaaaaaaggacccattaatatttgggtactttttcagctatagcccaaaataattaaatattacgtatttggagtgaacagttttggcttcaaaaaccaaaaactattaaaatctagyatatgagaaaagttttgtttttttgttttttactttttgctgtcagatgccaaatcaaacttgttatctagaagagagggaaaaatctagaatagcaacaatatgttcaaatggaaaaaaaaaaaaaaaaaaaaaaaactctaccgaaatttagcaggcagaaaatagaagcaagaatggaggaatcagatagatacagccacactgctcctaaaggagaaaatctgatcaagaaatttatccccttgggcttgtatttttcaaaaggagaaatttcatgggtctgatattcatgaatgcactca

SEQ ID NO: 894587 - DNA, 562 bp, Homo sapiens
ctgggaagattattctggttggctcaatctaattcaaggcataccttggaagtattggatacctcggaagtattgggggttgggttccagaccactgtaataaaatgaacaaagtaagtaacacatacattttggttttccagtgcataaaatgtaygtttacactatactgaagcctattaagcgtgcaatagtattatgtttcaaaaatgtgcatacctgaacttaaaaatattttatttctaaaatatgctaacaatcgtctgacacagagacacaaagtgagcccatgctgttggagaaatagcactgatagacttgttccatgcagagttgccacaaactttcaatcttaaaaaaaatacagtatctgtgaagttcaataaagcaaagagcaataaaaccagatacacctgtacatgagaccctaaagcagagaatctgtcctggtcaggtcagagagatgatacaagaaggaggaagagaagaaaggagactgagaagggaaggagaaggagaaagagaagaagagatttgaaggatgagagggtcttaacgaatt

SEQ ID NO: 894588 - DNA, 599 bp, Homo sapiens
cttttcaccctcttgaaaagcacatgtatatgtgaaaatataaaattattccagtttgtgttgtgtacatttacaaaataaattccgcataacttcatttatatatatgcatataagttaaatatgtacttggaagaaaatgtaaaaaaaagaaaatatgtaagtagaatttactgaaggtcaaatcaaaataaaatcaacatattacccaactgtaatgtgaagggtagaaattgaaggactactttaaaatgaaacatctaatagatcaaaaaacaaaggcaatttgctgaaagttccaaaatacatcaaaaatagtgaaaacayttgttgtatatataggaaaactactgactatgggtattttttaatggtaattcctaattcttcaaggatatgacaaacctaatttggaacatcaatgtgtaatatgattgtacatgaagtgaaaacacagctaaaaaatgaacaaattaaacatcagaaaattgcccccaaagaataagtcacataagttatttaatttgtgttgcatgaacttatatttttacataataatatgaatggaataaaacatatagtatatattttttttctaa

SEQ ID NO: 894589 - DNA, 618 bp, Homo sapiens
ttacatgcctaaatcattatgtacagtctttacaatttacattataaagtctcctaaactaggtaatcattatcatgatagcaatatataagattacaaggagcagatggcctaacatctttcagctttcattggaaatattttagcaaaaatatatagttaaaatttctcagttataagagattggttttccgaaaatttatgttaatattgataaaattcaatataaaatttactaattttatcatgaatagttttcagtaaatcacttcatgattttcagaaaacacagagtaccattgtctaaattattttatatgacttgaaggtttttgttttgktttaatataaacatttagaaggttttctctcagaaaaaaaaaatcaatatattcagggatatttaggcatcccaaatgctacatatcaaaatccaagtaataaagtggtggaaaattgtaaaaggttattttaacattttcttattttgtgtaacactcttttgactaaggacagctatagaatgcaaagttaagtgaaagtaaagatcaaataactagctcattttactcaagggaaaaacaaatatattatctcactattgtgatcacgcaagga

SEQ ID NO: 894590 - DNA, 586 bp, Homo sapiens
aataacagacatcatcctagatttagatcatcttaaatccaacaagtatctttataagagaagagaagacagacacaaatggaaaaaagccaagtgaagatgaaggcagattagagtgatcctgccacaagcctggagccattaggagatgaaagaagcaagaaagccttctcctctaaagccttcagaaacagtgtggtcctgtcaacacattcattacagactttggcctccagaattgtgaaagggtacacttctgttgttttaacccacaaaatttgtagtaattttttatagcatccccaggatactaatgtagagtgcaaagtrggggtatggcacgtgactataaggtgaaaagtggttgggtggggaggattctagctgaatcctctaaggctaaatcctctaaggttatttaaaagtaaataggcttttctaatgggtggatatttcatgatatttcatctgtggctgactgtttttatttttttttctgaaaatattttccaaacccagaggtgagacagagtttatatgcatgtcagagagaattctaggagcagaccccaggaacattctggaa

SEQ ID NO: 894591 - DNA, 609 bp, Homo sapiens
tgaaggacagttttatgtctaattttctctttgggttcatcattttcatgagcatgtaatgtgccaaatgtgaatacatctagtagatgcagtagaagatgctaacattctggatatattccccgaacagccttaagaattcaatcctttattactatatctcactatacttgcaatgttgtaaatagagaaaaaataaaatggacaagatyaaaactgtaaattattgcaactacctccccccaaaataagtgcttaaacatgataagaatatttcctttgtgttttagaaacaaatgttgcactataattcatacaatttgttctaagtctaaaagagtcccaaaatactaatatttagatatttaaaactgaaaatagatatacctatatcactgtaaaaatatagacactggactttgcaaatcatgaatcaacattgggaaacagtcattgtacacatcagtgaacatatgaaattcaaggaggacaaaagaacaaacccaatagtagggatcataattcaaatcaacaagtcaacaaagtctcacatcgccttttaaatttttatttacaaaaattttctcacttactaccttcagtttgctc

SEQ ID NO: 894592 - DNA, 603 bp, Homo sapiens
tgacagaggtttgctgatgcctgtcaactatgccattctgtttacatggttgcttagtacctgtattagtccattttcatactgctataaacaacttccaaagactgggtaatctgtaaaggaaagaggtttaattgactccctgcagggctggggagacatcagaaaacttacgatcatggtaaaaggggaagcaaacacatcctacttctcatggcggcaggaagggaaagaatgagtgctgagctaagggagagcacctgataaaaccatcagatctcatgagaacacactcactatcatgagaacagcaaggaggaaaaccactcccatgattcagttacctcccacaaggcctctcccatgacatgtggggattatgagaactacaattcaagatgagatttgggtggggacacagccaaagtgyattagtgcccactccaactctgaaaattgtgtatcatcccaattggtgttcttatctgaattgcagaattaaaaaaaaaaacaaaaacaaaaactctacagaaagagtggaattattaggttgagaacccaacatgtcctggaaatattctacacttataattaaattttgtg

SEQ ID NO: 894593 - DNA, 610 bp, Homo sapiens
aaaaaaaaatagaataaatattacaaatgtaacacacaaaatatgacccaaactgcaattccaatctgctattttctaggtagattgctaggaaacaataattgatatattctcttgaaattacccaaatagagtcacgtgtaaatcttacagtttggttctttcaacacaaaccatgactctgaatcacaataatgagaaacagacaggggtttacttttcctacactggaaactttcttgggaaatgagtgagattgcattcttttttatcatgtttactcatttgatttactcattatttttacactcgacattaatgatgagacatttatgcacaytgaaaagtgtttgttgcactaatgaacaacttgaatattgaatgatgtagaaaatttaatttccaattttatggttaatcaagaacatttttgctgtaaattctacataaatttggaggtatatgtctgtacatccatatactcaaaatataattttaagtagataaattgtttcttgaatttgaatatgttttatcttataaactatattagatctaaattattgtgtcaaagtcccaaagacatactttttgattaagcatgttattt

SEQ ID NO: 894594 - DNA, 646 bp, Homo sapiens
tgttcataaataactcatgttaacattcattaggcacgcttgcatttttttcacattttttgctttgttttgttttgtttttttggagactgagtcttgctctgtcgcccaggctgaagtgcaatggcgcgatctcagcttactgcaatctccatcccagggttgaagcaattctcctatcttagcctcccaagtagctgggattacaggcacacaccaccatgcctggctaattgtttttatttatttatttwttttttttgagacagagtctcactctgtttcccagcctggagtgcagtggcgtgatctcggctcactgcaagctctgcctcccgggttcacgccattctcctgcctcagcctcccgagtagctgggactacaggcgcctgccaccactcctggctaattttttgtattttttttttagtagagatggggtttcaccgtgttagccaggatggtctcaatctcctgaccttgtaatctgtccgcctcagcctcccaaagtgctgggattacaggtttgagccaccgcgcccagccatgtttttctttaatcatattggtaagtaagcacagtaataaagagaatgaatttaaatattaattaggggaaatggatatcttagagaaaaaattat

SEQ ID NO: 894595 - DNA, 646 bp, Homo sapiens
tgttcataaataactcatgttaacattcattaggcacgcttgcatttttttcacattttttgctttgttttgttttgtttttttggagactgagtcttgctctgtcgcccaggctgaagtgcaatggcgcgatctcagcttactgcaatctccatcccagggttgaagcaattctcctatcttagcctcccaagtagctgggattacaggcacacaccaccatgcctggctaattgtttttatttatttattttttttttttgagacagagtctcactctgtttcccagcctggagtgcagtggcgtgatctcggctcactgcaagctctgcctcccgggttcacgccattctcctgcctcagcctcccgagtagctgggactacaggcgcctgccaccactccyggctaattttttgtattttttttttagtagagatggggtttcaccgtgttagccaggatggtctcaatctcctgaccttgtaatctgtccgcctcagcctcccaaagtgctgggattacaggtttgagccaccgcgcccagccatgtttttctttaatcatattggtaagtaagcacagtaataaagagaatgaatttaaatattaattaggggaaatggatatcttagagaaaaaattat

SEQ ID NO: 894596 - DNA, 591 bp, Homo sapiens
aatgaaataccataaactgcaaatattgataaattttgatacgtgtatgtctagtgcaaataatgaagataatgaaaatattgcatatctgtcaaccaaaaatatgttatttatacccgtttgtactttctccatcctgcctctttttactacttcctcccactcctaacaacagctgatctgctttctgtcactataagattagttagtattttgtataaatggactgattacaggagccacctttttttctgacttttttcatttaggrtaattattttgagattaatccatgtagctacaggtatcaaaaatctgttcctttgtattgttgagtagtattccattgtaaggatatactgtaatttgtttgtttatacacttaatggacatttggattttactagttcctggttattgcaaagagagcttcatccttttccagagttcatatgaacctacactttttctcctattcatgcaactcatagcacctatcatatgctatgtgaatgtttatgtgtgtatatataaaaacatatatatacacacatataaacatatatacacatatataaacatatatacata

SEQ ID NO: 894597 - DNA, 591 bp, Homo sapiens
aatgaaataccataaactgcaaatattgataaattttgatacgtgtatgtctagtgcaaataatgaagataatgaaaatattgcatatctgtcaaccaaaaatatgttatttatacccgtttgtactttctccatcctgcctctttttactacttcctcccactcctaacaacagctgatctgctttctgtcactataagattagttagtattttgtataaatggactgattacaggagccacctttttttctgacttttttcatttaggataattattttgagattaatccatgtagctacaggtatcaaaaatctgttcctttgtattgttgagtagtattccattgtaaggatatactgtaatttgtttgtttatacacttaatggacatttggattttactagttcctggttattgcaaagagagcttcatccttttccagwgttcatatgaacctacactttttctcctattcatgcaactcatagcacctatcatatgctatgtgaatgtttatgtgtgtatatataaaaacatatatatacacacatataaacatatatacacatatataaacatatatacata

SEQ ID NO: 894598 - DNA, 668 bp, Homo sapiens
ggacagagtgataaaaatcattaggaaggctaaaatgtgaacatttttaacctcaaatatactttttttttttttttttttttgagacagagtcttgctctgtcgcccaggctggagtgcagtggcgcgatctcagctcactgatctccgcctccygggttcacgccattctcctgcctcagcctcccgagtacctgggactacaggtgccctccaccacgcccggctaattttttgtattttgtttagtaaagacggggtttcaccctgttagccaggatggtctcgatctcctgacctcgagatctgcccgcctcggcctcccaaagtgcaaatacacttttttatatttaagcatggacaccttggttcaattgttatgaaataaagcaaataaacatatcatgaaagatatgattagctatatcagagcatgagtaacaaccagatctagtgacaacgcacacactatcacgagaagagcaagggtgaaatctgatcctataattcaatcacctctcatcagaccccccccaccaacactgggaattacaactcgatatgagatttaggtgggtcacagagccaaaccacatcagggtatttgtctaagaacaacaataacaacaaaattgttggttctgttattaagagaagaatgacaatcg

SEQ ID NO: 894599 - DNA, 729 bp, Homo sapiens
taaatttatattatgtttacaaccagaaaatatagatatattcagggtaaaattatgcttatttaacatacttgatataaatactagaagaaatttacaaaaaggggagaaaaatatttttcttgtatttgaaaaatgtttcagaatatttattttgtccttttyttcttttgctacttaaaaaagaatgtcttaaccctaatcttctaagcaataggaataagctattgaaatataggaagacaactattttgataaatcaagcaccttgtatttaaaacaaaattaaataaagataaaaacttttatattatatatttaagtagattttattttatatttaagtagttatacaaagttaaattttcaaaattggtgtctgacagatatctattttttcagaataatcatataattgacgtatatttgataatcacctaaatgttctatgactgaaaatttgaagacacagaaaaatagaatttaaggcccaataattgtattttgaaaggtatagaaaaacatagatctaaaaatcttcttttatttaaaaatattcttaataaatattttatgccttagcctaaaattagtcgatttctcagctcagatgacctacacaacttttttggtctatccccgcatgtgtgtctctttcactgtttacactatactgtattgcattcttttgcaacttacatacaaattttactatgaatatggccatag

SEQ ID NO: 894600 - DNA, 593 bp, Homo sapiens
taattttaacaaatgtatcatgctatcattagatgttaataataggggaaactgagtgtgtggtgcatgggaactccggataatcttcataattattttataaatttaaaacttaaaacgaatgaagtgattctaaagcaatatattctgatgaataggatctaaaacaaaaacgactgaatgaacaaattaaccacgaaaaactgaataaaaataataagyttacagtaagagtcaaacattagtaatgtgtcaaaatagacagaatttaatatgcagaaaaacatgagtttttaaaaattataggacaaagtttaagatatcatggatataagctgaaggaaaacaagaagaatttcatttgtgttattaggcaaagaaaataaatgttacagaacttgggattttatataaaatgttttatttaattatattttggagaaagaaaatttaaacttaatgaaatatatttagaaaatgagtaatcaaaacaataaatatcaacattacacatcactcatgacttttaaatgtaaagtcttatgtgcaattttaaactaaattattaaaaatttagataaagcacattattt

SEQ ID NO: 894601 - DNA, 593 bp, Homo sapiens
taattttaacaaatgtatcatgctatcattagatgttaataataggggaaactgagtgtgtggtgcatgggaactccggataatcttcataattattttataaatttaaaacttaaaacgaatgaagtgattctaaagcaatatattctgatgaataggatctaaaacaaaaacgactgaatgaacaaattaaccacgaaaaactgaataaaaataataagtttacagtaaragtcaaacattagtaatgtgtcaaaatagacagaatttaatatgcagaaaaacatgagtttttaaaaattataggacaaagtttaagatatcatggatataagctgaaggaaaacaagaagaatttcatttgtgttattaggcaaagaaaataaatgttacagaacttgggattttatataaaatgttttatttaattatattttggagaaagaaaatttaaacttaatgaaatatatttagaaaatgagtaatcaaaacaataaatatcaacattacacatcactcatgacttttaaatgtaaagtcttatgtgcaattttaaactaaattattaaaaatttagataaagcacattattt

SEQ ID NO: 894602 - DNA, 647 bp, Homo sapiens
gcattatataaaactgtgaaaataaatcttcatgtttaaaataagattacttcaagcatttaaattctatgattaggggctcttttcaacaaggagtctttttgtaaaacatatatacaattcaaaaatataaagatatcaaataattcaactaataaatcaaacctaaccctatcaaccaaaaacttcaactattaaatgtttactttttctatgcccttagtggtctctatagccaaattgcctagaattgaatcctaactcactatttatcttttgtgttactttggtyaatgtatttaacctctctgcgcctaagtttccttttgttaactcagaaggttctagtgaagactaaataactcaatttccgtaaagtgagtatagcaatacctggcatgtaataaaagccacataactgtcaatgttataacaataacacatacaagcacacacacacacaaatgtctttgcacatataaatgttaacatgtgtgttgacacttagtacataattgatattattataatcactttgactgtaagaataacctaattaagatttacaaaattgatgtctttgaacttttttcacttaaatgtacattaagattgaacataaatttatatggttttatgtgacaatc

SEQ ID NO: 894603 - DNA, 647 bp, Homo sapiens
gcattatataaaactgtgaaaataaatcttcatgtttaaaataagattacttcaagcatttaaattctatgattaggggctcttttcaacaaggagtctttttgtaaaacatatatacaattcaaaaatataaagatatcaaataattcaactaataaatcaaacctaaccctatcaaccaaaaacttcaactattaaatgtttactttttctatgcccttagtggtctctatagccaaattgcctagaattgaatcctaactcactatttatcttttgtgttactttggttaatgtatttaacctctctgcgcctaagtttccttttgttaactcagaaggttctagtgaagactaaataactcaatttccgtaaagtgagtatagcaatacctggcatgtaataaaagccacataactgtcaatgttataacaataacacatacaagcacacacacacacaaatgtctttgcacatataaatgttaacatgtgtgttsacacttagtacataattgatattattataatcactttgactgtaagaataacctaattaagatttacaaaattgatgtctttgaacttttttcacttaaatgtacattaagattgaacataaatttatatggttttatgtgacaatc

SEQ ID NO: 894604 - DNA, 569 bp, Homo sapiens
ctttctcgtccttgattagaatgtttttctctagtatagggacggtatctttcacatgggaattttctctgttttttttttgagacgcactcttactctgtcgcccaggctggagtgccgtggtgcgatcttggctcactgcaagctccgcctcccgggttcacrccattctccttcctcagcctccccagtagctgggactacaggcgcccgccaccacaaccagctaattttttgtatttttagtagagacggggtttcaccagtttagccaggatggtctcgatctcctgacctcgtgatccgcccacctcggcctcccaaagtgctgggattacaggagtgagccactgcacccggccccgaatttcttctgctgttaagacatagcatgaaggtcagaatgatcttcttgcacctgctgtttttcatgtgcttttaatttactgtttatgccagggtggtacatttttaactccttcaaaagccagtccccttaagcagagcttttcctggagactctcactgcctctacagtgtacggaatttttagaagtacattaaaataa

SEQ ID NO: 894605 - DNA, 569 bp, Homo sapiens
ctttctcgtccttgattagaatgtttttctctagtatagggacggtatctttcacatgggaattttctctgttttttttttgagacgcactcttactctgtcgcccaggctggagtgccgtggtgcgatcttggctcactgcaagctccgcctcccgggttcacgccattctccttcctcagcctccccagtagctgggactacaggcgcccgccaccacaaccagctaattttttgtatttttagtagagacggggtttcaccagtttagccaggatggtctcgatctcctgacctcgtgatccgcccacctcggcctcccaaagtgctgggattacaggagtgagccactgcaccyggccccgaatttcttctgctgttaagacatagcatgaaggtcagaatgatcttcttgcacctgctgtttttcatgtgcttttaatttactgtttatgccagggtggtacatttttaactccttcaaaagccagtccccttaagcagagcttttcctggagactctcactgcctctacagtgtacggaatttttagaagtacattaaaataa

SEQ ID NO: 894606 - DNA, 646 bp, Homo sapiens
tcatattataaggggagtagatacacacacatacatatgtatatatacacatatatatttacacatacatatatgcatgtatatatataaacaaattaaggtatataacatatattttaaatttttcccttgttaacttaaatttcaatatttcttcagtgttgtcaaatattaaaccacagtaatttttatgttaatcactcaagtagagataatgtaaagaaatagaagatttgaaagacattcatgaagagagggagagggaagaagcttgccctacaagatattgggaaattgtatatctatagtatctgatatggtttgactctgtgtccctgcccaaatctcatctccagttgtaatcctcacatgtcaagagaggaaggtgattggatcatgggggcactttaccccatgctgttctcgtgatagtgagtgagttctcacatctcatggttttgtatttggaagttcctycttttttttcttttccatgttgccttgtaaataaggtgcctgcttccccttccaccataattgtaaatttcctgagtccaccccagccatgcagaattgtgagtcaattcaaccacctttgtttgtaaacatgtccagaacatgtcacagactttcccagcagcccctc

SEQ ID NO: 894607 - DNA, 686 bp, Homo sapiens
aattgcttaatttttacatatttgtagatatcccacattttctctctgttattgatttctgatttgatttcattgtggttggggaagatactttgtatgatttcagtcctcttaattttagtgggacttattttatgacttactatatgtcctatcatggagaataatccatgtgtaccagagaaayaaatattttgaaataagtagggtttctagggtaagcagtttcatacgaagactcagagacaaagcctaaaataccaactctcaagagaccagaggacaggagtgctgtgtcactcaacaaagccacatccactgaagaccaaggaccaggagtacagggctccatggggaagggcaacttagaaagttttggatttgctgcagatttgttgacttttcaagagggcactgatgtattcggtccctctctctgacagagaagacaccccctctcctacttgataactgaatgatgccatagttactacctgatgtgcagttccttcaaatagagaggaagtacactggccacaatctctgaacaacagacatagaggactggcttacaggggaagctaaatttttcactttatcatggagcactaaacctctgctattgtatttggcaacagaaatgaggatcaagattaaacaatgagtgctgagtctcaatccatttg

SEQ ID NO: 894608 - DNA, 686 bp, Homo sapiens
aattgcttaatttttacatatttgtagatatcccacattttctctctgttattgatttctgatttgatttcattgtggttggggaagatactttgtatgatttcagtcctcttaattttagtgggacttattttatgacttactatatgtcctatcatggagaataatccatgtgtaccagagaaacaaatattttgaaataagtagggtttctagggtaagcagtttcatasgaagactcagagacaaagcctaaaataccaactctcaagagaccagaggacaggagtgctgtgtcactcaacaaagccacatccactgaagaccaaggaccaggagtacagggctccatggggaagggcaacttagaaagttttggatttgctgcagatttgttgacttttcaagagggcactgatgtattcggtccctctctctgacagagaagacaccccctctcctacttgataactgaatgatgccatagttactacctgatgtgcagttccttcaaatagagaggaagtacactggccacaatctctgaacaacagacatagaggactggcttacaggggaagctaaatttttcactttatcatggagcactaaacctctgctattgtatttggcaacagaaatgaggatcaagattaaacaatgagtgctgagtctcaatccatttg

SEQ ID NO: 894609 - DNA, 599 bp, Homo sapiens
cccatggaccaatcagcatgcattttcttccctctgaagcccataaaaaccctggactcagccagacttggacaatgcgatgacctgtctgcagattggagctattaactgtgggtgtcctctctgctgagggctctgcagatgatgggatgacctgcctgcagaatggagctacccactctgggtctcctctccactgaggaccgcacagaaattgtgactaccagtttcaggaaggagctacacwctccagatctcctgagaactgttctgccactcagtgaagttcctctctgacttgcttaccctccagttgtctgcatatctcattcttcctggatgtgagacaagaacttgggacccactgaatggtggggctaaaaaagctgtaacacaaacaaggctgaaacatgctccctgctcaccacattgcgggcaatgagaaggcgagaagagctgaggccctttgtgaagcccagacctaggggctccccaagccagagctgtgacattctctttgaggctttgtagttcttggaatatccaagcctctggcgccaccatgttctccttgtccagccatgggtgtcctcagtgga

SEQ ID NO: 894610 - DNA, 556 bp, Homo sapiens
ataaaataaaataaaatatttgggttatataaaatataaaatatttgggttataaaataggctctggttttgtcatgaaaacatacagcttctgaatataatatgtaaaatatatatcatactcaataggtaatatatatatttattacataaatatagagagactgctatgtccctgctatgaaagcacacaaatgttgattataatatggaatatctcttagtctgtttgtgccgtagtaacaaaatacctgtgactgggtaatttataaagagcagaaatttatttctcacatttctgaaggctgagaagtttaagatcaaggcaccaacatttggtgaaggccttcttkttgcatcctcatgtagtagaaagcagaagcacaaagaagcagatcaatgctacattcttacatggcagaagagaagagggtgaaccatgaacttactcctgcaaggcatttttataagggtcgtaaactatgagtgaggaaagagcctcccagaggtcccatcttccaataccatcactttggtgattaggtttcaagatgag

SEQ ID NO: 894611 - DNA, 469 bp, Homo sapiens
atgtgagctaaattcctaaaataaatttctctatctatttatctatctacatcctgatgtttccgtgtctctgaagaaccctgacaaatacaaaatctctaaagataacctgaaatttgaataatagcaaagtgcacgtagatccttccactggaaagaggtgagatggctctgggacatagtacaggatctgggaggcatgttgaccaagactcacagaagatgggactgatttttttggactttgagttatgaaaatggctacattttttgaaacttactatttatttacrattctatgattcatttcttttatgcctcaatgatatggtttagctttttgtccccatccaaatctcatccccaaatttaatccccacctgtcgagggagagacctggtgggaggggattggataatagaatcaggcttcccccttgctgttctcatgacagtgagggaattctcac

SEQ ID NO: 894612 - DNA, 469 bp, Homo sapiens
atgtgagctaaattcctaaaataaatttctctatctatttatctatctacatcctgatgtttccgtgtctctgaagaaccctgacaaatacaaaatctctaaagataacctgaaatttgaataatagcaaagtgcacgtagatccttccactggaaagaggtgagatggctctgggacatagtacaggatctgggaggcatgttgaccaagactcacagaagatgggactgatttttttggactttgagttatgaaaatggctacattttttgaaacttactatttatttacaattmtatgattcatttcttttatgcctcaatgatatggtttagctttttgtccccatccaaatctcatccccaaatttaatccccacctgtcgagggagagacctggtgggaggggattggataatagaatcaggcttcccccttgctgttctcatgacagtgagggaattctcac

SEQ ID NO: 894613 - DNA, 634 bp, Homo sapiens
ctcccaccagatacctcccatgatacgtggggattatgggagctacaattaaaaatgagatttgattggtgacacaaccaaaccatatcacatagcatccaaaacaattcctatttacccaatggtaagtatataacaattgtttattcagatttacttaactgattgcttaaaatattttgtcaatttatggaacatctacagaaatttgattgcttcagggatatagtcattaaytcactttacttgtgtacttttttataagttctgattatgcttaattttgttttcaaaaatgggtcttaaatgctaggtgtgtgaaagagttgaatttcataaaacatttctcagtgtcaatcttttaatattaattattttcctcaaactagtgtaataaaccttaataaactatttgtataaggaactttttttcattaaattttactgagtttaaaaaagcactttaaaggatttttttgaaagagtaacatagtacacctaaaaagttatttataatacaataaaataagatatccaggaaagctggaagaaaggaagtaactggaaatatgggaacaaatatctttgagcatcattttttttttaacctctgaactttttattggcctcctgc

SEQ ID NO: 894614 - DNA, 583 bp, Homo sapiens
tcttttggatggtttgcatagagttgctgctgtccagggcattaccaagattgaagtcctcaccatcttccagcagggggtggtaggtggcgatctcagcctccagcttgaccttatgttcagcagcgcctcctactcctgggcctggtgctgcccctctgcccaggtctgtggcaactcggactccaggtgcatcagggtcccmttgggctgctccatttgcagggcatagcgggcctccacctccttcaggctgttctccaagctggccttcagatttctcatcgagtacaggtcgatctccaaggactgaactgtatgtctcatccccatgagtatcatctcagcagctccaacctcgatgaactgtgtggtgaccactgtggtactctcctcaatcagccgagactagtatttgtccagctcctctcggtttttccgagccagctcatcgtattgggcctggatgtctgccatgatcttggtgaggtcctgcaatttgagggcatctacttccacggtcaacccagagctggcaatctgggcttgtaggccttttacttccacttcgtggttcttcttc

SEQ ID NO: 894615 - DNA, 614 bp, Homo sapiens
agactaatgcagatgacaaatgtaagttgaagtcaatcttcatttgctatctgaaaataatagagcccttacaaattatgctaaatctactttgcctttgctctagaaatgaaagaacaaagtctggagaacagcacatctggtcacagaatggcttactgaataatttaagtccactgttgagacctacagctcagaaaaaaaaagtttcaaaatattccttctctttagcaatgcctctggtcacccaagagctctgatgaagaagcacaaaagttaatgttgttatacctgcaaaaacaacgtccrtattgcatattatggatcaaggagtaattacaactttcaagttttattatttaagaaatacattttgtaagactttagctagcataggtaatcatttcttagatagacatgagcaaagtaaattgaaacctgaaaaggactcatcattctaaatgtcattaaggacatttgtgtttcacagtagaaggtcaaaatacctactttaacagaagtctgaaaacagttgattacaaccctcaaggaagacttgaggggttcaagactttgacagaggaagaagtaattgcagatgtggtggaaatagc

SEQ ID NO: 894616 - DNA, 658 bp, Homo sapiens
atgtctatctgtcattttccactggcaattcatagtaaatgaaattgaacaacggcagacaaaattatttttaaagctacactagtccactatatgtaattaaatatgaccaacaaaaattacatattccattaaytatttacattgtatttgccttttgttcaagaattgctaaccatatcaaaatttttctgctcacttttattattagttttaaaatatagaatgaataccaatatccctaactcctgtatctgtaccaaaacatttttggacaaggtcattggttggttaactatttttctttcatctccaaatatgtagaactttttttctgagtaatatttgaggaacagaactacaaattccactaagaacatgcttttcatataaattattctgatgaatccaacaactgctctctatctgccctgtgaccacctggctgcagccatcctcatctcctggctgtagccatcctcatctcccctctggaaaactgcaaaatcctttttttaatctgaggttctactttagtccattatcaaccattggtagcttaaagacaagtactgtccagacaaaatacattaaaacagctcgcacccttgcttggacatttcaatggtttctttttgtccttagatgaaattccaaa

SEQ ID NO: 894617 - DNA, 603 bp, Homo sapiens; identical to SEQ ID NO: 894592

SEQ ID NO: 894618 - DNA, 662 bp, Homo sapiens
gagtctaagtgtttttctctctccttgtttgcagagaagagactacgcaaggacatagtgagagggcagccatctgcgagccacaaacagaggcctcaccagaaaccaaccctgcaggcaccttgatcttggacttccagcttgcagactgtgagaatatacatttctgttgggtaagccatccagtctgtagtactttattatgacagcccttatcagactactacatagagtattcgggcatttgtaggcacttacctgccatgctggctagtttcaattgcgagtgcttgggagaaacatgagctttacttttcttttcttttttttttttttcactccatctgcctctgtgtttaraattctctgtttttctaattatggagctaacctctcaactccttgaatgaagaggctgaatgccacacagtccccgggcttttaaaatgccatatgctatgtgtatattcttggataattgtgaaccactttagacttcccctatgccccacttatgggttgactgatgtgtggtaacttgaatgggctcaatataaaatctctctggcttgtacaaggaaaaaacagagaaaacagagaaccttttaataaaagatgaaagaatgttgaagagggcttaaaagggaaggattcaatcagaa

SEQ ID NO: 894619 - DNA, 554 bp, Homo sapiens
tactatttcaaatatagttctctatcacaacatattcaaattattaggtgttttctctgtggagtattttcaatattttacagatgttggaataatcgtgagatttctgtaatacagaatgcgttccattgttattattaataatagtctctactataaatcacatcaatcactgtgtgagcattttgcacatgtaatctcaaattctcatagagaaatactgttggctacacagactcagtaatttcaatcatgatactattgttttaaacccatcaatatgctaatccattctgccaggtgcaagagaaaccaaagagtaataaagtaatttcagagccttctgacctcaaaaagactatcattcmactaaggagatagattacaaacaaacaagatgccaactaattcaaggcttctctatcatgagtgaaatattttcatagtctgctacctaatagtttcactcttaattgccaaaaaaaaaattacttgatccgtatgggtgtgtgtgaattcatacacaaacttaaaaaataattacatttattatc

SEQ ID NO: 894620 - DNA, 606 bp, Homo sapiens
tatgaataacatatgaggcagaggaaacttctctgtaatgttttaagttgtgacagacagaacaaaaatggtctatggggcttgtttgagagagcgaggagttcttgcgggaacgatatgaggactgagattttcacagagagcagaaagttatgcagggcacaaggggcaatgttaagsgtttatttttttgtcttaaatgcagtgcaaatccagcaaagggttctgagttgagggtagaagttgaggatgaaattaatattttgaaaagagtcattggttgtaattggaaaaaaaatagattttttgtagagaagcatgcaatagtggatgaggaagacaaagaggcaactgcaacactctgtgtgagatttgtttcaactagagtgagatagcaagatcttgcaactttaccatacagcttataacctcacttgcccagctttactttttagactgtctggttgcctggttgctagaacagacacatttttgacaaggtttagagtggcacattttataaaatgataggaggcaaatgtagcccaccagtgaaagtctgcctaatggctgatgcagaaagttccactgactctatacacttca

SEQ ID NO: 894621 - DNA, 620 bp, Homo sapiens
tttcaaatacaataaaattgtaacaattatttggtgtataaatgaatgaatgatccactcttcctctctctttgctcctgggaagtacttgctccttatccagtatcttacatctcagtaaaggccaccacaatttaatcaattgcttgggacatttacctgggattttgtttttaactcctttcyttcacaacacacattaatccatgagaaaatcctattagtttttttcttcatattatgtcatgaatttaacaacttttcacatgctcaactattgcctgaactattacaatttcttactgactgatgtcctcaggttacacttgacagttcccgtagaggagtgttatcttttaatataaatgtaaatctgatcacattgctgtgttcctcaacatggtttttttggttccacatctgtctatgatgtagaaaactgaaaagagcatcattcccacttaaacaattaaaggccagatacactacaaaattaacgctttctttgaacccataagtcaatttctactattccacatataatatttaacattcaataacaaaataagcaataattaaaacacaaaaaaaggaagaaaaaaggattactaatagacaaa

SEQ ID NO: 894622 - DNA, 640 bp, Homo sapiens
agaagcatgtggtttctattgcctaataaataggtatagctggaagacaaaaacagattttgagaaggatccatctgcctctaattcctgggggctccatgaggaaaacagaggtctctccaaaaatggaatctgtggtaccttttctgcttttcccaaagagtcccaggccatcagaaattaccatagggcctctgatgtgtgcattaacagtggcaaggcaaaatggttaccaggccaccacacaggagcagaagaggccaggctcctcccctctgcataaggcgcaaattcctggtggctccaacccattctcccagtgtgcaggtgggcccttagtctgagccattcacattgatttatttcccttactgcacatgtgttcagggatggaattttccagtgactgagaaaaaaccttttacmagcaaagcaagatccaagaagagaaaaacataaaggccttttaagtatacctaatatttggatatccacttttaattaagctgagcactctttaagaaaatccttttaaatccgttattacctgactttagccatgccaagcggccaatatttctggcttttgaactttaccaaaagtaacatcccaactgctcatagaaaggaaaattcaagg

SEQ ID NO: 894623 - DNA, 634 bp, Homo sapiens
ctgtgatcacaagggtctgtttattgaaatgaaataggtgaatggttggaactcttgactaagagttacttaaaatatactctcctcagctttgttaaacagttttatgtggtagatacaaaacttcaaagggaggaaaactctgaaatatcattaatctactctaatgatttatgaatttaagtagacttcttataatattttcatttgggtggagtataaatttaaataytaaaaataattatgcatatttattttatctttatataatacaaattctatggctagtttagaagaatttactgaatgaataatattattaattttatctgtcagttatacacatgaatatttattagcatgaataattatttttattttaaacaatggtgactcatagaaactacctgctttgatactagtagaagccacacaagtgagttacatttttctgaatactaatattatgtcaactgaatatcaaattgttgacaaaatatttctaagtggaaaacaaaatatgaagacaaaggagtgaaatacgctagaaaatctaggacaagaacttgagtgtcttgattcctagctcagacatatatataaatgtgatacataattacataccgtagacgtg

SEQ ID NO: 894624 - DNA, 624 bp, Homo sapiens
tggagtaaagcatttaatgtgattttatgaatttcagttatgtcaacatttctaaatacgttctcagaataaatgtatgtagtgttttgaactgtaaaaatcatgtatatttacagggataactttctgcaaggattttagayatgacattataggaaggcttacataacgatgtaagtgggtcatatttaaagacttaatactcaaaaggtagattacctatgaagatttaagaaaatttgaattaaacatttctaattgaaaaaattccatggggacattaatcacaatcagtgcataatgaagaatattggtatatattaaaagcataattgttgacttttaaaagagttttaagttcctctgaacattgatgttcactaaactggagttaattagttagctttctctatatatagattagttaatagttgattagtcaagtattataaatattcccagaagtggtgctgctgtcttacagtgtcttcaagaaatgtgaagtcaagtcaggttatggcttatgtttttaagtagtaaattatgtatcagttctaaaatagagttcagcttaattgttaaatagtataaatcagcaaattgattccttcaatgcatatgtgc

SEQ ID NO: 894625 - DNA, 577 bp, Homo sapiens
acaaaaacacacagcgtaaaacacacaatataatctgcatgcaatttgacagagaagagaaaggatggatgagaaaaacaggacaccagaccccccccataaaagcgcattcacacacacacacaaaaatgaaactctgtggaaaccgctaatataaaagtaaatataaaaatatttgtttttcttatgttcaatgactctaaaacagaggtcctcaagcaggaaaaattttgcccctcagagcgcatttggaaatctctgtaaacactttttatttttaagttggagagtagggggtgctactagaatctagtgggtagagacaagagatgttgctaaactatatatagtactataacacaggacagctcccaacaacaaagaattacctgatccaaaatgtaagtaatrttggtactgagaaaccctgttaaaatatagttgatgttctaaaggaaaatgatattgttttatgtggctttataacatagttaaaattaaaatgtgtgaatataatggcacaaaattgggataaatggattggaaatagaaatctgtgaagttttacaataaaggt

SEQ ID NO: 894626 - DNA, 621 bp, Homo sapiens
ctggatatctgtaagtttgtataaaatcttgaaataaggtaatgcacactgtctttgttctttattggaaaaatattttggctatttgaggtcttccttttccatataaatttaaaaccttcttggcaattttctcaaaaaaagtctgcagttcatttttggagaattacattgaatctataggtcaacttggagataattgatatattagtaatatagatttttccaattcaaggtcatggaatatttctcaatttatttagatctcttttaacttcaggaactttgtctactttttgattttttattttaccttaagttctgggatacatgtgyagaatgtgcaggtttgttacataggtatacatgtgccttggtggtttgctgcacgtatcaacccatcatctaggttttaagccctgcatgcattaggtatttatcctaatgctctccctccccttgccccccaccccccgacagggcccggtgtgtgctgtttccctccctgtgcccatgtgttctcatttttcaactcccacttatcagtgagcacgtgtggtgtttggttttgttcctgtgttagtttgctgaaaatgatggcttccagcttcatccatgtcc

SEQ ID NO: 894627 - DNA, 660 bp, Homo sapiens
tatacttcaaattgtaaggtacatgtgcacaacgtgcatgtttgttacaacatgtgccatgttggtgtgctgcacctcatttaatgtgtgtttgaaaagactattcagtagttgttggttgtagtgtattattaatggttattaggtaaagtttgctaataggctaattcacatcttctaaattctgacctagtttagtctacctgttttactttctcagagtggaatggtatagcctctacctataattgttgattgattcctgttaattctgtcaggatttcctttcagttcttcaggtatttggaagcgctggtagtggcatacacgtacaggatttttatgtctttcttgtgaaatgattcttattatttgaaatgacctccgttatatctaatcatgttgtaataaacttgggtcctgatactaatagagacttcccagccatcatatgattagtgtttgcatgatgtgtttttacatgcttatgtttttaaatctgtttccattcttttctygtttgcattattcctgatgcactgtcaccattgttcttatttgttcttttgtgcattaagtgacttttttctctagctgctctcaagattttaattcttgatttttagaaatattgttatgatatacctcattataatttct

SEQ ID NO: 894628 - DNA, 553 bp, Homo sapiens
ctctgaaaaacaggcaaacaaataaaaatctgacttgtcgcatttgccagtttccatggtgtaaatactcttatgatcacttctaaaacttccaatatgcaattgttgagaagagatgtgcaccgttggccccaggaagccagcgggaacctctgtcatacttcactgcttctcargcacagtctgctccaagaatacctctcccatttctggcagtttttggaggtggtttaatgtatgacctgttctttctaggcttgctcaggactgctatattggaccttaccttgtgccctgtcaaagctctagaatagaggttagaaactttttcttaaaggtctagagagtaattaattttagacttgcaggcaaatggcttctgttgcaaaaaaaattaactccgcccttgaagctcaaaggcagctgcataaaatgatggatgtggctgcatcccggtaaatttcatttataaaaacaggccctgcagctcttaactgtcccttgctcacaaactcctgaatttctgctacagccttcgaccagctctgaaccg

SEQ ID NO: 894629 - DNA, 682 bp, Homo sapiens
aggtgctatgggaatgggacagtctcagaatgggatcttcctacttcgagactcagagtatgtgaggatgacatgctttcttacttcttttttatttttattttttcttcctcatgtactcttaagcatcaaaagggacatgcaatgagagtttgttccaaatggtcattcaggaatccaggattcttccatcttgtgtttttgttgttgttgttgttgtttttgtttttgtttttgttttctccttgggctttttaaattacttttcacctgatcagttaattagacatgaaaataaggattgggtgagggaagcttttgtgatctaggcctgcaaatgtcacacttcaacgcatagtccattccccacacctaattttgggtgaggctaaggcaagtggattagttgtgtgtctgtttctaccactatatttatactgtaaaatatcatttcccatstaggccacttcaacagcctcctcaccatactcccctcctcaaatctcttccctctccaatatcttctccaaagagtatttgggtttggaatccttaatattgacctgtgattccctgtatgttctctctcttttaatctaatttcttactacactgcccttgctttccagaactcaggaccctgcgcctttcctgcacatgctcttctcccaccacaagtcct

SEQ ID NO: 894630 - DNA, 667 bp, Homo sapiens
aggctatttcatgaaaatttaccttggtgcaagtgatatgagctattaaatccatctttcggccagatattccattctgccttagaaagcccaatactaatccaagaaagacatggaaacatgaaattcacacttatttctaagagttgtaattgctgtgagttttcagcatatcttagcccatttggaagaatrgggttttcttgaggctttcttgaacccggagagctttcggaatagtactttccaaggagtctgagatatttctttattttattttaggatagctttggtgctttctctgagggtggcttagggtaaatggcattgaacaagatggccttaaaattccccttagcttgtctgaactttatacaggcttctttttgtctctaggtaactgacctccctctcactctggaccaggtgggctaaccacagaggatcctgaccttccttccccctatcccttacagaacccaggttacacaatcacagagcaaaacattccaagcaagaggccctaatcacaaacttaatatataacttaatgtacttgacacaccccattgatcaatctccctgcaacatcctttgttacttttccactaactcaccacaactcttaaaaaccctaccattctttgttacagaagaggtaagttca

SEQ ID NO: 894631 - DNA, 655 bp, Homo sapiens
taaggcacgtggttatgagccattttcttcaggtactcaatttcatctttagctaactttcttgtaatgactcctgtctagcatgacttttgaaattgcaatcttccttctagaattatttctactttacttgtaaaaaattgccttttcctttatattttctagcttttatggaaaaataattatcaacatttattatttgcttttcactttcaaagtcagccatacratcactttgagaaatggtttagtcacatctcccaaagcttgtgttgtagtatcacccagctgttctactcttccatatacttgcagcagaaataaagtatattcatagcagcactattaaaaatagccccaaattggaaactatgtgactgccaatcagtattaaagtggtgagtgtattgtatcatgttcacacataaatttactgtgcagtaatgagaaataacatctaaaggaatatgcataaaagtgggtaattttcaatatatcatattgaagaaaaggaataagaagaaagtgtaatatatagttccattaatatacaataaaaatgcagcccgaactaacattttagaagacaggatcgtgatagccaggtcaaagtgaggaaagcagattgcagtggtaataacataagagatgcttc

SEQ ID NO: 894632 - DNA, 632 bp, Homo sapiens
aatattccaaattcggacttgtgtggctcagacctgggtagagatgaaaaacctcatgactgagcttggagaaaaagcagctgaagcttagcatccaggcccaagggagcaagacatggaggcatgctcctgtctagggtcttcctccaattctgatgacctgtctaaagagcgtcttcctgtgaaaatgactaaccttgagagtagtgatctcattcagactatagtcccaatcaactttgaatgattttacttcatgacctcagtaaagaacacaaaaataataaagtaagattaatatctacgtaagaaatacacattaccactgcatagattatgtccagtataataggataggcctaygtcagtttgtaaaaactttattaatggaagttttgttgtcctgttctataatcgtatggcattcttatacttatgaatgtgagctatttatgtcacatctcgtgtcttctgtttgtcaaaatggttcaccattagaggctgggcctttaactactactaattattaatacaatggcttacacactctcataagtggccactaaagagagaattcacatgcttttaattatattgctgtgcatgttaacgcaagataatttttgccactc

SEQ ID NO: 894633 - DNA, 642 bp, Homo sapiens
tttcagttgttttcactttttgacattattaataatgctgtcattagcatttatgtacaagtttttgtgtggacatatatcttcatttctctttggaatgtaattacaattctctgtttaacatttggaggaactgtcaaacattttatacaaaacatctgcaccattttacattcccactcacagggcatgagggtgccaatttcttcacatcctggccaacatgktttactatctgactttttcatggtagccactccaatgaatgctaagtggtatcatgattttgatttaaatgtccttgatggctagtgagtttcagcatcttctcatgatcttattggtctttcttttgcttgggtacttcttattgtagtcttgtttatttctctaactctttcatatcttaccccttcaacctcatatttaatttgatagttccagtgagcccctttaaactctttcaacacagctttttttttcctcaagttcaagcccacacagttaccatttttttcctacttttcttacttttttattggtgagggctgactttgtaggggtacaactcatgcaactgcacagattctgcactctttaacgaccccaagtttgagctaatatgctgcagtcatcgtcatc

SEQ ID NO: 894634 - DNA, 642 bp, Homo sapiens
tttcagttgttttcactttttgacattattaataatgctgtcattagcatttatgtacaagtttttgtgtggacatatatcttcatttctctttggaatgtaattacaattctctgtttaacatttggaggaactgtcaaacattttatacaaaacatctgcaccattttacattcccactcacagggcatgagggtgccaatttcttcacatcctggccaacatggkttactatctgactttttcatggtagccactccaatgaatgctaagtggtatcatgattttgatttaaatgtccttgatggctagtgagtttcagcatcttctcatgatcttattggtctttcttttgcttgggtacttcttattgtagtcttgtttatttctctaactctttcatatcttaccccttcaacctcatatttaatttgatagttccagtgagcccctttaaactctttcaacacagctttttttttcctcaagttcaagcccacacagttaccatttttttcctacttttcttacttttttattggtgagggctgactttgtaggggtacaactcatgcaactgcacagattctgcactctttaacgaccccaagtttgagctaatatgctgcagtcatcgtcatc

SEQ ID NO: 894635 - DNA, 609 bp, Homo sapiens
agttttgcttttgttgcccaggctggagtgcaatggtgcaaacttggctcaccgcaacctccatctcccaggttcaagcggttctcctgcctcagcctcccaagtagctgggaatacaggcatgtgccaccatgcctggctaattttgcatttttagtagagacggggtttcaccatgttggtcaggctggtctcgaactcctgacctcagatcatctgcccaccgcagcctcccaaagtgctgggattacaggcgtgagccactgtgccgggcccatgctttgtttttatgctataaaaagtaattaattttgaataggttgaacttaaaacaaataaattaggttaagttctcaaacttttaacttgcagtaatgaaaactcttaaatatttataagtggatattttccatttcacctatatctattaaaaatattatcartgtaggatggatgaatttctaggacatatatttcatcatatttttatcagggtatatcagatatggttatttgccactgtgaccatcactatcaataacagttgtttgtctccaatttcacaggctactccaatcttcagtttttaacctggagtccaagagcacc

SEQ ID NO: 894636 - DNA, 621 bp, Homo sapiens
ctaaatgaagaaaaaaaaaacttaagcatgccaagatatgatttatatgagacctcctggcctcttccactgtcctacaaaagtgctaggctgctaggcaacatattatcttaatgaaactatatttaggacttttattctttgcatttcattaatattttaaaacatttgctrtatcataggattagtactaaatgtctgttgcaggtcctcagaaaagtggagtttatgagaaatgaacactatggatatttccaaagcacagtaaggcagagtggctcgtacaagatatgctagtattagaataataggactagctaatatgttaattaatagtgtgttatgtgtccctgagtcctcaatttccttagttataagataagagggtttaaagaagagactgttgggacctatttatactcaagcatttaaagatacttttattcaagcgtatccacattctccagagatgccctgggatttctgaattattgtccatgcatgacagcataggtatttgtgtgaaacaaatgaaaaccgaaattaagattataattcatatatgtttatgttgtaaaacctcactgaaaatagttttaaaaaccatactaggtccacctt

SEQ ID NO: 894637 - DNA, 574 bp, Homo sapiens
tattttagaatatatacattttcttcacctcataaatgataagcaaagctgctctaaaatagttgctctaaaatctactatctgataaatttaacatctaggtcattttagtatttgcatgtgtttgttgtattgttcctttacaattcacctcactgtactggttgtcaaaaaatactgaattktgtcctggatattgtaaatattatgttgtgcattctctgtatctttagataaatatgtggggattttatttttcaaggagttaatcacctctaagttttgtgttccatcctgtcagcagtgactcaaacctcaagtgatttctcaaagcttttgctgtgctggtttgtgcgtgcagagctagggcataggctaaaatttctgtgggtttttacacagaattttgacatacccttctctgactcctagctgagattaccctcacactctccaacattatgtatgcttttttccaagatacctctgtccttctggacaagttttagttaccacgatcactttgaacctcttcaactagggcccgtcccctgggaaaagccttgagagaaaa

SEQ ID NO: 894638 - DNA, 603 bp, Homo sapiens
acagagtattatgactggaaaagaggaagatatttcactctagtatgtgaatgctttgaagagtatgtaggacataatctacaatacaatcataatacagttttacaaggatgatgcctattcttattctcatcaatatgatttttaaaaacttatttttattataaattatttccctagtaatgccttttcaatttgatttagaaaatggattgtatatcgtgagttttatagtgagttacctggttctaatattcatgacctagtggaattcaggtcaagacttgtatatttcagttcccagagccygtgttatgcttattatcagcttcaacctgctcagacacaggcagaattcagtaatgcaggccagcactgagcaagaaataagacttttcttaggtcacagttaccaccaccaaataaactaggctcagagaaaatattcagagccaaaggaggaattacaaaagaaagtagaaagcttgcattaagcaagtaatcaagtcaagaaatctcatactgcaggagaatgcagtgatcagtactgactccaagttcacctctaaatctcagaataagaaaaaaaagaggcagggaggg

SEQ ID NO: 894639 - DNA, 603 bp, Homo sapiens
acagagtattatgactggaaaagaggaagatatttcactctagtatgtgaatgctttgaagagtatgtaggacataatctacaatacaatcataatacagttttacaaggatgatgcctattcttattctcatcaatatgatttttaaaaacttatttttattataaattatttccctagtaatgccttttcaatttgatttagaaaatggattgtatatcgtgagttttatagtgagttacctggttctaatattcatgacctagtggaattcaggtcaagacttgtatatttcagttcccagagcccgtgttatgcttattatcagcttcamcctgctcagacacaggcagaattcagtaatgcaggccagcactgagcaagaaataagacttttcttaggtcacagttaccaccaccaaataaactaggctcagagaaaatattcagagccaaaggaggaattacaaaagaaagtagaaagcttgcattaagcaagtaatcaagtcaagaaatctcatactgcaggagaatgcagtgatcagtactgactccaagttcacctctaaatctcagaataagaaaaaaaagaggcagggaggg

SEQ ID NO: 894640 - DNA, 564 bp, Homo sapiens
agtatttttgttatttatttatggtataattactaacaagactcttttagtttttatgtttcagaatattgatttaatagaggctgaatattctcaatgaaaaaaatgtgaaaaaagcatacacaatatgcctactgccaaacacgttagtattaacaatgatgggagcattgtaatatattttaacctcttaatgcctcagcagagacttgggaagaggtamcaacctaatttcttcataaatgtcctaattgaaagttgattatagaacctaactttggcgaggtccagatgcatattcctgatgtaaaattatacagtaaaagtattttaaaataaaaagtataatttaaaaagtgtctttaaaatcaattattatatttgaagacgttagtaagtatacttatttgggtattctttcttgagatgtcaaatgacattttccattattttaggcaaatatgttttaatgcagaagtttacttgttatgatcaagggcaaaagttctatgaatcaatttatttgtaatttcttaatcacaactgtgctagggagacaatttt

SEQ ID NO: 894641 - DNA, 593 bp, Homo sapiens
gtaccttgtttattgtcatatcatgctaggttttttcaaattaaattgagttgcactgaatttataaacatatcaggagagaatgtgtatttagtaattgtggtaataaatgctaatcttccttccattcctgacagtcatcattgtgatttwtttttattttttttgtaaaatctaagcatggatcatcaaagtattctcatggttttcatcttatgatttttaggtgtgaaatgggactagtaaacatttcagaaatgagatattatttcccctgttttgctgacaagcttctcattttatttgatattagtaacttcaggctaagtccctggcaatcatatgttaggtaatattattagaaaaatcacacctcaaaacaaattaatcaaataatttgacttacttatccataatgtttaacaaagaatggccacggtgaacttgatgaagagggaatccttttcttcaactttaattagcactatccagtaaggatgtttggagagctaaaagctgcacacagatttttgatagaggttagaggtaaacaatgttcactagttgcagagtcatagagtgacactatggac

SEQ ID NO: 894642 - DNA, 593 bp, Homo sapiens
gtaccttgtttattgtcatatcatgctaggttttttcaaattaaattgagttgcactgaatttataaacatatcaggagagaatgtgtatttagtaattgtggtaataaatgctaatcttccttccattcctgacagtcatcattgtgatttttttttattttttttgtaaaatstaagcatggatcatcaaagtattctcatggttttcatcttatgatttttaggtgtgaaatgggactagtaaacatttcagaaatgagatattatttcccctgttttgctgacaagcttctcattttatttgatattagtaacttcaggctaagtccctggcaatcatatgttaggtaatattattagaaaaatcacacctcaaaacaaattaatcaaataatttgacttacttatccataatgtttaacaaagaatggccacggtgaacttgatgaagagggaatccttttcttcaactttaattagcactatccagtaaggatgtttggagagctaaaagctgcacacagatttttgatagaggttagaggtaaacaatgttcactagttgcagagtcatagagtgacactatggac

SEQ ID NO: 894643 - DNA, 643 bp, Homo sapiens
tatatatataatatgtatatacatacatagaacataactttcaaaagacaaaacttataaacttattatttttcaattttaattttttttcagagaatagtacatttgtatatttgtggggtacatgacaacttttgatacaggcatacaatgtgtaataatcamattagggaaaatggtgtatccatcacctcaagcatttatctttcgtgttacaaataatccaattatacttttagttatttttaaatgtataattattattgactatagtcatcctgttgtgctattaaatacctgatcttattctatttttaacacaaacctatttgaagttcacttctatcctctgcaatgacaaaaagatacttattttttcataaaaataacttcaagcaacctacgattgtaataagtttataaagttaattttctatatatagaaaaaagtactagctattagtattttagcaattcttcaccataataaaatagggctcctatatggttaaaaaagagtaggatcttaatctgatgggatcaatggccttaaaagaaaaggaaaagagagttctctctgagtctctatcccacaagtgatcacacagtgagaaggaagctgtctgcaaagccaggaaaagag

SEQ ID NO: 894644 - DNA, 643 bp, Homo sapiens
tatatatataatatgtatatacatacatagaacataactttcaaaagacaaaacttataaacttattatttttcaattttaattttttttcagagaatagtacatttgtatatttgtggggtacatgacaacttttgatacaggcatacaatgtgtaataatcaaatyagggaaaatggtgtatccatcacctcaagcatttatctttcgtgttacaaataatccaattatacttttagttatttttaaatgtataattattattgactatagtcatcctgttgtgctattaaatacctgatcttattctatttttaacacaaacctatttgaagttcacttctatcctctgcaatgacaaaaagatacttattttttcataaaaataacttcaagcaacctacgattgtaataagtttataaagttaattttctatatatagaaaaaagtactagctattagtattttagcaattcttcaccataataaaatagggctcctatatggttaaaaaagagtaggatcttaatctgatgggatcaatggccttaaaagaaaaggaaaagagagttctctctgagtctctatcccacaagtgatcacacagtgagaaggaagctgtctgcaaagccaggaaaagag

SEQ ID NO: 894645 - DNA, 704 bp, Homo sapiens
acccagcctggttacatgtaatttaagtagccttgcccttttattgttctgtaatattcatattatatatttgaagtaggacaagcagatttcctataaggaagtacaagtaagggactgggaaagtgagcatgaagcagataattcaaacaatagcaatatttaaagcaaataactatttagatataggttaagatctgctaacagctgcaatagataataaatacttacaaatttttgccaattttcagtagtatatggaagtgagaacaaatttggaggtattgtttttcatgtttgatgatggtgttatggtataattacatatccgtgaaagttatttaataaatatactttgaaacaaaaagtaatatttattataaaagactaaaatttttctataactagctatgggttaaaatagcaccaatattctcttatcattgtgttattctctaaaggaagctcttattaaacataatgcaggatataattctactgatgtccccttaatagtaarcaagactctggactaaaagaagtgcttgataaataatttcataggggcccttggatttttaaatcatgaagcagatactcaaatgtgtgtaaattgtagatgacaaaattacgtaatgccagtgaattgcagggaaggatagagctaattacatcatatgcatcttgtggatcacaggatacat

SEQ ID NO: 894646 - DNA, 612 bp, Homo sapiens
gtaaaatgagtctaagaatagcatgtaccttataggctcttttgaggaataaatgagttgcagaattcctaccatatgtaaagtagcatatgtaaagcatatgtaaagttccacaaaattattgttgctaatattgttataaattacagttagttggatatcttgttactgacaatgttagatcaaaggccgtgtatatttacatacagtatttattagatactgtcaaactaccatctaaaagctttttacaaataattctctctctagatatagtataaaaagctaattataaattgaggccatgtgagggaaactgtcaggaggtccctttagcaatgaatgatagtttatagagagtcaaccactttgaaagttatttgggagaaatatacagaacaggtggactgcatgacctgtttgccctgtgaaaataggtatttgaaatgacctgattctcaacytgagaattttcaaagtgacaaattacactcatttggcttgtaatgatgttctgattataggctataagaccaatgatggatttccctgacttcttttcttaatgttctcaaatcctgttgtgacctttccatattcaagcatgtagca

SEQ ID NO: 894647 - DNA, 599 bp, Homo sapiens
gtggctttatttctgggctctctattctgctttattggtctaggtgtctgtttttgtaccatgaccatgctgttttggctactgtagccctgtattatactttgaagtcaggtagagcgttggctccagcttaggaggtatcctaagctggatgttctttttgctttggattgccttgactattcaggttcttttttggatccacataaattttaaaatagttttttctagttctgtgaagcatgtcattggtaatttaataggaatagcatttaattaaaaaatttctttgggcagtatggccattttaacaatwttgatccttctaatccatgagctgagcataggatgtttatttgtttgtgtcacctctgatttctttgagcattgtttgttagttctccttgcatagatatttcacctcccttattaactgtattcccaggtattttattgtttttgtggcaattgtgaatggggttgcgttccagatttggctcttggcttgacccttgttggagtataggaatgctagtgatttttgtacactgatttttgcatcctgaggctttgatgacattgtttatcagcttaaggaa

SEQ ID NO: 894648 - DNA, 656 bp, Homo sapiens
tacagaaattatctttaacaggtgggaattgctcagtgatcaagcacagctcatcaaaatgttaataacatgacaagaggtaaatgtattcatgagaatattaaaaatgtgaaacaatagcatttttacatgcagctcaatgtttacatccaaataagcctaatcatatgttaaatattgtaaaatatatttaagtaatagatatatgaacattaaaaagtgagataatgtcagaaattggcaaataacctgatcatatagagataataaaccagggtaagtctgagagatatttagaaagcagtccatagtccaatctgatttctactttttggaggctcagtttgtcaactttctgggtattgacagaaaagggggagagtagaattcaggagggcagacagaagaccactggactagacaacaggcaatcttgcttaaatttaggattgcaggtggagaaaaatggttggatygaaaatatgactttgaatatagaactttctgataggttaaatactgggatttataccacagtattagaaaaagaaaggtgtcatgatagaatcataggtttttggttttagccacagggtcaactgatggtatcagttgctgaaacagaaaataccaaagaacaagacagattggggaga

SEQ ID NO: 894649 - DNA, 592 bp, Homo sapiens
aggcttttggtggtgtctttagggttttctgcataaagaatcatatgattaatgaagagagataatttgacttcctcttttcctatctggattccttttgtttctttctcttgcccagttgctctggtgaggcttccagtactgtgatgaataagagtggtgagagtaaatatccttgtctttttccagttcttaggggaaatgattccagcttttccccattcagtatgatattggctgtgggtttgttacagayggttgttattattttgaagtatgttctttgaggcctaattttttgagggtctttattatgaatggattttgaattttatagaatgtttcttctgtgtgtactgagatgatcatgtggtttttgttttcaatattatttatttggtgaatcacatttatcgacttgtatatgttgaaccaaccttctatcccaggaatgaagcttactttatctagataaattaattatttggattgctggtggattctgtttcctagtattctgttagggatttttgcaactatgtttatgataaatattggcatgtaattttcatattttgttgtgtctttgcta

SEQ ID NO: 894650 - DNA, 655 bp, Homo sapiens
gatatcatgcagtatttgtccttctgttgctggcttatttctcttaccataatgtccctgatgtacattcatgttgtcacagatcacagaatttctttcttttaaggctgaatagtattctatttgatgtatacaccataatttctttatgcaattatcagtccataggcattttaatcttttccacagcttgactattgtaattaatgctgaaatgaatatggaaatgaaaatatatcttcaagatcctggtatcaatctctttgaatgtatacccagatgtaggattgctgggttataaggttattctattattaatgttttaagagaatttcatactactttttgtagtatccataccgttttacatttcaamgacaaaaaaaaaacatttaattgctccacaaacccaccaatatttatttatttagataattattttaacaatatgagatgacgtctcattgtgaattggatttttatttccctagttatcagtgatgttgatcaatattcatataactggtggccatatgtctgtcttatttggagaaatggtgatttaagtctttggcccattatttaattgggttacttaagtggatttggtggttattctttgcttttattatgttttgctgttgaattatagggg

SEQ ID NO: 894651 - DNA, 592 bp, Homo sapiens
tactcattttatggtattttattccagcaggctgaactgactaaagcattgaattctataagtctataggtatacataaattagtgtattaaggatgtacaacatattttatgtgtcacattgatagtaaaattgaaggctttttctgaataaagtttgctttaaatttgcactgagttccagtaagctcatacactacctattatattagaaatttgaatttgtagctgaatatttcctaagttctttgattgagactgacacttgtgcttttacaaaagatgcaaaagaataaaggatttatcatatacaaacatcactgccttgttattggccatctttatacgggactgmaataacaaagctggatggaaaaaaatatgagtcatgatatcatatatggtttcttacacatatttcaattcaagaggcacaactaaatttcaacaaaaactccctgggtcttctggggtaattcccattaatcaagtagattttaagaagcaagaaccatttgactatagttttgattagaaaagtcagcgtcctaaggttgtagtcactaggaatgggaacataagcctggacaaag

SEQ ID NO: 894652 - DNA, 597 bp, Homo sapiens
gttatccacagtagaatttctttcaaaataagagccatctatgacaaacccacagcaaacatcatgctgaaggggcaaaagttgggagcattcccctagaaaaccagcacaagacaagcatgtcctctttcactgctcctattcaatgtagtattgaaagtcctggtcagaacaatcagacaagagaaagaaataaagggcatccaaatagaaagagaggaagtcaagctattcctgtttgcagatgacatgattatatatctagaaaackccataatcttagcccaagttgatacacaacttcagccaagtctcaggatacaaaatcagtgtgctaaaatcacgagcattcctatacacaaacaagagtcaagctgagagccaaatcagaaatgcaatcccattcacaattgccacaaaaagaataaaatacctaggaatacagcaaaccagggaggtgaaatatctctacaaggagaactacaaaacactgctcaaataaattaaagattacacaaacaaatgaaaacacagtccatgctcatggatcagaagaatcaatatcattaaaatggccatacttcccaaagcaatttg

SEQ ID NO: 894653 - DNA, 597 bp, Homo sapiens
gttatccacagtagaatttctttcaaaataagagccatctatgacaaacccacagcaaacatcatgctgaaggggcaaaagttgggagcattcccctagaaaaccagcacaagacaagcatgtcctctttcactgctcctattcaatgtagtattgaaagtcctggtcagaacaatcagacaagagaaagaaataaagggcatccaaatagaaagagaggaagtcaagctattcctgtttgcagatgacatgattatatatctagaaaactccataatcttagcccaagttgatacacaacttcagccaagtctcaggatacaaaatcagtgtgctaaaatcacgagcattcctatacacaaacaagagtcaagctgagagccaaatcagaaatgcaatcycattcacaattgccacaaaaagaataaaatacctaggaatacagcaaaccagggaggtgaaatatctctacaaggagaactacaaaacactgctcaaataaattaaagattacacaaacaaatgaaaacacagtccatgctcatggatcagaagaatcaatatcattaaaatggccatacttcccaaagcaatttg

SEQ ID NO: 894654 - DNA, 662 bp, Homo sapiens
ccataaaaatgaaaaagatcatgtcctttccagaaacatggatgaagttggaggccattatccttagcaaactaatgcaggaacaaaaaaccaaatgctgcgtgttctcactgataagtgggagctaaatgatgagaacagcagacacatagaggggacaacagacactggggtctactggaaggtggagggtgagaggagggagaggatcaggaaaaataactaacaggcactaggcttaatacttgggtgacgaaataatctgtacgacaaacccgcatgacaagggtttacttatataataagscagcacatgtagccctgagcttaaaagttaaaaatattagagacaatcaatttacactgtatcaaattaaactaaattaaaattaaactttatcaacagagtttatgtcatattgtaagtactgcgttgtcaattcaacaatgttgtcacagcatcttcactgagagaaggttccatctcagtagaccactttctttgttcatccacaagaagcaactactcattgttcgggctttattatgagatggcagcaattcagtcactttttcaggcttcatttctgattctagttctcttgttctttccaccacatctgtagttcatttttccactgaagtattaaactcctgaaggc

SEQ ID NO: 894655 - DNA, 662 bp, Homo sapiens
ccataaaaatgaaaaagatcatgtcctttccagaaacatggatgaagttggaggccattatccttagcaaactaatgcaggaacaaaaaaccaaatgctgcgtgttctcactgataagtgggagctaaatgatgagaacagcagacacatagaggggacaacagacactggggtctactggaaggtggagggtgagaggagggagaggatcaggaaaaataactaacaggcactaggcttaatacttgggtgacgaaataatctgtacgacaaacccgcatgacaagggtttacttatataataagccagcacatgtagccctgagcttaaaagttaaaaatattagagacaatcaatttacactgtatcaaattaaactaaattaaaattaaactttatcaacagagtttatgtcatattgtaagtactgcgttgtcaattcaacaatrttgtcacagcatcttcactgagagaaggttccatctcagtagaccactttctttgttcatccacaagaagcaactactcattgttcgggctttattatgagatggcagcaattcagtcactttttcaggcttcatttctgattctagttctcttgttctttccaccacatctgtagttcatttttccactgaagtattaaactcctgaaggc

SEQ ID NO: 894656 - DNA, 695 bp, Homo sapiens
atctacttcttcctgatatctcatcagtggttgatcttaaaatctcattcacatagactctgctttatagtcctgccatgctaccctagtggatattctgaagcaagattcctatcaaaatgaccttggtcgtaaatagctggattgagttccagaactcacccctaggttttatgtttctgttastatttacagttgttagaaggaaatacagttatttatcaagtcagcaacaacatttctcatccccaaccctattctttttcttctctcttctctatccaccatcctgccaaagacattttgcataacaaaatcagtcatggttaagcacatgactgcatgaaacctttttccaactccccaagggacctcctggaaagccccctcatcaggcttgagattagaatttaccttcatccttcatttattgattaacagttgatttgggatttgcaggaaaatcagagtatgaaaataatttttcccagagatatatcttcagggcccaaagtttaaatccccttcttgatctttttgtgtcctgatgcaagtgaggattttcaaaagttttagaaaaaacaaaaatacttaactgtttccttggaaatttacattttggcctgttacccaactcacttttgaatctgttatttatttcacctcagacatcaataagacattttccaaattaa

SEQ ID NO: 894657 - DNA, 695 bp, Homo sapiens
atctacttcttcctgatatctcatcagtggttgatcttaaaatctcattcacatagactctgctttatagtcctgccatgctaccctagtggatattctgaagcaagattcctatcaaaatgaccttggtcgtaaatagctggattgagttccagaactcacccctaggttttatgtttctgttagtatttacagttgttagaaggaaatacagttatttatcaagtcagcaacaacatttctcatccccaaccctattctttttcttctctcttctctatccaccatcctgccaaagacattttgcataacaaaatcagtcatggttaagcacatgactgcatgaaacctttttccaactccccaagggacctcctggaaagccccctcatcaggcttgagattagaatttaccttcatccttcatttattgattaacagttgatttgggatttgcaggaaaatcagagtatgaaaataatttttcccagagatatatcttyagggcccaaagtttaaatccccttcttgatctttttgtgtcctgatgcaagtgaggattttcaaaagttttagaaaaaacaaaaatacttaactgtttccttggaaatttacattttggcctgttacccaactcacttttgaatctgttatttatttcacctcagacatcaataagacattttccaaattaa

SEQ ID NO: 894658 - DNA, 600 bp, Homo sapiens
gaaaagtgaagcatatgcctatctcaatatttgccataaagtaataaactttaacatgcaggaatgccaatgatatgattacagttttgccattagaagtagtcttaggaacatgaaaaagatttctacaaacacaagtaattcatagcatcgcagyggagatgactggttaatgactagaataaccctcttaatgccgtgagtgtcattaactccccacacttgaaaaaccccaagaaggaccataattttgaattttcttacagtggttgaattatgagaaataaaattatgagaaagaaaagatgactaacctttaggttcctggggaaacaaattaatccattaattgaatcaattattaatgacacactcagcaaacatagccattacagtcaaaggtaatcatgggtccttacctggggtctagtagagcttacagtttttttttttcttaacaaaaatatctgtacatgtttcatgtacacaatttagtgcatatgcctgtagccataaaatcaccacaataaggataataaatatactcatcattcctaaaagtttccatgtatttctttggggaggcggtgtgtgtgctga

SEQ ID NO: 894659 - DNA, 604 bp, Homo sapiens
tcttaacaaaaatatctgtacatgtttcatgtacacaatttagtgcatatgcctgtagccataaaatcaccacaataaggataataaatatactcatcattcctaaaagtttccatgtatttctttggggaggcggtgtgtgtgctgatgtgtttcaaatgtgtatgtgtttgtgtgtggttagaacacttaacatgagctctaccttcttygtaaattttaagtatacaatagtgaattgttaactataggcacaatgttgtttagcagatttctagaacttactcatcttgcataactaaaactttatatccattgtgtaacaattcctatctttccttcctcctagcccttgacatccactattctattctctgcctctagaagtctgactatttttagaactcatataaatgaaatcatgcagtatttgtacttctgtgactggcttatttcacttagtagatgtcctccaggtctatgttttcccaagttgtaggattttcttctttattttaaaaaactggataatatttcatggtacatgtacattatgttttctctgtccactcatctgtctattgaaatttgggtcatatctgta

SEQ ID NO: 894660 - DNA, 588 bp, Homo sapiens
atactactgcagtcaaaggtagatattgaaatataggaagtgattctatagtaaattattaaacgaatgggaaaattctttctgcatggaagttttttcacattatagttaaaaataaagtgatttatagtaataattaaattaatatatagtaataaataatagaatatatacatactaatgattagttagttttagtacctataggtagtctaacagagtataaagttacttattatattacctttgaactggaagctcatggggctctttgttttgtttttcttttcttttcttttttttttttttttgaggcggagttactgctgttgcccaggctggagtgcaacggcacaatcttggctcactgagacctgcacctcctgggttcaagcaattctcctgcctcagcctcctgagtagctgggattacagakgcgtgctaccacagccagaaaaattttgtgtttttaatagaggcagggtttcgccatgttggccaagctgttctcaaactcttgacctcacatcatccacccaccttggctaggtaatcccaaagtgctagtattacaggcgtgagccacc

SEQ ID NO: 894661 - DNA, 637 bp, Homo sapiens
gagtatatacccagaagaggaattgatggattatacataattctgtgtttacattcttgaggaatcatcataaaataataacttattattaacaagaattagaccacctgagaaacatacactataatattaaaagaggttaaaagaaagataacattttaaaaaactcttcacttaatgttcttttggcaaaagagaattgtaactaaatattatagaagaaatttaaaaggaagaataaagcactttaataaaggaagattataaagtagacatrcaagaacacagagtagataaggcacaagaaagatgaaaataaaatatgagtttataaattgaaagatagcatcttatatcaaaaataattgatccataattgtaaaaacagaaacaaatcttattactttttatggaactttgaaaataatgaaaaaatatttgcacctcttcttaggtaaaacaaatctaagtaatttataagtagcatgataacaatatatcaaaatttcatggaaaagttttagtacataaatgtctaaaattaatataaattatgttttttaaattccgtatgtcctcatcttgataacaaacccattgttcatccaagcaattgaaaaaaaaatcagattggcct

SEQ ID NO: 894662 - DNA, 617 bp, Homo sapiens
ggtttggaatatacttttggaagcccatggactcaaaaccacattaattataatattatgacattatttgctctttctagtcttttcctcatgagcatacagtgaatattttcaaaggctttatagacatgtggtatcacaatagattacataaaaaagcagatatgataatccccatcttttcttgaatttggacattacattaatttgtaaaaatgtaaaacaatataatcatttacattttattttgttttgaaaatatagctatttttataaaattgtgcaatttttgttaacatgcaatgaatttatttctgctattttaaataataaayagttcttgaatttcacagttttaatttataatatagtatatattgatatttataactcaaatttcaaaaaaaatttggagaagccgaaaattttttatatataaaatctgtatatctataaatcctgagaaaataaaattgctgaactggagaataacatatgcaattataaattaatttattcaaaaaatttttacctgcaatgattattctaatatgtcacagacaaacaaatatgcacaaactgagagacattttacttattggagtttctcacgtagt

SEQ ID NO: 894663 - DNA, 672 bp, Homo sapiens
caccttgtgctccgaattaaacagataaattaaatagatgaaattactttttatggagatactttatttttacatggacaaatatgcatgagaaaactagctatgctttatgctgttaataaaggaaagggtgaaaatagagtagatattactacataagtaactactgccttttatagctgaaaaaattcatgtagcctattagagagaaaaaaaagagagagaaaagaacaagacagagagagagaacaagcaaaagggcaagcacaagaacaagagcatatccaatatcaaattcaacataaataaaactgatagactcaataccaatataagaataatttacatactatacattatatcaaaatatcagttatttaatagaaattaactygattgttcaagtttgaattaccatttttacattttaattttaataaagtccagtttatcaagttttttttcatgtattccatctttagtattgtttctacaaagtcatcattatacccaagatcatttaggttttttcctgggttatcttctagaagttttgtagttttgcattttcgttaggtctgtaatccagttttatgtaacttttctgaggggtgtaagatctatctacgtttatatttttgtatgtagatgtccagttgttccagcaccact

SEQ ID NO: 894664 - DNA, 551 bp, Homo sapiens
acctataaataatgtgctgataccagaaacccaaaatgatggtaactgagagtggttctaaggccctaagttttggtacactctcatctaagtgagaacctgaccaaaaagggggaatttttttttttttttattttctgaggtggagtcttgctctggtgcccaggctgaagtgcagtggcatgatcttggatcactgcaacctctgtctcccgggttcaggtttaagcaattctcctacctcagcctcctgagtagctgggactataggtgcgtgccaccatacccatctaattttttgtatttttagtagagacgggktttcaccatgttagccaggatggtctcaatctcctgaccttgtgatctgcctgctttggcttcccaaagtgctgggattacaggtgtgagccaccgtgcccagccaggcagaatattttaaacaaaattctgggaggccgttgttttggactaagttcatgtactaggtctcaacaaaccaagccaaaccaaaccaaaccaaaatggagttgcttgtgctaggactttaa

SEQ ID NO: 894665 - DNA, 611 bp, Homo sapiens
taaagtcatttaaaatttaagttcaatacaggactagaaagaaaaccaatgtgcttggatggcttaacgagctgtgatttagtgaatcataaacaggaaactcggagatgatttcagagatgaagtcttgggtcaagatttggtaggccttgtgwagggaaaatatcttgggcccccaaaatcactaaggaaaactcaaggtggaaactgcttaagaaaaatcctgtctcctattctattcaaagctctccctctgctcactgagatagatgcatatatgattgcctcctttggaaaggctaatcagaaactcaaaacaatgcaaccctttgtgtcttacctatctgtgacctggaagctccttcccgctttgagtcttcctgcctttgcttcaagttgtcccacctttccagaccaaaccaatgtactttttacatatattgattgatgtctcatgtctccctaaaatgtataaaatcaagctgtgccatgaccatcttgggcacatgtcaggatttcctgaggctgtgtcacggacccttccctcaccttgtcaaaataaactttctaaattaactgagatctgtctcagattttctggtttcacaggc

SEQ ID NO: 894666 - DNA, 611 bp, Homo sapiens
taaagtcatttaaaatttaagttcaatacaggactagaaagaaaaccaatgtgcttggatggcttaacgagctgtgatttagtgaatcataaacaggaaactcggagatgatttcagagatgaagtcttgggtcaagatttggtaggccttgtgaagggaaaatatcttgggcccccaaaatcactaaggaaaactcaaggtggaaactgcttaagaaaaatcctgtctcctattctattcaaagctctccctctgctcactgagatagatgcatatatgattgcctcctttggaaaggctaatcagaaactcaaaacaatgcaaccctttgtgtcttacctrtctgtgacctggaagctccttcccgctttgagtcttcctgcctttgcttcaagttgtcccacctttccagaccaaaccaatgtactttttacatatattgattgatgtctcatgtctccctaaaatgtataaaatcaagctgtgccatgaccatcttgggcacatgtcaggatttcctgaggctgtgtcacggacccttccctcaccttgtcaaaataaactttctaaattaactgagatctgtctcagattttctggtttcacaggc

SEQ ID NO: 894667 - DNA, 628 bp, Homo sapiens
gcaataaataataatgaagtgctacaaactgtttacaaagataaatctcaccagtataatttaatcaaagaattcaggcatgaagaagcacaagttttatgctttctttgaggtaacatttaccagcatgcaaaagcaaactgtaaascagttttcatgaacacctgttcagtattgccttaatattttttggtgggagtgagaaatactgaattcactttctctttattgacctatagtttcacatatgtttatgaatactaaaagcaaaatgataattgaaaataatcatgtactgtttaactgaggacaaacacagttttgaattctttttaacttcgtgatttataggtttattaatccattaattgttctctaattaattaaatatttatcaaacacctaatagtatgtttaaggtaaatttgttccaaaaagcccttaacaggcaaccagtctaataggctagagagaaaagccaatgtttacaaaataatgcatactttaattaaataattcattctttcataccaaaaatattttttgaattactacaaaatgcatcacatgtatgtagttggaaagcaatggattttataaagtgggggcaaacagagaaaatactaaa

SEQ ID NO: 894668 - DNA, 641 bp, Homo sapiens
ttcccatctttctgttcatgtattcattgtttagctcctgcctataagggagaacatgtggtatttgcttgtctgttcttgcattaatttacttaagcaaataccacatgttcttgcttataagcaggagctaaacactgagtggaagatggcctccagctgcatccatgttgctgcaaaggacatgatttcattcttttttatggctgtgtagtattccatggtgtatatgtacagcatttttattatcattttattttattttattttttgagatagagttatgctcttgttgcccaggatggagtacarcggcgctatcttggctcactgcaacctccgcctcccaggttcaagtgattctccttcctcagcctctcaagtagctgggaatacaggcatgcaccaacacacccccggctaatttttttgtatttttagtagagatagtgtttcaccatgttggttaggctggtctcaaactcttgacctcagatgatccaccggtctcagcctcccaaagtgctgggattacaagcatgagccactgtacccggcctcacatttcattatctaatccaccactgatgggcacctaagttaattccatatccttgctattgtgaatagccctgtgatga

SEQ ID NO: 894669 - DNA, 619 bp, Homo sapiens
tactttcccatcaaaagtgtataagcattccttctctccacatttttgccaacatctgctatttttttctctttaataatagtcattctcactgggataaaatggtatctcattgtagttttaatttgcatctctttgatgattagtgatgttgaacgttttttcatatatcaattggctatttatatgtcttctttttaaaaagtacctattaagtttctttgaccactttttaacgcagtggtccccaaattttttggtactagggaccattttcatggaagacaatttttccatggacagggaattttggggggatggtgttaggattaaacgtttccacctcagatcatcaggcattaattaaattctcataaacaatgcgcaacctagatctttcaygtgtgcaattcataattaggttcgtgctccaatgagaatctaatgttgccactgatctgacaggaggcagagctcaggtggtgatgctcactctccaccgcccacctcctgctgtgccacccagttcctaagactggtaccggttcacagcccagtgaaccaccaggccaaagattggtactgcttcatagcccagggtttggggacccctgtatta

SEQ ID NO: 894670 - DNA, 606 bp, Homo sapiens
aactgaggtacatggttcatctcatcgggactggttagacggtgggtacagcccacagcgggcaagcagaagcagggtggggtgtcacctcacctgagaagtgcaaggggtcagggaactccctcccctagccaagrgaagccatgagggactgtgctgtgtgggacgtttctatccggtccagaaaactacgcttttaccatggtctttgcaacccacggaacaggagattcccttgggtgcctagatcaccagggccctgagtttaaagcaaaaactgggtggccttttgggcagacactgaactagctgtaggaggtttttcttgttgttgttttttgttttttgtttttttaccccagtggcaactggaacactgctgagacagaaccattcactcccctggaaaggaggctgaagccagggagccaagtggtctagctcagaggatcccaccaccgtggagcccagcaagctaagatccactggcttgaaattcttgctgccagcacagcagactgaagttgaactgggatgctctagcttggtggggggaggggcatcggccattactgaggcttgagtaggtggttttcccctgacagt

SEQ ID NO: 894671 - DNA, 657 bp, Homo sapiens
ttctgctcttcaaatactggagcacagaataaagatgtctctgcatgaatcaagaattattttgttgtttttgttgcttgttgtttgtcttttaatctaactttttcaagcaatcattgtatttagccgaccactaaatctaaagcctacatttgtgacttgtgtttagaaagatgatttgaataatgattttctagaaaataacaaggtgagaaaaatgttaaggctatagaaactattggaaacatcttttctttctttctattctaagactaaatatttaccatcaagaaaaaataagatggaagaagaaatctttggtatggtrtaaaccaaagtatgaatccatatgaggaaatcaagaccaatgtaaatgacttcctctttccagtgttcatgaataaaatttcatctaccttctatacatgatggttctatctggctagtgtccaaggacaaagaccatcatttttactactgatgtttgtatagtggcaggaagataaatgagtaaagttatctgtttcttgtgaaatgatgaagtattgtgaacaatatgcatgcccaaattaacaaaaacatgttacataaaaataaatgaaatgaatggaaatccagacaagagcatggactcaagaaaagggtagggttatattt

SEQ ID NO: 894672 - DNA, 592 bp, Homo sapiens
actatagctctacatcttttgcaaaggaggaaaggaagaatataagaaaaagagagcctgaatcagaaagggaaatgctttctccggaaatcatttatactgttccttgaccagaaccgtgcacatagccagcccaccattatctgtgatggattcaaccagataagtagttttaaattagtccattgttcttgcaaaacaaaattagaaaaggggggaaaaagagaatgaatatatggcaggcatttagtaaggtcttaccacagtggtagtacttagtgctattagtgcttaggggacatagtgaggcctaaatgaatactagttgttacaatcttgaaagagctctagtgcctgagtcagttttatagaggggacttacttgatatygaaaatcagtgctccaagattttcacagaagacaatggaaaatttgcatctgttctccttgtgattgtttacaaggattttcactgggaatgagtaaaatgtaatcttcacatacaggttgaataaatagaactatgatacaatttaaagggcttcataaggcccctggttagaaaaatctgtcacttggctaactgtaatt

SEQ ID NO: 894673 - DNA, 516 bp, Homo sapiens
aagtcagtatattgtcagcctcatcagtgtgggtatgaccagctgagaatgtggatccatggaggtattaacaaactatggtacattactgcaaccctatatcaaactgactcccatttgataatcctttttatctcactgaacaaaataaaaacttgtagtaaagatgagaatttgcataaataaccattatcttgtctgttcaacctcagatattatatcatttgaaaaataattaatgataggaaagttgaaaacaaaatggcagtagtcaaattagtttctgtggctccagcatacaacccattctattttcttcagtccacgaatggcaccacmaacagttactttgcctcaagtatgggacaatgcagctaataccaaagtcctattcaaaagccacacttacaaagttaaagtaaattgagccttctatattcagttcttgtttccttacgctcttgctcctgtatcttaatgagtgttctattaattttgcagtgactttcttcctta

SEQ ID NO: 894674 - DNA, 609 bp, Homo sapiens
tggaactttatagttaaaatgagaaagaccttacaggttatatagaccaactttctcacttcacatctggcaaaatgaagaaccagagaactgaagagatctacttgagtaaaccggttggtagttgcaaaagtaaatataaatatactatatatatatatatatatatataaaawatatatagcatttatatataatatatatagtatttatacatattatatatagtatttatatatatatgtatacttgtatatataaatataagtatatatacgtatataagtgtatataaatataagtatatactatatataagtatatagtatatatagtgtaaatatatagcatatataaactatatatatataaagagagaaacgtttaaatttttctcattaaaaatgtataaggcaccccagtagttactcacatgaaagttattacaattaaacctcaaagcatccctataagaaagactttaatatcattgcatccacttaattatctgggaaatatttctcaaagttatttaggtaacttgccttgggtcccacattacgaaatgccagagtgacgttaattcacatttcataagctaaatcttaa

SEQ ID NO: 894675 - DNA, 603 bp, Homo sapiens
ctgccttattcctgtccaattctgtatctttatagtctattagtgttcacattttataattattcagacccataggaacgtgctactttcttaacctttctaccatatcttagaaaccctaaataattcatggtctgtttttaccttaaagtgattttcacagtcatagacaagtcartttaaagtaatgtgacacagagtaacaaaatgaacaaaaaagcattttgctaagctctttatacacactgccatgttgttctttatgacaaatttatgaggtaggttccttagccccatttcacaggctgagaacctgagactgtcaacactaagctgattttactgtgattacatcttagtgagtgacagatctagcaatcatggaattgagaaggccccacctatgttatgttataacataacataacataacataacataacatagcatagcatagcatagcatagcatagcatagcatagcatagcatagcatagcatggcaacataacataacacagggggccttctcaattatgttataacataacataggggaggccttataattttcttcattcttatcttgatgtgaaataaggac

SEQ ID NO: 894676 - DNA, 603 bp, Homo sapiens
ctgccttattcctgtccaattctgtatctttatagtctattagtgttcacattttataattattcagacccataggaacgtgctactttcttaacctttctaccatatcttagaaaccctaaataattcatggtctgtttttaccttaaagtgattttcacagtcatagacaagtcagtttaaagtaatgtgacacagagtaacaaaatgaacaaaaaagcattttgctaagctctttatacacactgccatgttgttctttatgacaaatttatgaggtaggttccttagccccatttcacaggctgagaacctgagactgtcaacactaagctgattttactgtgattacatcttagtgagtgacagatctagcaatcatggaattgagaaggccccacctatgttrtgttataacataacataacataacataacataacatagcatagcatagcatagcatagcatagcatagcatagcatagcatagcatagcatggcaacataacataacacagggggccttctcaattatgttataacataacataggggaggccttataattttcttcattcttatcttgatgtgaaataaggac

SEQ ID NO: 894677 - DNA, 660 bp, Homo sapiens
taaaatactgttataaaatttataactgttagccactctctgagagctattgaagcaccaaacatattggacatctagaaaatctgattttcccattttttaataaattaacagatactatcatatgaccaaaatgagaaattattagctaaatacacaataatgtgtctcaactcataataagaacaattatcagacttgtaacttagttcatttatgagagattcctcaaaatcaacagataatatgtattttggggtaaataaggatttcggaatgcttttaaaagaaggaatctctttacttcaacaagaagcacaaccaagaatatttagcagactaaaaaactgtaaagctattaacacttccaaagaaagtggctaatatgaagaaaatcattgggcagttgcagggagttaacatggagaataagaaaataccttagttgattattatgtcaaataggcatctctcactgaagtcctagcttctacactaccttaaaastacacattttcaaaatttcaaagaagctgtggaaagtcagcaacagttccagaatataaaaattaatggaaaaatatctaaatacgagttacaaaacaaacctctaacaatttcaggatggccatgtgatcatgccagatgatctcaaagaga

SEQ ID NO: 894678 - DNA, 697 bp, Homo sapiens
tttgcttaggattatcttggctatattaactcttttttgttccataatgattttaaaatcgtttcttctatttctgtgtagaatgtcaatgcaatttaaggagactataattgaatctgtaaattactttgggcagtatagccattttcacaatattgattattcrtatctgtgaacatggaatgtttttccatttgtttgtgtcctctctgatttccttgagcagtggtttgtaggtctacttaaagagatcttttacttcccttgttagttgtattcctaggtattttattctctttgtagacgttgtgaatggcagtctacatgaatgttaattcatgatttggatctctgcttctctgttgttgctgtataggattgcttgtgacttttgcacattgattttgtatcctgagactttgctgaagttgcttatcaacttcagaagcctttgtgctgggatgatggggttttctagatacaagatcgtatcatctgcaaacaaagacaatttgacttcctctcttcctatttgaatactctttctttctttctcttgccttattgccctggctagaacttccaatatgatgttgaataggagtggtgagagagggcattcttgtcttgtgtgagttttcaaggggaatacttccagtttttgcccattcagtatgatattggctgtgggtttgtc

SEQ ID NO: 894679 - DNA, 635 bp, Homo sapiens
taacagaagcatgggaaaaagggatatgatagttcaaaactttatctgaatggaaattgtcattatttctcaatttaaattatgtttatgttacagtgtagagtttttattacatgcagtatttcagttacaggagatgattgtagtttggaaatgagggagatcaggatgtataaatttgataagaaatttacttggataagtacagatgtatttaataacattrtctaagacattgtgaatgtttctgtaatggggaaaaatcacaggagcatgtaaaatataaaaatatatgaaatcacttaattaaaaataattatgcatttttaataactaaataaaaccttgtgattttgtaagatgtcaacttgtatgtagattatgagaaattttttataataaattccttccactttataattacctacacagagtaaatcttgtccaataatctcttttatcacttaataattattctgatgatattagtagggtttatccaccatttcataatttctgtggggaaaaacaagctaaggtaagtgttcatgtgcttaatttttgtctcttcaaaatttggcctgactgctcttaatttttgtctgacttctaagtgatttctttttgctacacca

SEQ ID NO: 894680 - DNA, 635 bp, Homo sapiens
taacagaagcatgggaaaaagggatatgatagttcaaaactttatctgaatggaaattgtcattatttctcaatttaaattatgtttatgttacagtgtagagtttttattacatgcagtatttcagttacaggagatgattgtagtttggaaatgagggagatcaggatgtataaatttgataagaaatttacttggataagtacagatgtatttaataacattayctaagacattgtgaatgtttctgtaatggggaaaaatcacaggagcatgtaaaatataaaaatatatgaaatcacttaattaaaaataattatgcatttttaataactaaataaaaccttgtgattttgtaagatgtcaacttgtatgtagattatgagaaattttttataataaattccttccactttataattacctacacagagtaaatcttgtccaataatctcttttatcacttaataattattctgatgatattagtagggtttatccaccatttcataatttctgtggggaaaaacaagctaaggtaagtgttcatgtgcttaatttttgtctcttcaaaatttggcctgactgctcttaatttttgtctgacttctaagtgatttctttttgctacacca

SEQ ID NO: 894681 - DNA, 639 bp, Homo sapiens
atataacaccatgaaagaccatttcatggtcaaagtggaaaaaaatcctggcgacaggacagtatctgatgttaaaatatgctctaaaaccataataattaaactggcatgatactggcataaagataaacataggaccaacggaacagaatagaaagcccagaaataaatccatgcattcacagtcaactgatcttcaataaagatgtcaagaacacacaatgaagaaagaaatgtcttcaataaatagtattgggaaaatacactatccacatggacaggaatgaaatgaaattcttatctgacattatgaacaaaaatyaattcaaaatagattaatccttaaaagttttgaagttgtaaaactactagaagaaaacaggggaaatcttcttaacattgatctgggcaataatttttaaaacatggccccaaaagcacatgtgacaaatgtaaaaaatagagaaatgaaatcacacaaaattaaatagctctgtacagcaaaggaaacaataaacagaataaaaagacaacctacaaaatagaagaaaatatttggaaatcatacatctgataagtggttaatattcaaaatgtataacttcaatagcacattgaactcaattcagtaaggaaacc

SEQ ID NO: 894682 - DNA, 639 bp, Homo sapiens
atataacaccatgaaagaccatttcatggtcaaagtggaaaaaaatcctggcgacaggacagtatctgatgttaaaatatgctctaaaaccataataattaaactggcatgatactggcataaagataaacataggaccaacggaacagaatagaaagcccagaaataaatccatgcattcacagtcaactgatcttcaataaagatgtcaagaacacacaatgaagaaagaaatgtcttcaataaatagtattgggaaaatacactatccacatggacaggaatgaaatgaaattcttatctgacattatgaacaaaaatcaattcaaaatagattaatccttaaaagttttgaagttgtaaaactactagaagaaaacaggggaartcttcttaacattgatctgggcaataatttttaaaacatggccccaaaagcacatgtgacaaatgtaaaaaatagagaaatgaaatcacacaaaattaaatagctctgtacagcaaaggaaacaataaacagaataaaaagacaacctacaaaatagaagaaaatatttggaaatcatacatctgataagtggttaatattcaaaatgtataacttcaatagcacattgaactcaattcagtaaggaaacc

SEQ ID NO: 894683 - DNA, 699 bp, Homo sapiens
aataaaaacaaataaataaataattaaaatttaaaactataacttcatgggaaaaatattctatctaaaaccaaacagttctgtaaaacagtagaaactttttaagtacttattaaaatatttttagaatttaaaaactgcctgtgtaaactgtaatactatataaaagcatgtgagacactagcttaaaaacaataatgaagaatatggctccaatcaaagttattataattcctttttcctgtactgtgcaacaaaagaatatatagaagcaaagaagaaggaaaacagctataacaacaaataataggcagccagaaattwacatgaaaaagcttgatggaaaagaactactgtgtagaaaataaaagaaatagtataaaaatgtgctttttaaatagaaaacatacttaaattccatcttgagaaataattctaaatcatatttaatagtacaataaatttagagaggcaattatagtacactgcatgccagcctattaataatttttaggctgaccatttaagggagcaaaagtgttttgaatagtttttcacttttctttgtcatgaccgaactgcactagatttagtctagtgctgattatcacctctcaagaaattctttacccattgcattagttttcttccttcattctttcttttgcaagctaacatgagttattctacagcgaataa

SEQ ID NO: 894684 - DNA, 494 bp, Homo sapiens
aaaataccaccagtctctttgcatagcaagagtgacctttactccagttcccaacaagttcctcatctccctctgagaccaactcatcctggatttcattgtccatatcactaacagcattttggtcaaagccattcaacaagtctctaggaagttccaaacttttccacattttcctgtcttcttctgagccctcaaaactgttccaacctctgcctgttaacccagctctaaagttgcttccatatttttgggtatctttatagaagcaccccactctctgtggtaccaatttacgrtattagttcattttcatattgctataaagaactgcctgagtataggtaatttataaagaaaagaggtttaattgactcacagttctgcatggctggggggcctcaggaaacttacaatcatggcagaaggaacctctttacagggcgtcaggagagagaatgagtgccgaaggaaggggcaattctcttataaaa

SEQ ID NO: 894685 - DNA, 584 bp, Homo sapiens
ttactcatgtaaccaaacaccacctgtatcttaatagcctatcaaaatataaaaaaaattcagatttatcacattgcctacaaatgtcatttagaaaatggagaaacattttaatattaaaataaaacataacaattaaaamaaagacttcctcggacaaataaaagctgaaggatttcatcaataccaggcctttcctacaaaaaaaatgctaaagagagtaattgaaacagaaagaaaatgacattagtgagcaatatataatcaccagaaggtataaaactcactggtaatggtcagtacagagaaacgcacagaataatataacaccgtaactatggtgtgtaaactacttttatcctaagtaaaaagactacaaaatgaactaaacaaaaataattaacaactacaacttttcaagactgactatgtctttatgtctttttgtactgactatagtacaaaaagatataaagaaaaaatgaaaagctaaaaagcaggcagatgaagttaagcacagagtttttattagttttccacaagaaaactgtaggtgcatataaacaaattcaatgaagttgcag

SEQ ID NO: 894686 - DNA, 584 bp, Homo sapiens
ttactcatgtaaccaaacaccacctgtatcttaatagcctatcaaaatataaaaaaaattcagatttatcacattgcctacaaatgtcatttagaaaatggagaaacattttaatattaaaataaaacataacaattaaaaaaaagacttcctcggacaaataaaagctgaaggatttcatcaataccaggcctttcctacaaaaaaaatgctaaagagagtaattgaaacagaaagaaaatgacattagtgagcaatatataatcaccagaaggtataaaactcactggtaatggtcagtacagagaaacgcacagaataatataacacygtaactatggtgtgtaaactacttttatcctaagtaaaaagactacaaaatgaactaaacaaaaataattaacaactacaacttttcaagactgactatgtctttatgtctttttgtactgactatagtacaaaaagatataaagaaaaaatgaaaagctaaaaagcaggcagatgaagttaagcacagagtttttattagttttccacaagaaaactgtaggtgcatataaacaaattcaatgaagttgcag

SEQ ID NO: 894687 - DNA, 647 bp, Homo sapiens
actgttgactacagaatagctgatgatattttcatcagtgaattcatttttgccttcaacttgctataatacccttatttatcgtcatttttacttatccgtattttaaattcaatttcattctgtgcatttgtgttatgtaacttaactattcgtgaaactgaatttggatagcactaagtaaataaagcaaacaccaaatcaccacagaaagtaacacaaaaaattgtcaatctcttaggctgctgtggactgtaaatgatgaaaatataactcaattatttttggaaataagaaaaacacagtgttttcctcaggaaatccaacactggggtaaatttcaggttggtttaataatcagtttagcaatattttcaagtgtttamattctccatatatcttaattgtctaatccttggattggtttcactctcatccacgtagcaagattgctgcaacaattctggttatcttgtcctaacatgacagattcagacaaagagacagaacagtccttcctgctggctatttcactggagaaataatacattttttttcagaagctgcctcctgtttcactaggcaggatgttttaacatttgcttttctaaaacagcccgaagcaagaataatttaattattacagt

SEQ ID NO: 894688 - DNA, 645 bp, Homo sapiens
aactgaaagcagagaccagtctgtccacgtggtcccagtctgcctctccctgagatgtcaagagccttaagaatcactaggattctagtatcctgttaagcctgtgtatataaaaatgtttgttttgtttttcatatgtttattttatttttcttctattctgaccctgtagtatatcatttgtggtgtttgtgcttacgtttgattgacatctttttttttctataacaygtagtaaaattatttcaaatggtgtaagcaatgttaagcaaagaagacaaatcatataggcatttaatacctgatataaaaatatagaattcttttaaaagcaagaaatcaaaaaacggtgttaaattgtttttaatactatatattctataataaacgtacagtgattctgtatgtctacatgcataattaaatattgagagatacataacagaaaaagagccgtttgtgatataactatgttcacttttatcattttaagttaattatgtcttactagtgatataatagttgatatagtaatatagtgaatttgtgacataagtaactaatctgcctccttgtacgcttcatgctaaaggctatgaaaataggaaaagactaaaatttcaatgtcacgacaattatttgtta

SEQ ID NO: 894689 - DNA, 607 bp, Homo sapiens
atagttgatatagtaatatagtgaatttgtgacataagtaactaatctgcctccttgtacgcttcatgctaaaggctatgaaaataggaaaagactaaaatttcaatgtcacgacaattatttgttattgcgaaagaacaaagtatgyaaaactggccatttttaacaggaaaattaatgctttaaaatatgcattcattgaattcattgggtctcatattaaattttggctgttttcttcatggagccataaagtaagctctcactgttatagcagaagtcaattaagcttgctgtacacgaggatgcattgtatagatgatgtttttggtcttggaactgaagaggagaaaccacaaaagagacagagatggagtgtgcagaaattttatttgaatctcaaagaatgaacttaacagaagtcttgggtatagtaatatatgaacggtgatagtactatgtgtgatttttattctatcgcataaagctaaatttttaacttgactcataaatttaatttataaccagaataaaattatgctacttaaacctagcaaacacataattttaccaagcttgaattgatgtatacagattttaagtgatt

SEQ ID NO: 894690 - DNA, 631 bp, Homo sapiens
tactgcaaaaagtcggggcaggagatatagcctccctggaaacattctacatgcctcttcccaatcagaaaccctctcttgctaagaacaatgactagcctgattttgcagtaaatacttcctttcttttctttatagttttaccaccagttgtgtgccacttaacactacagttgagctcttctattccttattcccctaaagtatcctttaattgtctaaagaaactatgtctagatatctttgtaattaacttgttgaaaagccattgtattttttttttctgtagagtttccttcatatatatctacatggyataggttagtgtgactctctataaattaataactaagttgagagacttaatcagaattaaagttcagtttttttgcttgtctaatttataggcggtaagttcttcaacaggaggcatataccgtaattctttctttttatagttttagcagttcttaatgctccaagtctaaatccatttttccaataggtattgaaaaatgatgatattataattttattatttcttcttcagctgtttgcctgaaaaaagaaatatctatcatttggttacccagtggtttcatccttattaaagaagcactccatctcttct

SEQ ID NO: 894691 - DNA, 584 bp, Homo sapiens
aaaatttcatataatcataacacctttatatgtgatggttcatgcttcactttgccttccaaatcttgtgcaaaatttctcttctggtcaactctaaccaggttgtataggaaagaagattttgttgggtatctttctgattaacataaattaatattatcaagggagttcatgatgtaatttcatatcattctcaaaagtatgtatatatattgtttttaatactactgtatcctgcttatttaatttgggaattgcacttattggaaggtctacaatattcratatttatatagagaactgtgctcctgttgttaattttaagacattttaaagaagtatcctgtgtacttttaagtgatttatattaatattttagacataattgtctttattcaactacatactgtgactcagaataattatattgttcaatcaaaccaggtaggttgtaaatgaatgttatgttttatgcatcaaacacaataatcaactaattataatatttcagaatacaatgttattcaacattataagtcatcagggagatgcaaattaaaccataagaagatactatttcatag

SEQ ID NO: 894692 - DNA, 664 bp, Homo sapiens
gatactgtagcttcagatcactgctgacccatagcatatattaaccaattggactcattttcttttggtgctccgatatgtggagtttgccctaatttcaatgttttctgttagaatattctatttttattaaagtaattttatatttcacacaaatattccagttatttcagattttttccccaccatagtagtcagatacaagtccaccagagtaggtgttggagataattctaatgacagraacattagaaaattcaaatatgcttttctcctctgttttctgagccaatatgattgtaccaaattgtcttgtataatctactttttttcttaaaattagttaatttcaaaaagattttcctttctaggattaaggacccaataaattgattgtcactaattatccaccaattctcatagttttgtttatcagtgacaaacttaatttatgctctattaaaacttctactatacaatctctctagggagagaaggatactgacatttaaatggcaggattacacaactgtaaaacatacataaggttaccaaactctccctaaaaattacacataaggagctttactaaatagtagggaaagattatgagtcacagcattttctctgaatgcattgtaacgtgaaccccaaatatctgagc

SEQ ID NO: 894693 - DNA, 643 bp, Homo sapiens
gggatattttggacaaatgcaatttaaagaagattatggcaggaataaagcatgttgactttaagctgtaactactcattgtttgtctgtgcagtacctaatgtcatgactcacatcccctcctcaaggactacagtttcgtttacagcctagtgtgactgcaatgaaattcagtctatgtcagcgaacctgtcaaattcaacatcatgtcctgtcattgtctccagagcaatgaggtgttactgtgattgatctgcatagttgccaaatacttgacatcattcagctatgccctgagctttgaatgagttcatggttatcaaacaacatatatgtatatatatgaaactatttaactggaaagtcttgtggcattaatattactaaatccattgtgatttgtgccaaatgtgtttaaaaagtgtaatctgtgatattgaatgggatatttgggstttaagttatatttcaaaattttgtatagctacagtgtactaactcatctttaggaaacaaagttctattttcactgccctatgataaaacttttaaaatttcatttcaaattgttaaaaagtggcaattataaaagcataaaaggttttacagaataatgtgtaatattaatatttctacatacaaa

SEQ ID NO: 894694 - DNA, 665 bp, Homo sapiens
tctttttaaaggagatttaaatctagatgtgggtcgagacttcaaacatttagcaaggcagacaagcgtgaattgttttgattcttctgcgaaacattgcagaaactggtgtgatctgttccccagtgtgttcccacaaagtcaccaatattcagaggctctgattccattagacaacaagcaatgctcacagaaatagaacttatgccttgtctgactgctcaagcacatggccgcaaaccttactgaagtcagccttgtcttgtgattgggtttctaacttcattccaagctctcacagagagtagaatattaaagatgaaagattaaagttgcacggtagaattcttttcaatataataaacattaaaaagtggtaatttacaaatgaaaaagcttccatgtctattggaagcatagtttacaattcaagcacatacagattgagcacatctaatgtgaaaaccygaaatccaaaactctccaaaatccaaaatactgagtgtcaacatgatgccacaagtgggaagttccacaaataaatatttaatacaaatttgcttcatgcacaaaattattaaaatgttgtgtaaaattagctttgtgctatgtgaataaagtgtatatgaaaaataacttaatttcatgtttaaccttgggtccta

SEQ ID NO: 894695 - DNA, 607 bp, Homo sapiens
aatgtgaaatgcctatagaactattacatgataatatctaatagccatttacgtatactgatttgtaactcaggggacaaataatagtggaaatatagtttgaggttcatattttgtcaccaagagcacgctttattctgtgataaacattagagttttagcatttgtccatggaaaaagtgggaagcaaatgattatggaagacaaacaaaagaagaatttcaagaaggaagaggtattcagatttgttataaacacggcaaaagtcaggtaagatcaatrcattactttgctaggattgttgtaaagaagtatgacaaactgaattgcttaaacaatagaaacttagcatttcacagttctggaggctcaatgtccaagatcaaggcattgtcaaaagggttggttccttttaagggggtcaaagaaagctcagtgtcaggtctatctcctgggcttactgatatccatcttcttccttgcctcttcacatcctcctccatccatgggtatttgggttcaaattttctctttctataagaacaccagtcatgctggactaggcacccaacctactctggtatgaactcatctcaaatcattacat

SEQ ID NO: 894696 - DNA, 659 bp, Homo sapiens
gtaatttgaaaagtaagtctattttgttataatgagtcagccacaaataatgagttagcttagcactaaaaaatgggataatcttgattacattccttccatagtgtagtgtatgcatctgtatgtatattgttcgttttcttcatactttttgtgtcataagcacaagggacaataggaatttgatgacttcatgacctgatctaagccattatgattatattgagccatgccttgcaaaaattaatgttgaaaaatgagatcatttatgagatgaaactacgatgtagctttgaaaatataaagcaattttataagttcagtatagtttttaaaaagtaatcttacactcaagagatctgaatctttctaattgtaaagtgagtaaaggagcaaaaataaaacatgttcacattcttttgaagaaacctccacaatagaccmctgtatgtaatgattccttagccaaaggcaaatttcttcgaatttcttcctttggcctctacaatatacataacacatacacattgccagattttaaaaaaattagaaaggattaaaggaattaaataattaagttatttaaatatataaatatagcaacaaaggctatcatatcattataaactgaatattataaaatgaatattaaaagttaa

SEQ ID NO: 894697 - DNA, 632 bp, Homo sapiens
aaataccgtctgctcttctccctccagttcggttcaagggagagaagtgacaattgggcctacatgccaccgtcttcagaccaagactaagataacccagaaatggagagaaagtgggggaagaggaagcaaaaatgccacaaaagttgagttttcctcgtttgttcatttacttgaagctgtaaacttttgactgttttccactgcttctatatagttattttattcatttgcaagcttttaaaaaatatttctgtggggaaccaaaacttgagtttcctgttttgccatcttgctaattttacaggatgatgttacttkttaaggatgtttctgtttgtgttcaggagatgtatgtagataagagagataaggtctccagtttttgatattttaagaatttttttcttttaattgtttactaaatttggataatgagataatgctgggctcatagaatgagttagaaagtacttctaatgcttctattttggggaagagaatatagagaattggtattacttctttcttaaatgcttggttgaatttattagtaagtaacttgtaattaaggatgttctttttggaaggttactaattagttattacattcctttatagaagaatactac

SEQ ID NO: 894698 - DNA, 593 bp, Homo sapiens
cataaatttatttttacctatttttaatacactgatgtgtttcttaagatgtttactagtttcagtgttctgtataatttctctttataaaataacttgctgtttgtgactaatagcagatctatgagggtgaattgctatgaaaaacagaacttataggagaactctcacctctctagtgacaacatcttacattatatactttgatactgaattttatgcatttgcatgagataaaaatgcatttataataacacataaattgtaagaactgttttggaacgatcacttgtatttgtgagatttagaggatttatgactattgcgtctttctcttagaagaggtccacacaaatgtgacattctctcaggtcagaatgtaaaaaaaaaacaatgcaatctaaattcgactacttcattcatcttttagaaccatttttaaagtgttcrttaattctaactttcttcatttctgaaatgaagttcaataaacggaacaagcactttatcttccaaaagtgattcgtttgaaaattcctctgttggatttaattaggtgagatgtctgcaagtgggtaattagttcactcagc

SEQ ID NO: 894699 - DNA, 577 bp, Homo sapiens
cattccattctggtttgaatgaagaaattgatttaaaaaggcagacactttgtttcagtatgccttgattgttgaaatattatcaacatgaaggcaaacaggaataggatttgaaatggtttggatttgtatcctcgcccaaatgtcatgtcaaattgtaattccaaatattggtggtggggcctgttgggaggtgattggattatggaagcatatttccccttttggtgctgttctcatgatagagttctcaaaagatctggttgaaagtgtgtggtacctcccccagacctctcttcctcctgctctgktcatgtgaagatgtgccttcttccctttcacttttcactgtgattgtaagtttcttgagacctctacagccatccttcctgtgcagcctgtggaactgtgagccaattaaacctattttctttataaattacccagtctcaggtatttctttatagcaatgtaagaatgaactaatacagaaaattgatacataagagttcggcattgttatgaagacacctgaaaatgtggaagtgacttaggaactaggtaacaggcagaggtt

SEQ ID NO: 894700 - DNA, 649 bp, Homo sapiens
catgaggatgatgatgataatgatgatgatgacacttagttttaatatatagctgagtgaaaatgaacctgaaaataaaaacacagacaaagcactaagttaaaaagaatagatcctcaccttttgcaaatgtaaattctcagtttcatttacaaatagcacattgtacaagttaatttgtaattttacctttaataataaaatctattttattctgagaaaagtgaccatcaagggacaggcagtgaacatttttaaatgattgtagtttaaggcaatgcctctcaacctaaatcaactgcatcacctgggaattttttgttatgaaagatttttcatatatacaaaatgttcaacaaattatggaagaaacacttatataacaaatcaccaagtttctacttattgacccattgccagttttgtttcatgtgttttcttcaaaccacattaatgggycatttaaaaataattcccagacatgcatcatgtcaaataacatttcaaaaaactgagagcacttacaaagtacaatttgcacaattgaaacaattttatggtgccttataagaagggttggccaatgaatagaattcactctgtaaacatgctgcatttctctccatgaatggaaggtacagtcatggtc

SEQ ID NO: 894701 - DNA, 626 bp, Homo sapiens
cactgaggttattttcattgaactgctaccattccacactttcctgcactaaatttctgtgccaaagaacttctgtggatcttaatttaagaaacaggttttacaggctgggcacagtggctcatgcctgtaatcccagcattttgggaggccgaggtgggtggatcacgaggtcaggagttcaagaccagcctggccaaatggtgaaaccctgtctgtactaaaaatacaaaaaaatagccagatgtggtggcacgtgcctgttatctcagctaatcaggaggctgaagcagagaattgcttaaacctggggagtggaggttgcagtgagccgagattgtgcccttgcactccagcctgggcaacagagtgagactccatctaaaaaagaaaagaaaagaaaagaaagaaacagtttttacagtgtctrcttttctctattgattttgttcttttttgtttacctgcttagtactcagtgtctttctagtttatgtatattgtgctatgcttatccccaagttgctggaatattggatattgtccttcagtggcagcctgtcgatggattcctgttgttcgtaaataagactcataaccctcaatgccattctgcgtagatatca

SEQ ID NO: 894702 - DNA, 689 bp, Homo sapiens
taaattatattttagtggtataaacagtctgttagtggaaatcttggttgtataacatttaaataaggttattttaatgaagtccaaagataagtaaatttaaaaatgtccaaatttctttttcattctaatgagctgtctggaatctgtcaacattctgaactgtaaatgtatgtagaagttcaatactgaaaaaagagcttaaagcataaatctataatttataaaatgtatggaggagaaaacctcccttyaaaaaaaatgaatgattctctctaatcattaatgacatggcagcattgccaatgcaagaattatattttctgttttctatttaatttaactaattcttctaacatttggaaactactgtggtatttaatataaatataatattcaaaacacttttttaaagtttcaaaaataagaattatcatctgtcaggtatagcctacaattcaactgaacgctttttactttgctggcaatgatgagttcccttgtgttagcttatgaaagaaaaagtagcttttattggaactttctcgatattctcttcttgaccactaaatttttttttttaatttgcctctaaaagttagctactagaaagggccaagtgccttttgacaaattaagaatataggaagatattaaatcttaatcctgtaaaaaaatgatgcagttag

SEQ ID NO: 894703 - DNA, 656 bp, Homo sapiens
ttgtttacatcttgctggaagcaatatggctgaacatatcttgcctttcagtaaatagaatttaatttgtgggtatgtgatttagaactagaataaaaggtacatacaatgtttaattaagtacattttagaagagataaactaatgtaggttaaactaactacaatagaaacatagaagttaatcttatccatattttcacattctagaaagttatgcatctttttttctcaattaaaaagattatcatgggttaaaaatttgtcataaaattctttaaagggtaggataaaaatgaaaaaaactctcactggaaatctgtatttgcataattactgtaaaataccaattttacacacaaacaaacagaagccaaaaatgcttcgaaatctcatttgaataatgcatgcatatgtattggttctgcatggctaagccaacagttgcatcagtgaaaatatttaccttttaatgtcaacactagaaataacaattatcaatatgaaagagaaggcccwagtataaaatacatactatcatcaaacaaatctaatttcttattttgttatgaagtaaaataatacatttgttatgcatttctaaagcaaaaaattacataagtatcaggggtctattaatttttaaaagtacacata

SEQ ID NO: 894704 - DNA, 639 bp, Homo sapiens
aggtccacagcacatcctgaggctatagttcaagatgaaaggaaacatatattaagtttgtctcaaaagttatatcttgagattgaggagaaaggagaaagaagataaaaagtttaaaaacatggtttgaagccaagctagctgtcctgttacaaaatgacaaaaggacacataagatacaatgaatactcctttttattcaataaagggaagagacaaagggaatctccaggataatgaacaaaagaaatagtacggcagctgtgcgcaggatatgtgatattgtccattaaaataagagcaggytatatatcctgggaaatgttttattggtaagataaaatttatataatacctaagtatctcaacacagtaaataaatttgatgcagttctttggagaatttggagttgaaatggtgacaaaaacatgcaaagataaacaaatgaaacaaaataagataattattaatgccacaaaaatatgtatttttaggaaaataaatatattagtagttttctacaaggttaaaatttaaatagtatttaaacacttattgtaacataagtctggaatatttatctaccataaattttataaaacttctttgaaaaggtgattaaattgaaagaatgtctt

SEQ ID NO: 894705 - DNA, 639 bp, Homo sapiens
aggtccacagcacatcctgaggctatagttcaagatgaaaggaaacatatattaagtttgtctcaaaagttatatcttgagattgaggagaaaggagaaagaagataaaaagtttaaaaacatggtttgaagccaagctagctgtcctgttacaaaatgacaaaaggacacataagatacaatgaatactcctttttattcaataaagggaagagacaaagggaatctccaggataatgaacaaaagaaatagtacggcagctgtgcgcaggatatgtgatattgtccattaaaataagagcaggctatatatcctgggaaaygttttattggtaagataaaatttatataatacctaagtatctcaacacagtaaataaatttgatgcagttctttggagaatttggagttgaaatggtgacaaaaacatgcaaagataaacaaatgaaacaaaataagataattattaatgccacaaaaatatgtatttttaggaaaataaatatattagtagttttctacaaggttaaaatttaaatagtatttaaacacttattgtaacataagtctggaatatttatctaccataaattttataaaacttctttgaaaaggtgattaaattgaaagaatgtctt

SEQ ID NO: 894706 - DNA, 559 bp, Homo sapiens
agtgcttaataagtctaaactgaatgcatgatttttttgctgtcatttctcctcatctgtccagcagtctaattttacctctgctgcaaagtaagattattgaaagcttttagctttttagtcacttagcaatagctttctgattgacttcttggatcctcatccccatgctttgtagaatttaccaatggcctagagtagtaaagcactcgaaattctaagaacgcttccctgggtcattcttctcctccaggactcctagccttcacattctgggtgtgctattacttctgaaaacaaatatttacctcctcccataatcatatctcaaactcaaagtttctgctttccactaagcctttatgccttatcytgagatttagggaaagcaatgtccaacataaaagagcagtataatctggccccctgcaatttgtttatgttctctctatcatcttgtagcctcaagttctatttacttggtgctctttgatactcagtaccagatgcttttggcacttcttcagttttatgaatgtgtttttctgactcatgttac

SEQ ID NO: 894707 - DNA, 613 bp, Homo sapiens
gtgtatatgtatatatacgtatatatatgtatacacacacacacacacacacacacacacatatatacacacagagacactttttttgttttttttttgagacagagtctaactccattgcccaggctggagtgcagtggcacgatctcggctcactgcaacctctacctcccgggttcaagtgactctcctgcctcagcctcctgagtagctgggactacaggcacatgccaccacgcccggctaatttttgtattttmattagagatggggtttcaccatgttggtcaggctggtctcgaacttctgacctcgtgatctgcctgcctcagcctcccaaagtgctacgattacaggcatgagccaccatgccaggctgaataaagttacatttctgtgagaaaattgttttactttacaactttcatcaaaattatatgaataatcttgttcataaaatctatattacaatttgattttcaaaatgtgtttgggccatgaagtatttatttttgcttttgtgacttgatggtttatcacatctttctagtcatatcaagttactttttctatatgtttgttagcattcttaccatagaaagcacattaattg

SEQ ID NO: 894708 - DNA, 637 bp, Homo sapiens
acagctcaggctgttgcttcagagggtgcaagccccaaaccttgccaggttccatgtggtgttgagcctgtgggtgcacagaagtcaagaattgaggattgggaaccaccatctaaatctctgaggatattggaaaaagctggatgtccaggcagaagtttgctctaggggtgttgtcctcatggagaacctctgctagagcattgcagaagggaaatgtgggtttcaagcccccacacagagtccccactggggcattgcctagtggagccatgagaagaggaccctcatcatccagaccccagaatggtaggtagatccccagcttgcaccgtgcacctggaaaagccatagacactcaacaccagcctttgagagcagccaagagggaggctgtacactacaaagtcacagggctggagctgctctagatcctgggaacccatcccttgtatcagtgtgacctggatatragacatggagtcaaagaagattattttggaactttaagatttgactgccctgctggattttggactttcatgggacctgtatctccttcattttggccaatttctctcatttggaatggctgtatttacccaatgcctgtaccccagttgtatctaggaagtaa

SEQ ID NO: 894709 - DNA, 690 bp, Homo sapiens
caagaggaaatgcttgtgatacctttttagatggttaagtggagaggctcaatcatcatgacagtacaagggcaatggaattgagtcttttaataaatggttgcctcaaaactgcatctctggcaaaccagaaagtctggtttattttagtccctaaatatctctctaatcttcctaactttagttcatctgcctgaacaccacactcattcaaactttctcatttggaatattacaatagtttcctagcaaccactatcatttgtgcatgctgacctccttcctatctaaaaatgtaacttttctggtaaacaccctctactggcatgccagatccaaaatagggatcacwttagtaaacacagtctgtaagaccctgcactcactgatcctggctatctctcactgcactgtctccaattctctctatgtcaaccactgcattaaatttcaattatcttatttatagagccttcccacatgcctgttgttcttatgtctttgccatttcatctaattaatgcctatgctttccttatataagtgtttaatgattaataattgcaaagtatctttaagttaaatacctttattttaaccatggtttgtagaacactcatcattgtagcagttgccatatctgatattgaattgttctaatttaatcatttgatgaatttatatgtctct

SEQ ID NO: 894710 - DNA, 570 bp, Homo sapiens
ttccttgagaaccttggaattaaataggaaagctgcacctttaaacttatatttgctctaagtttatttaactacacatatggattgaaccattatcgttcaaagtcttttatgaatctcataattttgtctttggagcctaatcaatcatctttcccaatcttgaaaaaccttggattataggacactattttcttttttttctactgtaaaacatgcaattcttttttgagattgtatctttcttataatgccctctctarcacagatagtagtggctaacattctaatatttcattttacactttctttagacctaggggctgagaagacatgttgtctgccttctaatttaccaatagtttaccaaaacatttatcttattaggaaaagtgcatttaccaaacgaacatacagatacagatatgtactgttaatttctgccatgatttttgcccataaacttttgttagaagttgttctacataatgttctcatatatacattgtcagaccttgctattctattctatttgcaattcctcttcaaggtcatactatcttgttttca

SEQ ID NO: 894711 - DNA, 570 bp, Homo sapiens
ttccttgagaaccttggaattaaataggaaagctgcacctttaaacttatatttgctctaagtttatttaactacacatatggattgaaccattatcgttcaaagtcttttatgaatctcataattttgtctttggagcctaatcaatcatctttcccaatcttgaaaaaccttggattataggacactattttcttttttttctactgtaaaacatgcaattcttttttgagattgtatctttcttataatgccctctctaacacagatagtagtggctaacattctaatatttcattttacactttctttagacctaggggctgagaagacatgttgtctgccttctaatttaccaatagtttaccaaaacatttatcttattaggaaaagtgcatttaccaaacgaacatacagatayagatatgtactgttaatttctgccatgatttttgcccataaacttttgttagaagttgttctacataatgttctcatatatacattgtcagaccttgctattctattctatttgcaattcctcttcaaggtcatactatcttgttttca

SEQ ID NO: 894712 - DNA, 619 bp, Homo sapiens
agtcctttttatttatttcttttttctatgtttcttttttcttttcctttttttttgagacagagtctcattctgttgcccaggctggagtacaatggcaagatcatagctcactctatccttgacatcctgggtacaagcaatcctcacatttcagcctcctaagtagctgggactacaggcatgtgccaccatgcctggctaccttttgtattttttgtagagatgggttttcaccatgttgcccatgctgagctcaaactcctgagctcaagcaatccacttgccacagcctcccaaagygctggtgccacaggatccctggggtgttgctttgccagttggaaacctttgtggtctctgacatctttgcccaagttttgctcagcccactgggctcattctgcccactcagcctggcaggctgcacttggtttgcactactagcctggatctttgcttgccaaggacaagccagatgcagagtggtgaggggtgcatcagtgagcgactgtggggttcagctgctgcgcacagccaggcacaccagctgcagcagggtgggcagctccagacactgacatgggtgccagctccctgcaacgctatggctggacca

SEQ ID NO: 894713 - DNA, 581 bp, Homo sapiens; identical to SEQ ID NO: 892888

SEQ ID NO: 894714 - DNA, 670 bp, Homo sapiens; identical to SEQ ID NO: 892889

SEQ ID NO: 894715 - DNA, 589 bp, Homo sapiens; identical to SEQ ID NO: 892897

SEQ ID NO: 894716 - DNA, 566 bp, Homo sapiens
ttaatttctgttttggatagtttgctgttatgtatagaaaaacaacatattttttatgttgactttttatccctctattttatgaattcttttattctaaaagtattttggtagcatgtttagaatttttgatatttaaaataatatgctttgcaaaccagaacatttaacttcttcctttctgatttggatgtctttttttttttatcttgcacagttgttctaagactttctgtactatgttgaatagaggtggtgagagtgggcatacttgccttgctcttgatttttgaagaaagcttctggcaattcaccattaggtatgatgctagttgtgagcttgtcattgtggcctttattatgttgaagtgcattccttttaaaaataacttgctragtttttttttcataaaagattgttgaattttgaatgtttttttctgcatcttttgattgagatgatcaattttattatccgttctgttaaaaaggtgtatcttatttattgatttacatatgttgaaccatccttaaatttcatagatatgtcccactttatcatggta

SEQ ID NO: 894717 - DNA, 646 bp, Homo sapiens
tcagtacagatgatctctagcacattatagagtattaaaactcatttttcttttcactgctccatatctgtgttaaattttatgatgaataacctaacttacattaagatgtgcaaatattttcttccatcgtgtagctatacttctggcccttggactttttatctgcaggattaaagactagagactagaaaatgctgcataaaacagaaggtttctcttttcttttattgtgagccatataaccttaaatggaatgtgaagaactctaaggtgtttcataaaagcaaatatattttataagagatatggaaaatatgatatacagaaagttctaagaatcgggacagttttgtctaraggaaaaagggcttacactgatttaattgcaatcttcagcatatgaaaatatgttcttattagaatagattctagatttctttacgtagtagaaattttcaaaaatggattttgaaagtttcaactagcaatcactgtctccttttaaatatgggtttttaagaaaatcattatattttatttttttcatcaaattttaagagaataatattagtatatattagacataatacaaaactggaaaaaatgcggtatagttctgattttatatctaactagaaatgaa

SEQ ID NO: 894718 - DNA, 615 bp, Homo sapiens
tatttcagattaaggcatgtgtcttgattctgtctagttttttcagccttctataaaaaataccaaaaactgagaaggttataaacaaaagaaatttccttctcatagttctgaagtctgggaagttcatgaacaasttgctggcagattcaatgcctggtgagggcctgctttctcgttcactgatggtcatcttcaccttgcgttctcacatgatggacagggctagctagctctctggggcctcttttatgtgggcactactaccattcatgagagcactgccctcacaatctaatcatctctcaaatgccatcatctcctaatgttatcaccttgggaattaatattttagcagatgaattttgggagaacacatatattcagacaataacatcactatatgtagtaagcttaggataaagatttgcccggggactgtcggttttatgtcttaatcaggctatgatttccatcctatagagcacttctgggaaagactgatgccgtgtgcaatatatgggttcaccaggtggccactcctgtggagaaagaatagtcactatttggtatattgggcccacattcataaaagcaaagggctcactagtacct

SEQ ID NO: 894719 - DNA, 615 bp, Homo sapiens
tatttcagattaaggcatgtgtcttgattctgtctagttttttcagccttctataaaaaataccaaaaactgagaaggttataaacaaaagaaatttccttctcatagttctgaagtctgggaagttcatgaacaagttgctggcagattcaatgcctggtgagggcctgctttctcgttcactgatggtcatcttcaccttgcgttctcacatgatggacagggctagctagctctctggggcctcttttatgtgggcactactaccattcatgagagcwctgccctcacaatctaatcatctctcaaatgccatcatctcctaatgttatcaccttgggaattaatattttagcagatgaattttgggagaacacatatattcagacaataacatcactatatgtagtaagcttaggataaagatttgcccggggactgtcggttttatgtcttaatcaggctatgatttccatcctatagagcacttctgggaaagactgatgccgtgtgcaatatatgggttcaccaggtggccactcctgtggagaaagaatagtcactatttggtatattgggcccacattcataaaagcaaagggctcactagtacct

SEQ ID NO: 894720 - DNA, 641 bp, Homo sapiens
cagccaacataaggtaagaactgattccaggatgggtgactctgctatgtgttgcctgatccggatacattttaaattgaactccatcattttttgaggccctctgggaaacgtatccattgaaaacagtcgacaccagggtctacttgaatggggctgggggaggtgggatgagggagaggagcagaaaagacaactactgggtactgggcttaataactgggtgatgaaataatatgtacaacaaatctcatgacacatattttcccatttaacaaacctgcacatgcacctccaaaccaaaaataaaaataaaaataaatgaataacaacaccacaaagaccagcaggattccagcctgatactgtaatgtattttggattcttaactcgatcctaaaataggaaatttgtgcattgctagtgacagaargaatattatttgcaagatttattggcaactttgcatttattctcgaaggcagtggttcccaacctttttggcaccagggaccagtttcatggaagacaatttttcacagatgggggaaggtgggaggatggttttggtattattcaagctattacatttatcattaaattctcataaggacaacacagcctagatccctcccatgcac

SEQ ID NO: 894721 - DNA, 615 bp, Homo sapiens
gaaatgactttaatcccattcccaataaaaaaatacagacctgtttacattattatgattgggatatgatcatgatttattagcttttatttcaatagaactgttgtaactttacttattctaacaagaacatttatgatgattagaaccttgatcttttctttatccagcctatcactgatgggcattgagcttggttccatgtctttgctatcatgaattgtgctgcaatgatcatatgcgtgcatgtgtctttataatwgaatgacttatatttctctgggtatataccaagtaataggattgcctaatgaatggcatttctgtctttaagtctttgaggactagccacactgtcttccataatggatgaatgaatttacacttccacccaatagtgtataagggttctgttttctccacaacctcaccagtatctgttattttttgacttttgaagaatagccattctgactggtgttggatagtatctcattgtgattttgatttgcatttcactaataaaccgtagaatactatgcagccataaaaaagaaaaaaagaccatgttctttgcagggacatggatggagctggaggtcattatccttagca

SEQ ID NO: 894722 - DNA, 615 bp, Homo sapiens
acataaaaattggtatttacgattttttaaaaaaatctcccaaatagttacaaataatactctagaaagtaattgtaatgaatgcaaaacacattcacacatccttaatataaaagctgtagaaaatattaaatattttacccttaaatagatgtaagtcaaaacgtgaatattttgcagaaaaattcatcaaattaataactgtctataatatcaacaataaacacaaaaatgaaatttgcctttttattaaacaattttagaaacattaataaagtaaacatattatttgctggtgagtggatcatataatagacacttctatagctctcagatatattattgtatatgcaatgagaaaacatcaatataacatttctggatgaaaatgtagcaatgcaaayaattatctaacgtttaataaattgatatagcatagagcatcataacagacagtgtttagaagaaaaaccataaaattactaaaagaaaatgtaaaagcaccatctagcatggtagctcattcctgtaatcccagtgcttttggagatggaagccagagaatcacttgaggccaggtgtttgagaccagcctgggcaacatagtgagacttc

SEQ ID NO: 894723 - DNA, 587 bp, Homo sapiens
gtcagattttccttgggtgatgctcactgtggctgctgtggggtataggggtgtggttcccaggccaatgaagtcatattctcaggagcattatggctgcctctgttgcatcacacaggacgctagggaagtggggaaaagctgacagccacatgtctcacccggctgccgtgctgcccacagccagaaaggctggtcttactcctattgtgcccccacaacagaaccaagtttatttccaagcagctggtaagcagggctgagaacgtgctccaggctacaagcctcccagctgagaatgcaagccaactcacagtttctcaggcatccyatggagcctgcagaggcaatccgcatccttcaaagggtttgtggattctttctgctttcctggtatgttcctgtgtagttcttgaagtgaaagttcacagtgtgggtctgcacaccttactctgtctgagtgtgagctgccagttagtcctgcctcctatcccccatttttcctcgtccttttaattcaatactttttaaataatgtgcttaaactcatctaggtttctactggagggtattcctgagcaatgaaa

SEQ ID NO: 894724 - DNA, 587 bp, Homo sapiens
gtcagattttccttgggtgatgctcactgtggctgctgtggggtataggggtgtggttcccaggccaatgaagtcatattctcaggagcattatggctgcctctgttgcatcacacaggacgctagggaagtggggaaaagctgacagccacatgtctcacccggctgccgtgctgcccacagccagaaaggctggtcttactcctattgtgcccccacaacagaaccaagtttatttccaagcagctggtaagcagggctgagaacgtgctccaggctacaagcctcccagctgagaatgcaagccaactcacagtttctcaggcatcccatggagcctgcagaggcaatccgcrtccttcaaagggtttgtggattctttctgctttcctggtatgttcctgtgtagttcttgaagtgaaagttcacagtgtgggtctgcacaccttactctgtctgagtgtgagctgccagttagtcctgcctcctatcccccatttttcctcgtccttttaattcaatactttttaaataatgtgcttaaactcatctaggtttctactggagggtattcctgagcaatgaaa

SEQ ID NO: 894725 - DNA, 587 bp, Homo sapiens
gtcagattttccttgggtgatgctcactgtggctgctgtggggtataggggtgtggttcccaggccaatgaagtcatattctcaggagcattatggctgcctctgttgcatcacacaggacgctagggaagtggggaaaagctgacagccacatgtctcacccggctgccgtgctgcccacagccagaaaggctggtcttactcctattgtgcccccacaacagaaccaagtttatttccaagcagctggtaagcagggctgagaacgtgctccaggctacaagcctcccagctgagaatgcaagccaactcacagtttctcaggcatcccatggagcctgcagaggcaatccgcatccttcaaagggtytgtggattctttctgctttcctggtatgttcctgtgtagttcttgaagtgaaagttcacagtgtgggtctgcacaccttactctgtctgagtgtgagctgccagttagtcctgcctcctatcccccatttttcctcgtccttttaattcaatactttttaaataatgtgcttaaactcatctaggtttctactggagggtattcctgagcaatgaaa

SEQ ID NO: 894726 - DNA, 579 bp, Homo sapiens
tcacaaatttattcagccattcttactcctttctaatcttttctgaatcttactatgatggttaattttatgtgtcaacctggctgagccacaagacgcccagatatctgcttaaacattatttttgggtttacctatgaaggtgtttctggaagagattagcatttgaattgctggattgagtaaagcatattgccctccttgatgtggaagggggtgtcattatccaattaatcaaaggcctgaatagaacaaatggtggaagaaggttggattctctttctgccttactacttaatctggcggaaattmttctgcccttggtgctcctggttctaaggccctcagatttgaactggaatctacaccactgcctctctggccctcagtcctttgtaccacagtaggagtcttcatgggtttccagtttatagacattgcattatggaactttccgctttcataattatgtgagtcaataatcttgtaatacctctcctctataagtataaaatatgctatgggctctattaggagaagtctaatatagattttggtgccaaaagtggggtgttgctg

SEQ ID NO: 894727 - DNA, 481 bp, Homo sapiens
ttgattcatcaagccaacagggaagggtctccttacataatgggcattataatattatataatgtaatcatgtacatataatctccacatctcattatttttgccttattgtattagttagaagtaagtcatgggttctgccatgaaagaagaggatattatgcaaaggagtaaatactaggagagaccatgaaggggacaamttaagagtgttttcatggcagagaaattttggaaagcaagagtaggagtggagagaaacatgtgtttggagggggagagagaaggagaggtgagagagaggtccatgttgttgtgggtgggtgaagaactaatggcatttaagttgaattcaagtatgtgtaaactgatagtacttctttattttatggtaaaatgcttggtcttttattctgtattttttcaagtaattattggtttctcttgctagcacttccactgattaggaatcatagtttca

SEQ ID NO: 894728 - DNA, 651 bp, Homo sapiens
attaactaataagaacttgtagaaatgaaaaatgtattcactgaatttaaaagttcaatggatggtttaatctgaagattagacacagccaagagatgagaaatgagttggaagatataactgagcatgcgtgttaagacawgaaaggcaaggaatgaaaattctgaaagctgggaagagttgagaggcatagattatggaccaaatgagaaggtttagtatgaatccaactggcattctgaaaagagacaatgcagaaatggaagagggaagaaacaagatttaacaaaaaaaggctgtgaatttccccaaattgataaaaagcatgcatctgtattttcaggaatcatactgaaaccaagaaaataaatttaaaaaaattttcacctggagaaattatactgaaaatttagaacactaaaggagataaagaaaatattaaaagaaaaaaggcaggctacttgtaagaagcaaagattaagtgaatacactaaatgatactacgaaacatcttcagaaatgaatggggattataaagaaaattatcaggatattcatcagtattggtcaaggatctatgagaatgtgatttggaagagctaaaatggctaatctcttccttaaatagtttgatgaattgttggttttcat

SEQ ID NO: 894729 - DNA, 539 bp, Homo sapiens
cgtttgactggtttacaatattggaaggaggatcattttgagagtaaagtgaaccaaatatggtaactgctttactcttctggttgtctttgaaaatactgaaataccaacatttactgattcaaaatctatctgtagmtttgatcttttaaaagtcacccttgtaactggtcactgagtaaaggtaggatggaggatacttaatttcacactctcaaaggcttaactttctgccttttttctgcacattgttagtttgttgctgagtaggagatgacaggagatgtttgtttattttggaacgatagttttggcatagtaactattccttgtaaatgtaacagcaatataattccaggtcatgagcctcaaaagccacaaccagcaattgcattaacctagtttattgagtttgaatcattattcccaggcacatttcaaatttggccagctatgctaattaccattgccataatactcatgaaaataatattacagcaaagactcatacgtattatatttgaaaacatagtctcatt

SEQ ID NO: 894730 - DNA, 539 bp, Homo sapiens
cgtttgactggtttacaatattggaaggaggatcattttgagagtaaagtgaaccaaatatggtaactgctttactcttctggttgtctttgaaaatactgaaataccaacatttactgattcaaaatctatctgtagctttgatcttttaaaagtcacccttgtaactggtcactgagtaaaggtaggatggaggatacttaatttcacactctcaaaggcttaactttctgccttttttctgcacattgttagtttgttgctgagtaggagatgacaggagatgtttgtttattttggaacgatrgttttggcatagtaactattccttgtaaatgtaacagcaatataattccaggtcatgagcctcaaaagccacaaccagcaattgcattaacctagtttattgagtttgaatcattattcccaggcacatttcaaatttggccagctatgctaattaccattgccataatactcatgaaaataatattacagcaaagactcatacgtattatatttgaaaacatagtctcatt

SEQ ID NO: 894731 - DNA, 589 bp, Homo sapiens
cctgtcttctgaacccttcaaattgttccaacttctgcatgttacctagttccaaagttgcttccacatttttgggtatcttttcagcagcaccccactcctggtaccaatttaccatattagtctgttttcatgctgcttataaakacatacctgagacttggtaatttatacaggaaaaaggtttattggacttacagttccacatggctggggaagtctcacaatcatggtgaaaggcaaggaggaggaagacatgtcctacattgatagcagcaggcaaagagagagcttttccagggaaactctgccttataaagccatcagatcttgtgagacttatttgctatcatgagaacagcatgggaaagacctggccccatgtttcaattacctcccaccaggtccctcccacaacatgtgggaaatcaagatgagactttgatgggaacacagccaaaccatatcacgtggcaatgtcagaaagttactctacatggtctaaaaaggggagttattaatccagcccttgtttagcatatcatcaagaaaataaccataaaaatgggcaaccagcagttcttggggc

SEQ ID NO: 894732 - DNA, 595 bp, Homo sapiens
taaggatgctaacgatgatgcatgtgaagtttatgtaaaatgctctgaaacaacattctctgaagcatagtgagagcttaatgaatttgagctatggatattgtgaattactaactatttgaccttggcagaatcatgatagaggatgtcctgaggatgcagtgatgtgccgagaatttgagagtaagagtttaaagcaatgttatattcacaaagaaataataaaatatacaaggccagatgtctagagatcacagwctttttaaaataattcatgcttttaaattcatactttgtttttaacaaattcaaatgccttcacaggaggggtaacaaccataactgtgtgaaaaactgagccatcacctaagtaataataatttttaaaaattaataagaatcataaataatcaaaagcctggagtcaacttccacatcccaatttaaacgtgaagctataatgagacttcaaaaattcatggaaaaattgaattaaaatataaaaataaaaaatacaaactttatttctcaacagacactccattaagttcaaaacacttttataagtgactccaaacatttagtccctccataa

SEQ ID NO: 894733 - DNA, 595 bp, Homo sapiens
taaggatgctaacgatgatgcatgtgaagtttatgtaaaatgctctgaaacaacattctctgaagcatagtgagagcttaatgaatttgagctatggatattgtgaattactaactatttgaccttggcagaatcatgatagaggatgtcctgaggatgcagtgatgtgccgagaatttgagagtaagagtttaaagcaatgttatattcacaaagaaataataaaatatacaaggccagatgtctagagatcacagtctttttaaaataattcatgcttttaaattcatactttgtttttaacaaattcaaatgccttcacaggaggggtaacaaccataactgtgtgaaaaactgagccatcacctragtaataataatttttaaaaattaataagaatcataaataatcaaaagcctggagtcaacttccacatcccaatttaaacgtgaagctataatgagacttcaaaaattcatggaaaaattgaattaaaatataaaaataaaaaatacaaactttatttctcaacagacactccattaagttcaaaacacttttataagtgactccaaacatttagtccctccataa

SEQ ID NO: 894734 - DNA, 619 bp, Homo sapiens
gcatgtttggttgggtgcagatagtttttgaaactaggtggtgacccaacttacaaatatgtcaccagtggtgacctaggaaaacagactgatataagggaaagctcttctcagtgagatgatttagacatttgaaagggcaagggcaatgaatggggtatgcatgttaggataatgaaattaacttctaaagcctaaggtgtattgagataccacaaagaaatgataaaaaaaaaaaaaactggtgccattgcacaaataatatttaacagtgaaagttggcctcttatacagcttataaggagtgtaagaaaggatacagctgagatgcaagtacargtcttagtagagtcacagagctccaaatatgttgaaatgattagctaaattagatctgtcatgctgtaaacaggtcctaattgagaaaatctgaaactctaaaatatggcatgctatatctatgccagcttgcaacagtgactcacccttttaaaaaaaattgttggctgggcgtggtggctcatgtctgaaatcccagcactttgggaggctaaggcgggtggatcacttgaggtcaggagttcgagaccagcctggccaacatggtgaaaccttgtct

SEQ ID NO: 894735 - DNA, 619 bp, Homo sapiens
gcatgtttggttgggtgcagatagtttttgaaactaggtggtgacccaacttacaaatatgtcaccagtggtgacctaggaaaacagactgatataagggaaagctcttctcagtgagatgatttagacatttgaaagggcaagggcaatgaatggggtatgcatgttaggataatgaaattaacttctaaagcctaaggtgtattgagataccacaaagaaatgataaaaaaaaaaaaaactggtgccattgcacaaataatatttaacagtgaaagttggcctcttatacagcttataaggagtgtaagaaaggatacagctgagatgcaagtacaagtcttagtagagtcacagagctccaaatatgttgaaatgattagctaaattagatctgtcatgctgtaawcaggtcctaattgagaaaatctgaaactctaaaatatggcatgctatatctatgccagcttgcaacagtgactcacccttttaaaaaaaattgttggctgggcgtggtggctcatgtctgaaatcccagcactttgggaggctaaggcgggtggatcacttgaggtcaggagttcgagaccagcctggccaacatggtgaaaccttgtct

SEQ ID NO: 894736 - DNA, 676 bp, Homo sapiens
cactcattttcacaagaaccgcatgggggaagctgcccccataatccattaccacctcccttccacaacacctgggaattgcaggtccctcccttgatacatggggattaaattcaagatgagatttgggttggaacacagagccaaaccatatcattctgccccttgcccctagcaaatctcatgtcttttcacatttcaaaaccaatcatcccttcccaacagtcccccagtcttaactcattccagcattaactcaaaagtccacagtctgaagtctcatctgagacaaggcaagtgccttccacctatgagcctgtaaaatcaaaatcaagttartaacttttataccatggggatttaggcattgcataaatgctcccattccaaatgggagaaataggccaaaacaaaggggctacagaccccatgcaagtccaaaatccagtgggacagtcattaaatcttaaagctccaaaatgatctcctttgactccatatctcacatccatggaacgagagtgagcaatgtattaaagaaacaggtttaattgactcacagttcatcatggctggggaggccacaggaaacttacaattatggtggaaggggaagcaggcaacttcttcacaactgggcaggaaagagaagactggaggagaaacttccaaacac

SEQ ID NO: 894737 - DNA, 596 bp, Homo sapiens
tagctatttgggactgcataatatattactgttaactgtagtcatcctatagtggtttaaacattagctatcattcttcctatgttgctataattttaggtcttataacaaatttctccctatccttgccttctccctaccctttccacctccagtatcctctgttctaatggtcacttctgtgagatcaaccatttttagcttccacatatgagtctgatcatgcagtgtttaattttctgttcctggcttatttcactagacataatgtcctccagttctatctatgtggctgcaaatttcagaatatcttctaaatataaaaattttatttaaaagtaatatgttttcctggcaaatcttttacacagaatttgagagktttttttgctgcacttttatgctgcaaattatgttcaatataatataatgaacttttatattttataattaattaattcaaaattgtcccatatctttgggtgatttttttggacaggtgcaatttttatgaataaaataaatggcatccaaacataagatgaatgttttaacaaatgtagtcatctatgtaactagctcttcagtcaccatat

SEQ ID NO: 894738 - DNA, 587 bp, Homo sapiens
gttatatgtatgtgtgtgtcaaagtgtgtgtacatctatttgatatatgtatgtctatatattctggataccatctctgtttcatgcattgcatatatatttgcctatttagtggtttatcttttcattttcttttggtatcttttcattagaaatgttatttattttgagtaagtaacatttaatatattctgtaacatttaatgwatcattttatgttatgtttagtattaaatttctgaaaacattctatgtattctactagaattgtcataattttatcttttatatacattgatatttttatgtcaaatatgtaggtatgtgatattatgcacatggttttaattcagttaattgttcttccagatgtttgtaccattccaacatcatttaaatcattaaatgaaaagcctttccttactagctagccagctttgaaaatccattcatagggtttgtgttaatatatttttgttcttttttttcctttctactgatctctttatattaatacctactgtggctttatatgaagtcatggaataatacgtagtaagccctctaacactgttctgttactgttg

SEQ ID NO: 894739 - DNA, 596 bp, Homo sapiens
acatatataattatttagatttcagtgttctataaatcctaatgagagatgaagccagctggacttctgggttgagtggggacttggagaacttttctatgtctagctaaaggattgtaaatgcaccaatcagcactctgtaaaatggaccaatcagtaggatgtgggtggggacaaataaaggaataaaagctggccaccccaggcagcagcagcaacccattcaggtccccttacacgctgtggaagctttattatttcacactaagaggggtcaaaatacaacagattcttaatactaaaacacaacatgttgctatcttttttccttggatatgtgattgtgaatcactaaggggccttaacaactctagaaatatgaacatatagaaaagtaatgcatwgtttgaaggacaatccagtacctttgaaaacaccaactacatagcttgaggaagatttaaaacaagcttgtccaacccacgacccgcagaccacatgtgggctcatgagggctttgaatgcagcccaacacaaattagtaaactttcttaaaacattatgaaaatagtttgcatttttcttttgcttatcag

SEQ ID NO: 894740 - DNA, 622 bp, Homo sapiens
caatccatgtagctaccattgacagtactctttatatatccaggtttctatctgctaccattttcttctgttttaaggactccttaaaatatactatagtgcatatccactggtgatgaagtctttaagtttttatatattaagcaaagtttttcactttctttttgaaatatatgttcactgggtaaataaatacagggaaacaggttttattttggcttttcaatgatacagatataattggatgaaataataattttgctatgtttcattttgtttagactctttcaaaattcttatttttaaagtattttaagatttttctactaatttattatgactgtcattttgttttggttatttttggttaattttatatttttcttaacyatgagttgtatttctctgcctttttgaatgtcaggtaattttgagtgcatactagataatgtgaatttaccctgttgggtgctaaatatttgctttgctaaataaatattcttgagactattgggggattcagttaagttacttaaaaccaattcgattctcttgagtatttatgctttgcttatgcagtgttcactttgtctctggctaattttttgtgggtaccaaagta

SEQ ID NO: 894741 - DNA, 622 bp, Homo sapiens
caatccatgtagctaccattgacagtactctttatatatccaggtttctatctgctaccattttcttctgttttaaggactccttaaaatatactatagtgcatatccactggtgatgaagtctttaagtttttatatattaagcaaagtttttcactttctttttgaaatatatgttcactgggtaaataaatacagggaaacaggttttattttggcttttcaatgatacagatataattggatgaaataataattttgctatgtttcattttgtttagactctttcaaaattcttatttttaaagtattttaagatttttctactaatttattatgactgtcattttgttttggttatttttggttaattttatatttttcttaaccatgagttgtatttctctgccyttttgaatgtcaggtaattttgagtgcatactagataatgtgaatttaccctgttgggtgctaaatatttgctttgctaaataaatattcttgagactattgggggattcagttaagttacttaaaaccaattcgattctcttgagtatttatgctttgcttatgcagtgttcactttgtctctggctaattttttgtgggtaccaaagta

SEQ ID NO: 894742 - DNA, 622 bp, Homo sapiens
caatccatgtagctaccattgacagtactctttatatatccaggtttctatctgctaccattttcttctgttttaaggactccttaaaatatactatagtgcatatccactggtgatgaagtctttaagtttttatatattaagcaaagtttttcactttctttttgaaatatatgttcactgggtaaataaatacagggaaacaggttttattttggcttttcaatgatacagatataattggatgaaataataattttgctatgtttcattttgtttagactctttcaaaattcttatttttaaagtattttaagatttttctactaatttattatgactgtcattttgttttggttatttttggttaattttatatttttcttaaccatgagttgtatttctctgcctttttgaatgtcaggtaattttgagtgcatactagataatgtgaatttaccctgttgggtgctaaatatttgcyttgctaaataaatattcttgagactattgggggattcagttaagttacttaaaaccaattcgattctcttgagtatttatgctttgcttatgcagtgttcactttgtctctggctaattttttgtgggtaccaaagta

SEQ ID NO: 894743 - DNA, 641 bp, Homo sapiens
tctccatcaagtcatcttcgtttaattcctctggtgtagtaactattagatcttctatttctccatgacctatatcatggcattcttcaccaaaccccattgtttttgctatattcacatctttcatgatttcctcgattggctttttataaattctgtgaagtcatgcacaacatgtgaacgtagttttctctagcaggaatttactgtttaaggcttgattactttcaaggctgtttctataccagtaatggcatcttcaaaagtgtaatccttccagacttttttttttattattatactttaagttttagggtatatgtgcacaatgtgcaggttagttacatatgtatacatgtgccatgttggtgtgctgcacccattaactcttcatttaacattaggtatatctcctaatgctatccctccccgctccctcaaccccacaacaggccccagtgtgtgatgttccccttcctgtgtccaygtgttctcattgttcaatttccacctatgagtgagaacatgcggtgtttggttttttgtccttgtgatagtttgctgagaatgatggtttccagcttcatctatgtcgctacaaaggacatgaactcatccttttttatggctgcatagtgttc

SEQ ID NO: 894744 - DNA, 634 bp, Homo sapiens
cattacaacgaaatttattagagtcttaagagttaaaagatgaattgttttcaataaataaacttgtatgtagattaaaacattagagttcactagaccttattgtctcaaaaaacatttctctcacattagactttcttcttactttaaaaataaaacttttaaaccaacaatgtyaattaggctttatctgagccccaaattctttaaaaataatcagtaattttaaatttaaagatttttttctgtcccttttttttccttagagggtgatttgtatttaatgtaatatatttaaaacatgtacaattatgatatttccctaattccaatgtttacaacagcaaaataatatttttgtgacaattgcaaatgactttttgtgaattctgcctgtaccttatatctgggaactatctactaacatggaaatgtagagaaagccaacaattttcctagaaagatagacttattcctgtcacagtgaaggtcacacgtattcccaggcctgttgaacatctgaagacagagattttgaagacagattgcttttttccctctgcgtagcattttgaaatatttctaagtgaggataaaatatgacaggcacagaagtgatttcaaaaaaaaatgg

SEQ ID NO: 894745 - DNA, 595 bp, Homo sapiens
gttaaaattatctaaatatacatgtatatcatccatagagaagaatattaacatctccttttttgcaaagatcttacagttcaaaggtaccaccgttaagagtcttgaactattgctaccaccaaaattaattgcctattcatttctgttgcattaaatgtctcctgttaacattaacctgattctgtcaccaacattttacatatttatttaaatacacctgaggaaatatgctgaatgtaatttagggtcatgtggcataggatattcatttatttatttttcccccatagtaaatcctaaagaaayaattactgggtgggttatgtttaaactaagtataataaatgtgcaaatttcaaatgttatgaaagctgaaagcaaagcttctatattgtggtaatagctctaatgtgccagaatgacacatggaatattgtgacagagtatagagctggcaggtaatacaatttctcaaagaatttaggttacaaagccctctgcaaatcacgtataagtacttagttcggaataatatttattctgaatcaatatttaagcgataaaataaaacattaatacacaaagagaggtt

SEQ ID NO: 894746 - DNA, 584 bp, Homo sapiens
aagctactgaaaaatatattttatgcattacaacaaagttaaactttaataatgaccctgaaaatagtggtagagtgaatttaaacatttgaaaaatattttaaggaagcaattatagaataaataaatagtaaaaaatatatttttgatttgaaattcaatgttcatctatacatgtatggtatctatctatcaacattttcatgaaactgcctatcaaaacaaaaaggacatagctcatataagagttagtgaaaaagatagaattgttgagcccagttaaaagtctgtaagttaatatttgagaataaaacatttcttgaaawccatgttgaaatattctttggatgaaggtttcttagtcacactagactttaatcacactagacttcaagttcctttaatgaaataacaattcctctttcaagacatttacacattatttattcaatcagaaaactgtccttggcatattttgccaatctaacttatgctcatttttaaagcatcaacttaatcaattattccttagcagaaactgaagtggccccagtgaaatactcttctcagcaacagttcaccta

SEQ ID NO: 894747 - DNA, 654 bp, Homo sapiens
ttcttacagtcctgaagcctgaaagtccaagatcaaggtgccagtatggtcctattttggtgaaagttctcttcctggcttgcagatcatcatcatcttactgtgtcatcacatgctatggagagaaacaaaaaggggaaacactctggtgtctcatattagggcactaatcccatcataagggcctcactctcatgaagctcatctaatcctaattacctctcaaaggctctgtctccttagaatattgcagtggtgattaggatgttaacatgaattttaggggaacactaccattcagtacataacagayctctaaagcttcaggatctctttctgtattttaatgccttataaaggtaaagaattaggaataacccattagtttcaggagcttacttaatctcaatcctgtttaaatcactactaaacatatcttatacttgatggatctaagaccctgcttgtaattatacagcgtccctccttttctcctgaggactcactcttattttgaggaatctcaacttaaactttgtttcaatttgtcctgataatttttattctttacttttgataacatatatattttcaaaactaaagacaaccttctattttaccctttaaatacaatttaaaatgagtacaatttaa

SEQ ID NO: 894748 - DNA, 430 bp, Homo sapiens
acactgtcttccacaatggttgaactagtttacagtccaccaacagtgtaaaagtattcctatttctccacatcctctccagcacctgttgtttcctgactttttaatgattgccattctaactggtgtgagatggtatctcattgtggttttgatttgcatgatcaggaatgtaatgttctgattccattttttaaatctgacagctgacagcttttaattcccactcttttctcttctctgctttctrtaactatgaaaacaaataagaaaacctgattactttcttctttggtgccaattagaatctctgtcctatgcagacaccagatcagccatgggaaccctcactgtgctctcatactccaaccacaacaacagacaatgccaattcttgtctttcaacccagttttagaccttgctctttcg

SEQ ID NO: 894749 - DNA, 498 bp, Homo sapiens
aagacatactgccctcttttgaacaaagtaaaatttcagggaaaaacggtttttttacaaagcaaaatcagagtgcatagaaaaaataaatgcagagatgatggtaaacaaagaagattaacttgcacattttataaagattttaagaatgctgaatttgattttaytttctcaaacttttagtatgtgtgtttgtttactttcatgataattcttaaatgcatttgaacacagtttgcagtttaaagaatatatctatacatatggaaacccttgtcttaaagatatctaatgattgttttaagtaataaaaactctgatattctctgcagattccacctgaagtaatttattaccattttgttattgctattattcacctctatgaatgcttttttacttgacaagtctgtatccgtagtttagcaacgaggccagaacaataaatctgtcactgtgtgatacactctgggtacaagtttatgagattgtctccat

SEQ ID NO: 894750 - DNA, 621 bp, Homo sapiens
ctgaggtcaggaattgaagatcagcctggccaacatggtgaaatcctgtctctactaaaaatacaaaaaaaattagccgggcatggtggcgggcgtgcctgtaaacccaactactgaggcaggagagctgcttgaacccaggaagcagaggttgcagtgtcctaagatgatgccattgcactccagcctgggcaacaagtgcgagactctgtytcaaaaaaaaaaaaaaaagaaaagaaaagaaaagaaaaaagacagatggaagtcaggaaattttacatgcagaattttttacctaaaatttaaaaaatgaatgatgccaaggtttatatcaatttgaattatacctatttccactcaaatgtattaaataaaagagaaagataaaaaacttaagcaagagaacacaaactttatattcagaaaggtaaactacagctgtctttgacagttttaactacaaaattttataataaccacattttcaaaagattaggtgtaattttatataatacataatttattagtcacaatttataggctattagaagtttgacatggataagtgtactaaaagcattttgaagttgcgaaaatcaaaatatcatgtccaccttatat

SEQ ID NO: 894751 - DNA, 591 bp, Homo sapiens
tctagagatattttccctaggttttaaaacatcgttgaaaggtagcttttattgtcaccatattaccaatgagaatgtagatccaacaactagatccaaaagtttggaacttgtttccaaaagtttgagttgtatcacaatacatcatacaatgttcatttttcaatatcagacataaatatgctcrtgtatatttttgtctaaattatgttgtattatttgcttcacaagttcttgttgccatctggatcattaacagaaaacataagacagttgcacaagtaaattataatagttttgaattgatttgcagattcagtgatatgctttgggtcaccatgtaaaataagtccgatgtcaccaacaagcaagagagaaatggaacactaagctggaattttcacaggaaattataattataatcttaaaataatcactgagtacttttccctgttctattgaaatatatttaactctaaataaacaaaccaaaccgaacgagacaagggtaaattttgtgatacagctatactacttgatttccatttgcttatttactcctttatttattttttatttttatagatgtaa

SEQ ID NO: 894752 - DNA, 597 bp, Homo sapiens
aagtaaccctctgtataaacaatagatcctggtttgtaatcccagcactttgggaggccgaggcaggtggatcacgaggtcagtagatcgagaccatactggctaacacggtgaaaccccgtctctactaaaaaatacaaaaaattaaccaggcttggtggcaggcacctgtagtcccagctacttgggaggctgaggcaggagaayggcgtgaacccgggaggtggagtttgcagtgagccgagatcaccccactgcactccagcctgggggacaaagcgagactctgtctcaaaaaaaaaaaaaaagatcctggtgatgatgatcactcatagtactatgggctgtatgaattgtatggaccatttaggggcacagtgagaaggtgggtacttgcaagtcaatgagagaggactcaggagaaaccaattctgccaacatcttgatcttgaacttctaaccttcagaactgtgagaaaataagtgtctgtgatttaaaccacccagtatgtggtattttattacagaaatactagtatactaatattgtcatgttaatcactcttgtattaagatgaaaagaaaacatttaaagct

SEQ ID NO: 894753 - DNA, 580 bp, Homo sapiens
accttaaaagataatttcaaaaccgtatataagagaaatatttaacactttcaacctatcagaaattttaaatgtatttgttctttggaaaaatatttagtgtggccaggtacggtggctcattcctgtaatcccagcatattgggaggcctaagcaattggatcacctgaggtcatgagctcaagaccagcccrgccaacatggtgaaagtccattcctactaaaaatacaaaaaaaattagccgggcttagtggcaggtacctgtaatcccagctactcgggaggctgaggcaagagaaccgcttgaacctgggagtcagaggtttcagtgagccgagaccatgccattgcactccagcctaggcaacaagagcaaaaccctgtctcaaaaaaggaaaaaaaaaaaaaaaggtaaggaaaaaaaagaaaaatatttagtgaggcctccaacatgccagatagtagtctaggagttgctattaaggtggtaataggacagaaaagcactctaatttctggaggtgatttctccaggggcttgtacggcaataggtttttcaagaaggtgtttgtggaaa

SEQ ID NO: 894754 - DNA, 632 bp, Homo sapiens
agcttgcagatggcctattgtgggacttcaccttcttatcatgtgagtcaatactccttaatatattccctttctatctgtctatctctcccatttatcctattacttctgtccctctagggaaccctgactaataaatacaacaggaaagacggattacacgttagaaaccagcaccctgcaaatatatcatgtgttttctcacattactcaggcctttttcacttagaaggccaagtgaatagttatgagttaaagtgacatgtgttactttgagaagcctagagtaatcagcacytatttcttaaacagttttttcctcaccttcacaattaaaaactgcatgtattccaggttatgctactacaaaataatggcatatttatcagcctgagtataagagattttgtttctattgctgtgcaacaaatttccacaaacttcatggcttatagcaacacatgtattttggttatttactcttttgtttgtgtatatgttaatttgttttatttttatcatagcatccatgggggaaaagcttgcataggtcttacctgagtcctctactcagtatatcactctgactatgttgaattttatcacacactttttcatcctctattgaaata

SEQ ID NO: 894755 - DNA, 632 bp, Homo sapiens
agcttgcagatggcctattgtgggacttcaccttcttatcatgtgagtcaatactccttaatatattccctttctatctgtctatctctcccatttatcctattacttctgtccctctagggaaccctgactaataaatacaacaggaaagacggattacacgttagaaaccagcaccctgcaaatatatcatgtgttttctcacattactcaggcctttttcacttagaaggccaagtgaatagttatgagttaaagtgacatgtgttactttgagaagcctagagtaatcagcacttatttcttaaacagttttttcctcaccttcacaattaaaaactgcatgtattccaggttatgctactacaaaataatggcatatttatcagcctgagtataagagattttgtttctaytgctgtgcaacaaatttccacaaacttcatggcttatagcaacacatgtattttggttatttactcttttgtttgtgtatatgttaatttgttttatttttatcatagcatccatgggggaaaagcttgcataggtcttacctgagtcctctactcagtatatcactctgactatgttgaattttatcacacactttttcatcctctattgaaata

SEQ ID NO: 894756 - DNA, 582 bp, Homo sapiens
ggttaaattcagaatattttaatatttttataattattctgttttttactacatgtaaaatacattgtatacaattgtataaaacataatctaagaaactgaacatccaacagatttcccttcttcttattttacaggttttgttttgttaacgttggttcctgcaaaatctatattttgaaatgctttatttaatactttgggttcttgggccaaactaaaactgaaatagcttcttttaaaatacattttattgcaatataatattatattgaaaatatgatcacrtagaaatatggagagcttcccaatttatttaatgggctagtataagtccaatattaaaaaacagctggctcaaaaatgaaaagtaagaaggatataactttcttattgtatatttgcaaatagaatttatcactgtgttaaaaagattactgtgccattagggtttctaatgtaaaatggtaatttcacattagaaaacttattatctaactcagtagattttaaggaaaaatctattaatcttttggggttacaaaagccaatagaagcaacaaaaaaataaagtttgatgca

SEQ ID NO: 894757 - DNA, 578 bp, Homo sapiens
aattattcaatgtaggggactaatctacaaaacttcacataaagcaataattcccaatgcagatttagtggctgtttatttatgtctgtgttgagattctgaacttctatcacagtttgtcttactctgcagcttttttggtaaccaggcttctttgtcttaactctgattttgtaatttgacttaattttcctataggatcccatcagcatttaayttaccagttttcccttggttttcaacttcaataagattcatctttaaaaaagtaatttctttcagtctggaacattagcataggataaagaaaaaaactgaaaatgtcttatgtcctcaaaatcataacatgtggtaattttaatgatgttaaatatatattatcatacattggaagggctttaattcatgaaaattggcaggttgaccacaattatgtagttaaattctatttaaaataaaagggtcatatatgatacctcaaccacttttatcagttccctactctgttctcctttccccactcagttcaccaagcaaaggtaatctgaagcaataaagcaacactacagtcatcctac

SEQ ID NO: 894758 - DNA, 658 bp, Homo sapiens
ttgaaacttttgagtgggtgagatctagatgaaattttgcacctttagttgatgttgtaataggttgagacttttgaatatgtttggataggtaaatagagtttgcatgtggaatgaatgtgaatatttggaggtcagaaggctatgtgtgaaaaaaaagtgccccttgtcccccaaaagatctccctgttgtaacccttgacattttttaatacattaacttacatggcaaaatggactttgcagatatgaataagaaagtatcttgagatgggaagattatcctggattatctgggtgtgcatggtataatagaaaacctagtgtaaaccaaagagggtggcagaaaatgasagtcaataggagatgcgaagatggaagcagagatcagaatgatgaaagaaaaaatacaggagactaggaatgcaagtgacttttaaaatctagaaaaagcaagtacactaattcttccctacatattgtagaaggaataaaactttgcttactcattttaaacttctgaccttcagaactgtaagatgataaatattaatatgtttagtttcactataaagagtttataatttactatagctgcaataggacactaatacaacttacacttcattacttatacctcatggttttgatgatcacc

SEQ ID NO: 894759 - DNA, 645 bp, Homo sapiens
ttattccaattacgtttacatttccaaatcagtgaatgcagttcccactgtaaggtctgacctacagagaagaacaataacagcttttcagtggagctagaacacccctcaaatatttgttttttacaattgtaatgaaaggtatgttatgatgggtaaatgggtcttaaataaccttaaataaccagagtaggaaggcaggtcttaaatgacaaatccactctaacattccaatctcattaagtccttgaatctctcctctctattaaaccaaggcaggtctgggcatttctcaggtaattactgggggctaccttttgatctatgttttgtctaatcgacatccccccaaaataaatctggtggagcctcttctatttccttgagctgcaacgttaaatgcagaatctctgcttagtgggcccataacaataacgtcggcctgatccaactttaggtttcccccaccaytatcccacactcttaatatctactttcacacctatatcccagatttctgtctgcataaattagaaaactcaggtagttcttttgaagtgtagcatacttcttcgtaggtcatactttttacctcacctttaggggactgctggaaactgagtctagttgtaggtcaaagtgcaa

SEQ ID NO: 894760 - DNA, 639 bp, Homo sapiens
ctggcatatttttatatattatggatattgaaagaggaaataagttgtattaaattttggcaaggaggaaaataagatgttgaatacaaagattctctgaggagaatgtctactgataaataagaaaaccgtaaggtgaaaagatgttgttaagggaaataaaatcaaaggcccactcacrctcttcaaaatgtcactaaaacatagcggtattcatcctcttcctaggtaatttaagccaggctaatctacttacagaattatggatcgttaaaataaattgccagtatttgccaattttcaaggtgaccaaagaggactcagtttgtctcctgttgctctttttgtccttgaggttgtatgatgtctctaagtcttgattgttcactatgagacccagtcccagccccttcttcactgctgatattgttctcctcatatgttcacatttgatgggtagatataaaatataatgctgcctgcataagccactcctggtggtttagacctagtggaggcaattaggtaggtagcattatattttcctagtagaacttttgtgcacctcagtgattcctaggagagaatctagcattactactactagcaaattaagaaaaaaagcaatataaggacaga

SEQ ID NO: 894761 - DNA, 667 bp, Homo sapiens
taaagaaatccatgaattagctctatcatttcactttgtggcactttcgatgatacaaaataaattatattaaggtcacttaacaatttcttttctcaaggaaaagtcaatgaagttactgtaaccactcaatgcgttcagtttacccacatcctagacagagtcaatttatcaagactggagaattgcaatagagaaagagtaattcatgcagaaccagctgtgctagagaccagagctttattattactcaaatcagtctgctggagcattcagggatcagagtttttaaggctagtttagtgggtgggaagccagtgagtcagcagtgctaattggttgagtcagagatgaagacataggaagtctaagctgtcatcttgtgctgagtcagttcctgggtagggggtcacaagatcagataagcgagttgatccatctgggcgatgccagsttatccatcaagtgcagggtcttgaaaatatctcaagcactgatcttaagttttacaatagtgatgtcatcctctggagcaatttggggagggtcagactcttgtcgcctccggctgcgtgactcctaaaccataatttctaatccaaattctaacaaattttggctaatttattagtcctgcaaaggcaatctagtccccagacaagaaggg

SEQ ID NO: 894762 - DNA, 657 bp, Homo sapiens
ttctggctttttttattggtagcaaacgttaacataatttgaaagacaatagtataaaaattacatgttggcatatatatttaatggttgagatatttacttttaatttctagcaatttcagagatgtatagcaaattgaagacgtttttctccattgtcctttcccttgatttctgcttttttaagtgttcccttatcaccaaagtttccactattgttttaaaaatatctgatattaattcaaattaattattaatgctaaccaattttgccttgcagaagtgtttgcattttaaaaagaaacgcctagaggaagattgtcaaatttcttctcaccttttgaggggcaatattttagaggatggatgacctgcaatacaagccttaagaaactactgctcccattgtcgtcaaggctagctgtgagactaatgccagcaagtctttgcacaaaaacaaatgagctcttaaagagatgattgaatgcatgtgggatccattactcaatragaagcttaagtccaaatcagtctggggctaactggcctttgcagttttactatagcaggggcaacatggtgtagtaaaaaaggcctgaagagtaagtgtaattttgtcttggtcacttattggcctcgtagtcccaaaaaattaac

SEQ ID NO: 894763 - DNA, 567 bp, Homo sapiens
tgcaatctgttgtgacagaaggtagaacagttcttgcttgtggaagaggggagcggataaaggccagaggtgggaattaccaaagggcactagaaaacttacatgtgttatggatatgtttattatcttgattttggtgatagtttcatgagtatacacataagtcaaagtaatcaaatcatacattataaatatgtgcatcttatagtatgtccattatatcttgtattattgtacaacataaattatacatataaaataccaaaagtatgtagacaaactgataattatttttactaaggttaagtaattatttgtgaactacttttaaagtgaagctggtgccatttggggatcagatgttttaattcctaattttaatccttgaygatagagcgtaagtgcccatgtggactcttcccggggggagcccacaaaatagtcagaaaagtactggctctcttacatagtgcctgagtagtgtactgcctttatagtttgctcagctcctttcatctgtaatagtccacatggaagacaacatagaaccactggaatccctaaatg

SEQ ID NO: 894764 - DNA, 633 bp, Homo sapiens
ccatcaatcagtgggtgaataaaggcattgttttatatatatacaccatggaatactattcagccattaaaaaaatgaaataatgcatttgtagcaacctggatggaattggagaccattattttaagtgaagtaactcaggaacggaaaascaaacattgtatgttctcactcataagtgggagctaagctatgaggatgcaaagacgtaagaatgatacaatggactttgggcacttggggggaaagggtgagaggggaatgagtgacaaaagactacaaattaggtacagtatatactgtttgggtgatgggtgcaccacagtctcacaaaccaccagtaaaaaacttatgtaaccaaacaccacctgttccaaaaacctatggaaattaaaggaaaaattgcttgttgaatgaataaatgagtgatttttttgtttgttttctaaaggtataggctggaggtcaggaaccaattatattttctgggtatttttctgtgcatctaacatgatgctaagtatatggaaaacactactgtagattattagaataaataaatgtatgaattctgtttctatgggtgaatgaatgtgtctgtgtgtgtgagaaagacaaagacagataaaggca

SEQ ID NO: 894765 - DNA, 633 bp, Homo sapiens
ccatcaatcagtgggtgaataaaggcattgttttatatatatacaccatggaatactattcagccattaaaaaaatgaaataatgcatttgtagcaacctggatggaattggagaccattattttaagtgaagtaactcaggaacggaaaaccaaacattgtatgttctcactcataagtgggagctaagctatgaggatgcaaagacgtaagaatgatacaatggactttgggcacttggggggaaagggtgagaggggaatgagtgacaaaagactacaaattaggtacagtatatactgtttgggtgatgggtgcaccacagtcycacaaaccaccagtaaaaaacttatgtaaccaaacaccacctgttccaaaaacctatggaaattaaaggaaaaattgcttgttgaatgaataaatgagtgatttttttgtttgttttctaaaggtataggctggaggtcaggaaccaattatattttctgggtatttttctgtgcatctaacatgatgctaagtatatggaaaacactactgtagattattagaataaataaatgtatgaattctgtttctatgggtgaatgaatgtgtctgtgtgtgtgagaaagacaaagacagataaaggca

SEQ ID NO: 894766 - DNA, 623 bp, Homo sapiens
tgtggtccttcatcagccaaaatgttatgtggcacatgactgtaataccttttcttacactccaagagaatgccagaagaaactcatttaaaaatctgaatttttaaaagcaatttgaagtcagatttccttttactttaggatgctaacatgttaattctttcaggattagaatagaaactacataattttacatcaatagactctacaccttgttgcttaatattgatttaagaaattcaaagcaaatataaaagaactaaaaaggttagtatgtgtaggcaacagaaagctgatatttgtaacagacatgatttgctatctctgaaaggctttccyccatgtctccctagctggcggaggtgcagtgtaggtaaagtgaccaccttcaaccttctacttggccatgccaagggaggttaccctatcctcagtcgtgataaagctcatcttggcaattgcattgctcttgagaataattaacctactaatagacgtgtgactttttttgctatttaaagaactaaaaccaagcagccctttgattaaaaacataaatttgttgagaataattccttttcctgccccttgaataaggctctgaaggaaagtaaaggctagag

SEQ ID NO: 894767 - DNA, 624 bp, Homo sapiens
ctgttctgacctcaaccttacttccatagaggcctcatttcctagcacagccacactgagagttaatgtttcaaaatataaaattttgggagacaaattcagtctataacaagagctcctttcagttctataaatgttactttatttattttgaagctttattactgagaccttaaaattttagagttgtagagcacagtaacctcagcaagatggtgaactaggaagctccaggctctcattttctcayagggataccaagttagcaaataaatacagagaataacaactttgcaaaaactctagagagaccagttaagaagttgttagacccagttcaatgtataaccaagaaaggattcccgtgaaagaggcaggaaaatgtgcagcatttcgcaaaaccatatatgccctacctttcttcagcctaacacactccaatctagaggaaaccttccacaccagggattctccctttgaacagaaataaaagagtgggccattgttctgactagtctggggctccccaaagaactggtatctgtctcacctgactcagaacaatgataaggctgtagatctttttggaagtctatgaaaacaggcacaatgaaggcagcatgt

SEQ ID NO: 894768 - DNA, 648 bp, Homo sapiens
agaaaatatcaacagaccaataattagtaaggagaataaactagtaatcagaaacctcccaacaaagaaaagcttaggaccaaatggctttactggagaattctaccaaccattaaaaggataattaagaccaatcttcctcaaacttttaaaacaaatgttaaagaggaggaaactctttcaatctcattcatmaggtcagcattatccttataccaaaaccagacaaagacactattaaaaaaacttagaccaatatccctgatgaatttcgatgcaagaatcctcagcaaaatactatcaaacaattcaacagcatacttaaatgattatatgctgtaatcaagatgcatttattctttgaatgcaagtgtaattcaacacataaaattcaatcaatgtaatacaccacattaacagaatgagagacaaaaaccacataattatatcaactgatgcagaaaaaaatctgacacagttcaacaccttttgtgataaaaacactcaacaaactaggaaaagaaggaaacaactttaacacatcatatgctcactgatgaaaatctacaagttctttataaaagatcaggaacaagacaataatctgcattgttaccacttctattatacgtagtattggaagttcta

SEQ ID NO: 894769 - DNA, 648 bp, Homo sapiens
agaaaatatcaacagaccaataattagtaaggagaataaactagtaatcagaaacctcccaacaaagaaaagcttaggaccaaatggctttactggagaattctaccaaccattaaaaggataattaagaccaatcttcctcaaacttttaaaacaaatgttaaagaggaggaaactctttcaatctcattcataaggtcagcattatccttataccaaaaccagacaaagacactattaaaaaaacttagaccaatatccctgatgaatttcgatgcaagaatcctcagcaaaatactatcaaacaattcaacagcatacttaaatgattatatgctgtaatcaagatgcatttattctttgaatgcaagtgtaattcaacacataaaattcaatcaatgtaatayaccacattaacagaatgagagacaaaaaccacataattatatcaactgatgcagaaaaaaatctgacacagttcaacaccttttgtgataaaaacactcaacaaactaggaaaagaaggaaacaactttaacacatcatatgctcactgatgaaaatctacaagttctttataaaagatcaggaacaagacaataatctgcattgttaccacttctattatacgtagtattggaagttcta

SEQ ID NO: 894770 - DNA, 565 bp, Homo sapiens
tttgaggatgaattctcttctcctagtaaagtatatccaagaaacaagtgtacttttagagttatgctaactagttacagtacttgatgagatgttttcattagagttcaataaccctatctggtatctcttccagaagacaagatcttaacatttcagaccatgtaagcattatttaggaggatgttgaagaaatactgtatgtattgatgatgattaggtgcattttatgagttmtttgcagtatcagaggatgtctgcttgaatttgaccagaatgtagaatcagagtaaatttctaggtgtaagaggcagtctgatttcaattcagaatggaagaacaaataagatcctaaaaataggcaatttctttgtcattaaaaacaatgccaatactctttggattcccataatgtctgaaagctttgttgatgttttagcttaagaattaattgttccttctatcatttctgaagattgggataatatgggcagtaaagtttctgaataagcagcaaagtgttgaaaatcttgttagtgacagtcccagtaaaatgggtatctct

SEQ ID NO: 894771 - DNA, 565 bp, Homo sapiens
tttgaggatgaattctcttctcctagtaaagtatatccaagaaacaagtgtacttttagagttatgctaactagttacagtacttgatgagatgttttcattagagttcaataaccctatctggtatctcttccagaagacaagatcttaacatttcagaccatgtaagcattatttaggaggatgttgaagaaatactgtatgtattgatgatgattaggtgcattttatgagttatttgcagtatcagaggatgtctgcttgaatttgaccagaatgtagaatcagagtaaatttctaggtgtaagaggcagtctgatttcaattcagaatggaagaacaaataagatcctaaaaataggcaatttctttgtcattaaaaacaatgccaatactctttggattccyataatgtctgaaagctttgttgatgttttagcttaagaattaattgttccttctatcatttctgaagattgggataatatgggcagtaaagtttctgaataagcagcaaagtgttgaaaatcttgttagtgacagtcccagtaaaatgggtatctct

SEQ ID NO: 894772 - DNA, 629 bp, Homo sapiens
cactgagagaaccatgttctcaccacaaaaaattttgtaagtatatgaggtaatgcatatgttaaattgcttgatttaaccattcttcattgtatccatatatcaaaacacaatgctgtacaccataaatatatacaatttttaccaggcattttaaaaattaattttaaaaactgagagcagatttggaaagttaaaaacagaaacatgtctgcatttattctgaaaggaaagagaagtaaattgttaagtatcacttaactaagaaaaatgagaaagcctttcaaagagcaaaagttttaattttttaatctgctctttttctgccctctctggttttaatcaaatattttaaatgattccattttctatcctttcagcatttaaaattatgctttattttttgaatattttagtgtttgttctagagtttgcaatatactctaaatataaagctaatctgtgtatactttcaaataatactatattmttttacagttaatgcacacaacttatagcagagtattaccatttcctctcccttataacaatgatgtcattcattttatgtatacatattctataatcaatatataattgtgattatggctttgaatgcaaatttatct

SEQ ID NO: 894773 - DNA, 623 bp, Homo sapiens; identical to SEQ ID NO: 892400

SEQ ID NO: 894774 - DNA, 510 bp, Homo sapiens
agatatttgtggggcaaaaatgatatgctaatccaaaacaaaaaacctcaaggaaacagataaaacacaaaaaaacaaaaaagaacttagaaaaatgctaattagtcctgtcagagaaattaaaataaaatgacaayttacattttgtatggttcaaggcttagtcagtactggggccctttgaaaaatataaaattagaaatatacaattaggtgcaaaaataatatataaaaaagtcacaatttaatttactggaatcttagagattccagtcccttttttctgagatttatttagctagaaaagctttcatagaaatgcttcttgattttaagctattatttacctttctacttagaagttctacaatttccagcaacttttggtactagagtatggggccacctgcctcatggtaaatctactatgccaaaaaaaaaaaaaaaaaaaagaaaggatttagaaaacaagaatgagatctttaaaaatgtaactgccaaaaaccatct

SEQ ID NO: 894775 - DNA, 614 bp, Homo sapiens
tttctttaatcttttttctccacatttttcagattgaattatttctgctgctctttcttcaagttctcttaatttttcctctgctatcttaaattggctgttgaagctgtcaagtaaatttttatttcagttattttatttttcaactctggaatttacatttttttatatgttctggttccctttctatatttcctatatgttaattcatcatcatcatattttcctttcattatttgaacataattyccttttaagtctttggacatatatacaaaacttccaagttttgtatataacttgctcggaagtccttgtctataacccaaatcatctgggttcactcaaagcagtttctattgttgactgcttgctttttaagtaactgagtatagaatatattttcctgtttctttgcatatcttgaaaattttgttttaaaaggtaaacatttttaaatattatattgtagcaactctggattctgttttatttttcttaggattgtatttttaataactctttttaattacttacctaaacaaactgtgaaatcactaatgtctctgctgttttttaattatttttgttttttaggctattttcctaaaggt

SEQ ID NO: 894776 - DNA, 534 bp, Homo sapiens
aggctctacgaaaacagattacaactcagttacttgaggcaatcaatactgtccaatactgtcaagatttggactcagtatcctattgctactgtaaaacaaattaccacaaattttatggcttagaacaagacaaatttattttcttacagtctgaaagtcagaattctaaaatgggtcaacagggctgtgctccttctggaggctctagtggagaatctgtctcttgccttttccagcttctagaggctgcccgccttccttggcttgtggcccccttccatccttaaagcaataaccaggcaagtctttctcacatcacattactctgacataaactcttgctttcctcttccacatttaatgacccttgtgatcacamtgggtcacccaaataatccaagataatctcttaatgttaaggtcagctgattagcaaacataattttatctagcaccttaattctcacttgccatgtaacatgacctattcccaggttccaggaagtaggagttagacatctttgaagagtc

SEQ ID NO: 894777 - DNA, 625 bp, Homo sapiens
cttacattatgtttacattacatatttcaccacaataaaaaatttttgaaggaaaaccagaactttaatgacaaacttaggacatattatgctctgaatatatagttttgataacgtctttcctggcaaatcaacaaggtaagaataaaaggatattctgaaatctttttttttctttggagacagagtcttgctctgttgcccaggctggagtgcagtggcacaatctcggctcactactaccttctgcctcccaggttcaagtgatcctcctgcctcagcctcctgagtagctgggattataggcgtgcgccaccacgcctagctaatttttttgtatttttagtagagacggggttttaccatgttggtcacgctggtctcaaactcctgacctcatgatccgcccacctcggcctcccaaaatgctaggattacaggcatgagacaccrcacccagccagatattcttaaatcttatgctcacactccaccccccccaaaaaaattgtccttcaggaaagcataatttaaggaaaaatttcccaaagtgccaccttcagcttcattcttagcaccagaggaagaattgcctgtcatataatgaaagatccttggtgttatc

SEQ ID NO: 894778 - DNA, 670 bp, Homo sapiens
agcatgaacctcaggttcttagcaatgtttctgtgcaagatttcaaacaccataatggttatcaaccccgacagatagttttattacctgaaagtatttatttttaacccacgataaagttaacttgttaacaaacttgtgctaaagtaaaataaatatattaattatgtaactttgtatcatttataaatatggagaaaaactcaacttttatgaattattagtgactcttatcctctacctaacaccctaacacatcgttcagattactcatatttatagcagagcagcaggaactgggctttcatcttaccagcacattttgattcatggacatgcctgakatggtatcagagcaatgacctgatcagtcacaaggagaaacctgcaccatacctgtccattgtgttcccctcctgctgacactactctgtgcacttttcagaagctcttcttaacatctgaggactacaaaagtgggatcacttctccattataaattcaatgcaaccatattacactaaaaataagtacagacccaggccttgaaggcaagtagcaacatgtacttcttcatctatcctacctaaatgtctctaaatgtctgttgaactccagtcagaatgcctaggttcaaatctgggctccactatttcctaaatcagtaacc

SEQ ID NO: 894779 - DNA, 641 bp, Homo sapiens; identical to SEQ ID NO: 892522

SEQ ID NO: 894780 - DNA, 621 bp, Homo sapiens
tcagtttcctggttttgataatggactatagttacgtaagatgtcactggtgaggcatgtgggtgatggatgcatgagacctctctgtactatttttccaagttcttgtgagagtacaattatttcagaatataagtttaatagcccactatcttttaagtttaaacaatgatgtggttcagagaacactcatggcttccctgctcagccatcaaagagaattgtgacttactgaatataacaataacctcaaagtcacaagtcacagttatgtgttttggctgtgctacttataatgcatgtgacacaggccagtaagttactcaaattttaagtttgagctttttcayttgtaagatggaacaatcgtgacactcaaaagatgaagaatgagtttttttccccattaattgtaaagtaccaaagcatcataatttgagagccataacaagattgggcaaattagaaaaaatgctgccacgtataattcaataacaagtgtccaattattacaaaactataccctaagtcaggcgacattcctccagtcttacaagtatggagaggtaagaactgattcaattgctaaggctagtaagctagttccagcctgacagtttc

SEQ ID NO: 894781 - DNA, 621 bp, Homo sapiens
tcagtttcctggttttgataatggactatagttacgtaagatgtcactggtgaggcatgtgggtgatggatgcatgagacctctctgtactatttttccaagttcttgtgagagtacaattatttcagaatataagtttaatagcccactatcttttaagtttaaacaatgatgtggttcagagaacactcatggcttccctgctcagccatcaaagagaattgtgacttactgaatataacaataacctcaaagtcacaagtcacagttatgtgttttggctgtgctacttataatgcatgtgacacaggccagtaagttactcaaattttaagtttgagctttttcatttgtaagatggaacaatcgtgacactcaaaagatgaagaatgagtttttttccccattaattgtaaagtaccaaagcatcataatttgagagccataacaagattgggcaaattagaaaaaatgctgccaygtataattcaataacaagtgtccaattattacaaaactataccctaagtcaggcgacattcctccagtcttacaagtatggagaggtaagaactgattcaattgctaaggctagtaagctagttccagcctgacagtttc

SEQ ID NO: 894782 - DNA, 644 bp, Homo sapiens
gtcatttaatttttcttgtagaacattttgtttttcctggagtttataattgtgttattttttagtttgtttgtaagtatgtttatttagatactgagaaaaaaatttactcgaattttaccagtgccaatacctggtttagggtagaatatttttgaaaatgacctacaattcctagtaaattgcttragcaattttctggtagaatttaacaagatgaagagcccactttagaggttggatttatctgcccagctaactgtcgtcagccttatgatgagcttcataaactttagccagactttattatacctagtctaacaaagtcacctagccagctttctttctctttaaatgtctctaccagagaaatcttgactggctttatcagaagcctttgctcttgcagcaagtttgacataaaatattgacactaaccagtaaccaattcgcttggaaagttccttcaactatgttcatcattaattcttccacttagtttccccaagaagtggaaatggcctcccaataccttaaaacacattgggtaatctctacatttcattctttccttgaagacatccttcttggagcatgctattttctggctgcattgtaggttgatgagtctctagacttgctgc

SEQ ID NO: 894783 - DNA, 577 bp, Homo sapiens
attaaacagtttattgcttttgaagtatattttgtcagtccagttgagggactgagtctcagtccagatgagggactgccagtttgtctagcagttgatacaaactaattacctctggtaactttgcaggagctgaaaacagaagtgtgactagtaaggtgtgaaggtggcttgatttctagatatgaggctcttggtgcttgttggctgacagacactctccctttctttagttcagcagccactctggtagtcttaaacgtcagagtttttaagaggggtattcatagcccaaatctagggataaatgtaggagatggaggaaaggggagttgccrttttattggtgccactgtttagttaaaatacctaaaacattttctcattcccctttttcctgcctccactgcctttggatgtagatttattctggagttctgttgggaaaacacactattttggaatgttttacttgtctactgagagggttcttcggctattttggactatgttgtcaatctatttgctattgctgtgtcacttctagaaactcctcattgtcctggactactggcaa

SEQ ID NO: 894784 - DNA, 621 bp, Homo sapiens
cgacagtaaacacccagactcaggctcctacagagggcccccagttctgctctaatatacctatttttctttaaataaaaaacatctgatttttgcaccccaggtatttaaagacacactttgatttctgaaaggcttttgaccacacatgargaactccttgggccttgaccatttttagcactttcacagtttctgattttgatcaagccacttaatcacccaggattctgaatctgaaaaccaggagggtttaattccactttcatgttcccttgaggagctgttggcagcaggatgaaggcaggtccatacagaacatgggaaggaagccaggaagccagcttttcctttcacatcaaagagatctagaaagcaaaacctgtctcacatttgcatacaatattagacttacatatggatgccatgtctgtcaaaagacaggctaattagggcattagtttctttaatggttgcgatttagtaattcacaaatagtcccacttaatttttcatcctatacctaaaggatctacttcacacttgaagtttaagaaggcttctcccttaagatagaaagaaggcattcaagtatcaaaatactggtttcctgccaaaaaa

SEQ ID NO: 894785 - DNA, 613 bp, Homo sapiens; identical to SEQ ID NO: 892520

SEQ ID NO: 894786 - DNA, 607 bp, Homo sapiens; identical to SEQ ID NO: 892521

SEQ ID NO: 894787 - DNA, 573 bp, Homo sapiens
aatttctagttccttcctgttttgttgattacattagtagtgtctccaaaggaacacaatgcttgaaataaaagattcttttcataatggaaaatgacttacttataaaaaatattctgtaaaccctaccatcaatctggcttatctccaagcacagaaaagcaagataattaagagaactgagacaatgtgaaaaacagttaacgactagatgaaacggacaccaaaccaatcagaagagacgtagagctagattctttgctagatcattgggaggtcaggaggacccagcagtggtatgggaggggatttgggataattctaagggtaccaaagcatttcagtattttaatacacagtcacaccagctaaatacaagccctgaagrtaaccaacatttcttataagtcatgtcttataatagaaatatttaataaagtttttagagccaaggaaagagccatatctgagacccttctcacttgttaaaggctccttactcattatcaacctacatctgtcaaccaaatgaaacaaagtataaaataagaatcctcctacatcttttctcgt

SEQ ID NO: 894788 - DNA, 559 bp, Homo sapiens
cttgtgccaatatcatggtcaattcacataaaaattaaataatgaatttatctaaattgttcaatataattattgtattaattcatttcaatttggcaaaacaatagtttcaggtaagtactattttaaggctacttatgctgtactaggagaaaaggattagtcattgaaatcattgtattctgcatgtaatacagaaggcaggagcccaggttgagcttaactgctcactctcagcatttaaaggactgagctcggggagcggctctaccaagattttctttgcatgagagactaagaagtctcctaggcaaggttcatcctaggggaagaaagagttagaattatgttcccataaaaatgtcccgggtttcwgaggagaatataattgttttaatataataaaagcacaatacctatcactagaatttgcctaaagattatgaattgaaacatttacagtatccaaaactgtaaaatggggataataataatacctatgccatgggtttgagaggattaaatgtaagttaaatgtaaattgcttagaacagtgctt

SEQ ID NO: 894789 - DNA, 572 bp, Homo sapiens
gtgattatcactagaactgctataagattcatgtgcagattttattgtgaacacaagttttgatttctctgatttaaattcccaggaatgcaattgcttaatcatatggtaagtatgtgtaattttataaaaaaatgttaagttgttttcaagagtgactttaccattttgcattcctgccagcaatatacaagagttacagatggtctgtctccttgtcaaataaaattgtttatttttagccattctaatagaygtgtggtgatatctgctagtgattttaatttgcatatccctaacaactaatgatcaatgttaaatatcttttcatgttcttttgaatcatctgtataccttctttggtgaagtttctgttcaagtctttgagttttaaaattggattattttcatactggtgagtttacaaggttctttatatgttctggatacaagtacttgttggatatgattttcaatattttctcttagtctgtagcttatctttttagcctctcagtggcgtttttcacagagtgaaagtgtttaattttgatgaaatatggtttatgagt

SEQ ID NO: 894790 - DNA, 665 bp, Homo sapiens
acaataatggggctcaaaaatttaatagagggtttcaataccaatctatataaagcagaagaaagaattagcaaacttgatgacaagtcattagaagtcatccaatctaagaagtcaaaagaaaaaagaatgaaaaagggtgaagacagtgtaggggatttgtgggacaccattaagtggaataatatatacattatcagtgtaccagaaggagaaaagaaacagaaagggacagaaaacattcaaggaaataatggcagaaaatttcctaagtctggaaaagaaaatagaaatccatatccatgaagctcaatggtctgttataggataaattcaaaggracacacaccaagacacattacaatcaaattgtcaaaagttaaagacaaagagaatattgaaagcagtaagggaggagtgacttgttacatacatgggacctctagaagactgtcaatggattttccacagaaatcctgaagggtagaagggaaagggatgatatattcaaaactgaaataaaaaaaagaaccctgccaaccaagaatactatacccagcaatcctgtcccttaaaggtgaagaagagataaaaactttctgagacaaacaaaaggtgagggaatttatcaccattagacctaccttacaagaatgctaacaata

SEQ ID NO: 894791 - DNA, 596 bp, Homo sapiens
ctgacatttcatgtctcaactgttttttattcataacctctctttttcctgacatctactggatgtattaaattaatacatgatgacaaaataaactggctataattaaataacaaatcttaacttgcacaaaacagacaaaaccatatcactgatgatgttataaaattatcaataaaatgatgtctacttaaaacattattatagtacacaaagtaaaacaataaaagaataactctttttagttcctttataatgaaggcaatttattttgtatattattttgcatattktgtcaaacaatatagtccattagatagcgatgtgttaatatctccagtaaagatttcatgtcaataaccaatcttgaaatctcttgcccacaactatcacttagtacttttaaaagacataactggacaactggacaagaggaagagcatcagtattgccaaatctgacgaatactcacgagaggatattcccaatataagcgtagtaggagcaacagtagggcgtggttccatcacagcagtaagatttgcaatctttgccacactgagcaaggcaatcatctacaaaacaaaaaccacttg

SEQ ID NO: 894792 - DNA, 545 bp, Homo sapiens
ccaaataactgaataagtgagtgaattagcatacacttaacatagaaaatgagttttctgtgcatcaaaacgtattcacagaaaaactttcatttgtgatacttcttataactagtttctggaaaaagaaaataactgaattgtgactttttgacatagttaataaaaatgttgtctaccttttaaattctaataatactttagaacaggaattaaagtatggcttttattacaacaatatcaattagcatgtatgtgttgtttattttcatattttaattgctacttctaaacaactatataaaattaattccttcttaatatgagaaaactgaaaaatggagaagttaagtaatttcccaagatcatacatcttgagtaaaagaggcagratgaaaattgagtagtatggcttcagaactcacaccgtgaagcaccatattatctgatccttagaggagagggcagtagtattttggtattctcaacttaagaatctttaaagttatttttaaaaagaagggcaatatgttgtatgtgtgtct

SEQ ID NO: 894793 - DNA, 610 bp, Homo sapiens
ggactaaaattttcatttccaaaatactcaatgagtattttatattataatttaaaatgctttcaatagtcagctcttaggaaaatctggctcttagtgcagaaatggaggatgtagcagacatctgttcaattacagtattgataatagaaaagcttttaaaaatctacacctcataatatgttaatgcagggaaatacttcttagcagtttttatagaatcttgtcttttgcacaataaaaggcaattctccatttcaatgcagatattgagtaaatgaaaattgcctttttaaatttgagaggacagaagaataaagatatttggcttgagataattgcttacactgttggtgaaagctaaagttgtttcttataatgcaataatgactgcattttaaataacacagatgrgtttcactctatgcatagataaatagttgtatggaaatcaaattttcataaatgaaattacactttaaaaacacaatactcataagttacttataatttttgtagcaaaatttttttgtaaaaataattgctcagtattcactatataacttcagctatttaattatggtaagaaatttttttaaaaggaggcaga

SEQ ID NO: 894794 - DNA, 646 bp, Homo sapiens
aaaaaaagaataaaaaagatgaagcatttctacaatagctagacaatatcttcaaaagggcaaatctaagagttatttctcttaaataaaaggtaaagagagatagagtagaaagtttactcaaagggttaatatcagagaatgtcccaaacctagagaatgatataaatattcaagtacgggaaggttatacaactcgaagtagattgaacccaaataagactacctcaagatatttaatgatcatacccttgaaagtcaaggataaagaaaggatcctaaaagyggcaagagaaaagaaacaggctgggcatggtggctcacacctgtaatcctagcattttgggaggccaaggtgggtggatcacttgaggtcagaagtttgagaccagcgtggccaacatggtgaaaccctatctctactaaaaatacaaaaattagctgggcgtggtggcacattgcctgtaatcccagctacttgggaggctgaggcaggaaaattgcttgaacccaggaggcagaggttgcagtgagccaagagcatgccactgcactccagtctgggcaacagagtgagactccatctcaaaaaaaaaaaaagaaagaaaagaaagaaaagaaacaaataacatacaatgaagtacca

SEQ ID NO: 894795 - DNA, 646 bp, Homo sapiens
aaaaaaagaataaaaaagatgaagcatttctacaatagctagacaatatcttcaaaagggcaaatctaagagttatttctcttaaataaaaggtaaagagagatagagtagaaagtttactcaaagggttaatatcagagaatgtcccaaacctagagaatgatataaatattcaagtacgggaaggttatacaactcgaagtagattgaacccaaataagactacctcaagatatttaatgatcatacccttgaaagtcaaggataaagaaaggatcctaaaagcggcaagagaaaagaaacaggctgggcatggtggctcacacctgtaatcctagcattttgggaggccaaggtgggtggatcacttgaggtcagaagtttgagaccagcstggccaacatggtgaaaccctatctctactaaaaatacaaaaattagctgggcgtggtggcacattgcctgtaatcccagctacttgggaggctgaggcaggaaaattgcttgaacccaggaggcagaggttgcagtgagccaagagcatgccactgcactccagtctgggcaacagagtgagactccatctcaaaaaaaaaaaaagaaagaaaagaaagaaaagaaacaaataacatacaatgaagtacca

SEQ ID NO: 894796 - DNA, 650 bp, Homo sapiens
gtggctttattattgaattttatccaacatttaaagaactaatacccatgctactcaaactattccaaaaaatagaggtggaggtattacttccaaactcattctatgaggctggtattccctgataccaaaaccaaacaaagacacatcaaaaaaagaaaactacaggccagtatccctaatgaacaatgatacaaaaatcaaacactagcaaacaaaattcaacaacacattaaaaagaccattcatcatgaccaattggtatatattccaggaatgcaggggtgtttctacatacataaattaatcaatgtaatataccatatcaacagaatgaaagacaaaaaccatatgatcatttcaactgatgctgataaagcattagataaaattcagcatcctttcatgaaaaaatcctaaaagaactgggtatagaaagaacatacctccacwcaatagtagtcatatatgacagacccacagctagtatcatactgaatggggaaaatctgaaagtctttcctctaagatctggaacatgacaagaatgcccactttcatcactgttattcaacatagttctggaagtcctagctagagcaatcaaaaaagagaaagaaataaagggcatccaaattggaaaagaagaa

SEQ ID NO: 894797 - DNA, 587 bp, Homo sapiens
aatagtgctaccatgaacatacatgtgcatttatccttatgatagaaaaatttatatttctctgggtatgtacccagtaatgggactgctgagttgaatagtagttctgttttaagttatttgagaaatctccaaaatgcttttcacagtggctaaactaatttacattcccacccccagtgtataagcattcccttttcatttcaaccttgccagcatctgttattttttgactttttaggaatagccattctgagtggtgtgagatagtatctcattgttgttttgaattgyatttgtctaatgattaatgatgccaagcattttttcacatgtttgttggctgagtgtatgacttcttttgagaagtgtctgtttgtgtcttttgcccatttttaaatagggttgtttgactacagtcaataataatttgttgtacttttaaaaatacgtaagagtataagaataattggattctttgcaacacaaagaaagggtaagtgcttgaggtggtggatacaccattttccctgatgggattattatgcattgtgtgcctgtatcaaaatatctcatgtacctcatca

SEQ ID NO: 894798 - DNA, 626 bp, Homo sapiens
gtagaaagaaacatttgtagtaaaaatacattaaaggaaacatttaaagaagttgaaataataattattgtatttgactataggaggcttaggaaaaacactagcaaataatttaaatatgagcattagaaggaacaaactagtgtgactatgaaaacttgtttagcatctctgaacrtatgtttaatattgaatataatttgttattagccattaaaacaacctcttctgggatagcctagttcaatgtatacttgtttacacatgttgaccttggtaatatgctttgtaaatgtgttgtcaagttgtatttattagtcatggactaaagaatatctattagtcacaggataattagaatgctttcagttataaggctagaaacctagtggaaccttcttctggcagacacacagagagagagagagagagagtgagagaaagacagagagaaaggaatttttcagaaagagtttttgttttacaataacaaagctttgtttattgttcatgttacattttggctttagctctcctccacatatcttctcattctggggcacagtttgaaggagcagcccctatctcagacttgtggaagaggaaaaaaataatcatagaacaag

SEQ ID NO: 894799 - DNA, 665 bp, Homo sapiens
taccttaaaagcataaccactacaatggaatattatttgaccataaaaaggaatgaagtatgtactgatacctgatacaacagagatgaatcttgaaaacattacactaagtgaaaaaagctagtcacaagagaccatttgatatatgattctatttatgtgaaatgtccagaaaaggcaaatctgtacagaaagttgtttagtggctgcctagggctgggggatagaaggattggatgtgawagctaaagggcatgaattttttgtggggtaatgaaaatattctagaattttttgtggtgatggttgtacaactttgtgaacatgctaaaacccataaatcatacaatttaaatgggtgaattatatgtatataattcatataattatttgtatgaatttatatgtataatttatatccttatgtacatataattatatgtataatttgtatccttatatacatgtaattcaataagactattaccccaaaataaccatcaatacagcattttgtatctactagagatgtacttttgatatttttagtgacatgaaagcacattattaatataaagttgtgcaaaatatgaagacacagaaatgactacacaatgtgatgtgaagtatatttatagacagacagagaggtctaaaataaaatg

SEQ ID NO: 894800 - DNA, 665 bp, Homo sapiens
taccttaaaagcataaccactacaatggaatattatttgaccataaaaaggaatgaagtatgtactgatacctgatacaacagagatgaatcttgaaaacattacactaagtgaaaaaagctagtcacaagagaccatttgatatatgattctatttatgtgaaatgtccagaaaaggcaaatctgtacagaaagttgtttagtggctgcctagggctgggggatagaaggattggatgtgaaagctaaagggcatgawttttttgtggggtaatgaaaatattctagaattttttgtggtgatggttgtacaactttgtgaacatgctaaaacccataaatcatacaatttaaatgggtgaattatatgtatataattcatataattatttgtatgaatttatatgtataatttatatccttatgtacatataattatatgtataatttgtatccttatatacatgtaattcaataagactattaccccaaaataaccatcaatacagcattttgtatctactagagatgtacttttgatatttttagtgacatgaaagcacattattaatataaagttgtgcaaaatatgaagacacagaaatgactacacaatgtgatgtgaagtatatttatagacagacagagaggtctaaaataaaatg

SEQ ID NO: 894801 - DNA, 498 bp, Homo sapiens
tggtgttacagcaatatactagctttatattgtcgggccctggcctggggtggggcagtggtatgttcattgcctgccacaaatacaaattctggatttgtgttaaggtccaaggtggacactggaagggctggccttggagttayatggcttgcccacgagctctagcgatacatcatatggacttgaggttgaacaaatgtatgcacaagaggaaaaaatcttccttggaaatcaagtttcttagacctaagcaatttcttataaagagatggtaaaatcagacacaaggcccagaactgaaaacatatgctgaagggaaagtgtggaactggtaacacaggtggtcaccatagcaaatttctcatcttggaccaaaagaagcaatgaatcaaatatgacttagagaagtattgcatgcacaaggagcttttctccccccagacatggccaatatacaaaaaaatcaaaccaaatttgtaaatgttctatgaatta

SEQ ID NO: 894802 - DNA, 656 bp, Homo sapiens
tagatattattagaaagaataatatttggcatttctgagttgcaattgcaagttacatgattttaattgtgctatggtgttacagcaatatactagctttatattgtcgggccctggcctggggtggggcagtggtatgttcattgcctgccacaaatacaaattctggatttgtgttaaggtccaaggtggacactggaagggctggccttggagttacatggcttgcccacgagctctagcgatacatcatatggacttgaggttgaacaaatgtatgcacaagaggaaaaaatcttccttggaaatcaagtttcttagacctaagcaatttcttataaagagatggtaaaatcagacacaaggcccagaactgaaaacatatgctgaagggaaagtgtggaactggtaacacaggtggtcaccatagcaaatttctcatcttggaccaaaagaagcaatgaatcaaatatgacttagagaagtattgcatgcacaaggagcttttctcccyccagacatggccaatatacaaaaaaatcaaaccaaatttgtaaatgttctatgaattaatctcaagctggaaaaattattttcttcttgaatgtaaattctcagcttctggattcttgaccactggcattgaccaactggca

SEQ ID NO: 894803 - DNA, 619 bp, Homo sapiens
cccagtctttagagttaactgctgttagattcagatttcttgattaaagccggaagcaatttaaaattttaaagttgggccagaggaaggtcttattcatacctttgccctaacagaaagcgaattcatatatgccacaccaaattatgggcatatatttataatattgaaaactaattctatttctttgtctttaaacatcttgttcagtaaacctgctgaatactgtgcaaaggatttggatttttataaaatcaagaactcttcaagtatttcctctaccaatcaagttttcatttctgttctgaagactcagttatcttttacttcttacatcagttagctattgctgagtaacaaattactctaaaaggtactgtcttaaagcaacaatcatgtattatttctcatgagtttacaggctggctgagcttgcaagtttacagggtgtgctgattttttttttttttttttttttttttwaggtggagtctctctctgtcacccagctggagtgcaatggtgcaatctcagctcactgcaacttccacttcctgggttcaagcgattctcttgccaaagcctcctgagtagctgggattacagttgcccaccacca

SEQ ID NO: 894804 - DNA, 522 bp, Homo sapiens
aagaaggcactttgattttgagatgcatcaatttcccacactccagatcatctagaactcagagtgctgttaaaggaagaccctctagtgtccagggtgcatgatggaacgttagtgaaagtcatggaaccaggtgtatgcaatagttcagagagaggaagtaagactatcattctaccttggcacaataaaaatactagctagcactcatttgaagcktgttaaaatccaagaactgtattaggtatattgaatgtattaacttaatacatttctaaagtacttttttctctcccttttatagattcagagcctgaggcaatagattaggtaacctgtctctgctaacacagagtcaatgtaatatagccacttgaacactggcattgttcttttgaatcttttcatcctattcactcactatgctgcgtctgaaataacatcagagctgatgggtttgagcacttagctttgaaatcacctttcgttattagaggcccaatgcactctccgtcacactac

SEQ ID NO: 894805 - DNA, 646 bp, Homo sapiens
catgaaactggaaacctcatggagttgtcccaccatcatggcgcaaaaagcacagcaaattattttaaactagcctttgatacggaacagatacatacaatgataagatctagatattgaacattcacttatttgctttttcaatcactcaacaaatatttatcaagtgcttaacatgaaaaagccactccacaaaaggaaatctcaatttctgkcaagctttcaaagctataaactatgacatcatcctttctcaaacaaaccaaccattataaacatcccagaataggctttatgaagccttctctggagaagggctcttaacctagggcatgtgcagaggctccagtagtctgggatttcctgttaactgcatgacaaattgtgcatgtctgtgtgtttggggggcaggggagaaggtccattgttttcatctagttcaaaaaggggtctataatccaccgaaggttaagcgtggcagctccagggtatcactgtttaggatgctaaagaccttactgcccagtttctccatttcgctccagaaaatttccgtgaaactaagcaaatggtattaagtacttgggctcaccccttgagttactgacacaccatcacatcccttgcttttctgcttctctctgct

SEQ ID NO: 894806 - DNA, 590 bp, Homo sapiens
aagctataaactatgacatcatcctttctcaaacaaaccaaccattataaacatcccagaataggctttatgaagccttctctggagaagggctcttaacctagggcatgtgcagaggctccagtagtctgggatttcctgttaacygcatgacaaattgtgcatgtctgtgtgtttggggggcaggggagaaggtccattgttttcatctagttcaaaaaggggtctataatccaccgaaggttaagcgtggcagctccagggtatcactgtttaggatgctaaagaccttactgcccagtttctccatttcgctccagaaaatttccgtgaaactaagcaaatggtattaagtacttgggctcaccccttgagttactgacacaccatcacatcccttgcttttctgcttctctctgctcacttattaccctactaatgagcgcagatacctctgcttaactatgttctgtgtgacaaaggaagattaagagttagacaatggcagaacttgaatatcagttcttcaagttctaaaatctcctttccttttcctaccctgaacaattcctattttgatagtcccattc

SEQ ID NO: 894807 - DNA, 590 bp, Homo sapiens
aagctataaactatgacatcatcctttctcaaacaaaccaaccattataaacatcccagaataggctttatgaagccttctctggagaagggctcttaacctagggcatgtgcagaggctccagtagtctgggatttcctgttaactgcatgacaaattgtgcatgtctgtgtgtttggggggcaggggagaaggtccattgttttcatctagttcaaaaaggggtctataatccaccgaaggttaagcgtggcagctccagggtatcactgtttaggatgctaaagaccttactgcccagtttctccatttcgctccagaaamtttccgtgaaactaagcaaatggtattaagtacttgggctcaccccttgagttactgacacaccatcacatcccttgcttttctgcttctctctgctcacttattaccctactaatgagcgcagatacctctgcttaactatgttctgtgtgacaaaggaagattaagagttagacaatggcagaacttgaatatcagttcttcaagttctaaaatctcctttccttttcctaccctgaacaattcctattttgatagtcccattc

SEQ ID NO: 894808 - DNA, 646 bp, Homo sapiens
aaagacttttgtgtttatgtttataaggtatattggtagttttcttttttttttattattatttatactttaagttttagggtacatgtgcacaatgtgcaggttagttacatgtgccatgctggtgcactgcacccactaactcatcatctagcattaggtatatctcccaatgctatccctccccattccccccaccccaccacagtccccagagtgtgatattccccttcctgtgtccatgtattctcattgtwcaattcccacctacgagtgagaacatgcggtgtttggttttttgttcctgcaatagtttactgagaatgatgatttccaatttcatccatgtccctacaaaggacgtgaactcatcattttttatggctgcatagtattccatggtgtatatgtgccacattttcttaatccagtctatcattgttggacatttgggttggttccaagtctttgctattgtgaataatgccgcaataaacatacgtgtgcatgtgtctttatagcagcatgatttatagtcctttgggtatatacccagtaatgggatggctgggtcaaatggtatttctggttctagatccctgaggaatcgccacactgacttccacaatggttgaactagtttaca

SEQ ID NO: 894809 - DNA, 583 bp, Homo sapiens
atgtggggtagtgacgttgtcagggtaaggaagaaacagacttctgcaatttatttaaagtcaaggcaaaaatagaaaagtataataatatagatacccataatatcgacatttagaagccatagtaattggtttttactggaaatgagtgtgtktgtgcgtatgtgtgtgtgtatgtgtgtagtagaatagtagcagcagaattgggccatctgcttgacaaattagaccttttaactgcatagagctttgttaggaaagatgattgaaagacaacctggctgaagaattatatggcaaagacccagagacatgagcatttagaggaaatctggcctttgtgtcagaatcatcagtgtgtttgatcaggtatagcagttgcacatgtggctagaaaagttggttggaatttagataagtacctgtcatctgctagattccagaggaaggcatgcactatggggtcaaacactgagctgcaaatattctttaaagtgtggaatcctcacaagtgagaatccactgtatttctaaatacaatagtgttttggaattttgttgctttgacctagtaatgttagct

SEQ ID NO: 894810 - DNA, 679 bp, Homo sapiens
tatgtatatattataccatctttttaaaaatatagatgttttaaatcatttctttaaaagcatacatcctcctaaggagaaaatttaaagtaccgccattctacaatactgtttgatagggaaattcagcatttgaaatgtacgctaaaaagtaatgattccaggtttaaaaagaattaatgctcctaggaagcttaatgttataaatgttataaaatagacttttgctagtcaatttcaggttgttttttttttttwaatttctatgcttgcattattatctcaactctttaactttgtatctggactaagtttagacataaaaattaaaaatgaagcagtagattatgttgcttgctgtttctaatttaacaccagaattttaatagtatgcaatcttcaagggttggtagtctggtaaaaacttgaagcaatagtttcatagaactttaactaagataaagtattaattgtctatgccaaagagggtgagcaatgatagagattataaagagcctagggcttccctgagacccaccttggtgctaccactgttaagagaaaattaaaaataaatgaacaatagtttccaactctaaaacatattatatgcagtacatactttaacctagtttacaatttatatttattatgcccactgaacccacaaaagcagtgt

SEQ ID NO: 894811 - DNA, 487 bp, Homo sapiens
aatctcttataattctaattctattttttcctggttctttgaaatattttacaggcctagttgttttagattgatgacaaattttgtgcataaaaaagtcaacataatttgagtttctgaatttttatttccctctctagaggatttaaatttgctactgccaggctgttgagctattggttgattactgtaatctacttaatctaattagagattgrgcaagttggaatctgtaacctgaaggccttcaagtggtggtcgatttctggcatatacttactcccaggctgtatgtagccttttggtattcaaactaaaagctttgggtatttacttgggtctcttttccttaacaagtctaggattctaactttagcacccctcattcctgtgatgctgcaatactccctgctcacctgcttattccctcaactgctattttcaaaaaggtaaatgcttgtggagcaaaggagcactaaatatcagg

SEQ ID NO: 894812 - DNA, 627 bp, Homo sapiens
atattcctattgtaatcatgtcataaaattaaggggaaattgaatgccttgcagagtccgataaagacaagttcattctttcttgtgcaatgatttcctataacatttggagttatatcaaatctaaatttgtattctaagcagaaattacatgtgtttttcccgaacatgtgttttcttatgctcctaacctgtgaaataggaacttataaactattcttttaaaggcaagcatatcaatttagatgtcttcctttgcagagaaaatcagatacaaataatcctatgaaaatatagttgcataagagtgaaccatcttattgtttatttcagattygctcataccagcttgtgtatattgttgagacagctcactgaatggcattattcaatggtttctctttgtggctcatcgcctttgagaccatacttataaagtacacctaatggaagtgtcttagagccttcttaagtgttttgctgagccaggagaggaactgaattatagatcaaaagaactaacgtgtttcagttggcaaaaggttgtcttagtcttcacagacttgccaatctcttcttccaccaatgaagtatttcactcagttagctataggaaagcatttgttt

SEQ ID NO: 894813 - DNA, 650 bp, Homo sapiens
tattgcactcttaactgtgttatgtcccactagaatgtaatgtttttgaggtcaggaactgtgcgtgtatggtttgttgttgtatataatgtgcagtataatacctggtgcttattatgcattcagttcatgtttgttaaacaaatgcatagaatcattgtctttaggcactaccctacttataacgaattgaagaaatgataaaatccattattattacagctatttgtatggtatagaacagacctaattttctattatgtgatttggcttctgaaaatttatttactcaattcctttctgtagttaggttcacatgcacccatattacatgaatatattcatgccatctcagagatcattaggatgmcaaaaaaaaaaaaaaaaaaaaaacatataacggctatcaattttccccaaaaaccagcaggtataagcaattgttattcacattgttcattttataagcaatataggaactctgcatttaaataggaaaattgagtgatttctaaaatcagaagctaatatattttggattattattttaaaaagtttaaaggatacatatatacatctgtaggtttcctggagtctccaaatcagggatgccagccatcctagagtgtcactaaagtgagaggcagcat

SEQ ID NO: 894814 - DNA, 597 bp, Homo sapiens
ctaggtgaggacaggtatttttgttttccagtccagatatttcatttcccaagaccactctgacctgccacgccacccatcttgtgcctatgaaaactctggagaccctagcaggcaggcacacaagtggctggacatcaagaggagcggatcggtggaagaagatacaggtagctggacgtcgagagcagcacatcagtggaggaacagatgggcagttggatgtggagaggagcgcatcaacaggcaccgatacactggcaggccacygaccagcagaagaacaatgcagagtttgacttggggcagtaggaggagagcccagtgccatgtggcactgagaagaatgtatatactgttgatttggggtagacagttctgtagacatctactggtttcacttgatccagtgctgagttcaagtcctgaatatccttgttaattttctgtctgggtgatctgtctaatactgacagtggagtgttaaagtctcccactattattgtgtgggaatctaagtctctttgtaggtttctaagaacttgttttatgaactgggtgtcctgagatatcctgagatatcttgtattgtgtgcg

SEQ ID NO: 894815 - DNA, 588 bp, Homo sapiens
taacataaaactttattttttagtaaagatacatgtctagtgcagattggaaatggagctctgctcattatggttcaattcagtgggtttggatctcaacaaatgattctgcaattaccatggcagagaaaaggaaatacagtatactgactcggaaaattccatttgaaagtgacacatttatctcatttattctttattggccaaacaactcacagggccacctttatcaaggcaggtaaaagggaggatgacacatcatgcaccttctaccttgaagtgatagatgtggctatcactcatacttaactggccaacactacgtttccacatttaatattaaagaggacaaggaagtgtaattygcctgcctagctaggagaggagaattagatcacttgtgagtagtcactgcactacaaattgattaaaaataagttcatctttgattttcaaggcattattctattgcgttgtatcatccagtaaactttgagtgccgttcttttgtatgtgatctgttttacccagatagggtaagatttcaggattgtctttttatctctggtgttgtgaaacttgtgatat

SEQ ID NO: 894816 - DNA, 631 bp, Homo sapiens
taaaaccattcaacctagcaatcccattactgggtatatgctcaaaggaaaataaatgttctaccagaaaaacacacgtctcagatgttcattgtaacactattcacaatagcaaagacatacaattaacctaggttcccatcaccattgggccggataaatgtggtacatatatatcatggaatactgcactgccatataaaagaatgrtattattttttgcagcaacatggatgcagctggagaccatcatcctgagcaaattaatgcagggacagaaaaccatacactgcatgttctcacttataaatgggaactaagcattgagtacagatgaacataaagatgggaacaacagattcttggggctatttgaggggagggtggggggagggtgagtgttgaaaagctatctatcagtcgccatgctcactgcctgcgtgatgggatcactcatacagcaaacctcagtgacatgcaatttgcccatgtaacaaacctgaacatgtactccctaaaactaaaatgagttgaaaaaaaatttaagatagttctgagaaattcccagcaaacctttggcttgcttgttgggtttgtgagtctacacccactttcttttttacctctttta

SEQ ID NO: 894817 - DNA, 631 bp, Homo sapiens
taaaaccattcaacctagcaatcccattactgggtatatgctcaaaggaaaataaatgttctaccagaaaaacacacgtctcagatgttcattgtaacactattcacaatagcaaagacatacaattaacctaggttcccatcaccattgggccggataaatgtggtacatatatatcatggaatactgcactgccatataaaagaatgatattattttttgcagcaacatggatgcagctggagaccatcatcctgagcaaattaatgcagggacagaaaaccatacactgcatgttctcacttataaatgggaactaagcattgagtacagatgaacataaagatgggaacaacagaytcttggggctatttgaggggagggtggggggagggtgagtgttgaaaagctatctatcagtcgccatgctcactgcctgcgtgatgggatcactcatacagcaaacctcagtgacatgcaatttgcccatgtaacaaacctgaacatgtactccctaaaactaaaatgagttgaaaaaaaatttaagatagttctgagaaattcccagcaaacctttggcttgcttgttgggtttgtgagtctacacccactttcttttttacctctttta

SEQ ID NO: 894818 - DNA, 552 bp, Homo sapiens
ggtctgtggattcagctaacactggatggaaaatatttggaaaagagaaaattccaaaaaccaaaacttggatttgccttgtatcaaatactatatatatttatatttatatagtatatatatttatatttatatattatatatatttatatttatatattwtatatatatatatatatatatattttttttttttttttttttttctgagatggtgtctcactctgtcacccaggctggagtacagtggtgtgatctcagctcaccgcaacctccgcctcctggaatcaagcgattttcccacctcagcctcccgagtagctgggattacaggcacatgccaccacgcctggctaatttttgtatttttagtagagacagggtttcgccatgttgggcaggctggtctcgaactcctgacttcaggagatccaattggcctacctcggcttctcaaagtgctgaaattacagatgtgagccaccatgcccagcctcaaatactgctttgaatccatatgaagaaagtaatatgtaggcattgtgttaggta

SEQ ID NO: 894819 - DNA, 618 bp, Homo sapiens
ctttttttgagatggagtctcgctctttcgcccaggctggagtgcagtgacgcgatctcggttcactgcaagctccgccccccgggttcacgccattctcctgtctcagcctcccgagtagctgggactacaggcgccctccactacacccarctaattttttgtatttttagtagagacggggtttcaccgtgttagccaggatggtcctgatctcgacctcgtgatccacctgcctcggcctcccaaagtgctgggattacaggcatgagccactgcgcccagccaagaattacttgattttaactatcaatagtgccaaggtggagaaacccttatttagaatattttaataaaaacaaatccgtctgtggatccttggacaacattattgttagcaaatctgggaaggtgcaaggttgactggtaaactctggaggaattaagctccatctagttctgtgttgcacatttggcatggcattcctgctaatgggaggatgtatttttataactgagtcaaggtatcataaagttgaacctaatggatgccagaggagactcatttgacttggcagctataaatagctcaccagcagcacctgtgtaactcttata

SEQ ID NO: 894820 - DNA, 655 bp, Homo sapiens
taaaatggcttaggagttcatgattagaatgtataaagaaaataaggcaacttcgagcttatactacattctactaaatgataacaaacttttggaattactatttgttctatatcagatagagttttacatgttataaaacaaaaaaaagttgatcaattttaaaacaatctttctatttatggttaagttatatcatgacaaattccttctaatgcagagctttctgattttcttagaaaatatgttccaaggttttaatgccaaaacagcragtaaataatactccttaagcagtcaactggcacacaactaccaatccatcaagagttacagcaaaaggaagtagaataagccttggtatttataaaagaaagagcaatcaactcggagagtaactagatctggctctttcactaattgaagctgcagaacaaggaccaagtcatttgacactaaaattaccgccctcacaaatgcaactccaaggtcacatctctattttttttttctttaagttgaggtcggacagggtggcagagacattagtacttgttcatttttagttttcatttattgtgcatttgaaggttatacttctctgtctccttttagttaggtggagctgaagtgatgtgtgtcacatccaggaaga

SEQ ID NO: 894821 - DNA, 481 bp, Homo sapiens
gtggagctgaagtgatgtgtgtcacatccaggaagagccatttaattgcttatgtgagactctagcaatctcttggaaattgtagaggaagatcatgttacaagggagttgccacaagattgaaacattcttgatttctaggtcaccaaatggaaacaagttgtcctggatagtcactgcgattcacagtaaactttctatgaacaggaaacaaactgtaaakggattaagtcactcagattgtgttctgttttgctactacagcatgatttaggttatcctgatgaattcagatattggaactagagttagtatgacactataaaaaaaatttgaaacgtaaggcactgacttagttgttgggcaatgttcagcttctaggaatatggcatgagaggctataagtaagacaaaggactgcattagttacggcacagcaagcaccattgttttggctctttttgtaccccgaattcaatgg

SEQ ID NO: 894822 - DNA, 558 bp, Homo sapiens
tttgaaaaactcatcccagcaaaagcccatcattgacactccattctagagtacaaatttgttctagcaaaaactttcaaataaaattgatttctgtggtgttgcccacatgcaaatgcttattctaaactgtggctttgagcatatttgcgtagttgttttagcttttggtgttgctrtaatgtttgttccactgtgttttcactcactgaagaataatacacatgatctttcttagggctgatttttcctacctaaagtatatgttgaaattcaatttcatgttaaacttttggagttaattttaagtaaatctaaaactgacttgtggtgatgggtgagatgggcatcaggaagtagaataacatcgaaaatttatcaacacaattaatgtatacctttaagggcctagaatagtaatataaagaggcgtattcaggttggttaatatgattaatttttttgtatttcgaaatagaaaagagatgagctctatatttttttgatttttaactttgttctatttcattattttcttaaagacagctgttctggaag

SEQ ID NO: 894823 - DNA, 690 bp, Homo sapiens
ataatagttttccccaagccacgacatcaataactatctttgccccttcagcatgtgttctgaaggtagagggattgaagtactctaggtgggctccagacttaaatgaacaaatgatatgcatgtcatctctgatactctgcaaaacttgtgattccatgatcctatgagctgtatgcctttacagtctcttggtgatcactaaaagggaccaactctttttttttttttttttttttgagayggagtctcactcagtcgcccaggctggagtgcagtggctcgatctcgctcactgtaagctccgcctcctgggttcacaccattctcctgcctcagtctcccgagtagctgggattacaggcacccaccaccacgcccagctaattttttgtattttttttttagtagagacagggtttcaccatgttagccaggaccaactctttatttaacactttgagagtgaatattggaagtttttgtatatacaattttattttgggttgcctgagacacatctcagtgcttctaatgaagacaagaacttgaatgaatgtaccatgaaaactgaggactattgaacaacagatgtgaaattgcaaggtgtattaatttgcattgtgtgacgatcacacagatgtgtttcttgtttatattcagtccattaagatctgtttagttaattta

SEQ ID NO: 894824 - DNA, 596 bp, Homo sapiens
tcaatggaaaggtgcttttattgagtacaaaataaggtcatattccatttctgctctcatttctcagcccgctctttcctagtatgtaaaataacttacagagttgcttggaacattaaacaaaataatgtcatatggcaagcactcartaataacattatgattacttgtcctgagaagctggtcatatgttgtgtgtatgtttgagaatggtgattgcgaaattgaagaaaccattttacttggagggacctgtggggaatgtgggcagccttaagcatagatctgaaatcactcaagggaaaacattccttctactttggcactctggcagcaacagctgctgtggtaagcactgaggtcctggaagcaacaaggctgaagtggccgtgaggagtagacaggagtgggatgaagaacaccttgagcttccagggagtttctggggagagaaagaatgaatgattttaagtcccaaagtagggccttgagagcagcataacatggtgctgagctgatagactctgaagttcagcaggatcagtactaattgtgtggccttggacaagttatttaaccttttgaaatctgttatc

SEQ ID NO: 894825 - DNA, 625 bp, Homo sapiens
caattattagtgattgagtcctctgagttctatcttcaaaaatatttataatgtagccaaacaattctgatctcttatgtggaagataaaatagtagagcctgtcaactagtctcagtatgttcactctcaacacaatctgtctagtcaattccctgttaagtcttttcccttcagtagatacaacaatcaaaggagcttgaatatcaggtcttgttagaatccttcctaaaattctgcaatgactgttcaaggtactttggctaaatctaggggcatttttttttctatagcccaaattataaacttctgccttccttttaaaatatttctcctgttctcaaaatccttctttcagtttctgggaatggccagctctctcctatcacagggcctttgcacagacccctgttcctagaacacttttcaccttacctgmcttttgctcagatataaaatatcagcttacattcaattattttttaccatttgctttagatatcaacttacacttcacctcttgtgaaacattttctctcactccatgatttacactaggttccatctcaaaacacatccttattatttgtttcttcataggtttataacattttggaattatttat

SEQ ID NO: 894826 - DNA, 642 bp, Homo sapiens
ccttgaaaaaaaaaaaaaaatccctccttaacccctgtaggtactgcttctcctactagatctgtttctttgattgaatcatcccgacccagtaggttctgtctctttctgtctctaagttacctattgcctggcacattgttttaaagtaacaagcttgggcaaattagtgatttgtcacaatttgtacttacagctcttttatatgccctctaaacactatcaactttaatttctttttataccacatcttttgttctataacaaatttccataaattcttgctgagatattagttggacatgtaacagacaacagataggatgttaactaaaagaatgtcaatgtcaccaagaaactgaacaagagccaagtttctaaggaatgcaaacaamatgggcagatgacaagtgacgggtctaatatttttatattagccattatttttgcacagactcaataaagaattaattaaatacccctttggaaccagggccatttcagtgagttacagcacttgaaactaaaattgaacattttaaaatgaacatgtcccatgaggtaaacattctctactgaaatatggtcagctactatgaaaacctaatgatttatcttttgagacccataattaaataataa

SEQ ID NO: 894827 - DNA, 615 bp, Homo sapiens
tgaggtaaacattctctactgaaatatggtcagctactatgaaaacctaatgatttatcttttgagacccataattaaataataagtctcaaaccaatagtattgagataaacaaatatttataaattctgggtcattgaatgatagaagacatagtatcttaaatttagctgactgatttaacgtgatcaagccatttgtaagtggataccaatattaatgaatatcttttattaaaccctaatactacttttgtttatttaatatatatatttcttaagtatatgtagctgtttattttatatatatatttattaagtatatgtagctatacatttaatatatatacatatactttaatatatataatttagaaatcmtatctttatatctatacctatatctcccatgaagttgaattaatctcagaaaactgaggcaacatctgtatttgtcagtatgaattcctgtatgctacagtaacaaacagttccccgtatatcaggcagaagttagtattttgctcatgccacataccccatgcgcattagcagctgcctctgctcacacagggcacacattagcagctccagtctgcttgatggaggctctacc

SEQ ID NO: 894828 - DNA, 628 bp, Homo sapiens
cttttgagacccataattaaataataagtctcaaaccaatagtattgagataaacaaatatttataaattctgggtcattgaatgatagaagacatagtatcttaaatttagctgactgatttaacgtgatcaagccatttgtaagtggataccaatattaatgaatatcttttattaaaccctaatactacttttgtttatttaatatatatatttcttaagtatatgtagctgtttattttatatatatatttattaagtatatgtagctatacatttaatatatatacatatactttaatatatataatttagaaatcatatctttatatctatacctatatctcccatgaagttgaattaatctcagaaaactgaggcaacatctgtatttgtcagtatgaattcctgtatgctacagtaacaaacagttccccgtayatcaggcagaagttagtattttgctcatgccacataccccatgcgcattagcagctgcctctgctcacacagggcacacattagcagctccagtctgcttgatggaggctctaccacctcaatcacaaggtttcatggttgtgtgctgcctcatagctcatcatcttgtaactataccatcttcaa

SEQ ID NO: 894829 - DNA, 648 bp, Homo sapiens
ctttatgcttgaacagttatgttctctgtctctcttttgaagaattttttttttttttttgagacggagtctcgctctgttgcccaggctggagtgcagtggcgtgatcttggctcactgcaaactccgcttcccgggttcacgccattctcctgcctcagcctcccgagtagctgggactacaggcgcccaccaccacgcccggctaatttttttgtatttttagtagagacggggtttcaccgtgttagccaggatggtctcgatctcctgacctcatgatccacccacctcggcctcccaaagtgctgggattacaagcatgagccaccgcgcccggccaggatatcttattagtacagccacccyaccttctcatataaagcatcattaactcaggctcttgttagtttccttcatattacttctcaattaatatttatttatttgcttctgtggttattgcctatttcatccatttgaatttaactttcaagcgggcagggatcttttctgtttttgtaccatttttcccagcacctaacactgtgtggcacacaatgggagttcaataaatcatctgttaatgaagtgattattataattattgatgtaactttatgcagggcttcttggtgagctgaccca

SEQ ID NO: 894830 - DNA, 648 bp, Homo sapiens
ctttatgcttgaacagttatgttctctgtctctcttttgaagaattttttttttttttttgagacggagtctcgctctgttgcccaggctggagtgcagtggcgtgatcttggctcactgcaaactccgcttcccgggttcacgccattctcctgcctcagcctcccgagtagctgggactacaggcgcccaccaccacgcccggctaatttttttgtatttttagtagagacggggtttcaccgtgttagccaggatggtctcgatctcctgacctcatgatccacccacctcggcctcccaaagtgctgggattacaagcatgagccaccgcgcccggccaggatatcttattagtacagccaccccaccttctcatataaagcatcattaactcaggcycttgttagtttccttcatattacttctcaattaatatttatttatttgcttctgtggttattgcctatttcatccatttgaatttaactttcaagcgggcagggatcttttctgtttttgtaccatttttcccagcacctaacactgtgtggcacacaatgggagttcaataaatcatctgttaatgaagtgattattataattattgatgtaactttatgcagggcttcttggtgagctgaccca

SEQ ID NO: 894831 - DNA, 610 bp, Homo sapiens
attttgatgctgaatttactatacatctacttaaatctttttgattcctttttttatgtgtcaatataaagtttatttaccaactcaagttttgaaatcactaagctatttatcatgtttgaacactgtgtgtatgtgtgtttgtgcacacacacacacctatgaacaatcaatagcactgcatttctcgctatttatatgtttataattttataaatttgattgggcagtttgcttttttcaatcaacattgatctatccttctacttattagtaatgtaacatacatacatgcatatggttcacgcattttaactatagtagcttattatcttatacattgggtcttattttcaagctgtgtgctggtaaatatttatggaaattttcctatggtgcacatcaagaatcagaattctgagcatttgcaggtgggtgcaggtagcctcagctactctggakgctgaggcaggaggatcacttgagccccgaagttcaaggctgtagtgtgccatgatcacacccgtgaatggcctttccattccagcctggtcaacacggcaagaccgcttctcaattcaaaaaagagagtcatttgaactaaacattg

SEQ ID NO: 894832 - DNA, 589 bp, Homo sapiens
catgaactgtccttggctttttctgtacctcaaatctaccatgatgctaacaagttttcctctgctattttgttgttattttcagtgacgttcaccagacatggcctgactgctatctcttttcttctatccatatccaagattctcgattgacctgtgaattgactgctcttgagttaatgctgaatcctggtccaagtggttgcttttagagggaagtcagatcacgaggggcagcatctctgctgagagggctcccttctatataaaactctctgaccagccagtgttccttaaacagaggagcaaacatgtaagctgatatgcacygtctcctctttttatcaatgagggctttcaggtactttttcacgcatcttaaaaatccaggactgtatctggcacttgaaaagttccaaccaagtcaggtaattttctatctttttatactaattttactaggtaattaactacaacacacatatatatttaaaaatatgtttatcgtaaataacaattactatgtattatggaatattcgtttttcacacttatttaatacatcagtttatatacatttcttcatggt

SEQ ID NO: 894833 - DNA, 761 bp, Homo sapiens
atccttttacacccctcccactgaaagcaagtggtctatgttccttctttttgaatctgggaaattccataatggattatgggagaatggaggctgtgccaagtttcaggtttagtctttaaaagattgtcagtttctagtgggttctgtttgttggaatactagtttttgaaaaccagttatcaggctgtggaaagttcaagtgatgtgaagaaaccacatgtagacaatttggacattatttccagctaaactcccagccaaagcccacatcaactgccaggcaactgattgtgctatgctgggacatccaacccaattccagctgtcatctgatagcagctacacacaagaatccgtgagaatgcccatcagaggctactcaacccattagactgtgagagataaaaataaatcattgtcttgtgtcacaagataagggcataaaattgacatggtataaattattatattaaatactcaacagtaggagtttattgataatcaaagtggtttttactttacttattaacacttttatactattattgcagcttattttgagagaaatgtcagtgtattctgagctgtctttttatgttttgtttatatttgctttgatgyacatacatagtgaagttattagcacaaagatgtgttaattaaagataattaacatatctattatctcacatagttatccaatctattgaggacaaagtttttgtctaatttttaaattcatttttttatatcactat

SEQ ID NO: 894834 - DNA, 610 bp, Homo sapiens
cctttgctcattataatacctggtacatcatgttataattaagattgtgtcactctttccattataaatcactattttaaagactcataaagcagctgtaaaaatgagctccaggctcaacttggcatgtaaaatattaacccaagagaatttatgttttttatttttattttacttttgtacaaaactgtctttcaggccttcttaaaataaagcaaaatttcaagtagattttttctttcaggtgcctttttggcacttcataaatcaaaaccagtcttgcttgttaaaaaccaaatcttgcaagcacttggtgaattaggagaggtaatcattttgagtgcttcaaatgactcttttaaaagtgycttaaatattttaaacattacatgtgatcactaaatatctgaagagttttataagccacctaccaggaaaatttttgcttctttcctttccagatggcattaaaaacattaatgatgccaaagtatagtgtaagacactttgctattattggtgtgattcactatttcagaatttagtttccataagacagctccctatggcaagccattccagcctaataatccccttgtgtaatattgtc

SEQ ID NO: 894835 - DNA, 630 bp, Homo sapiens
aattttcttgttgtattgaaccctttatcattatataatacccttctttgtcttatttttctgttgttggtttaaagcctgtttaatctgaaataagagtggctactcctgctcacttttgttttctgtttatatatcttttttcttctaatttactttgagtctgcagctgcctttagccagtaagtgagcctcttacatgcagcagatggttgagttctggaatttttgtttgttttctttgttttgtcttcttttgttttgttttttacagtttccactctatgtttttagagtagagcattcaagtcatttatattcaaggataatgttgataggtgagattttatgtttatcatagtgttgttagctagttgccttgtggtttcattgtgtagttgctttatgttatctgtgagctttgtatttctgtcawcttttatgatggtgtgggtcattctttcatttccatgtgtagactgcacatttgttggtggtctggtctagtggtgacaaattcccttggtgtttctttgtcggggaaaggttatatttctccttaatttatgaagcttagtttggcagaacacaaaattcctggctggcttttttgtttctttaagtgggcta

SEQ ID NO: 894836 - DNA, 630 bp, Homo sapiens
aattttcttgttgtattgaaccctttatcattatataatacccttctttgtcttatttttctgttgttggtttaaagcctgtttaatctgaaataagagtggctactcctgctcacttttgttttctgtttatatatcttttttcttctaatttactttgagtctgcagctgcctttagccagtaagtgagcctcttacatgcagcagatggttgagttctggaatttttgtttgttttctttgttttgtcttcttttgttttgttttttacagtttccactctatgtttttagagtagagcattcaagtcatttatattcaaggataatgttgataggtgagattttatgtttatcatagtgttgttagctagttgccttgtggtttcattgtgtagttgctttatgttatctgtgagctttgtatttctgtcatcttttatgatggtgtgggtcattctttcatttccatgtgtagactgcacayttgttggtggtctggtctagtggtgacaaattcccttggtgtttctttgtcggggaaaggttatatttctccttaatttatgaagcttagtttggcagaacacaaaattcctggctggcttttttgtttctttaagtgggcta

SEQ ID NO: 894837 - DNA, 598 bp, Homo sapiens
tcgcccagcttatttttttgtatttttagtagagacggggtttcaccgtgttagccaggatggtcttgatctcctgacctcatgatccacccgccgtggcctcccaaagtgctgagattacaggcgtgagccaccgagcccggccttaacagacttcttaatagacccttaatattaagaaaaacttaatagagcytctttagatttgttattagaatactgaattcattggaagaaattctagcattgttcttttgattgtgtgttttctggaaagaactttacttccacagtagttaaaataacatacagatgaagaatatatatgcttgttaatcttatgtgttgtgtatgtgtgtgttgtgtgtgtgtttggttcttttgtgctgtgatttgttttaaaagaatttcagtacaatcagagaataacaatcttagaagacatattacagttcacataattaaacctctcactgttggaggttcttgcacagatgttgtaaaaaataaaaacaaaaacaaaaaatgaaacatctttgtcagatgaaaagtgccattgctagtctttcttcagtaatgttactaaataaatgtcagg

SEQ ID NO: 894838 - DNA, 598 bp, Homo sapiens
tcgcccagcttatttttttgtatttttagtagagacggggtttcaccgtgttagccaggatggtcttgatctcctgacctcatgatccacccgccgtggcctcccaaagtgctgagattacaggcgtgagccaccgagcccggccttaacagacttcttaatagacccttaatattaagaaaaacttaatagagcctctttagatttgttattagaatactgaattcattggaagaaattctagcattgttcttttgattgtgtgttttctggaaagaactttacttccacagtagttaaaataacatacagatgaagaatatatatgcttgttaatcttatgtgttgtgtatgtgtgtgttgtgtgtgtgtttggttcttttgtgctgtgatttgttttaaaagaatttcagtacaatcagagaataacaatcttagaagacatattacagttcmcataattaaacctctcactgttggaggttcttgcacagatgttgtaaaaaataaaaacaaaaacaaaaaatgaaacatctttgtcagatgaaaagtgccattgctagtctttcttcagtaatgttactaaataaatgtcagg

SEQ ID NO: 894839 - DNA, 617 bp, Homo sapiens
ttcaggtcataatttattgtgcaaaggccagacagaaactcaagggaggtctcttttgcctcaatgttaatttctaacaaatgcaataaacatttcaaattttgaaggaggcaaacaaaattctgtttctttgtatttctcccaccacaaaatttcaaggttgacttgaagtcatacaaggttagtaattttctgagtgtttttttttttcctattttcttaagcatttgctatatagtgaaataacttccaaagaacaggatgttctccacagctaaagaactgctctagctaggcaaatactcatatcgtcaattaccattttaaaatatctcagagaacactctttgaagtaatccttcctcaaatcctatttgaaactggattcgtataatgggtaagtgggtaaacattttgtggaatkaaatgaatgaaggggaaaatgaattttgtcacgtataaagttgttatctttaaaggaatgcctgagtgttacttcttctcaaaattctgggaaaaccagatagagtattgttaaccaagtaattcctaactcatggtttgaaagtctgtgagggtttatgagaattagggttaagtgaagaaaggcactgaaa

SEQ ID NO: 894840 - DNA, 667 bp, Homo sapiens
gttgcaagaagatgcaaaatattttttttcctctaaggagaagctgatcacttaccttctggcttcttcttaatatattcacatatattaattagcatcaattttgaaaatcaaagtaaatatttatttactatgtggatgatgggaatatgaaaaccacaaaggctcaccattactctggccaatattcttatagtcaataaacatatttccttgagaaaactacaatggttacccctattcaaggaggaactatagaattttgagatataatggaagttgtagagtagtatttcattgagtaaagakctcttcaaggggcaataataagagaagcttataacatacaaaataatgatgatgtagcaactgagaaaactcctttaatactctgatatttcttccccccttcctccctgctgctcttctcatttcttcatttttcatgcatcattcttacattctccttctgcatctgccttcttttctcttcctctgtggttctgcatgatgtttctattttccctctttatatggcttacgtatgttttggatgtctcttctttctgttcacatcacgtgtatttgattttcaaagccaaatccaaatagtagtatcctttttcttctaaattgaaatagtgcttacatgtcctgaccatttcaa

SEQ ID NO: 894841 - DNA, 575 bp, Homo sapiens
acattcaaattcacgaaatccaaagaaccccagtaagatactccatgagaagatcaaccccaagagacataatcttcagattctccaaggtcgaaatgaaagaaaaggtattacaggcagccagagagaaagaacaggtcacctataaagggaagctcatcagactaacagcggacctctcagcagaaaccctatgagccagaagagaatgggggccaatattcaacattctttaaaaaaaaaatgtccaaatcagaattcatatccagccaacctaagatgcataaatgaagaaaaaaataagatcctttwcaggcaagcaaatactgagggaacttgtcaccatcaagcctgccttgtaagagctcctgaaggaagcacaaaatatggaaaggaaaaaccattaccagccactaaaaaacacactgaagcacacagaccactgacactatgaagcaaccacataaacaagtctgcaaaataaccagctagcatcatgatgacaagatcaaactcacacataacaatattaaccttaaatgggctgaatgctccaatttaaagacactgaatgg

SEQ ID NO: 894842 - DNA, 573 bp, Homo sapiens
atgaccggacctcaaacattaaaaaaaaaatggcgattaacaatttcccatacacttgcaaacatttatgacatgttctttcatcattccttgtgaatgaaatatgaaaatatagaaaatcctaccatttatttaaccccaaattactccagtcagattccttttatgaagattacagtgcagataaaaatataaaaagcttgagggcagtaaggatgctatataattctacctgtagatctttcctttcctaagtagtattaatcatttgtgctgtacttcatatacagacctcaygaagtcaatctccctgcctctttgcacattgctttgctttgactagatgtggacttgtgactaggtcttcctgatgaagtttgagggtagggggagactccaagctcccttttattctagcatgtcaatcagcaaaatcggcagcaagaagagactgacatgagtagaaccatgcttctctcaatatgagattgacattagcttacataggaaataatagatagtattttaagtcactcaagactttgaggttgcttattgaagcacaatggaaat

SEQ ID NO: 894843 - DNA, 618 bp, Homo sapiens
cattcttttctccaaatgtctagaaatatccagtttctcaaatatttttgacccatctttatcaacttaactggtctgtcattaatcagttgaatacatttttggcacatgtctattctgtttctatgtgaatctttttttaactttttgaaattttactttgaaaacaatgcctatgtacattgccaaactatgttaaaatgaaaagggacaattttctcacatcttaacaggcaatatacacaggcattcaaaagattctaatctatttaactatttattattatattgataagagcatttttgatgtacgtgcatcactgttttatttttcatgtatttcaatataatttaaaacatcattttatcttttttatraaaaattagatttagtattcacaaggatgagaaagaagttttacagtcttactgggtaaccaatattcactcatagatatctaagaaaagcattgctataatcaggtcataaacaatcatttagtcaacacgtccatggctctgcttcagtggcccaagtctatctgggagtcataagcaaggggttcccgacatgcttcattttgggatgaagaggaaacatttttctagtttgggctt

SEQ ID NO: 894844 - DNA, 618 bp, Homo sapiens
cattcttttctccaaatgtctagaaatatccagtttctcaaatatttttgacccatctttatcaacttaactggtctgtcattaatcagttgaatacatttttggcacatgtctattctgtttctatgtgaatctttttttaactttttgaaattttactttgaaaacaatgcctatgtacattgccaaactatgttaaaatgaaaagggacaattttctcacatcttaacaggcaatatacacaggcattcaaaagattctaatctatttaactatttattattatattgataagagcatttttgatgtacgtgcatcactgttttatttttcatgtatttcaatataatttaaaacatcattttatcttttttataaaaaattagatttagtattcacaaggatgagaaagragttttacagtcttactgggtaaccaatattcactcatagatatctaagaaaagcattgctataatcaggtcataaacaatcatttagtcaacacgtccatggctctgcttcagtggcccaagtctatctgggagtcataagcaaggggttcccgacatgcttcattttgggatgaagaggaaacatttttctagtttgggctt

SEQ ID NO: 894845 - DNA, 584 bp, Homo sapiens
aagacctcaaactataagaatgctagaagtaatcctaggaaacaccattctgaaaatcagccttgggcaagaatttatgactaagtcctcaaaagcaatttcaacaaaacaaaaattgacaagtgggacctaattaaactaaagagcttctgcacagtaaaagaaactatcaacagagcaagcaaacaccccacagcatgggcgaaaatattcacaaacaatatgttcaagaaaagtctcatatctggaatctataaggaacttaaacaattaaacaagcaaaaaaygaataacttaattttaataatgagcaaaaccatgaacagatacttctcaaaagaagacatacaagtggctaacaaacatgaaaaaaaatgctcgtaatcactgatctcagagaaatgtaaatcaaaaccaaaatgagatatcgtctcacactagccagagtggctattattaaagaactccaaaaatgtttagtaatatcttttattgaaaagttcctgccaaggctatagaaaaaggggaatgtttatacactgttggtgggaatgtaagttagttcagccactggggaaagtagt

SEQ ID NO: 894846 - DNA, 584 bp, Homo sapiens
aagacctcaaactataagaatgctagaagtaatcctaggaaacaccattctgaaaatcagccttgggcaagaatttatgactaagtcctcaaaagcaatttcaacaaaacaaaaattgacaagtgggacctaattaaactaaagagcttctgcacagtaaaagaaactatcaacagagcaagcaaacaccccacagcatgggcgaaaatattcacaaacaatatgttcaagaaaagtctcatatctggaatctataaggaacttaaacaattaaacaagcaaaaaatgaataacttaattttaawaatgagcaaaaccatgaacagatacttctcaaaagaagacatacaagtggctaacaaacatgaaaaaaaatgctcgtaatcactgatctcagagaaatgtaaatcaaaaccaaaatgagatatcgtctcacactagccagagtggctattattaaagaactccaaaaatgtttagtaatatcttttattgaaaagttcctgccaaggctatagaaaaaggggaatgtttatacactgttggtgggaatgtaagttagttcagccactggggaaagtagt

SEQ ID NO: 894847 - DNA, 659 bp, Homo sapiens
ggggcatatgtgctgctttgttacttggatatattgtctgatgttaaggtttggggtataagtgatcccatttaccaaggtactacacatagtacacaaaagcaggtttttcaacccttgcctctactcctccttcactccacctgctagctgtacccagtgtctatttttgccatctttacgtttatgagtayctaatatttagctccaatttataattgagaaaagactgtatttggttttctgttactgcattaatctgcttaggataatggcctccagctacatctgtgttgctgcaaaggacatgattttgttatttttatggctgtgtagtgttccatcatgtatatgtgccatgttttctttatccattccaccattagtgggcacctaggttgatttcatggctgctattgtgaataggactgcgaggaacatatgagagcctatgtattattgctaaaacaatttgttttcttttggatacataaccagtaatgggattgctgggtcaaatcgtaattcccttttaaagtctttaaaaaatctccaaactactttccacagtggctgaactaatttagatttccactgaaagtgtgcaagcattcccttttctccatagccttgccagcatctgttattttttgatgttt

SEQ ID NO: 894848 - DNA, 625 bp, Homo sapiens
tagctccaatttataattgagaaaagactgtatttggttttctgttactgcattaatctgcttaggataatggcctccagctacatctgtgttgctgcaaaggacatgattttgttatttttatggctgtgtagtgttccatcatgtatatgtgccatgttttctttatccattccaccattagtgggcacctaggttgatttcatggctgctattgtgaataggactgcgaggaacatatgagagcctatgtattattgctaaaacaatttgttttcttttggatacataaccagtaatgggattgctgggtcaaatcgtaattcccttttaaagtctttaaaaaatctccaaactactttccayagtggctgaactaatttagatttccactgaaagtgtgcaagcattcccttttctccatagccttgccagcatctgttattttttgatgttttaataatacccattctgactgatgtgagatggaacctcattgtagtgatttgcatttctctgatgattagtgatgagaattttttatatgtttgtaaaccacttttatgtcttcttctgagaggtgtctattcatgtcttttgttcatttgtattcattgttttatgc

SEQ ID NO: 894849 - DNA, 541 bp, Homo sapiens
acatttttctttaaaataaaacatactatttttagatagcagaaaacttggtgttgtttttcaattcgttctgaaaatacgaattttacttggattaattcattaacaattaatgtaactactgatatggttatgttgtgggtggtttcctaygttttctgcttttttctctgtcttaacttggttcttttttcttttttcttttcttttcttcttcttttttttttttgatggagttttgctctgtctcctaggctggagtgcaatggcaagatctcggctcacagcaaccttcacatcccgggttcaagtgattctcctgcctcagcctcccgagtagctgggattacaggcacatgccaccatgtccggctaattttttgtatctttagtacagacggggtttcaccatgttggccaggctggtctcaaattcctgacctcgtgatccgcccgcctcggcctcccaaggtgctgggattacaggtgtaagccaccacgcctggccagaaaaacatccttttcatctactcagatagtt

SEQ ID NO: 894850 - DNA, 594 bp, Homo sapiens
tgacttattttcctctggagagatacccaatagtgggattgctggattaaatggtagttctacttttaattcttcaaggaatctctacactgttttccacagtggctgtactactttacattcccactagcagtgtagaagtgttccctgttcactgcatccacgtcaacatctactgttttttgattttttgtttatggccattcttgcaggagtaaggtgatatcacattgtggttttgatttgcatttctctgatcattagtgatgttgagcattttttcatatgtttgttggccatttgtataccttcttctcagaattgtttattgatatccttagtccactttttgatgggattgktttttacttactgatttgtttgagttcattgcagattctggatattactccttcatcagatgtatacatcatgaagattttctcccactctgcgggttgtctgtttactctgctgactgttccttttaccatgcaaaagagttttagtttaattaggccccagctatttatctttatttttattgcatttgcttttgggttctttgtcatgaaatctttgcctaacccaatg

SEQ ID NO: 894851 - DNA, 629 bp, Homo sapiens
gaatgacactaattaaaatccgtatatttactcatttgaatcttgacaatcattcttatttagatgaacctcattcaaatagttaatatttaacatgttttcttcaggaatttttattagcaatgagaatgttaattgaggatggctgggctggctgggcttacattccataagaattgtacccttttattgaatatttaaactaagtttaagtatatataaaagaacagatattgcaacatgtttctggtattaatttccaaaaaacttttttatacgtgaaattatgaaatggtacttcctatagtctagtactaaarataaaaaaaagtcttttatcattcttactgcataaaaatgctttagtgcgtattgttaagaagaataaaccaatccactttagtttccttatccctgtgactcatttatgcacttgatatttctcagtgtagccctacaacaatgtctttaaattatgtaattttctatgaattcaacaaaagaaacctaaaagttgactctgagcattttcttggccttcctcattttgtggttgattgtggcctacataatttccctgaaatgagtcagcttccttccaaatagtttaggattccaagccctctata

SEQ ID NO: 894852 - DNA, 552 bp, Homo sapiens
catcgatgcatcaatagtgcttaattataatgacagcttcaagccacagtatttttccacatttttttagttctatgttctcttaaaactagtctacctaggctgggcgtggtggctcacgcctgtaatcccagcactttgggaagccaagggcaggcggatcacaatgtcaggagatcgagaccatcctggctaacactatgaaaccccgtttctactaaaaatacaaaacattaactgggcgtggtggggggcgcctgtagtcccagctactygggaggctgaggcaggagaatggcctgaacccgggaggcagagcttgcagtgagctgagatcgcaccactgcactccagcctgggcgacagagcaagactccgtctcaaaacaaaacaaaacaaaacaaaaaaaactagtctacctcttcccttagaaactttgcatcatttaacaacttgtgttagagagaataatagcctcccaaaaatgcctatgacttagtcaccagaatctattcatctgttaccttacatggaaagcaggactttgtgggt

SEQ ID NO: 894853 - DNA, 552 bp, Homo sapiens
catcgatgcatcaatagtgcttaattataatgacagcttcaagccacagtatttttccacatttttttagttctatgttctcttaaaactagtctacctaggctgggcgtggtggctcacgcctgtaatcccagcactttgggaagccaagggcaggcggatcacaatgtcaggagatcgagaccatcctggctaacactatgaaaccccgtttctactaaaaatacaaaacattaactgggcgtggtggggggcgcctgtagtcccagctacttgggaggctgaggcrggagaatggcctgaacccgggaggcagagcttgcagtgagctgagatcgcaccactgcactccagcctgggcgacagagcaagactccgtctcaaaacaaaacaaaacaaaacaaaaaaaactagtctacctcttcccttagaaactttgcatcatttaacaacttgtgttagagagaataatagcctcccaaaaatgcctatgacttagtcaccagaatctattcatctgttaccttacatggaaagcaggactttgtgggt

SEQ ID NO: 894854 - DNA, 552 bp, Homo sapiens
catcgatgcatcaatagtgcttaattataatgacagcttcaagccacagtatttttccacatttttttagttctatgttctcttaaaactagtctacctaggctgggcgtggtggctcacgcctgtaatcccagcactttgggaagccaagggcaggcggatcacaatgtcaggagatcgagaccatcctggctaacactatgaaaccccgtttctactaaaaatacaaaacattaactgggcgtggtggggggcgcctgtagtcccagctacttgggaggctgaggcaggagaatggcctgaacccgggaggcagagcttgcagtgagctgagatcgcaccaytgcactccagcctgggcgacagagcaagactccgtctcaaaacaaaacaaaacaaaacaaaaaaaactagtctacctcttcccttagaaactttgcatcatttaacaacttgtgttagagagaataatagcctcccaaaaatgcctatgacttagtcaccagaatctattcatctgttaccttacatggaaagcaggactttgtgggt

SEQ ID NO: 894855 - DNA, 552 bp, Homo sapiens
catcgatgcatcaatagtgcttaattataatgacagcttcaagccacagtatttttccacatttttttagttctatgttctcttaaaactagtctacctaggctgggcgtggtggctcacgcctgtaatcccagcactttgggaagccaagggcaggcggatcacaatgtcaggagatcgagaccatcctggctaacactatgaaaccccgtttctactaaaaatacaaaacattaactgggcgtggtggggggcgcctgtagtcccagctacttgggaggctgaggcaggagaatggcctgaacccgggaggcagagcttgcagtgagctgagatcgcaccactgcactccagcctgggygacagagcaagactccgtctcaaaacaaaacaaaacaaaacaaaaaaaactagtctacctcttcccttagaaactttgcatcatttaacaacttgtgttagagagaataatagcctcccaaaaatgcctatgacttagtcaccagaatctattcatctgttaccttacatggaaagcaggactttgtgggt

SEQ ID NO: 894856 - DNA, 655 bp, Homo sapiens
caagttgcctgcttggccctcttccaagtgtactttactttcttttgttcctgatccaaactttttaataaactttctcccctgctctaaacttacctctatctctccttctgccttctgcccctcattcaaattctttcttctgaggaggcaacaggttgcttcaggccctcgtggatctgccactgctaacctgctttggtaccgtgcaactcagatgctttctgctgctaacaatagtagcagcttcttcacaggggtttgtgaagaatgcatataaagctcatatatacattcctggcacattgtagaagctatagaagtgttggttattgttattttattatattgaagaggaaaaattagctccagtgaagggccttagaaagggagagygtgaagtttctattcctctgtcaagaagatggtatctgccaaattctgacttttctgggcctcgagtgggcactttcgcccttttttcataaaaataactaagctaatattatattttatgattatgttgatataaagatgaacacaattcaggctggatttattatcatatatttattgttattaatatttttcttctgacttaaataaaattaaaatatttttgtggattcctaatgttctgtgggccataggcact

SEQ ID NO: 894857 - DNA, 657 bp, Homo sapiens
aggactgtgctcagctaggactcagttgttcgtgcctagaggggttaggaggcatcttttacttcagtttctatttgcctgagttttaatttttttcactgaaataagtagaaggacaggttggggcttcaggagtaggatgacagctatatttttatgaggttttgttgaaattagcgtctacatttcaatagctctacgttcccacctgcttgatggcggcactaaagggagcccctcaaaacctcctctgctattccaggcattccaaggtggccttgcaggacagcaaggaagaaatttgctcctggactatgatttcaacctcgcctgctgtcyattgcctgtcatgaagaaggcatcgtgatgaggtattgctttcacaccctctgagagaataggactgccacatactaccataagcttgatggcttaaaacaacagaaatgcattctctcatggttctggaagtgagaagtcctaaatcaaggtgtctgcagggccacactccctctgagggctctaggggagaatctttccttgccccctccagcttctgatggctcctggtgtttcttgcttgtggtagcatcactccaatctctgtcttcatcttcagcattgctctaatctctgtctccatcttcctatggcctt

SEQ ID NO: 894858 - DNA, 641 bp, Homo sapiens
tgatgcctagggtcatgaagggtttggagaagtcaatgactttctcccgcacgtaggtgatggtaagaggagccactgccaggtcagccctctgcaaaagcaagtccaaaattgtcagcttagtctagtttctttgcaaatgtctagacttttcctgggtactcctgattcttattctcaactctaaatgcttctcattcatgaagctcctgtgatggttggttctaataaaaaaaagccaatttatacagttatgtttatgaaacagtatcagcaaagagaaaccagaaagtataaaacacacatatacatacacaaatatatatccatcattytggaactaaagacaaaaatgcaggaagatgcctttaaaaagggcatgtgagaaaaagaaggaatgagcaacttggttgtactattaattgacatgatgagattttgctctgagctgaaaactttaaaattcttttttttttttttttttttttttttgtgaggcggagtctcactctgtcgcccaggctagagtgcagtggtgcaatctcggctcactgcaagatccacctcccaggttcatgccattctcctgcctcagcctaccgagtagctgggactacaggcgcccaccaccacgcctggct

SEQ ID NO: 894859 - DNA, 641 bp, Homo sapiens
tgatgcctagggtcatgaagggtttggagaagtcaatgactttctcccgcacgtaggtgatggtaagaggagccactgccaggtcagccctctgcaaaagcaagtccaaaattgtcagcttagtctagtttctttgcaaatgtctagacttttcctgggtactcctgattcttattctcaactctaaatgcttctcattcatgaagctcctgtgatggttggttctaataaaaaaaagccaatttatacagttatgtttatgaaacagtatcagcaaagagaaaccagaaagtataaaacacacatatacatacacaaatatatatccatcattctggaactaaagacaaaaatgcaggaagatgcctttaaaaagggcatgtgagaaaaagaaggaatgagcaacttggttgtactattaattgacatgatgagattttgctytgagctgaaaactttaaaattcttttttttttttttttttttttttttgtgaggcggagtctcactctgtcgcccaggctagagtgcagtggtgcaatctcggctcactgcaagatccacctcccaggttcatgccattctcctgcctcagcctaccgagtagctgggactacaggcgcccaccaccacgcctggct

SEQ ID NO: 894860 - DNA, 581 bp, Homo sapiens
ctcccaccaacagtgtgaaagcatccctttttctcggcaacctcgccagcatctgttgaaaaggaatttaaatatgtaaaagaatgtaaatcctcccttcctagaattttccttgacatagccattgtcctttgccatactgaataaattgtttcctattgagagagacttcttattcttcacttatatattggaaactatgttttcttctgagaacattgtgtatggaaggctcatggcaaactcaaggttaactttccttgctagatcaaggtgaaraaaaaaattgtttttaagtgactattctattttttaataaaacttataaaaacttgaaaatgaagcaaaaaaaaaaaaaaaagattgtgtgaccttctttgtcatggtggccatagtacaatagcctcatccaagggtgatttgattctctaaagaggtgtctctttatttttaaatttactgttgtttaagatgcagattctgtgaaattacatgttaatttataggatttgtatgtggcagagatgtaaatgatttccatctaatagaaaagataacctgaaaaattataattgtattga

SEQ ID NO: 894861 - DNA, 644 bp, Homo sapiens
gttggcattaaaaacctaaactatttctaccactgtatggcttttaactagaggtttgtggtctaccctgaaaacttaatctactatgcatatctttatttctaaactaatacgttcttttgagttcagcctacctaaaagcatacttctggtgtactgcctatttgtaaattgaaacttgtcataagtataataacattgcccccattgttcgtattaattcatagcaagggggaacactactgtatagatgttataaatgcttaggcaagggagaccattcagctcttaacccaatttcctgctgcaaatatcaaaagttggatcaacatatgcccctagttacaaagatgtaacatyatttctaaagtcttcagcagcagaatcctaaagggcccctaaatttcagtcttaactttgttccagccacatcccagctgtttctcccaagtacttcatcacctgcaggctgttttcagttcattatgggaccaaggagaggccactgggacagtatatcaatagaacaatccttgccaaataatgatatttggaaataggctgggcacggtggctcatacctataatccaagaactttaggaggctgaggcaggagaattgcttgagcctaggagttgaaggc

SEQ ID NO: 894862 - DNA, 656 bp, Homo sapiens
gccctgaaatctgattcaccatgaacttccagtgttattagccaataaatctcctttaggggttaagctaattttcaaatcaaatgcagtgtaatttacctgccttttaaattttgaagactaagaagaaattgttttcttctagtggataaacaactccactagagtgagtggggtgagaattaggtactttataaagctaaattaattccagtcaataaagcaatcaccaacacacatatttgcttattgtgtgttggttagtgtatataggagagtactaatgcacagggtgccaattctccccacctgacacctatagcagacattgctagtcagccattatggtgctcctactgagccagctttccttctcatcagtgtttgaggtaaccacagtcaagagaccagagttggcaagggaaacctgtgatcactgatataggtagtcactgattgttgctaaaatatatacctggaaatttggtgaaatctctgcatcataaatcagcattkctccacagggacactattaataactaggagttgtgttgccatataagaaaccaaacatgctataaatcacagagtaataaaaaacatgacatgaaaacacaagtcgactataaaattttataataatctagagtaaataa

SEQ ID NO: 894863 - DNA, 612 bp, Homo sapiens
ctctgcgattacggaaatacttagattagcaggtttatgataatcattttggcattattttcccactgaaaatgattttaaaacgtaatgtcatttgaccctctcttgccttatcaactctaaatgtaggtaattccatattatttaaatatcaatactaagggagtatcatccatattgatcaatcactaggtaggggccttttaagacatttgtttaggcaaccatcccatagccctctattaagttattgtagagtctagcattaattaattcatatactgagtacttaccttgcgctgggcactgaagatatgtaacaataaacaaaccacacaggatctttgtttatatagggcttattataataattcttcagtgaaataaaagttaagaacaatgamgacattcataattatgtctatccatagttttgtctattcttagttatgtctatccataaaggtttttagaagttttacaaaaaatatctgctattattgttggacatgaccaatgaaagcaaatgtgttttaatatactgaactttatataggtagcccttgtcttttctcattaagccccatcttcaatcccttttccatacgactt

SEQ ID NO: 894864 - DNA, 574 bp, Homo sapiens
ctgacccagatgacagggaccgcctgcaacattctcccacccccactgcactttcaccccatcaagccctcaaactggattgctgatctttgttcaaatagtagcttacacactgagactaagatgagtctgaagcagaggctagscgttctgttttttaacattaaatatataaagactttgaaagatgtgaccaaagaaagctgtcttttcctggagcttttgaaaaaaaaaaattaacagcaactgcaactgccatacagagtgcttgccatgtgacagatagaagatcattaactatgtagtaatcaatcatttgcacacatatgtgggtccccatgggacacaacatttattatccagttaatccttgaaaaagtgtctactctcactgtttccatttttttcttcctgctctcacttccaaaccaattagattttcaccctcatcatttctctgttactgtttttatcaagatcaccatgggcacctgtggtagtaaatccagtggtcatttctcagtatttatctttcttgacctatcagcagcatttgatgtactattcttttcaa

SEQ ID NO: 894865 - DNA, 666 bp, Homo sapiens
ggggaagcagctcatcttacatggctggagaaggaggaaaagagatggagggtaggtgctacacatttataaacaagcatatctcatgagaactcactcactgtcatcagaacagcaaaggggaagtctacctccatgatccaatcacctgccaccaggcccttccttcaacatgagatttgagcaggaacacaaatccaaaccatatcaccccctacccatacacacaccacacacacactctctcaacaaggtggctcccaggcatccttcagatttcacagcacacaccactccccttggaaaccatttcttaactgccrtgaatatggagaatctccatgctttcacagcaccatgaacttctccatggcatttatggcagccctgatttgaacatatacataacatacacataaatacaattttatgtataaaattaatttcaagtaaagtgctttatataattgtatacaaatgtattagtcttttgcattacaaagggtttattgcaaacctatcacatagtaaactcttaaggtaggtttattgaagaaagaagtgaatgaattgaaagagagatacattagggaaatcagatagtattatcctaaattttgaggaccaagtatttttgcagttttagtatttttttagaacaataat

SEQ ID NO: 894866 - DNA, 545 bp, Homo sapiens
tctagcaatgcatcagaagggacaatttaagtttcatagtctataaatagctttgtctttcatatttttttttacacataatttttgagaatctttgaaatcaaggggaggatgaggcacaactgtagctatttatcccactggaatccctgaaataccctttctaagagggtgcctattgcaggcttgagaaatcaatacttaacctatagaaacaattattttaaaacagcctttcagagggtggatcaagtttgactaagggctaaaagtggtgagacaatggtttcctgcaaaataaattcaataattgttttggctcataatatttttttacactgtgtctgaacaattaatgactttttctggtagtctcttgctgaaatatcaacataactctcaatrcagaacaagaaagcttaaggctgaatccaaaaataatacactatagaaaatagcaaccaaacccacctacctgatagacacaattttacaaaatacacacaacagctgggaaaaaaacataaacatggagccaaaacatg

SEQ ID NO: 894867 - DNA, 611 bp, Homo sapiens
cgtaactcatggtttataggcagaagtaaatgagaaaccacctatagtactcaggactcatcttggcacactgtgtttattcaataaataccagtgattattatatattgctcttcatttacaaaggaagaaagtgcagggcataaagggacctcacttgatgtttcataaagacacatcrtggaggaaagaataagaatcaaagacttttaactttcactctaggccagggtttgttaagagaccaatagcatacgagtaagatgcctggtgtctaactgatcctcttggggactccagagaaaataagaggctatctactctaagccttttgactgctggaaacctcctagctgcagcttgtgagccctgggcagagttacagcctgctgctgttactgccaacctgggggagtgacagcataattggatgcctctctgtcttttggctcaagacaagggcaaggaagaatgcccacctgcagggaggaagtagagtccagaagacagaaattttgacaaatagggaactcatctgcctctctcaccagctctgtcctcatcttagatctgcaagccctcacctgagctcccttcctgaatgacttgaa

SEQ ID NO: 894868 - DNA, 611 bp, Homo sapiens
cgtaactcatggtttataggcagaagtaaatgagaaaccacctatagtactcaggactcatcttggcacactgtgtttattcaataaataccagtgattattatatattgctcttcatttacaaaggaagaaagtgcagggcataaagggacctcacttgatgtttcataaagacacatcatggaggaaagaataagaatcaaagacttttaactttcactctaggccagggtttgttaagagaccaatagcataygagtaagatgcctggtgtctaactgatcctcttggggactccagagaaaataagaggctatctactctaagccttttgactgctggaaacctcctagctgcagcttgtgagccctgggcagagttacagcctgctgctgttactgccaacctgggggagtgacagcataattggatgcctctctgtcttttggctcaagacaagggcaaggaagaatgcccacctgcagggaggaagtagagtccagaagacagaaattttgacaaatagggaactcatctgcctctctcaccagctctgtcctcatcttagatctgcaagccctcacctgagctcccttcctgaatgacttgaa

SEQ ID NO: 894869 - DNA, 653 bp, Homo sapiens
gtttcatctaatatgttctttggagttcattttggactcagatttggaaagtcttgtaagcgtgctttatttttttacagaatctagaacattttggagaattcttaacttttaccacatacataaactgaataactaaagttaggcaattcrtttggcttttgggaaataattagggttcatcagctatgcttcctagaagaatcactgaaccaaaaatatactctacctgataaattacaatctacttaataacctgcaaattagcaagcattagctcaaaggatgtaaataaaatgagttccaaaaataagaggcttaaacacaaaatgacagctcaaaagatgtatggtgaaaagtatactttcaactatatttagaataaaagtttgctaaaatatttctaaggctgatcttttagaaatctgtatctccatatgccatgacaaagatcaatatttatttatgcttttacaataaaaagcagtattgtctttctcctctagggcctgcagtaataaaatattttacagctcctttatattttataactttaaattttcattgatgctaggcaaggaatagtgtagagatgtagtcttctttgtgaaggacttttaatccttaattaatcatttatataaatctattgc

SEQ ID NO: 894870 - DNA, 567 bp, Homo sapiens
caccagacattgttctaagggtttaaaaatacattataaaagctttaacatttgttatccaatttctatagccgaaaaaaagaggaaaaacagaaatttttctgttgagttatgcaaatcttactcttataattttatttacacagaaatgtatatgaaaataatcatttttataatttccctaattctctaataactcartttcctagatatcaaccacttttcaccatcttccatcttctactgtgaccttttcccccttgttcctccttgtcaatccccattttctatctcatcctgtgtcatgttggctgaatctaccttggtccaatttcctgctggtgctcttcttagagctggccaaatcttcagcacggtggaaaggaagccgaacagcagagcgtaccttcaggagttttctactcactccttccacagaagcaaacaaaaaaattaaccaggcatattcttcaaaataggcctccaacatacattttcaaaatcaagctacctcactagtcgagacaagctgcatctcaggcatttgtatttcatgatgtctggtca

SEQ ID NO: 894871 - DNA, 567 bp, Homo sapiens
caccagacattgttctaagggtttaaaaatacattataaaagctttaacatttgttatccaatttctatagccgaaaaaaagaggaaaaacagaaatttttctgttgagttatgcaaatcttactcttataattttatttacacagaaatgtatatgaaaataatcatttttataatttccctaattctctaataactcaatttcctagatatcaaccacttttcaccatcttccatcttctactgtgaccttttyccccttgttcctccttgtcaatccccattttctatctcatcctgtgtcatgttggctgaatctaccttggtccaatttcctgctggtgctcttcttagagctggccaaatcttcagcacggtggaaaggaagccgaacagcagagcgtaccttcaggagttttctactcactccttccacagaagcaaacaaaaaaattaaccaggcatattcttcaaaataggcctccaacatacattttcaaaatcaagctacctcactagtcgagacaagctgcatctcaggcatttgtatttcatgatgtctggtca

SEQ ID NO: 894872 - DNA, 706 bp, Homo sapiens
ttgtaagaactctgtctccacttcagaaagccaaagtggattatgatttcaagtcttaaatatcactgggtttaatacacataaacccaatgttcctggtttgcagccttgtaaaataaatagatataattgcaggcagttgcatactaaaaggaggataacacttctgtattcacagagatttgtttactgatgacatgaaacatacatgaatatatcttttatgtaacattatagatacatacacacacagattctacaaactaagctggtattagacatcacagtctcaattctctccagaaaaagtaatgacgtttatgtgtttttctcgaaatcaacatgcttctgatgtttttctcattatgttcaaactcatcaagacttaagacatttcgttttcagtatatcacttggcttgcttgcrcttgcacacctaaatactttccaaatgaagactggattttaacataagataggaagaaattctttttggtgatttgccatttatttttcacaaaagacaggcaccgcaaaacagacaaacgttaaaatatgctttttactctaatttgatgaggtatgaagccctgtgactgaaattgagagaaatgaataattaagcatgtctcacttcttggtcaggtttgcacattggtatttactgtttctgctgccattttactacggcattagggagaaagga

SEQ ID NO: 894873 - DNA, 674 bp, Homo sapiens
tctcagaaagaagcaatcttagaaaaaaattatgatctatattggaagcaacctaaatgaacttttcatttttctttactttcaactaattttcttaattcttgtatggcaaaaggtacacttacttaaatgatcatttaaaaataaatgaaaacagttacttygcttaaaaatgactaaagttcaaacttacagcttttgctgttgtattcctcggcccttttacacttcattttctttattgggtcatgcatttgtatgcttctaaataagttactttttttagcagacttttgagataagatacagacagaattgcagaacctgttttatttcctcaggaagaatctcagatgggagtggtgcataagaccagactgcagaacataaaatggttttctcaagtctacactagctagaaagcaatcacccttcttctttctttttatttgacccgaaaggacttgtgtactgatttacacaattctatgccatttgtgtgtgtttatgtgtatgtgtatgtgttatgcaaaaatgagtctttccacagggaattttgctgtatttccttttgactgagtatgaattatgctgtagatagatttatgaaatataatgctaatttggatggtctcatattgacttgtagggtgatactgtcctccttcaaaagg

SEQ ID NO: 894874 - DNA, 628 bp, Homo sapiens
cacatttggaattagaagagtgatgagaaccagcaggaaggtagaacaaaaagccaatgacattagagaagtgttcaaacagccagctaaattcactgcacttctcaaccacagaaatattttcaggtgattctgtttttgagaaaacgtgggaaccacaggatctacaacacttccaggcaaaactcaacagctytaataatagtgacagaagtgaaagccaatttggataaaataagacattgactcaaagtcctctgagagatttttcaaaacaaagtttacaaagctccttttgccttttgggaaatcacattcttctttgcaccttgactctttttctgaatttctttctgtctgggaggatctccctacagtgtttcttctccatctgacatcatgaaatgtgatactcaagcaggagaatcgcttgagtcctggaggcagagattgcagtgagccaagatcgcgccactgcacttcagcctggatgacagagcgatactctgtctcaaaaaaaaaaaaaaaaaaagaaaaaaaaagaaaaagaaacaaggatataatgagatgtctttgttctatgcctttgtatccctccagacaaatcttttttgttgaactgttgtgc

SEQ ID NO: 894875 - DNA, 628 bp, Homo sapiens
cacatttggaattagaagagtgatgagaaccagcaggaaggtagaacaaaaagccaatgacattagagaagtgttcaaacagccagctaaattcactgcacttctcaaccacagaaatattttcaggtgattctgtttttgagaaaacgtgggaaccacaggatctacaacacttccaggcaaaactcaacagctctaataatagtgacagaagtgaaagccaatttggataaaataagacattgactcaaagtcctctgagagatttttcaaaacaaagtttacaaagctccttttgccttttgggaaatcacattcttctttgcaccttgactctttttctgaatttctttctgtctgggaggatctccctacagtgtttcttctccatctgacatcatgaaatgtgatactcaagcaggagaatcgcttgagtcctggaggcagagattgcagtgagccaagatcgcgccmctgcacttcagcctggatgacagagcgatactctgtctcaaaaaaaaaaaaaaaaaaagaaaaaaaaagaaaaagaaacaaggatataatgagatgtctttgttctatgcctttgtatccctccagacaaatcttttttgttgaactgttgtgc

SEQ ID NO: 894876 - DNA, 645 bp, Homo sapiens
ttaattccatacatattatatccttattctgctaatcaaagtttattagtctttgtattcccaatacccaccctatggtttgactaggtcaggtgccgaaaaagtattttttgtaagtaaagctgtgaaggtatcaatgaatgaatgtctgttctcgtgtttaggtttgtgtttgcgaactgttgtttctctctatattttcttgctctctataaaacacgtctgtttctgattgttcatcttatactaacccagtttgattttgcttgacagcagggaccttttttttcttagtttgtattcgtttattacatgtcctgtttttacattttactttttgctaatgccaattgcttaaaatatactaattgaatgaagacttgcaatcacagtcctgtgggatatccagtctgttatcctcacaatgacatcctcaagtttaaaaagtgggcactcataagaaattgaacaaamtttgtgatatcctagcaacaaagaaggggcaaaaactactgaaaagtttcctgatggtgtttatccccatgtgatattgcaccttctgagaacatgtttgaaatttagtacctgttcacagggaatttttaaaacattaacacttagttgcactaacctgtgttgtgtgtg

SEQ ID NO: 894877 - DNA, 541 bp, Homo sapiens
tgagagcaaacaataactgattgttataattaattttcttgtgtaatcacacaacgactactgaaaagataatagaaaggtagtagtgattattatacaatagcaaaaagaaagattattgccattactctggtcctcattacgtagcctatgagatgtaaatcatctcctgtattatcaccctgatgagaatcttttatctatttaataatttaaaaaaagttattgagccccctcttcttgccagggactgttctgggtgccagggatacataaaagaacaagatttgccttccagtatttcacatttcatttggtatggaaaggggactgaggagtagcaattatacataaataagtaaacaaaaaatggataataagttctattgttcaattaaaatttawtttaaaagacattatagagaatgactagttctgaaaagatctttttggtaaagtcagattcaagcttatttctgagtgacaaaaagaagctagttaaacaaacactattggcatcccattaccatttgtacaactg

SEQ ID NO: 894878 - DNA, 614 bp, Homo sapiens
gaccgttctcagtcttcttattcttggtgcatttagactgtatctgccttattcaaagatatgacaaaggccataaatgctgaggtgtggataataaaattattcctgaaaaacaacctctgattatcttagactttgtaaagttaaaatagcgatagtggcttctattttgttattcctaaaagaataataactacaatcaccctgactttctgctctggggcactttttcatcagggtgcaaggaggagagcccaaacaaagtatgcatcctggctaagaaaagaagacaaaacttagtgtgttggggggctgatgccgctaggatttgtcaggcagactagcagagaagagagctatagagaaatctgcagagcacttcagaaaagagagctatacagaaatctacagagcatttcagaaatctacatagcacttcagtttctttgagtctgtggctagatattaatcygcatatgcatggagtgaaaccccattagaacagacaaagaattaccagggatccttaatgtgatcaaatcccagaatttaaacaggacaacgatgcgtgagttctgaccagccagattgcagtgattttagtgattatcaag

SEQ ID NO: 894879 - DNA, 627 bp, Homo sapiens
gctctttacacactcttcccatgattgtctttggtatatctaaggttgtgtctcttaagtccaaaggattaactaagggtaatgatggatcttaatatcaaatgctataataaaactaaaaaagtgtaatttgtgtgaatcacccaaaaaagatattaaccaggaaaagcaacaagaaaagaaatacaatgtgtattttcaatgtggaggacagttctggttagcaatgagggttactgacctgggactgggtggctttccagggatgcaggacatttggtgctgaaaccaggacagtaggtcaccctgtaacctgaccagtatgaacatctttggcttcaccaagagtaggtggatatctacctacccagtagtctgcctacccaggcaggactgggtagtgccrcctgaatgcactgcgataagttttattctttctaagatgcaaatcagagagcacctcaggcaatgtcattgcaagggctggggaaaggattccaaaacccagctgtaaaattacctctagctgtaaatacttttttatagctttgattctaatttcccttgagattctttataaatcaatcaatctctttgttcctcaatttttttaacttactaaatggg

SEQ ID NO: 894880 - DNA, 606 bp, Homo sapiens
tttttttcaacacattgtctttgttgtatactctagtaagcagaatagtggttccccaaagatgttcacatcttaatccctggaatttgtgactatgttagttacaaaacaaagaagaattatgtctgaaggtgaacttcagtgattgcagatgaccttaagatagggagatcgtcctagatcagcgggatagatctgaagtaatcaagaggatccttaatgtgggaggcggaaggggacgaaccagagcgatagcagcctgtgtggctttcaagatggaggacggaagccacaacctgaggaacacaggcaacttctaagagctggaaagagcaaagaaacagattctccaaagcttctaacaggaacacagtcataccgracccttgattttaaattcgaacgcctccatccctgtctatcactttactctgctttatgtatttttaattacttatcactatcgcacattatataatcaacctatatgttgatttttaaattgtttttctgcttactctaaataaactctgagaataataacctattctgttttatgtactaatatattcccaatatttagacaagtgccaggaagatagtgtg

SEQ ID NO: 894881 - DNA, 587 bp, Homo sapiens
gtgacaaactacagaacatcaatgacaagacagaaaaatgttaatacaagttgagggaaagaaagacagtttgcttacaaaggaactacaactagaattatagctgcctattcaacagcaaaaattaagccagaagacagtggaatagtatctttaaaaatagggagagatttttgcctctaagagaaatgcgggaatataggatttggagggacggatacagagagcttctcttctagagcagagaaatattttcctaatttgtcttgctaatctccacttctccaaaccccaaatatatgcaacaaatataaatgtcrtggttgttacttactaagcagtgttactgaacgagctacctgctctgatttcagaagtaaataaaacttagccctagccttagaggatattctagacagaacaatgttctctccccattcccaatgatgtccacatccgaatccccttaatatagaaaaagagactttgcagatgtgattaactcaaggaccttgacatagggctatcatcttggattatctgaatgggtccaatgtaattacaaggattcacgtaagagggagaca

SEQ ID NO: 894882 - DNA, 604 bp, Homo sapiens
aatgtaagtgtcatttcctgttccttctggatcgtgtgttccctaatcagtcaaatcgcgtcttccagcctccgttatgaatatttccatcgcttgtgcgctccaggaaaacctggccacctacaccctccctgaaaatgtatttttgcctgcagtgatctagagaaaggggaaggctattttactgacccaaatgsttcaactaaatttgatttcagccttggaagcaaagaggcattctcctcttattcagcgtcattgccaactttaaatcaatacctctcccattgtcctaaaacctccaaatctaaagatcttgctatcagattatattatatacttctatccctcttcttcacacttgatatagtcacttaaagactcctgcgtcactttctctcattctttgaacattttagcttttgcctttctgtcgctttctctaccaatatttttgtctttattgaaaatgaattcatgatacattatgataatccggctgatgtcctgggcctctccattccccaccatcatctccaatgatcctactttctacttcagctcagccagctacttgaaaggcacacaaatcttaactgaatat

SEQ ID NO: 894883 - DNA, 667 bp, Homo sapiens
acaaaccagccttgtctgtttcagaaatagaagagacactggtgtttgagaggcacagggcactgaaagggctttagatttggatatatctgcatttgcgcactgcttctccacttactgtccatgtaatttgggatatgttccttagcctttctgaacataactttcctcaggtaaaagagcttcttttcatwgtttatgtgaggattgtgggctatttttgtaaagtccaatcacagagtgtatgccttatgaaaagattggctaccacggctgcaatgattaataatatgttcatattttcctttctgattattgactatgtttgggaagagtgatcatttaaaatcaaatattgacatgttaatattgcttatctctttgaggcaggggttttagatgacttttacttttgtatgtaattttatttttaagtgaaaagtattccacaagattttgtatattatacaaacatataattggaaacagagctaatgaacaaatcaattttgattatgaaagaattaaaataaagttgggttgatatcagtctgtagatcaaagatgcctcaatgaaaaattttgttctgggttaatccaaggcacaaccctcctttattaagcagtttgttatgtcatgcaccagaattatccacatttgagttga

SEQ ID NO: 894884 - DNA, 704 bp, Homo sapiens
tccaaagaagaagttaacttaagtataaaccttgaatctgtgacttaatgtggaaataattagaaatttgcatggattaccattgttcctgtgtttcccttacttttcaatcaaatattgtttcaaatttcatgctagcttgaataactatttttataataagyaaaacagaaaaagctaacttaaatatatgtttattatatcaaatttttgataatagctatcccctggatagtaacccagatgtgtctatgtgtttgtgaaaagaagcctatggggtatgatgtcatgaaaaatcgctttcagattttgctgcgtattctgctatgttggtagaattcagtacatgagactatgttcacatagtacaaaaataaataacatatagtacaattttgcatataacatctatctaaattcaaatatagttcttatcattcacacttgagatccagattccatttaaataatatttattaatcttctatcacatgcaggaaatgttacatatattactgtaactaaattaggttactcttcaacttggcaatgaaaaatcccctttggcatagactttgctattaaaaaagaagttggtgcaagttttacaaaagaagggaaatttttcctggggccattcatagttgacactcagaaattatagtggaggaacacctagaatagaacagattagaagaacaagc

SEQ ID NO: 894885 - DNA, 644 bp, Homo sapiens
agccatatttgctaatcttttattttacaagtattgtttatttgtttgtttgtacttacttgaaaaaaatctttcctatctaaggtctttaaggtaatgtcttatattttcccttttttattttaggcgttcttttttctacttaaatttaactacacctcttttcaaatttgcctgtcacctcacacatttttttccattgagtactcataccctagttacctcaccattcagatgtcacttccatgccatttcttcccctgagtgttcttttgttcttcaggttaggagcaatcttcttgcctgccagagagtcttgcaaaaaaaaaaaaaaaaaaggtgattttcttttcttctccggaagtttttatattgtacttaaactagtcaagacagtattatgcttgtttcagtatattattcttccaaatagttcttgagaacaagatctataaatcttgatatccccaaagagtcctactcagtgtctcaaagaatargtttaccattaacttttgtaaagagaaaaaaaaatgtatgtttagtttggacaactgaatgctcatctgggacacacagtaattatttccaaatacttgaacacctatcctaggttaaaggaattgaagtggtcctatatggtc

SEQ ID NO: 894886 - DNA, 598 bp, Homo sapiens
tttattgaaaagttcaaaatatgctgtttttgtttttattccattgatgaaataaatgcatgaatgggagtaacagaatatattaacacatctagagaaaaatattgttgcttatccctgcatagctgctggtacatcacagatagcaacaacaaaaatccataaccagtactatgatttggatgtcttctccataactcatgttgaaatttaactgccattgtgatgatcttggcaagtggaacctctaagtggtgattaagtggcagagtcttcataaatcctgttatttcatgagtggtttagactcctgggaatgagttccccaggataycctttctctgtctcacaggctcctttgttctctctcatcatgtgatatcttccaccatgttttcacacagcaaggggatccttatcagatgcaaaccctctatctggaatttccagactccatagctaagaactgataaaaatttctattgtctataatttgcccagtgtgtagtattctgttacagcaatagaaaatggactaggactaccagccaaaatcttaggtcagaaactaaagtgactccagtgagacattagatga

SEQ ID NO: 894887 - DNA, 642 bp, Homo sapiens
ggctcaccttgaccctgcttttaggcagagcttctccaatctatcagcctctccatttgacagccatttgctccctttaattttttttttagtatcatttacctgaatttgtgaaatatagaaaagcattagatatagacttgcaatgctctgtcctaaatagtaaaatgtaaggtcatttctttctttttttttttttggacacagagtctcactctgtcacccaggctggagtgcagtcatgcgatctcggctcactgcaacctctgcctcccargttcaagcgattctcctgcctcagtctcccaagtacctgggattacaggtgcctgccaccacacccggctaatgttttgtatttttagtagaaacggggtttcactatgttggccaggctggtcttgaactcctgatctcaggcgatccacccaccttggcctcccaaagtgctggcattatagtcgtgagccaccacgcacggccagaatgtaaggtcatttctaatagaactttcctcttccttatttgctccccttcctggaaagatatttagcttgttcttatcttagtacttcttttctacctctaaaactatgtagtgaagtatgatcaatcaagcttaaaatatcttagttgcaaagg

SEQ ID NO: 894888 - DNA, 551 bp, Homo sapiens
agcagaaacttggttaggtttgcaattagaaagaacattctggtggaagtgtgttcatggggtagagagataagagacatcactcctaatttttccttttcaaaacagctttcccaaggactttttgggtctctcaagtacatagggtcagaagtctaaaaagcagcttaaggaataaaccatcaaacaatccctctactgtcaggtaagaatatatggttgagtatcacttgtccagctcagtcatcttgcaagcaattgacrttggttatttctgtgttgaaattaagtcatgaaacacaaagcgctgaaccagattcttaatttggacttaatcgcatttattatagtgcaaaacaaatacattcttcccagaccagagcaacattgaatagcattgtaaactaatttttttgatgtcaaggaaagatgaaaacaagataaaacatgcgagagaagcagcttgcattagatcaggcacagtaaaactaagaaacatcagttgctactagcaaagaagcaaaagtccatggagtttgaatttttgttgt

SEQ ID NO: 894889 - DNA, 647 bp, Homo sapiens
tcttttctggttcacactataaaaattataacaagaggatatgttctcttttcttctaaatatttatactattttcattaggtaacaaacgaagaaacaaaaagcctgtaacataacacctgcaaaaggattgaataaaaataatagtgtgacaagtccaaattttgcttccaaagaaagcaaatttatttaatacaaagaatattttccaaactcaaaaaatacttaagaaataatgaaaacaggaaaaaaacaaacaaccaaaaaaacaacgggaacgaaatgaagtgaagattctaaacttcaattcattctatttaaaggcttctggttgctacgtggttataaagcccatggaggtgaaattcaaaattaccttgctctattcgaacaatagacttaatcttctagttaatttgagaatgttgtgattcaatggctaaaataacagatggccagtgagtaggcctggattttagttgtkgttctgatgttattaactacttgggcaacctctgatagagttgaacctatcgtaattcacaggactaggtaggcttttaggtttggttccaatattttatgaatttctgagactagtagcacattacttaataaaccagatccaatgctaagtatttccaaag

SEQ ID NO: 894890 - DNA, 618 bp, Homo sapiens
aatatctgtgattgttgaccatctacatcagtaggactcagcatcctagccctcttggaagtatatgattgaacacggacaaattaatcttgacctaggacccttcctaaatctgacaggagatatatcttgaatttcaatttttgtgccaatgctcaggatcatttctgttatcatctttctaaaatccttctctcattattttcccagaactcttccactcaaatatatttcaaatagttacaatattttaaataagcttatttctttggcatgaattctggcattccattttattttgttaatacaatacacttaggctgggcatgatggctcacacctgtaatcccagcactttgggagacygaggctggcggatcactttaggtcaagagtttgaggccatcctggccaacacagtgaaaacccatttctactaaaaatacaaaaattagcaaggcctggtgtgcacctataatcccagctactcaggaggctgaggcaggcgaatcacttgaatctgagagacggaggttgtagtcagctgagatcatgccactacactccagcctgggcaacaaagtgggactctgtgtcaaaaaataaataaataaataa

SEQ ID NO: 894891 - DNA, 591 bp, Homo sapiens
atttatgtaatttgatcttttcaaactgtttcatagatgattgttttttgtaatctcctgtaatatttgcttatctggcaacaatggaatattttgtccattgttttgctaacaaatttctaccaaatgcattgctcacattgcaccaaatccctttgtgaaagatgtaccaaaatggagtcatttatgtcaaactctaacaaaatggggtcaagagaggccacaaaaaaaatcctcgtgcacacatgcctgtaacaagggttatcacaagaccttcttcaaattgcastattccagataaataggttccaggacagttacctagcaacagctgtctttaccaataaacaaatgtcaactcctacaatgagcttttgacccgtgaacttgtctcaaagcagcttacctggacctctctttgtatttaaaaacttctcctgtgccctaaccccttggatgtgcctatgatccatcatccaccatagcatgcacattcctagattgcacttcgctgctctttccaattaaaactcatttgttctgaagagcatatgtgagtttctttttaggttgacacttctcatccctcaa

SEQ ID NO: 894892 - DNA, 683 bp, Homo sapiens
gtcagctcaagtggccaggcaaaaagaaaaaggggcaaattcctccttcctctgccgtttgttctattatggccctcgatagttgggatgaagcttatccaggttggaaaaggcagtctactgaatccattgatttaaatgctaatctcatccagaaacactgtcacagatacatccagaaatgttttaccagatacctgggcatcctctgattcagtcaagttgacacaaaatattaactatcacaatcattctaactaaaactacagttcgtgtataattctgttgatatgtgtgttatttatattacatcctccaggacctagcataaaccgtggcacatggcaggtccaaataaacacttatttaaatgaatttgctttyttgtacttgaaatataaactctttgagtaggtgattttcaccatgaaatatttggtagaaacagctgaagaggttcatagtaaaatgttcatataatgaactaaattgaaatgttgggacgaagggtaaagcctgtgatatcagctacaaagcttcagaatgaagaaacacagttcacagtccattttaccactgctggtagatactaaaaaagctgagttctctgttgtagagcacatagaatgagtcatacaaattgaagaaagatcttggaaggcccaagagataataaaacagaa

SEQ ID NO: 894893 - DNA, 617 bp, Homo sapiens
ttatgaaagttacaaattgaatactggagtgaaggtcaagtaaatgttaaaaagttagtgcacaaacacaatcaccatgctaagtgagctgcaggtaaaactgactttctaatttggaggattagtacaatcaaaagggtcaaataagttgtacatgatgccataatcttgatgttcatcgcttaaatctttattgagattaggttgccatttctttcaagtcttttgtcattaatatggatttttttttgccaaagactgaaccttttataaagcaagaaaagtattaaagaaaattaataaataaatgagtatttctctacatcgtataaaatcaatttgtttgatcatttgcttggattaatttattttcaatgatacagacttagttttaaaatagcattccatgctgctcctgagtattagwtacacatttgctttacttgttttaaatattatggtcttttaatattttctaccactaagaataagaaaaaaaaaactgtccataccaacaaaatactcccataaagaacctgactatgatatgctcctcaaatgaaaaaaatccatcagaagaataatgtcctttcaataactccgtcacatcacatctc

SEQ ID NO: 894894 - DNA, 597 bp, Homo sapiens
tcctttatcattttttctttacttttgtctgactgatttgactcaaagaaaattttcttactctgaaattccttcctcagcttggtttattcttctgttaatacttgtgactatattctgatattcttgaaataagtttttcagctctatcggctcactttggtccttctgtaaaatggccatttgtcttttgtcccatatatcattttactgtattccttagaatccttggaatgggtttcaactcatttaaagtgtcaatcrtcttcattcctatccatattctaaattttatttctgacatttcagtcatttcagcctgaatcatttcttgggaactggtgcagctgtttggaagtaagaaggcactcttgctttcttgagttgccagagttcttgcactgtttctcatctgtgtgggctgatgtttcttcaatccttgaagttgctgtcctttgaatgtgtgtgtgtgtgtgtgtgtgtgtgtgtgtgtgtgtgtgtgtgtgtgtgtgtgtgttgcttttaccttctttggtattcttgggggttttgtgatggtataaggtgtgttcaatcaactgactttgtttctgttag

SEQ ID NO: 894895 - DNA, 624 bp, Homo sapiens
gcaggtcactcctagaattttagcaatgttaatatttattttcttatgtttagatatttattacccctgaaaatcatggttgttactggaagaaaaaaatattttttcacacacacacacaaaaatacataaacacaaacactttctcaaaatgctggacagttcttacattatgtaccaaaatgtccatcttttttccccctggaatttctgtattaattaattttctgtcctatgatagtgccgtagttttaaatctctcatctcatttcactgtttcagtttttaattcattcctaatatgtatatagtaaagtgcactaatcctacatatacaacttaatggatttttatatmtgtatacactcatataaccattagctagatcaaaatacaaaacatttcctccacccagaagattccactgtgccctttcttatccaatactctcctgcccagaggtaccactattctcacttttattactgattagtttgttctttttttgaacttcccataactaaataaataacaacatatgatgagtatattttgtaccgatatgcatgttgtttcatttttgatacataattttttattgatttttaaatctggtgttccaaa

SEQ ID NO: 894896 - DNA, 612 bp, Homo sapiens
gatcctcctgcctcagcctcccaagtagctggaattacaggcaaatgccaccaggccctgctaattttttgtatttttagtagagactgggtttcaccatgttggccaggctaatttcgaactcctgacctcaggtgatccacctaccttggcctcccaaagtgctgggattacaggcgtgagccaccgcacctggccttaattattctagttttcttctmcaagccaacctaataaggaataggaatctacaattcataaaacgtcagtgaggagcaatgtttctcaacatcctatgtatgattcacacaatattcttaaatatcaatacacgtgatgcaagcactccagagagttcaaagaaaagtattcattatttttaaaacttttaatggcatgatgtgggaaatgtattttttcccatattttaagaagccctattttactacatcaacaactgatttaaaatatcctcctccagtgttttatctgatacagtggatttttctcaaagtctcttgcctaactgacacattctcaagtgatgaataataaaaaaacacattattccacaccctatcattgataaaggatcacagccctgcagctaga

SEQ ID NO: 894897 - DNA, 612 bp, Homo sapiens
gatcctcctgcctcagcctcccaagtagctggaattacaggcaaatgccaccaggccctgctaattttttgtatttttagtagagactgggtttcaccatgttggccaggctaatttcgaactcctgacctcaggtgatccacctaccttggcctcccaaagtgctgggattacaggcgtgagccaccgcacctggccttaattattctagttttcttctacaagccaacctaataaggaataggaatctmcaattcataaaacgtcagtgaggagcaatgtttctcaacatcctatgtatgattcacacaatattcttaaatatcaatacacgtgatgcaagcactccagagagttcaaagaaaagtattcattatttttaaaacttttaatggcatgatgtgggaaatgtattttttcccatattttaagaagccctattttactacatcaacaactgatttaaaatatcctcctccagtgttttatctgatacagtggatttttctcaaagtctcttgcctaactgacacattctcaagtgatgaataataaaaaaacacattattccacaccctatcattgataaaggatcacagccctgcagctaga

SEQ ID NO: 894898 - DNA, 639 bp, Homo sapiens
tctcagtttccagatgtcattgattcacaggatttctatagctctttacatggtgattattattatcttggattgcatgactttaagcaacgctgaaatgtaaaggtgatgattcggctcagaaaagtttttcaaaattgcctactgcatctgcctaggaaaagctttctccccacctagtgctgtgaccaccaagactttccaaagatcaggatgggtttttccccggcggggaagctacttycacgtggaattcattctcagaaatacttccctatcactcaatttttcccgtaagttccttgcaacaacagccaccagtcttgttattactttccttgtcacgtacttgaatattctccacccagaggaattttttaatccatgtatctatgcaccacgtaagcaatgataaaatatccacataaactctggcagagcctgtcatcttgtagactcatgggtacttatcattttccacggcccaatgttgttggcaaactcagtattttgcagaggacttaacaaaataaatgcatatgaatctgtcttcaatgtgcccttatcttagagtatttctaatgggtctcaggctaactcacttttttaagtttctgcttcttacagagaatatttatt

SEQ ID NO: 894899 - DNA, 613 bp, Homo sapiens
gaaatggcattcacaatggttatcgaaaagagagcctcttaactacctgaaaattaacttccttcattccaaagcacactgtttcagagcacttagttactttgttttatgattatctctcccatgcagaatccaaagtgtggcatgcatcacatgaagtgcccttgtgcaatacttaaaccatcactctgattcactgaagtaaaataagctgtgctttatgaatggacacctattaaattcaccaaaaagtatgcaccacccccaacacatgggattcyttataatggcagcttttaacacctttaaaatgagaaatatttttcttttcttactacaggttgattctgctcaaaaaaaagaaaacaaaaaacttactaatatccaaaagttcttgcctttctagaccagctccctatgtctgggaataaacactaaaataacttgggagtaagtcagttccaattaacagtccctccacccattcctaattgggttaacactttttattaggagttatttgtgcactttgtacaaatgctaatgaacaactcccaaatgctaataaatgtgtccatctgaaaggcagaaaaagcagaacaaaactagagta

SEQ ID NO: 894900 - DNA, 673 bp, Homo sapiens
tcatacattaggatcagggcttggctgctctgtgcagcttcaggacttgatgccttgtgtcccagaagctccagctccagccatggctgataggggccagggtatagctacagctgttgcttcagagggtgcaagtcccaagcattggtggcttgcaagtggtattgggcctgcagatgtgcagaaaacaagagttgaggtttgggaacctctgtctaaatttcagaggatatatgtaaatgcttggaagtccagacaatagtctgctgcaggggcagagccctcatggagaacctctgctagggcagtgcagaagggaactgtggggtgtgagctcccacacagagtccccactggggcactgtctggtggagccatgagaaggccaccatcctscagaccccagaaatgtagatccaccaacagcttgcattgtgtgtgtggaaaagccacagacactcaatgccagcctgtgaaagtagccatgaggactataacctgcagagccacaggagagaagctgcccaaggcattaggagcccaccccttgcatcagcgtgtcctggatgtgggacatgaattcaaaggaaattattttggagctttaatatttaatggctgtgctacatggggcctgtatcctttttgttctggccaatttctccctcttgga

SEQ ID NO: 894901 - DNA, 638 bp, Homo sapiens
ttctggccaatttctccctcttggaatgtgaacatttacccaatgcctgtacccccattgtatcttggaagtaactaacttgtttttgatttacaggctcataggcagaaaaggacttgccttatctcagatgagactttgaacttggactttggggttaattctggaataagttaagactttgtgtgactgttaggaaggcatgattggttttgaaatgtgagaaggacatgagatttgggaggtgccaagggcagaatgatatggtttggccctgtrgccccacctaaatctcatcttgaattataatccccacatgttgaggaaggggcctggtggggggtgattggatcatggggggtggtttctaccatgctgatcttgtgatagtgaggaacttctcatgagatctgatggttttgcaagtagtaggttcccttgtgtgctctctctctctcctgccgccatgtaagatgtgccttgcttcccttttaccttctgctatgattgtaagtttcctgaggcctcttcagccatgcaaaactgagtcaattaaatcttttttctttataaattacccaatctcaggtagtatctttaaggcagtatgaaaacagactaatacaatatgttttcaa

SEQ ID NO: 894902 - DNA, 638 bp, Homo sapiens
ttctggccaatttctccctcttggaatgtgaacatttacccaatgcctgtacccccattgtatcttggaagtaactaacttgtttttgatttacaggctcataggcagaaaaggacttgccttatctcagatgagactttgaacttggactttggggttaattctggaataagttaagactttgtgtgactgttaggaaggcatgattggttttgaaatgtgagaaggacatgagatttgggaggtgccaagggcagaatgatatggtttggccctgtggccccacctaaatctcatcttgaattataatccccacatgttgaggaaggggcctggtggggggtgattggatcatggggggtggtttctaccatgctgatcttgtgatagtgaggaacttctcatgagatctgatggttttgcaagtagtaggttcccttgtgtgctctctctctctcctgccrccatgtaagatgtgccttgcttcccttttaccttctgctatgattgtaagtttcctgaggcctcttcagccatgcaaaactgagtcaattaaatcttttttctttataaattacccaatctcaggtagtatctttaaggcagtatgaaaacagactaatacaatatgttttcaa

SEQ ID NO: 894903 - DNA, 589 bp, Homo sapiens
cagtgatttgatcacagttccttgcagccttgaattctgggctcaggtgatcctcctacctcagcctcctgggtaaatgggacaataggcacatgccaccatgcctggtgatatggtttggctgtgtccccacccaaatctcatcttgaattgtagctcccataattcctacatgttgtgggacgggcccagtaggagataatcgaatcatgggggcagtttcccccctactgttctcgtggtagtaaatgagtctcatgagatctgacggttttataaggggaaacccctttcacttggttctcattctcttctgtctgccrccatgtaagatgtgccttttgccttccaccatgattgtgaggcctccccagccacatggaactgtgagtccattaaacctctttttctttataaattacccagtcttgggtatgtctttgtcagcagtatgaaaatgtattaatacaactggcaaattttctgtttatttatttttattatttatttttattttttatttttatttttttgtagagacagggttttgccatgttgcccagactggtctcaaactcctgggctaaaa

SEQ ID NO: 894904 - DNA, 589 bp, Homo sapiens
cagtgatttgatcacagttccttgcagccttgaattctgggctcaggtgatcctcctacctcagcctcctgggtaaatgggacaataggcacatgccaccatgcctggtgatatggtttggctgtgtccccacccaaatctcatcttgaattgtagctcccataattcctacatgttgtgggacgggcccagtaggagataatcgaatcatgggggcagtttcccccctactgttctcgtggtagtaaatgagtctcatgagatctgacggttttataaggggaaacccctttcacttggttctcattctcttctgtctgccgccatgtaagatgtgccttttgccttccaccatgattgtgaggcctcyccagccacatggaactgtgagtccattaaacctctttttctttataaattacccagtcttgggtatgtctttgtcagcagtatgaaaatgtattaatacaactggcaaattttctgtttatttatttttattatttatttttattttttatttttatttttttgtagagacagggttttgccatgttgcccagactggtctcaaactcctgggctaaaa

SEQ ID NO: 894905 - DNA, 487 bp, Homo sapiens
agtggaatgcatacatctttaatttcatgtatacctaaactatttgtttcattacacttgctactgaactcagttaaaatcctgacctcagaatttcattgtggcttatatatgtctgggaaggaagattacaggaaggattttgataatgttctcataaaaacagccaggctagtacttrctaaaacatcactgctgtctctggatattttcttcctagactagacccatgagtagcttaaccaaagtgaagtgtcctgattaggcctaaatggccatgaatagaaaaacagagataatctcctgtcctatctctgagtctacttggcagaaattcccaggaactagatctctgttgttagaaaactctgcctatcaaggaacctactcctttccctcaaagtgaatattttatttttagacaaaaagtgggggtttcaaattcccgacagacatcttataaagaaaattaacacaagatttgtga

SEQ ID NO: 894906 - DNA, 487 bp, Homo sapiens
agtggaatgcatacatctttaatttcatgtatacctaaactatttgtttcattacacttgctactgaactcagttaaaatcctgacctcagaatttcattgtggcttatatatgtctgggaaggaagattacaggaaggattttgataatgttctcataaaaacagccaggctagtacttgctaaaacatcactgctgtctctggatattttcttcctagactagacccatgagtagcttaaccaaagtgaagtgtcctgattaggcctaaatggccatgaatagaaaaacagagataatctcctgtcctatctctgagtctacttggcagaaattcccagsaactagatctctgttgttagaaaactctgcctatcaaggaacctactcctttccctcaaagtgaatattttatttttagacaaaaagtgggggtttcaaattcccgacagacatcttataaagaaaattaacacaagatttgtga

SEQ ID NO: 894907 - DNA, 612 bp, Homo sapiens
aaaataataaaactttcttgttttgactatcagctagaaatggtacctttatataataaccggggcaattgtggtataagttcagagtccccatcattgagttttgatcatttgtttgtgagcactctattatactgctatctatctgtgatcaatctatctttgagttattttctaaatttgcatgtttactagttttggtaggcagaataatggctcctaaaagatgttcaaattctaaattctggaatttgtaaatatgttccttcacatggcaaagaagaattaaagttacagatgaaattaagcttgctaaaacagggtgagtatcttggattacccagccgaacccaatgtaattgtaagtatgaagtgggaggtaaaggcagaaaagtaggtctaagcgatccactatgaaaatgattggactcaccactgctgtctttggagasagaggaatgggaccatgaaccaaaaaatgtaggtggcctctagaacatccatctccaaactttttggtaccagggtcaggtttcctgaaagagtttttccacagattggagcaggtggggagggatggtttggggatgattcaagcacattccatttatt

SEQ ID NO: 894908 - DNA, 674 bp, Homo sapiens
agaaaatgtcacagctggatagatccaataaaataaattgggtggaataaagtagttctactcacagctctacaatagcttgctgagtaacattttaaaattctatctaacgctactgtttccatttccacctctgtagaataagaatattgaagtcgatgaactctacagctctctttatatttcatattttatcacattcgcagtaaaagaggaagagaacatgatgagatgactgttatgtacttataagactaagttttttgygaagtgtctaataatctgcattatatttctaatttcagagaatgttagaagatcttataaaataaagaataggaaaatacttgaacattgcttgttttatataaatattatgtctgccattaccatcgtattgtcttagtaccttactttttataacacttggatgtaagagagcagaacagcataagtacagtctatccaattttatttcaagatacgacaaaaaacaatcatttttgatgatagtaaaggcttcagagttttcaattagattcagtttatattttggcaaagaacccaggtacaactaacacctgctgagcctacttccttcccatcaaagtttgttgcctgcctttttaaacaaatggagatcatttgagcagattgaaaacagtaattggggt

SEQ ID NO: 894909 - DNA, 590 bp, Homo sapiens
atgcctttagtgagttgactaccaataaaatacatttgcagaagcttgaattttaatagggtgccgaccttttgccaactcagttgggagtgagaaatacgacaccttccagagtgattcatttcactccttgctgagcttctcttgttcatccttctaggaagacaaagcagcataaaatttaccattatattaagtggttaaaattatctttaccactataaaacatcagtggtataaagaaaaatcttggaattagaaaygtctttttccccacttgttatcatatccaacttctgccttcaagcatcttttagaaattggaaagcaaaaagctatttatgtaatttgatcttttcaaactgtttcatagatgattgttttttgtaatctcctgtaatatttgcttatctggcaacaatggaatattttgtccattgttttgctaacaaatttctaccaaatgcattgctcacattgcaccaaatccctttgtgaaagatgtaccaaaatggagtcatttatgtcaaactctaacaaaatggggtcaagagaggccacaaaaaaaatcctcgtgcacacatgcctgt

SEQ ID NO: 894910 - DNA, 606 bp, Homo sapiens
aacctacaaaacttccattccagctccagagttctactttcctagttgctttaatattatgtcaagaaccaccaagtgctgatatatttatgaagaaccaccaaagtgctagtacaatcaatgatattctccagaattcccgtgcaaacataagataaactattgggctatcataaataaaagttcaaaaagtgaatagaaatcattaaaaatgtattaataaattcaataaaaagaaaagccatgttgttttcaaggcaaagttagagccaatggtaatttttagcattatattcactaacaaaacatatgtaatatgtaatatgaaaacccaggtacattacagaagtggctgtcaaaattagggttagaactgcattaaagcttgttagtattcaaagagccattaaaaacaagatttgagtcaaaaaataactcarggtggattaaagatgtaaatctaagacctgaaatcatacaaattctagaaaaaaaacttaggaaaaacttttctggacattggcctagacaaagaatttaggactaagatcccaaaagcaaatgcaacaaaaatgaagataaataaatgggaccaaattaaacaaa

SEQ ID NO: 894911 - DNA, 636 bp, Homo sapiens
ggcctagcattgaagaataacatgtgttccgaaccttaaaaatacttctgacatttgatttagtatcctggctctaactggagtctaaaataagcaaataatcaaagatggggttactgattacttagtaaatgttcattaaaatattactttaaatgataaagaattgaaagcatcctaaatatataaaaattgagttaatattaataaaacatgctgcatttatacagaataatatggtgcagtcattttgaaataatatataattacataggggagtattcaaaataatcacattacaaagaatacaaaaattagtttttctatattttataattattattttactaaagaaataatactagttactcctaagtagtgaataatgtgtatgttttttckaactttgttttccatactgtttgcaatgagcaattatggatagaaaaaaacaatgaatgtttttatttttctaccaaagtaactcagagtccaaattcctgtaatcttttcttatggagctaaatttctttttttaaatagtttctaatgtttttctctagaatattccttaattttctatattcttaataaaattcagatgataaaatagaatcaatattctcataagagttt

SEQ ID NO: 894912 - DNA, 582 bp, Homo sapiens
accttctagtttcgatctgatgctctaatttctgaaaaatcccacttttctttttctgttctattttaacctgcatgtttaattaattcacaattctcagcatgaattaacatatggctgctagaaagttgcaaactggarattttgttggctgtaaccttgtctactatcgctaaaaaggaaaacaatcaattatttcccgattttttaaaaaagatatacattagataaagtatggtggagaaaatactctcttctgaaatgacctcgccaaatagtctttatgtttttaactacgaagtgaaccatatgcaatataatcacttgcacatattcaataaaaaagcagggttaagccaaattttgttaccaccaagaatatttgtactatacataagatgttttcaatagaaggattgagactttttttatctggcttataaaaggaaattgctcccttccctaaaggaacacagagaaaagctgatacatcttcagaaatattcattacagctcatatcttttaagtgaaactcgctatctggtgttgattctataaagattaagaaacttgtcatggtt

SEQ ID NO: 894913 - DNA, 582 bp, Homo sapiens
accttctagtttcgatctgatgctctaatttctgaaaaatcccacttttctttttctgttctattttaacctgcatgtttaattaattcacaattctcagcatgaattaacatatggctgctagaaagttgcaaactggagattttgttggctgtaaccttgtctactatcgctaaaaaggaaaacaatcaattattkcccgattttttaaaaaagatatacattagataaagtatggtggagaaaatactctcttctgaaatgacctcgccaaatagtctttatgtttttaactacgaagtgaaccatatgcaatataatcacttgcacatattcaataaaaaagcagggttaagccaaattttgttaccaccaagaatatttgtactatacataagatgttttcaatagaaggattgagactttttttatctggcttataaaaggaaattgctcccttccctaaaggaacacagagaaaagctgatacatcttcagaaatattcattacagctcatatcttttaagtgaaactcgctatctggtgttgattctataaagattaagaaacttgtcatggtt

SEQ ID NO: 894914 - DNA, 582 bp, Homo sapiens
accttctagtttcgatctgatgctctaatttctgaaaaatcccacttttctttttctgttctattttaacctgcatgtttaattaattcacaattctcagcatgaattaacatatggctgctagaaagttgcaaactggagattttgttggctgtaaccttgtctactatcgctaaaaaggaaaacaatcaattatttcccgattttttaaaaaagatatacattagataaagtatggtggagaaaatactctcttctgaaatgacctcgccaaatagtctttatgtttttaactacgaagtgaaccatatgcaatataatcacttgcacatattcaataaaaaagcagggttaagccaaattttgttaccaccaagaatatttgtactatacrtaagatgttttcaatagaaggattgagactttttttatctggcttataaaaggaaattgctcccttccctaaaggaacacagagaaaagctgatacatcttcagaaatattcattacagctcatatcttttaagtgaaactcgctatctggtgttgattctataaagattaagaaacttgtcatggtt

SEQ ID NO: 894915 - DNA, 700 bp, Homo sapiens
tttgctttagaaattactcagtctcgggtagttctttatagcaatatgagaatggacaaatacaattaattaagtcaaattggaagactcatgatcaatgttctgcatttgttatcagtggcaggacaatgggcatgggaggaatcagagatgtcagcttgatgctctggaactaatacagtatgcaacctagaagagaccyggcttcctacagtcttctccaaaattacctaatgcaagcccaaatcctgtaacaaaccctcctcactccatcttattgagatatcttgctgtttctcctattgtaaggtctctgttgtggcaacaagttaataaacccaactttgtttatctgtaggagtattcctggtggtcctggttggcaggcttcaacagtgcagtgtgagaatatgatataagagtaaacagagatgggacttctaaactggaacaaagaaaacttcttattcaagcttcacctttctcacctattgaacatttgcccacttaggcaaattacttagtctccatcaatttcctcatgatattgatttcccaagatagttgtcagaattaaataaaattctagggaagtattttttaactcactatgtaaacataggaggtataattattaatggcataagaggtattctgcagggatatttctagggaacagctctataatttggaaagtgat

SEQ ID NO: 894916 - DNA, 613 bp, Homo sapiens
attgagatatcttgctgtttctcctattgtaaggtctctgttgtggcaacaagttaataaacccaactttgtttatctgtaggagtattcctggtggtcctggttggcaggcttcaacagtgcagtgtgagaatatgatataagagtaaacagagatgggacttctaaactggaacaaagaaaacttcttattcaagcttcacctttctcacctattgaacatttgcccacttaggcaaattacttagtctccatcaatttcctcatgatattgatttcccaagatagttgtcagaattaaataaaattctagggaagtattttttaactcactatgtaaacataggaggtataattattaatggcataagaggtattctgcagggatatttytagggaacagctctataatttggaaagtgatgtacagtttgttttaaagtggaggaatggattgggagtcagaccctccttacttatatattagtgttttacttcacagatgaatgatacagcctgaaacaaattatttaacttctgaattttggcttcttcaataataggtggataataaaatctacctctaaaaattattatgcaagtagtgaaattg

SEQ ID NO: 894917 - DNA, 613 bp, Homo sapiens
attgagatatcttgctgtttctcctattgtaaggtctctgttgtggcaacaagttaataaacccaactttgtttatctgtaggagtattcctggtggtcctggttggcaggcttcaacagtgcagtgtgagaatatgatataagagtaaacagagatgggacttctaaactggaacaaagaaaacttcttattcaagcttcacctttctcacctattgaacatttgcccacttaggcaaattacttagtctccatcaatttcctcatgatattgatttcccaagatagttgtcagaattaaataaaattctagggaagtattttttaactcactatgtaaacataggaggtataattattaatggcataagaggtattctgcagggatatttctagggaacagctctataatttggaaagtgatgtacagtttgttttaaagtggaggaatggattgggagtcagaccytccttacttatatattagtgttttacttcacagatgaatgatacagcctgaaacaaattatttaacttctgaattttggcttcttcaataataggtggataataaaatctacctctaaaaattattatgcaagtagtgaaattg

SEQ ID NO: 894918 - DNA, 451 bp, Homo sapiens
ctgagcatggtgtgcgcctgtaatcccagctattcaggaggctgaggcaagagaatcacttgaacctgggaggcggaagctgcagtgagccgagatggcaccactgcactccagcctaggcaacagcatgagactccatctcaaacaaacaaacaaacaaaccacatgtcatatagtcttacttttagatttatcctttctttaaaaaactacagttattttattaatttatgggggagcatatataaattacttaataaaatttatttttaaagkagttctacattcacaaaaaaactgagcagagcacagagttcctatacatacccttccctcacctatgcacccccattatgaacatccccaccagggtggtacatttgctacaattgatgaacctatattgacacatcatcaccaaaattccataatttacattagggtttattca

SEQ ID NO: 894919 - DNA, 628 bp, Homo sapiens; identical to SEQ ID NO: 892637

SEQ ID NO: 894920 - DNA, 654 bp, Homo sapiens; identical to SEQ ID NO: 892638

SEQ ID NO: 894921 - DNA, 679 bp, Homo sapiens; identical to SEQ ID NO: 892639

SEQ ID NO: 894922 - DNA, 651 bp, Homo sapiens
caaagtagtcttcttgaagtacaaagcagatatttaaaaagtaatatgaatggaagaattctggataatgtaaatgtaaatggtgaacaggaatttattacaaatatggattgtaaatttgtgtatactaagataacagtgaatatgattatataagagcaagaaagaaaagcatgaatataatatctgttcattgagtcttgttgaactggcaatctgtcaccctagcgagtagtctactgtgaaattttgtcaaatagtatcctaaagaaatcaaaacttttttataatttttggtttgtttttttgaaacaatgtcttgatctgttagcccaggctggagtgcagtggtacagtcatggctcactgtargcttgacctctcagctcaagcaatcctcccacctcagcctcccaagtagctgggactacaggtgtgtgccactatgaccagctaatttttatttattttactttttatagagacagggtctcattatattgcccaggctggcattttcataatttttaaagcaagtccaataacatctttttgttatagcaacttcacctacacacagcttctaatctatcagaactaaactgctatagattgtccatcccaactgacctcatagatgaagtacagaaa

SEQ ID NO: 894923 - DNA, 654 bp, Homo sapiens
ctttcttggagttgaaacatccattatcttaggtttcctatggctgtctaaacatttacagtcaattgctagtgtgtgctcacccatttcctattgcaatctatgttacataaaaaaaagaatatcactttttaaaatctttctcctgtctggaggtgagaagtttgtctctgtcacagatgtaaggtggtgtgaaatcaaaatgagactttttaggtttttattctatgagctaagtagcatttctacaggattttaccttagagacctcaatctcaaactttttataaaagtgtactttttccaacacagagattgtttccaagtttgatgcttgacccaaaagccacgctggtataggaaaattgagtccrattagtgttcagcctctaatgcctggaattgttgtgtgtggactagcagcagtgtcatttcctggaatttggggtcccagaccagaatttctcaatcaaatctgtactttaacaagatccccaggtgatctgaatacatattaaatgtgggaaacactgttctagaatttccatctgatatggtttgggtctgtgtccccgcccaaatttcacgttgaattgtaatccccaatgttggaagtggtgcttggtgggaggtgattggatcatgagggccgac

SEQ ID NO: 894924 - DNA, 658 bp, Homo sapiens
tgggagatgaataaaattatttccataaaagataaagatagaagcatcagaaataatcaaagaagcagcagcaactttttactgaatcaaaaattgatcacaatgagaaatatatcacttgctcctacttacaaakagttgttcctattctcttcggcaacactgaactatgttttcacgctaatacatccagtaaaattgcttcctatttttatttgtgattttcattactgattccacttgggacagaaataaatagaatatgtgcatcaggatctccctagcaattttgcaccaacctcatgtggttctgtcaatgaaggcaattataattctgaatgaatatgcttgatgttcacttagcaggaaactgaactcagagaagatttttgccctttcattttaatgtacacaccaggtggcacccaaagtagtcaaatacaaatgtctcccaccctgtattcaaaagaaataatcatagtaccaggagctatcaaatcagaacattttctcgggcacggagtgacataaagggataacaatatctaagggccacatacctgttgttgcccaaagacacaaggcaggaaccataaaccaaaaagaaacacctgtccaggctgaaggcagcaggacttatttaccagataattgtatc

SEQ ID NO: 894925 - DNA, 657 bp, Homo sapiens
aagcaaattacattaaatctaatttaatgccgtgaactatttagcaactattaggaatatggaatatgctgggcattgtgaaggcgatcaagtcacacaaaacaaagtcctggctctcaggatacagccatgatcctagttgagaaaagatttaagcctttccatccattcaaagcaatgtgaactcttataatggcacctcaccatcgaaatccagacacctggcaactttgtctgtttaggttgccaccaagaagcaatcctttkgtaagaaagatgccacaaaatgcatgcagtatgcatagggattcccttggtccttacagcctattaatacttttagtgcccacagttttattaagctaacatctggtttataaggctaccacaagtcaggactagcaagtaaaaggcggcaagcaagagcaaggacaagtgacagcaaacttgtgacagctagggagaagaccaaagagcataaaatgcagataagcacactgacacatcaagtgaggcatacaaggacgagctgcccttcacgaatcaataagtcctgaggcattctgcatttcagcagagcctagaaaacagctgtgcctactaatggccttggtgtatcaggaaaagatgatgcaggcccagtctattctatgtaag

SEQ ID NO: 894926 - DNA, 673 bp, Homo sapiens
agcagagtaggaatacaaaagagtaaaaaagaaacagagagaagtttcacctaacgcccttacaaagaaagaagcatgagttctgtccctggagcagcaagaagctatgtaccactccaggacactaaaaagttagcaaggtctcaaagaagatagcagaattatgctaaattcctagcttcagcaaagatttctgcactccatacttggcctacacaacttagccaatggatttcaaaaccacatcatgggctaatgtaatgacaaagtctttcatgaccatcactagcaaaaatttatggattttgatgttacctttgaagtataagcattacatctgatgagatgtaaattataataaatttacagatgaaattttctattagctattttttacactatttttacactattttttacactgtttttttacagatgtttattcctccactttctttacctgaagtggcaatttggttttgcattaygcaatataaaatcaatattagaagttgtgtaaagcctaattcaaacctataaaatgtgtgaggcaaaattttaatgtttatattttattctttttgttggattctcgcagaagttccttgagtttttggtcttagactgcctttacataagtatattttgtgtatacaacaagatactaaagaat

SEQ ID NO: 894927 - DNA, 613 bp, Homo sapiens
actttcctaaaaaacagaacatgacagtaggcactgctgaaaataacataaaaataaaaatgaaaaacataaataagaccaagaacagaccttcaatgaactcccagcttagtaaggaagagaaacatttacacaaaaaaagtctcagattgatgcggttagagaaaaaggaaagagaaatcctatgaaatagacctcaaaacaatccagaccaggtccacttagggccttcatccatgctgggctttcacctgcagtttttacaatttaacacccatatctatgactcattccctcaytgccatcagagtgtgttcaaatgtcactcaaggaggccctccctgaacagtattatttatagctagcaccctcccacagatatatctttattctctacttagcatttatcaagccatttatcaccatatgatagacttgcattttactaattttgttgactgtttttctcactggaatataggatatctgtgaaggcaggaatttctttttttctttagggaataaaatagattttaaaaaagtataataaactggggccaaataataaagagctttgaatattaaggtaaaaagtgtggaattcattctaaag

SEQ ID NO: 894928 - DNA, 649 bp, Homo sapiens
ttaaacaacagaaatttatttccttacatttctggaggctctaagtccaagatcaaggtgccagcaagctaggtttccggcgaggcctctctccctggcttagagatgactactttcttgctgtgtcttcatgtggccttttcactgttactgtctcttcctcttcttataaggccaccaatacttctggactagggccccacttgtggattataaccccatttaacattacttacctctttaaaggccctacctccaaatacagtcatattagggatgagggtttcawcatctgaattggaggtttaggggaggaagatacaattcagttataacacgaggcatgaatttctggggtctcccttttgctaagttacataaaccaggggggatagtaggactggcacctcattgtaaacctttaggaggctaatcaaggttctcatctgaaggaatattgactgcacctttaaatagaactaggatgttttcattaaaagaaaattctggaacatcaaacaaatattcacggtctccagattcttttctattgatccatattcacagacaaagttttgttgttatttttaattaagtagtgtgtatgcttacaaaggaatatatgtaatttatacatgagttctgaagc

SEQ ID NO: 894929 - DNA, 590 bp, Homo sapiens
tgtatttgaaaatcactttttgttcatagaatcccagaggttagagtaaaaagaaacttcagagggcagttagctctgcccagctcccggatgccaggactgcattcacaaagtatccatgaattggtgactgagaccacgcattagtatctttagagacagggtaggccataaaattatcaatccgcttttcagatgcaactaattattaaaggaattactttttatttattattttattttattttattttattttattttgagacagagtcttgctctgtcacccaggctggagtgcagtggcacaatytcagctcactgcacctccacctcccaggttcaagtgattctcctgcctcagcctcctgagtagctgggactacaggcgcccgccaccatgcctggccaattttttgtatttttagtagaaacattgtttttcaccatgttagccaggatggtctcgatctcttgacctcataatccgcccgcctcggcctcccaaagcgctgggaatacaggcctgagccattgcacccggctagaggaatttcttatgtcaagaagtctgacccattgaatcttcta

SEQ ID NO: 894930 - DNA, 422 bp, Homo sapiens; identical to SEQ ID NO: 892649

SEQ ID NO: 894931 - DNA, 572 bp, Homo sapiens; identical to SEQ ID NO: 892650

SEQ ID NO: 894932 - DNA, 437 bp, Homo sapiens; identical to SEQ ID NO: 892651

SEQ ID NO: 894933 - DNA, 634 bp, Homo sapiens
caggggagtccagggtccttttagtttcaatttgagattggactggaattttttttttttcttgagacagagtctcgctctgtcacccaggctggagtgcagtggtgcgatctcagcttactgcaacctctgcctcctgggttcaagcaattctcctgcctcagcctccagagtagctgggactacaggcatgtgccaccaygcccagctaattttttgtatttttagtagagatggggtttcatcgtgttagccaggatggtcttgatttcctgacctcataatccgcccgccttggcctcccaaaatgctgggattacgggcatgagccactgcatctggcctggactggatttctgatctgcatttctcaaaggcatatccttgacatcccttctcctaaactcatgctactaactcttcagggctgttctagaggaacgttctagggatacatgcacccttccaacttcatgctatgtaaaagaatggcactagcggtgagtaaattaagaaaatgaataaaactcaattacaatttcacattatataaaattagagggtatacttgaaaacattatgctaattgaataaaccagacaaaagaggacaaatactgtatgattccactaat

SEQ ID NO: 894934 - DNA, 533 bp, Homo sapiens
tattttagtgttacctttccaaggagaagagacctcttaaaatcccttggttcctgttgagctgccagatcccgaggtgatcaaacaggacaacaagccaaactgaaagaaacaaccaggcctttattcatttaccackagagtgaaggcaagagacaaacagaaaaaggaaggagggggaagaactagggttaaaaagtactgggtcagagtacccaatggagagaagagtcttagtcaaggtccccctataaggaacatcttggtggatgtacctgaaaagtgcccccgcctctagcagggctatagataaggaggaccccaaatagagatgtcttggctatgaatgcaaatatctgtaagtatgagcagtaagtgtggagggacttgaatccttgactgcacctccctcctccagacactacgatgtggggaggacaactctctcccatgagacctgccaggaaaagccttgcaattgcctttggtcagacctgagagatcatacctaggacttcaacctggagctggac

SEQ ID NO: 894935 - DNA, 665 bp, Homo sapiens
tcacaatggaagttaaggcttcaacatacaaattttggagggacacagttcagttcatcgtcatatttaaaccagttcttccttctcgacctcaaaaggatttctcccactaaattgaaagtctctttgcactactggagytgagccaaccatgaaacaatgacaagttacttccagagatacccaatatccttggattatgttgaacatttagcatagaacctacctattcttaataatgcttctttctgcaaaggaaaaataaaattttttcaaaaattttacagatttttctgctgggctatatatattgatggggagtaaccacaaattcacaccccactgtgagattagattatattcccactctatttcagcaaggttacaaaccctactgaaagcatagtggccatgcagggcagaaacagatgtaatatatacttcaccctcaaaatgtttcatggagggcatgtagtcaccattgacttttttggctcaaggtaagatcttggtggaaaactgccaagccactgcccttttaatacacatggcttatatatatcatcatttcagaagcatttatattaaaataaatgagatgcattaaaatctgtgtgctaccctttaacaaaatttttacaaatatcaagctctcctacttcttg

SEQ ID NO: 894936 - DNA, 665 bp, Homo sapiens
tcacaatggaagttaaggcttcaacatacaaattttggagggacacagttcagttcatcgtcatatttaaaccagttcttccttctcgacctcaaaaggatttctcccactaaattgaaagtctctttgcactactggagttgagccaaccatgaaacaatgacaagttacttccagagatacccaatatccttggattatgttgaacatttagcatagaacctacctattcttaataatgcttctttctgcaaaggaaaaataaaatttttycaaaaattttacagatttttctgctgggctatatatattgatggggagtaaccacaaattcacaccccactgtgagattagattatattcccactctatttcagcaaggttacaaaccctactgaaagcatagtggccatgcagggcagaaacagatgtaatatatacttcaccctcaaaatgtttcatggagggcatgtagtcaccattgacttttttggctcaaggtaagatcttggtggaaaactgccaagccactgcccttttaatacacatggcttatatatatcatcatttcagaagcatttatattaaaataaatgagatgcattaaaatctgtgtgctaccctttaacaaaatttttacaaatatcaagctctcctacttcttg

SEQ ID NO: 894937 - DNA, 665 bp, Homo sapiens
tcacaatggaagttaaggcttcaacatacaaattttggagggacacagttcagttcatcgtcatatttaaaccagttcttccttctcgacctcaaaaggatttctcccactaaattgaaagtctctttgcactactggagttgagccaaccatgaaacaatgacaagttacttccagagatacccaatatccttggattatgttgaacatttagcatagaacctacctattcttaataatgcttctttctgcaaaggaaaaataaaattttttcaaaaattttacagatttttctgctgggctatatatattgatggggagtaaccacaaattcacaccccactgtgagattagattatattcccactctayttcagcaaggttacaaaccctactgaaagcatagtggccatgcagggcagaaacagatgtaatatatacttcaccctcaaaatgtttcatggagggcatgtagtcaccattgacttttttggctcaaggtaagatcttggtggaaaactgccaagccactgcccttttaatacacatggcttatatatatcatcatttcagaagcatttatattaaaataaatgagatgcattaaaatctgtgtgctaccctttaacaaaatttttacaaatatcaagctctcctacttcttg

SEQ ID NO: 894938 - DNA, 665 bp, Homo sapiens
tcacaatggaagttaaggcttcaacatacaaattttggagggacacagttcagttcatcgtcatatttaaaccagttcttccttctcgacctcaaaaggatttctcccactaaattgaaagtctctttgcactactggagttgagccaaccatgaaacaatgacaagttacttccagagatacccaatatccttggattatgttgaacatttagcatagaacctacctattcttaataatgcttctttctgcaaaggaaaaataaaattttttcaaaaattttacagatttttctgctgggctatatatattgatggggagtaaccacaaattcacaccccactgtgagattagattatattcccactctatttcagcaaggttacaaaccctactgaaagcatagtggccatgcagggcagaaacagatgtaatatatacttcaccctcraaatgtttcatggagggcatgtagtcaccattgacttttttggctcaaggtaagatcttggtggaaaactgccaagccactgcccttttaatacacatggcttatatatatcatcatttcagaagcatttatattaaaataaatgagatgcattaaaatctgtgtgctaccctttaacaaaatttttacaaatatcaagctctcctacttcttg

SEQ ID NO: 894939 - DNA, 647 bp, Homo sapiens
tttgactttaaactatagctgatttgctgtaggagatgcttaagacaaccagagatataaattgcctcatctaccgccaagggaaaaatgattgtatcttgtaatatgaacctcaggatagggacgagcttgttggctatatactcctgttaccaacatcagctacaaagaagaaaaatagaattgaggagaagatcatttgttttcagctcattacagggaaaggaaaactacgttagtatatatgattcatayataaagaggaacatatacataaacacacagtgggagagaagcaagctagcatttattaagtcttaatatataccaagagcttcaggtatcttaaacaaccctaagagatttggttatttccatattatgaaggaaagaattgcaaaaacaaaaaaatctgagtttataaacccctcctaaagtccagattttctgtaccatattctattgactttatgtacaatcttacataaattcctcttagaaattctgagatcgttgtatatcacttacctttaatatttcagaatgaaaataaagtcatgaatctctaaacgggacttcagattcatctgcagcctctaccaattgttccctcttctttagtttttcttaccctgtttacaagtgcc

SEQ ID NO: 894940 - DNA, 647 bp, Homo sapiens
tttgactttaaactatagctgatttgctgtaggagatgcttaagacaaccagagatataaattgcctcatctaccgccaagggaaaaatgattgtatcttgtaatatgaacctcaggatagggacgagcttgttggctatatactcctgttaccaacatcagctacaaagaagaaaaatagaattgaggagaagatcatttgttttcagctcattacagggaaaggaaaactacgttagtatatatgattcatacataaagaggaacatatacataaacacacagtgggagagaagcaagctagcatttattaagtcttaatatataccaagagcttcaggtatcttaaacaaccctaagagatttggttatttccrtattatgaaggaaagaattgcaaaaacaaaaaaatctgagtttataaacccctcctaaagtccagattttctgtaccatattctattgactttatgtacaatcttacataaattcctcttagaaattctgagatcgttgtatatcacttacctttaatatttcagaatgaaaataaagtcatgaatctctaaacgggacttcagattcatctgcagcctctaccaattgttccctcttctttagtttttcttaccctgtttacaagtgcc

SEQ ID NO: 894941 - DNA, 578 bp, Homo sapiens
cagtaagaaaaaataaagactatccaattaaagtgggagggaagacaggaaaatagacctgatctagacttcacaaatgagaatattaatgatttatcatagcatggaatgaaaatgatgaagtgtgctgagaatatgcaaatacaattcaagtgcacacaattaaaatcccatatcatgattaatcatagcaaatgtgtgtgtattcctagcaataaattgagcaaaatatgcataagactatgatagacatattaattattaaaagacttcaaatacaagatataccatgtttgtggattagaagcagcaatataaaacaagtcagttctctgcaaattcatgataaaggcatttacagtctacgttgcaatgaatttgtgtgtatgtgtgtatatttaacttgtcaaaagaaatttccaamatatatatggaaaaacatagagccaggacaaccaacacattttaagacaacaagttagtgaagcttgctttaccagatatcaagaattcttacaaaatgtttacattcatgacactgtagaattatcacagggaaaagcaacagatcaatgaaa

SEQ ID NO: 894942 - DNA, 605 bp, Homo sapiens
ttttggaggtggggggcacagttgagacagggtctcgctcgtgtcgtccaggctggagtgcagtggtgccatctcaattcactgcaacctctgcctcccaggttcaaccaattctcctgactcagcctcccgagtagctgggattataggcacccactaccacacccggctaatttttatatcatggggtttcgccatgttgaccaggctggtctcgaactcctgacctgaaatgatcygcccaccttggcctcccaaagtgctgggattacaggcatgagccaccgagcctggcctgtcttttttcaaggagaggctgtatatggatggtgtgcagggacactgtcttctgacgatgttgggaaggggaaaagaggaatcagtccttgtcccacggaggtagccagcaaggatgaaggggaagaccaaggacttctctctacggctgcggacgctggtccaaggcacagggtgccagccccagtggtgggcggctctgtaagttggtgccaggtggccgtgcatagtggcccgtggtgagcgtcacttggggaggaggtgggcctggagggaagccggcagcagcagtgtgtgggtctctccca

SEQ ID NO: 894943 - DNA, 639 bp, Homo sapiens
tcacttttctcctgtcctatctatttattttttaaattttttataaagacaggggtctcactgtgttgctcaggctggtctccaactcctggcctcaagtgatcctcccaccttggcctcccaaagtgctacaattacagatgtgagccactgcacctggcccatccttttataaaggatccattccacattaggmggggaatgaagtcattaatactgtagtgagaagtactcccagcccacgtggagcgaaaggattcagggcagcttgtcttgggaaatcagtccatgaaaaagctgaaagagggcatagggaaacagaagttgagagggcaccccaagtttggcctgcttcatagctgcattctcaaactgtgagaattagttttgggtgatttgtgctaaaatctagggcattgctagttgaaggcatttggtatgggggtgtgtgtgtgtgtgtagcgtgttgtgtttcgacttggttacacttccaaaaagctttgggtgaaatccttcatggtttgctgggaatcactgtctgagtccagatgacaaagggagccagtttttcccaactttccttttaggtttcaatttgatctcatcaagaggctgcttttgccaccactgcctgtagga

SEQ ID NO: 894944 - DNA, 639 bp, Homo sapiens
tcacttttctcctgtcctatctatttattttttaaattttttataaagacaggggtctcactgtgttgctcaggctggtctccaactcctggcctcaagtgatcctcccaccttggcctcccaaagtgctacaattacagatgtgagccactgcacctggcccatccttttataaaggatccattccacattaggaggggaatgaagtcattaatactgtagtgagaagtactcccagcccacgtggagcgaaaggattcagggcagcttgtcttgggaaatcagtccatgaaaaagctgaaagagggcatagggaaacagaagttgrgagggcaccccaagtttggcctgcttcatagctgcattctcaaactgtgagaattagttttgggtgatttgtgctaaaatctagggcattgctagttgaaggcatttggtatgggggtgtgtgtgtgtgtgtagcgtgttgtgtttcgacttggttacacttccaaaaagctttgggtgaaatccttcatggtttgctgggaatcactgtctgagtccagatgacaaagggagccagtttttcccaactttccttttaggtttcaatttgatctcatcaagaggctgcttttgccaccactgcctgtagga

SEQ ID NO: 894945 - DNA, 639 bp, Homo sapiens
tcacttttctcctgtcctatctatttattttttaaattttttataaagacaggggtctcactgtgttgctcaggctggtctccaactcctggcctcaagtgatcctcccaccttggcctcccaaagtgctacaattacagatgtgagccactgcacctggcccatccttttataaaggatccattccacattaggaggggaatgaagtcattaatactgtagtgagaagtactcccagcccacgtggagcgaaaggattcagggcagcttgtcttgggaaatcagtccatgaaaaagctgaaagagggcatagggaaacagaagttgagagggcaccccaagtttggcctgcttcatagctgcattctcaaactgtgagaattagttttgggtgatttgtgctaaaatctagggcattgctrgttgaaggcatttggtatgggggtgtgtgtgtgtgtgtagcgtgttgtgtttcgacttggttacacttccaaaaagctttgggtgaaatccttcatggtttgctgggaatcactgtctgagtccagatgacaaagggagccagtttttcccaactttccttttaggtttcaatttgatctcatcaagaggctgcttttgccaccactgcctgtagga

SEQ ID NO: 894946 - DNA, 639 bp, Homo sapiens
tcacttttctcctgtcctatctatttattttttaaattttttataaagacaggggtctcactgtgttgctcaggctggtctccaactcctggcctcaagtgatcctcccaccttggcctcccaaagtgctacaattacagatgtgagccactgcacctggcccatccttttataaaggatccattccacattaggaggggaatgaagtcattaatactgtagtgagaagtactcccagcccacgtggagcgaaaggattcagggcagcttgtcttgggaaatcagtccatgaaaaagctgaaagagggcatagggaaacagaagttgagagggcaccccaagtttggcctgcttcatagctgcattctcaaactgtgagaattagttttgggtgatttgtgctaaaatctagggcattgctagttgaaggcatttggtatgggggkgtgtgtgtgtgtgtagcgtgttgtgtttcgacttggttacacttccaaaaagctttgggtgaaatccttcatggtttgctgggaatcactgtctgagtccagatgacaaagggagccagtttttcccaactttccttttaggtttcaatttgatctcatcaagaggctgcttttgccaccactgcctgtagga

SEQ ID NO: 894947 - DNA, 640 bp, Homo sapiens
ggatatcactgtatatttggagtcaccctatatttggacacgtgatatctttaaaaggcagacacagttttgaagtattctgtgtattgtttcatttggagtgaagggaaagtatgtaattcttcttcccattggtgggcacattggattggggaatgtctgtttatatccccagtttgaacatggatcttccttctcagccagtgcccagccttaaggctattggcaactytgaatctgttggacaccttttagagttcacctttttttctgcatttgactccttaattcttaccatcttgtagtcctgcccttcctgtgacaacagcctggctgacataacccctgcccaccccgcaactgttctttcccagtttgctgtgaatgccagtgttccccaccagcctgttgggtctttcccccgcaccacttctctgccctcaccttcacaatctcacgtcctttcaaggcttcagcatctgcccatattgaggttgaaaactggtagcctgcaaggttggggttatggttgttttaaatatgagtttgttgccaacatttaaaaattgagatcaaatccagacctctggcttcttctgtagaatgaggtgagctggcagtgttgggaccgagccgtgag

SEQ ID NO: 894948 - DNA, 640 bp, Homo sapiens
ggatatcactgtatatttggagtcaccctatatttggacacgtgatatctttaaaaggcagacacagttttgaagtattctgtgtattgtttcatttggagtgaagggaaagtatgtaattcttcttcccattggtgggcacattggattggggaatgtctgtttatatccccagtttgaacatggatcttccttctcagccagtgcccagccttaaggctattggcaactctgaatctgttggacaccttttagagttcacctttttttctgcatttgactccttaattcttaccatcttgtagtcctgcccttcctgtgacaacagcctggctgacataacccctgcccaccccgcaactgttctttcccagtttgctgtgaatgccagtgttccccaccagcctgttgggtctttcccccgcaccasttctctgccctcaccttcacaatctcacgtcctttcaaggcttcagcatctgcccatattgaggttgaaaactggtagcctgcaaggttggggttatggttgttttaaatatgagtttgttgccaacatttaaaaattgagatcaaatccagacctctggcttcttctgtagaatgaggtgagctggcagtgttgggaccgagccgtgag

SEQ ID NO: 894949 - DNA, 614 bp, Homo sapiens
aacttaaagcttttgagaaagtaggacattttatggcttctccttgcaaagaagattactttagaaaactgaaaaaataactttgaagagaaggatagaaaaatcgggggaccaagcacattattattttctgggatctattatttggtatgttggaaatcaagtacaaagctacgtaaaagaattcttcatattgcaaaaacattaccgcaatactttgtaaaataagggctatagcataagaaaagatcacagtcccacaactcaagcaagacagaccgtctgcattttgaagtcatccctgccattctttgcccacatgtgggtatgctgtatattctyctgctgaacaattttgcagccttagaagggccttcatgggttgggtgtggtggcttacacacttaatcccaacactttgggaggctgaggcaggaggatcgcttgagctcaggggtttgagaccagcctgggcaacatggcaaaaccccatctctaccaaaaaaataaaaaaagtatccaggtgtgacggtgcatgcctgtagtctcacctacttggaaggctgaggtgggaaggtcacctgagccagagagatcaaggctgcagtgagcca

SEQ ID NO: 894950 - DNA, 646 bp, Homo sapiens
tgagagagtctctttctgttgcctaggctggagggcaggggcacaatctcggctcactgcaacctccactttctgggttccagagattctcgggcctcagcctcctgagtaactaggactacaggtgtgtaccactgcgcccagcttatttttgtatttttagtaaagatggagatttgccatgtttcccaggctggtatcaaactcctgacctcaagcaatccacccacgttggcctcccaaagtgctgagattacaggcatgagccatcatgcccagcaaaatattgtattttaatttaaatggagggtccgctgttacttaaactatcattgaataacaatgtttagaacaacaaagaccatttctgtacrctagggacagctattagacatttgttcaagtaatttcatatttactacaatacactttttttttttgaggcagagtcttgctctgttgtccaggctggagtgcagtggcgcgatctctgctcactgcaagctccgcctcccgggttcatgccattctcctgcctcagcctcccaagtagctgcgactacaggcgcccgccaccatgcctggctaattttttgtatttttttagtagagacggggtttcaccatgttagccaggatggtctca

SEQ ID NO: 894951 - DNA, 616 bp, Homo sapiens
tgaatataagtgtttctctgagttctgtgagcagtcgtagcaatttaatcaaactcaaggagggggtcatggaaccccaatttatagccagtgaatcaaaaagcacaggcaaaataacctggggcttgtgattgccccagaagcagagggcagccttgtgggactgagccctcaccctatggggtctgtcttatgctagctccaggtagatggcatcggaactgaactggaggacaccagttggtgtcttgttgcagaatggattgcgtccttggtgtgtggggaaaaccacacacacatttgatcacagaagtcttctgtgtttgttgttgtggagtgagagcagaggaaaaccagattgagtttccccccatcaatttctaacctcagttccccctcagttagrcatagtgacccaacacacatttctatcaacaagtagatacagaggcacagtgacccaacgcacacatttcaataaataggtagatgttgggcatagtgaagcaacatacacatttcttatgcaccttatacacatattcatcatgtacctagcctgcttgggctgctataacaaaatacccaggtggctggagtggcttattgatatggt

SEQ ID NO: 894952 - DNA, 640 bp, Homo sapiens
aaatatctcgcttttgcagcttttataaaaacatgtgaacacatttctggaacaccctcctaggccttggaagaggcttgttatagtaaggcacctccaaatttaagtcattagattaaccattaatctggctctgcaaatgccttagtgtatgctgcagacccccccgaccctgaacccaagatgctgcagcttgaaacactagcgctgctgtctctggaaatcagatatggctgctgctgccctagagaakattcttcactatgtctgcttcggtttgtcaccacctttcaattcaaagtctggggagggtgtttggcattggttgagcctaaatcttatgccttcgccctagctgcggggggaggctgggaatgtatctgttaatttgagcttatagagtgaagacaagttctgccttctagtgtggcagccctcaaatcaaagcagaaagtttattgtttgtagttgcattaaaaaaaagcatgaaatgatataaaaggaactgatgaaagtagttacctgtgggggagggtagtgggaggagattaggagccagacttcttaatgtgagcattttcctatcattttgagttttaaaacgtgtgcatatattatctagtcaaaaattaaaaatttt

SEQ ID NO: 894953 - DNA, 613 bp, Homo sapiens
aaaagaaggtgcaggaattgctttaaaagaaaacaaagagacagaaagtaagacgtgtaatttacaatgtcctgtaaaggttgcctcttgcacacatggactgaatgctgtgactacagaggcacttttcaaactagtacaagaaggaacaagattgcccaatggtgccatcacttagaaaagaaccctttattttacctccacctaattgctgtgcctttgcagtataagagggcttcaagtcttggttcggacggtcagtatgactctgtgccctcagtctccccatctgagaaatgaagattcctgttgtacctgggccagcttcatatgacctgagcaatcactcagggccctgtgttcaaagcattaawctatgcttggtttaatgctctgctattatcatcctggaattcttaataatccttgaacgaggggccccacattttcgttttgcactgggcaagtaaatgacgtagttagcctagttagtacctatctcaaagggttgttgtgagtattaatattttggaaacactttattatttggcacaccagtcatcattcactttaattccagctcccataactgtgttgaaataccaagtggcta

SEQ ID NO: 894954 - DNA, 637 bp, Homo sapiens
ttttcctttattccaatgtcacaatctccaaagatatcaggaacctgcatttaagagcacctgtcaaagttctatagctgattatcaaccatcttttgaaaaggaacaatacaagacaacaattatctgtgaatgacaaaatgttcaggctagttacagttaaaaacttgattgacagagaaatttggctacttgtatggtttacaataacttaacataataaccttaattatgattgataacatatactcagacattagaattttagaaatcctawgcaattttggaacatacattaatattattcaccaaaatagaacctgaaaattaaatgttatttttattttggcaatcccatgtaactaaacatgtcaaataatcctgtttacctctcttttggatgttccaggggccctctgtagcatccaaaagttaggggctagaaaagacaaccttgaagctaaagtttgatttttggggaagcctacaaacatgttaaaggtttaaaacatttgatattatgcaatagaattccaggttaccacaagtcatttatttagccaaaataatgatttaaaacatttttaaaaaggcaaaaacctttacatactaagagggaagacttagctttccaaac

SEQ ID NO: 894955 - DNA, 651 bp, Homo sapiens
gtttgtggcttttccacgtgcacggtgcaagctgttggtggatctactattctggggtctggagtatggcggccctcttctcacagcttcactaggcagtgccccagtagggactctgtgtggaagctctgacctgatatttcccttctgcactgccctagcagagattctccatgaatgccctgcccctgcagcaaacttctgcctgggcatccaggcatttccatgcatcctctgaaatctaggcggaggctctcaaacctcaattcttgacttctgtgtacctgcaggctcaataccacatggaagctgccaaggcttgggacttccaccctctgaagccacagcccatgctgttacattggcccctttcagccgcggctggagtggctgagacacagggcaccaagtccacagcatggggatcctgtgctgggcaacgaaaccactttttcttcctgggtctccgggtctgtgatgacctggtgatgtgatgttccgtgttgccatgaasgtctctgacatggcctggaaacattttccccatggtcttggggattaacattaggctccttgctactagtgcaaatttctgcagccagcttgaatttctccccagaaaatgggtttttcatttctgttgcatagtca

SEQ ID NO: 894956 - DNA, 646 bp, Homo sapiens
tcaggctgcaaattttcccaacttttatgctctgcttctcttataaaactgaatgcccttaacagcatccaaatcactcttgaatgctttgctgcttagacatttcttctgtcagataccctaaatcatctctctgaagttcaaagttccacaaatctctagggcaggggcaaaatgctaccagtttctttgcttaaacataacaagagtcacctttgctccagttcccaacaaatttctcatctccatttgagaccacctcagcctggattttattgtccatattgctatcagcattttgggcaaagcccttcaacaagtctctaggaagttccaaactttcccacattttcctrtcttcttctgagccctccaaactgttccaatctctccctgttacccaggtccaaactcacttccacatttttgggtatcttttcagcaatgccccactctacttgtaccaatttactgtattagtccatttccacactgcttataaagacatacccaagactgagaagaaaaagagatttaattggacttacagttccacatggctggggaggcctcagaatcatggaggaaggcaaaaggcacttcttacatggcggcagcaagagaaaattaggaagaagcaaaagcg

SEQ ID NO: 894957 - DNA, 646 bp, Homo sapiens
tcaggctgcaaattttcccaacttttatgctctgcttctcttataaaactgaatgcccttaacagcatccaaatcactcttgaatgctttgctgcttagacatttcttctgtcagataccctaaatcatctctctgaagttcaaagttccacaaatctctagggcaggggcaaaatgctaccagtttctttgcttaaacataacaagagtcacctttgctccagttcccaacaaatttctcatctccatttgagaccacctcagcctggattttattgtccatattgctatcagcattttgggcaaagcccttcaacaagtctctaggaagttccaaactttcccacattttcctgtcttcttctgagccctccaaactgttccaatctctccctgttacccaggtccaaactcacttccacatttttgggtatcttttcagcaatgcyccactctacttgtaccaatttactgtattagtccatttccacactgcttataaagacatacccaagactgagaagaaaaagagatttaattggacttacagttccacatggctggggaggcctcagaatcatggaggaaggcaaaaggcacttcttacatggcggcagcaagagaaaattaggaagaagcaaaagcg

SEQ ID NO: 894958 - DNA, 559 bp, Homo sapiens
tactatggcaatgatggaggaattctgcaagtgcgggaatagtggtactgatcaaagcattatgaataggcatgttagtccattttgtgttgctataaaggaatacttgaggctgggtaatttatttttaaaaagaggtttatttggcttatggttttgcagactgtacaagaggcatggcaccagcatctgcttctggtgaggcctcaggaagcttttactcrtggtagaaggtggaaagtgagccagtgtgtcacaggctgggaaagggtgggggggtgagagagagagagagagagggagagagagaatgatgctaggctcttttaaacaatcagatctcacgtgaactaaaagagcaagagtgcactccttacctcagggagggcaccaaaccattcatgaggatctgcctcgtgaccaaaacacgtcccactaggccccaccttcaacattgagatcacattttaacatgagatttggaggggacaaacatccaaactatatcaatagggaaggcaaatctgtatcagagatatatctatctctgtgaagaata

SEQ ID NO: 894959 - DNA, 588 bp, Homo sapiens
tcccccactgcttcagggcattcacagctaaaggtatacttggtcagagcagctaaaggtatacttccaaagtgaatcaatagcagtaggaaaacgtagttcctagcatttaagatagtggttcctcagtgtgacagagattgcygggtttttaccccaatattcattctcctctatttttaccattctatttcctaatgggctccaattggtggcacctggccatgcatctaaagactacacttcccagccttacttggctttaggtgtcgccatgtgactaagcactggccaatgggatgtgagtagaagtgatacacgcagcctctgggccctaccttaagagaaggtggtgtgccctctacttccccctcttcccactgttgactggaatgcatacatgatggtgggagtcacagcagccatcagcacaagagaggaaaggcaacacaggatggatgccaatgcaacaagataaaaagacactgtggagccactgtctgggctgagggatgctccatacaggctgttacatgacagagaaatgttggcacagctgttaagctgacatgagggttcgtggctaag

SEQ ID NO: 894960 - DNA, 701 bp, Homo sapiens
cattgaagaccctaaagtaattaatacttaataatctattagttcattcctcaacaactgccaagcaataaagctttagaaatctttcaattccttagtctacataaagatttaagaccagacacataatctagctctcaaagtgaaaattcaacaatgacaaagagcacccaccttctctacatttaaacagcttctatgaatggcccctgaagagcattaactttaagtttggcaactagttataaaacagtatctagttgttttatatgctgtttaaatggtttgggtgcccaatcttttggcttccctgggccatactggaagaactgtcttgggccacacataaaatacaatgacactawtgacagctgatgagctaaaaaaaaaaaaaaaagaaaaaaaaaaaggaggggggcggggtctgtgcataaatttcatgtattaagacagtttacaaatttgtgttgggccgcattcaaagccgtcctgggccacatgtccatgggccacgggttggacaagcttaaattatcaattgttaacattttggtttctcatttccccccagaaaatacagtctttaaaaggacatttgattagttggattgggactgaggtgtggtggtgagaaatcataatgaaaggctatttaaaatgatgacatcttccttccatattgatttttttaaactgaaaac

SEQ ID NO: 894961 - DNA, 510 bp, Homo sapiens
agtggataaagaaaatgtggtgtatacatatttatacatatatatgtataaatatatataccacattatatattttttatatataatatttatgtttatatttatatttatattccatggtgtatacacacacacacactgtggaatactactcagccacaaaaaggaacaaaatagtggcattcacagcaacctggatggaatttgagactattattctaaacgaagtaactcaggaatggaaaaccaaacaytgtatgttctcactcataagtgggagctaagctatgaggatgcgaaggcataagaatgatacagtggactttggggactcaggggaaatggtagcacggggttgaggaagaaaagactatacattgggtacagtgtacactgctctggtaatgggtgcaccaaaatctcagaaatcaaaaaaaaatctcagaaatttaaaaaaaataataataagcaaaagttttgaatttttaaaaaaatttttaaaaagaaaag

SEQ ID NO: 894962 - DNA, 606 bp, Homo sapiens
accctctgatccaggaattctacttctgggaccatatgctactgagctattccttcaaagtgtgcaagaacatatgtacaagggggttgattatattattcccaaaaatgaaacatgataacctaagtttccatcaatagagcactgtttgaataacttacagtgcatcggttaaaaagaatgatgggagccatatgtataacatgccctataactacatctatatctgtatgtttctatataaaattrtctagaagaggctgggcacagtggctcacacctataatcacagcactttgggaggccaaagtggtcagatcattggagcccaggagttccagaccagcctgggcaacgtggtaaaaccccatctctacaaaaaatacaaaaattagccaggcacggtggagcatgcctgtagtcccagctacttgggaggctgaggtgggaggatcacctgagcccaggaggtcgaggctgcagtgaaccatgattgtgccactgcagtctagcctggacaatggagtgagaacctgtgtcaaaaaagtaaaaataaaaatagaattatctagaagaatgcatgccatgccatccagaagatgaaaa

SEQ ID NO: 894963 - DNA, 631 bp, Homo sapiens
agatcttcttgggcatctaataataagctgttcaaaattaacatagccaaagcagaattcttttttttttttttttaagacagagtctcacttatcacctaggctggagtgcagtggcatgatctcggctcactgcaagcctcgcctccctggttcaagggattttcttgcctcaacctcccgagtacctgggattacagttgtgtgccaccatgtccagctaatttttatatttttagtagagacagggtttcgccctgttggccaggctggtcccaaacatctggcatcaagtgatccacccgcctaggcctcccaaagtgctgggattacagacttgagccaccgcacccagcccaaaacggaattcttgatgctgtccccaccctaatgcgcacaccccagtcctttctcgtcttagtaaatagcgctgtcaaacacccatttaggcaggccagaaacttcaaaggtgtctttgattccgcycttccaccactttatatctactccatcatgaagtcttgtagactttctgtccagaatatatcctgagtctgaccactcctaatcatttccactgttaaaacattaggccaccactgtctctcatgtgggtgttattgtggtcttc

SEQ ID NO: 894964 - DNA, 571 bp, Homo sapiens
aaaactgacaaggtaaacctgatacatgttgctatgtgtggatatgtaaagttaatctgattccaaatgagatgtgtggtaatgtgcttgatagtgtgcacgtgaactgtaaaccagtcatctagatgactataattataaacttactcagtaaagcccaagttagaatttttttcttctctttgttggattttcagtgtctataaacattgtttttaaaaatgaaaataggccgggcgcagtgactcacgcctgtaatcccagcactttggggggcccaggtgggcggatcatgaggtcaggagatcgagaccatcctggctaacatgatgaaactccgtctctactaaaaatacaaaaaaaaattarccaagcatggtggcgggtgtctgtagtcccagctgctcgggaggctgaggcaggagaatggcgtgaaccctggaggcagagcttgcagtgagctgagatcgcgtcactgcactccatcctgggcgacagagcgagattccgtctcaaaaaaaaaaaaaaaaaaaaaggaaatagtctgattttcttactgtataagtaatag

SEQ ID NO: 894965 - DNA, 631 bp, Homo sapiens
tttttcccagttttttcttgtaggatacacctcattaggaatgcacaaacaaccaaaggaaaaaatatacaaacaggaacttcatatgtaatgaataggaaagctacttactgctactctcaacaactccttttctacttgctccagcttattctgttttgatgcagcagaataaagagctgtggcatagcgaccttcaataccgtatacctgaacaggaggctttaaaaaaaaggtgaaataggagaggaargaaaaaggaaaatcagttaatagtatactctcaagagcagaatttaaaatttatattttaaaaaatgtatctctttaacacaaaacagtttaaatatgtcattcaagagctgtcctaaatggcaatttgcaaataaattagcgatgtttccttggtcaggtcactcaatctttgagcctccaattcctcatctgtaaaatgaggggcttagtaggcattgtctaaagtcccttccaggtttacatacctttatcaattacttgtactttaattttgagataagcttatgtttcctttgaactcagtaactatttagtttcaagtatgggaggttgtgaacactgatagacagtttcgagtatgttagagctaggaaaa

SEQ ID NO: 894966 - DNA, 631 bp, Homo sapiens
ccactgcctggaagggctgtgcagcgctcagagtgggagaggcagacctctgagacaaatgacttcagcatcactacagctgtggctagaatgagaacagcctcaaatttcactaatgaagagattttctgagttccatgtgagcaacgccgcttccttcccatccccgagtgattccccttgtcaaagaaaaaagacacaaccaaaagggagagctgccatcctttcaggtcccttcttgttcttcgtctcactgaattcacccctaaatgctttgaagtattctccatgactgtttcatcaactgaggaaaggaggcccagaatggcttagaaacttgctaactggtttagaagaagaactgagattcaaatgctttgcagtgtaggtctgcttctgccacaaaatggcagccaggggaggaaggagaaagtgaggaaagggggaaaattarcgctcgggctttgtcagatctcaggagaggcggacgctggctaagccccatcgccttatctttattttgtgagaagcaaactgtggggtttggttgcaagagaagatcttactagggaccagttgcagggtgtattaatcaggggtttccagagaaacagaactaataggatctatc

SEQ ID NO: 894967 - DNA, 631 bp, Homo sapiens
ccactgcctggaagggctgtgcagcgctcagagtgggagaggcagacctctgagacaaatgacttcagcatcactacagctgtggctagaatgagaacagcctcaaatttcactaatgaagagattttctgagttccatgtgagcaacgccgcttccttcccatccccgagtgattccccttgtcaaagaaaaaagacacaaccaaaagggagagctgccatcctttcaggtcccttcttgttcttcgtctcactgaattcacccctaaatgctttgaagtattctccatgactgtttcatcaactgaggaaaggaggcccagaatggcttagaaacttgctaactggtttagaagaagaactgagattcaaatgctttgcagtgtaggtctgcttctgccacaaaatggcagccaggggaggaaggagaaagtgaggaaagggggaaaattagcrctcgggctttgtcagatctcaggagaggcggacgctggctaagccccatcgccttatctttattttgtgagaagcaaactgtggggtttggttgcaagagaagatcttactagggaccagttgcagggtgtattaatcaggggtttccagagaaacagaactaataggatctatc

SEQ ID NO: 894968 - DNA, 575 bp, Homo sapiens
caccgctttggccaacagacggtatttatgtaactgcccaaggggttctccttgccagctgcctagacagagcctatttatcaagacaggggaattgcaatagagaaagagtgattcacgcagagtcagctatgcgggagaccagagttttattattactcaaatcagtctctccaagcattcgtggagcagagcttttaaggacatcttggtgagtgggggcgtgggaggctagtgaaccaggagtgctgattggtcacagatgaaatcatagggagtcaaagctatctttttgcactgagtcagtaacctgggcaggggccacaggatcagatgagccagyttatcagtctggatggtgccggctgatccatcaagtgcagagtctgcaaaatatctgaagcactgattttaggagtggtttagggagggtcagaatcttgtaacctccagctgcatgactcctaaataattttttctaatctcgtggctaatgttagtcctacaaaggcagtctagtccccaggcaaggaggaggtctgctttgagaaagggctgttatcatctttgtttta

SEQ ID NO: 894969 - DNA, 575 bp, Homo sapiens
caccgctttggccaacagacggtatttatgtaactgcccaaggggttctccttgccagctgcctagacagagcctatttatcaagacaggggaattgcaatagagaaagagtgattcacgcagagtcagctatgcgggagaccagagttttattattactcaaatcagtctctccaagcattcgtggagcagagcttttaaggacatcttggtgagtgggggcgtgggaggctagtgaaccaggagtgctgattggtcacagatgaaatcatagggagtcaaagctatctttttgcactgagtcagtaacctgggcaggggccacaggatcagatgagccagcttatcagtctggatggtgccggctgatccatcaagtgcagagtctgcaaaatatctgaagcactgattttaggagyggtttagggagggtcagaatcttgtaacctccagctgcatgactcctaaataattttttctaatctcgtggctaatgttagtcctacaaaggcagtctagtccccaggcaaggaggaggtctgctttgagaaagggctgttatcatctttgtttta

SEQ ID NO: 894970 - DNA, 672 bp, Homo sapiens
tctgtctggaaaaaaaaaaaaaaggccgtttgtgctcctatcaaactactaatgacattcttcacagaataagaaaaaacaatttaaaaattcatatgaaacaaaaaagagaatagccaagaatcctaagcaaaaagaacaaagctggatgcatcatgttacccaacttcaaactatattaygaggctatagtaacctaaacagcatggcactggtacaaaaacagtcacatagaccaatggaacagaacagagagcccagaaataaggccacacatctacaaccatctgatctttgacaaagctgacagaaacaagcaatggaaatagtcttccctattcaataaatggtactgggagaactggctaatcatacgcagaaggttgaaactggaccccttccttacaccatatacaaaaatcaactcaagatggattaaagacttaattgttaaacctaaaactgtaaaagccctggaagataatctaggaaatgtcattctggacataagaactggtgaagatttcatgacaaagacaccaaaagtaattgcaacaaaatcaaaaattgacaaacaaggcccaattaaactaaagagcttctgcacagcaaaagaaactatcaacagagtaaacagacaacctacagaaagggagaaaatatttgcaaact

SEQ ID NO: 894971 - DNA, 620 bp, Homo sapiens
aaaagtaggtcactgagacgggattttaggtgagccgggggtggggcaggagaggaaacttcagggagaaaggttgggccagattatgaaaaggtctagctcctgtacaaagtgaaaaatgatgtggattcaccaagctstcagaaggataatggcatcctttctgtgactatatggaatacatacatctattctactataagggatttatttatatctatattccatatagtcacatatagtatatatttacatctatattccaaatagtcacatatatagtatatatgtgtaactatatagtatatatgtatacatgtaaataaactgtctgtgtgtgcactgtgtgcacatgtgcctgtgtgtgtacaatacatgttcactgagcatttcacacacggtaaataactagggaaattagttcccttgtcatagtatgtcaaggaatttatcctacagtgcttaaaggaccccatgaggtatttaacaagcggaggggataattttgaaaagcaccagagaaaatacggaggacggatcaggcaagaacctgtaacaggaaggccaggtcaggggtgggaagtcacaggtgctaatgcccaacttaaggcaatgccaat

SEQ ID NO: 894972 - DNA, 639 bp, Homo sapiens
gcacagggctttaaaattttggagcaaggccctgccattatctgaaggtaattactctccttttgagagacagctcttggcctgctactgggtcttaatagagactgaccatgtaaccacaggccaccaagttatcatgaaaccagagctgcccatcatggtttggatattgtctgacccatcaagccatagaattgggcatgtaaagaaacactccatgatcaaatgaagtggtatatatgattggtcccaagtgggccctgaaaacacaagtaagttacatgaaaaagtgacccaaatgcctgtggttccacccctgttatgccttttctccttctcccagcttcatgggagtttccctatggctacatrtagggaatcagttgagaggggaagagagaacccagtcctggtttacagatggttctgcacaatatccaggcaccacctgaaagcggatggctgcagctctacagcccctctctgggccacccctgaaggacagtggtgaagggaaatcctcccattgggcagaaatctgagccacacttctgatggttcactttacttggaaggcgaaatggccagacatgcaattatatactgattcataggctggggtcatcctgactgggtggt

SEQ ID NO: 894973 - DNA, 652 bp, Homo sapiens
tcctaccatgttctccaccatcctgaagcagctaactcgatagaacagtggaatggccttttgtagatgcagttatcatgtcagctaggtggtaataccttgcagagttagggcaaggttctccagaaggctctctatgctttgtatcagcatctaatacatggtactacttctctgatagccaggattcttgggtccaaggaaattggagtgactcactattacccactagcaaaattttgcttcttattcttatgactttatgctctgctgggctagaggtcttatttctggaggaaggaatgcttccaccaagagacacagcgatgattccattgaatagaaagttaagacygccacctagccactttgggctcctcatgcctcaaaaaccacaggcaaggaagttgtgttattggctgggtgattggtcctgattaccaaggggaaattgtactatagctccacagtgaaggtaaggaagagtatgactggattataggagataccttctggtatctcttagtattactatgtcctgtgattaaggtcaatggaaaatgacaacagtccaatccaggctgggctagtaatggcccagacctttggggaatgaatgtttgggtcaccccactgggtaaagaaccataac

SEQ ID NO: 894974 - DNA, 583 bp, Homo sapiens
gggtaatggaagaaagtgattattaataccagctacaacaattaagtagttacagaaatggacttaacggtcacaaatatttcctcctcattctgctatgaatgtgtgtgtgtgtacgtgtgtgtgtgcatgtgtgtgtatctttgttttctttcctctcctgttcccttaccatgcaacataagatccactgayttttgtcatagtatgtaagtattaatttcacaccacagtgtttaaattaggggtatcaagggaaagagtaaatatcactcaaggactttacttcctcttctggggaaggggtcagtgtatttttggttgtatgcaggatgattgtatcatattagatggaattatgacctcattattacctttatttggagattaagtatggtttaaggagatgtgtatgggtgcccaagttgacaagggttggagttgtggtggaaaactttatgtgtaaatttgacaggcctcaggatacccagattaagaatcatttctttgtgtgtctgtgagggtgttttcagataagagcagcatttgaattgatggactccataaagtagatggcactccc

SEQ ID NO: 894975 - DNA, 597 bp, Homo sapiens
gcggcaatgagtgaggtaggagaggaaggcttggggagacacttcaaactgttacacttcaaactgtttctttaccaatgaatgctgagattatagtagacctcaggcctctagtggatcatttagcagataacagctgttcacacagcagaggcagttcatagttcctaattgtcctatcatcttccattctctcccaggttgaatctgttcttcagaaaacctggaatgaactttccaaatcatcttattgtaatgcttccctgtgttcgtctttcttgggctccccactgtggggattttatccccacaggataaaatcgtactgctttagcatggcctagatgaggcccttcctgacctggcccttgagcttccttactgaaatgctcactcacaaatatccttcacctgaatcctatggccacacagaactatttgttctgacacttygataccttcatgcctctgcacatgctttttctcctctgcttggaatgtcctaccccgttttcttctttgaaaacctctttgtcctcaactaaaatctcatctactgtgagacaccttttccattgctttcagagaaattaaaat

SEQ ID NO: 894976 - DNA, 669 bp, Homo sapiens
atagtgtcttcccatgatcaggaggctttctgaaggactgagtctgtaaatgaaaaaataatttatgtatgaatagcatgtatttctgaagagcttagagtgccttgtagaatttttttctcaattttattcttgaggtttataatttgggggccaaatagatagagctcatcattttcttgtttggaagttgaggctgcgacatgtccaaggttatgaagtctcttttgggaagaacagaaaccaggtctccaaatctggactcatggtttgttcagatgtgtctggacaaatggttgtcaatgttttgtcctgttttttcaaaggaactgttcttcctttgggacaaccttttggtgtttgggaaagtaataagatcttggatttttcaaattaacattaagttgtaagaactaaaattttctttgaaccacaytactgtgtaattcactgataattgacatattggctgggcagcctatctcttccatatccagcgtaaatgaataggaggtgtttgtgattttttttttctccctttatttaacattgagtcctagtagtttggagaattagggtccctctaccttctttctgctcttgtcttagtaagatacataaggtacatcatcttgtgtctgtgtgtatatagcagtaggtcaagtttag

SEQ ID NO: 894977 - DNA, 669 bp, Homo sapiens
atagtgtcttcccatgatcaggaggctttctgaaggactgagtctgtaaatgaaaaaataatttatgtatgaatagcatgtatttctgaagagcttagagtgccttgtagaatttttttctcaattttattcttgaggtttataatttgggggccaaatagatagagctcatcattttcttgtttggaagttgaggctgcgacatgtccaaggttatgaagtctcttttgggaagaacagaaaccaggtctccaaatctggactcatggtttgttcagatgtgtctggacaaatggttgtcaatgttttgtcctgttttttcaaaggaactgttcttcctttgggacaaccttttggtgtttgggaaagtaataagatcttggatttttcaaattaacattaagttgtaagaactaaaattttctttgaaccacattactgtgtaattcactgataattgacatattggctgggcagcctatctcttccatatccagcrtaaatgaataggaggtgtttgtgattttttttttctccctttatttaacattgagtcctagtagtttggagaattagggtccctctaccttctttctgctcttgtcttagtaagatacataaggtacatcatcttgtgtctgtgtgtatatagcagtaggtcaagtttag

SEQ ID NO: 894978 - DNA, 581 bp, Homo sapiens
tttttttttttttttttttttttttttttagacaaggtcttgctctgttgcttagggtggagtgcagtggcacaatcatggcttactgcagccttgacctcctggactcaggtgatccttccacctcagcctcctgagtagctaggactacagacaccggctaccatgcctgactaatttgtttttattttttggtagagacgagttctcactatgttgcccaggctggtctcaaactcctggactcaggtgatcctctgcctcctgaagtgctgggattacagtcatgagccatcgcacctggcctgtaacacaattcttgtgtttcattctctttctctggkggctggattttgggaatttcaccagattatgcccaagtgggattctcttttttgcttttcaaattattattattatacttgcttggtacttatagtttacattctggtccccaaattggtttttattcagttaaggagcattttcttctatttgtttgttaagtttgtttcttcttatctttccctgcctttttttcaggaatgcctgatattcaatactcaatagtcaatattctc

SEQ ID NO: 894979 - DNA, 618 bp, Homo sapiens
taacaaaattaaatatacactaaccacccgtccttaatcgcttcatgtaaatctgtggcattagaaactgaaaacaaaaattatctgagggtcatgttttgctatgcatttaatggatattacttctgcctgctccaagggcaatgttcagtttccacaaacagtgtagtttattatgaaaaataatttataaatcattcttgtttaaaacaaaatttttttaggagaattagtaacagaatttcaaaraagttgaataatttctaaagattaagatttcaacttcactcttttaatgtatttaaggtaataatcacttactttggtgattatttataacattaacagctctaagaggcctttaagggccattttgttatacaaaaaagaaacacatttataagcattcttagaataatgctaatgtcattagctacagaagcagcacatgctaagatatcagctttaattttaaattcatattagaccttaataaaataagtcaaggatgcattttgtaatatctagaataaccactaaaagaacagtaatgtctaacaggcaagttagtagagggggaaaatgaaacaatttttaaaaatacataattcaggccag

SEQ ID NO: 894980 - DNA, 568 bp, Homo sapiens
ttctctcttcgagcaaaccaatttccttctgtgattactgcttggatagaaaggactctgttgtgtggtgtggggagttcaggaggatggtgggcactgagccattaccaagtttgcacttgttgccttctggccaaggacccagaatgtttattcaaaggagcaatttttaaataagacactgacaccagtatctggtctaagagaagagcaagagagaatagtgggagacctggaggaaaccaggtgttcctccagccagggaagctgtagaatccttgtcgtggactcctttctgtcacctccaccaactgagtgagtagctcagactggaggccsctcaccaagcctgtgggaccaagtgtcacctgaaggcaggggttctgcataacaggccaccaggctaccagctgagcaatcttggactagccacaaaatctctgattgtcaaggcctccgcctgcataatagatctattaacaaaaatatctgcgatggccagtgtttggatatattagcacacaggaagatagtgctccaaaagtgcttggtaacaagagcctggtgc

SEQ ID NO: 894981 - DNA, 645 bp, Homo sapiens
tgcatagcaaagactctgtgtatgtgaagccagattttaaaatatggtaacaagtgtctgaaaatatgtggctcaatttgtctcccggttacttttccctctccccctttaaaatgtagaggaaggagaagaagagataagaggtttgtgagtgaagacaagggccctttaaggcctgggaagactaacgccatagggatctccctctgccttaaaaggcacaggaatcttagtggggaaaaagaagtggtgataaatagccagtccgtgtgcctggaatatcaaagtcagtgcgtgccagggatcacactgcgggtcacgtgcactctgggtctctctctgcaaacctgccctgcctcagtctgggaatatgcaactgcctaagaagggtctggcttacacaggggccrtgagacgtggcaggcatagctgggctgctactggtcatgaatcctggacacggcaggcaaggtgtggtgtccatatgcattattcgggtggggcaaagatcacagctctcactagactttcagaggactttgtaacccaaagaaccactcatctcaaggactgtggtaactcaggggctgagccatgccagtgtttattatgtgaaacaaggactggaacctcacaagaccaagt

SEQ ID NO: 894982 - DNA, 585 bp, Homo sapiens
tactggtttcacagaatgatttaaggatgagtccctctttctctatcttttggaatagtttcagtaagattggtaccaattctttgaatagctgatagaatttagctgtgaatccatctggtcctggacttttttttttgttgggaatttttgtattattgtttttatcttgctacttgttattggtctgttcaaagtttctgtttattcctgatttaatataggagggttgtatatttccaggaatttatccattcttctasattttctagtttgtgtgtgtaaaggtattcatagtagccttgcatgatcttttgtatttctgtggtgtcagttgtaatagcttctgttttgtttctaattgagcttatttggatcttctctctccttttcttggttaatctcgctaatggtctatcaattttgtttatcttttcaaagaatcatcttttttgtttcacttatctttttgttaatgttgttgtttacatttcatttagttctgctatgatctttgttatttcttttcttctgctgggtttgagtttagtttgttcttgtttctctagttccttgagggtgtga

SEQ ID NO: 894983 - DNA, 608 bp, Homo sapiens
tgtggactcttacttcttcctgactttttgatgttctcttttgtcaatgtgaccaaccaattttgaatcagagctactggcatctttagaatgacatgtatggtggctcagaactgtaccctttaaaactcagctccagtaaagggagattctgagcattttaagatgttggaaattgagttgcatcctgcattaaaggcatttcttctttatataaactgtaggattctgttaagacagaaatggggagagctaatgggctattctgaaagaactacccattaaatkgtaaagtacggtatgttttaaagtgacaaacccaagagctgaaaatgactctttgatctttaaaaggctcataaacggtggcagcgtactcacagacctatatttatgtattcaaatattgggaggaaatccaagtagagtctcaagactgcgggactttgcaatttagacaaaaagaggccagggaggagggcaattaaatcaaactttttacagcataaagcaagctttcttccctccttgttaatcaatgaactagaatcttggtaagggcttgctttttaagtggggtttgagccaatctttacacagatgtgagg

SEQ ID NO: 894984 - DNA, 627 bp, Homo sapiens
cctgaccttggagaggacgatgtaaaggggaatgcctaattaactttccatttataaaccaattattttactattggcaccttcattctgcaatcactgacataaaatcttttacaaaacaaaatgtaataaatgagaaatcgattggattttttttaagtttgctttgaagtcagccattaataagaaatgtcctttaataagagagatctgtctatagaagttcctcgacgtcagagcccagctgtgcggctgctggaggagacgaagccgcattcaatcaaggctttggaactcttccttgttcatctttaactgcaaggacagaggcgtactatttttctttttttttttttttttttttggtagagasgggggtctccgtaggttgctcaggctggtctcaatctcctggactcaagcaattctcctgtcttggcctcccaaagtgctgagattacaggtgtgagccaccacacccagccagtaccagaaggactgcttttctccttaaaaaagagggaaagaatgttttcacatagatcttcatgtgctaaaatcacaccaaaaactcatgcaaggtcaatgaagaacaaagttctctgctcccaccacagaatctttgca

SEQ ID NO: 894985 - DNA, 602 bp, Homo sapiens
tacaaggtgtttgctaattcgtgcctgccagctcctgtaagcctttgacacatagactgttttctcctgcagcagggattgtacttcctcattgaagctgtgctcaggcctgactctggttgttagccaggacataatgagagatagtggggacagatctggagaaaaacaatgatcattgtgtggagcacctccaggtgaggtcatagtgtaatgcactgggaagacgaggctgttctctccccaggttgttgggaacagcttcggccagccaggaagcttcagggaattgggggctacaatattctcagccttggccaygcaaacatcaccatccaaggtcttggtggtccactctcctgtcaggtctttactttgacactggggcggtgttaaggctgtgcattttgcttcttttgcatttctgccacccttataatcagatcccaggtttaataaccttctgtcctgtgggttttagagatgagaacctcctctaaagtgactacagaaatactctggctttcagacagggcctccaggtggcaaatagctgccctgcacttattattttctttttgcaaggcttccaatgccttcaa

SEQ ID NO: 894986 - DNA, 598 bp, Homo sapiens
aatccccaatgcaatagtcttaagggacctttaggaggtgaggagatcactggggtggagccctcgcagatgagattagtgcccttataaaagagaactgaggaagcttgttcttcccttctgccctgtgaggacccagctagaaggcatcatctatgaagcagagagcaaaccctcattagacactgaatcttctagcaccttgatcttggacttcctcagcctccagaactgtaagcaataaatttctgttgtttgtaagccactcagtttatgatattttgttatagcaacccaaacagaccaagacaaatacattaactatagtyatcatgctgtgtcttataaattttttgacatgaaggatgtatagcacacaatttacaaataataagattgccttttatgtaaatcggtaaagtcaattgattcttacagaatggttttgttgatttttgccaaaccattgtaattgcagccaacatatggctgcaactgatgaacaagtgtagctccaatatgaatgctggttaatatttttgttttacattaacaagtaagaagaaagcaaaataaatgacaaagacatatggtggaa

SEQ ID NO: 894987 - DNA, 591 bp, Homo sapiens
ggaagagagggacagtcacagtcattgccatattcggtggagagccaaaaataagaatacacaattatgtttaaaatatatggggccgggcacagtggctcacgcctgtaatcccagcatgttaggaggtggaggtgggtggatcacttgaggtcaggagtttgagaccagcctggccaacatggtgaaatcccatctccactaaaaacaaaattagccgggtgtggtggcaggcacctgaaatcccagatactcaggaggctgaggcaggaaaattgcatgaacccgggagccagaggttgtagtgagctgagattgcrccactgcagcctgggcaacagagtgaaactctgtctcaaaaaaaaaaaaaaaaatatatatatatatatatatatatatatgtatatcaattaaagattttaaaaggggtaagtcaatttctctctggaatcttgaaaatataatccagaaaaatgaatgactccataactaaaatattaactatacttaaaagtagaattgatgtccaatactgatatatccagataactcatattgacacaaatatctctccaataattttatgttttc

SEQ ID NO: 894988 - DNA, 524 bp, Homo sapiens
tcagctccaacattctgaaaaaaataccaaaaattattatttaaaaattatagcaaaagttggccaggtactgtgactcacgcctggaatcccagcactttgggaggctcaggcaggtggatcacctgaggtcaggagttcragaccagcctggccaacatggtaaaaccctgtctctactaaaaatacaaaaattagccgggtgtgctggcgcatgcctgtaattccagctattcgggaggctgaggcaggacaatcacctgagcccaggaggtggaggttgcagtgagccaagattgagccactgaactccagcctgggcgacagagcaagactgtctcaaaaaaaataaaaaataaaaaataattgtaaaagtgaaattcaacaaaaggattaacatcaagattaacatgaactgatcctgtgatttccctacaaggggaggaaaagctacgtttgaggctctttggatttttgcggggctttctttccccattttatttagaataaggcaatggaagtgc

SEQ ID NO: 894989 - DNA, 629 bp, Homo sapiens
cctgtaattccagctattcgggaggctgaggcaggacaatcacctgagcccaggaggtggaggttgcagtgagccaagattgagccactgaactccagcctgggcgacagagcaagactgtctcaaaaaaaataaaaaataaaaaataattgtaaaagtgaaattcaacaaaaggattaacatcaagattaacatgaactgatcctgtgatttccctacaaggggaggaaaagctacgtttgaggctctttggatttttgcggggctttctttccccattttatttagaataaggcaatggaagtgcagctcttgcttctatactaagcgcattttgaaagactcattgacaccaaacatcaatgaggaatgaaacattacaaagatgctcccctttaaacaaacataaagtcagcgcttttaaatattatgtgcttcttggacaggtatyctaattcaagacagcatctcacacaaactggagctggcgatcagtcgaataacctggctgacatcactgataaggccaaggactcccagcaccttctgacaaacctctgtttcctgcttcttgtctgaagtacactgtttgcttggcaaaagccaggagacgtgagaacctcccacag

SEQ ID NO: 894990 - DNA, 542 bp, Homo sapiens
tttgctagccatcatctaggaagcattctcagtgactagaggctgctttcaagcccttgacacatggtctcctcaatgggccctctccacttcagatctatcacttcagaaaggatctagacagttaaggactcacctgattaggtcaggcacacccaggatggtctttcttttaattgcctcataatcagctgatttgggaccttgattatatctacaaaaccctttcacatttgtcttataacattgtattcattgtcccatccacacttaagaaggaagragattatatagggtatgttcaccagaggcaggaatgggggccatcttagaatgttatttgttgcattcctctggagaaccctggcacatacacaaggttagtgcatgagtaacaattcgggtccactgtgcatctctccaaacccaatctgtcctgtattttaactaccttcacacaaggggcaagaatgttaaccctcaaggatgctgaaatattcagttcagcccagaggactccggcagacttgaattccatgtaa

SEQ ID NO: 894991 - DNA, 542 bp, Homo sapiens
tttgctagccatcatctaggaagcattctcagtgactagaggctgctttcaagcccttgacacatggtctcctcaatgggccctctccacttcagatctatcacttcagaaaggatctagacagttaaggactcacctgattaggtcaggcacacccaggatggtctttcttttaattgcctcataatcagctgatttgggaccttgattatatctacaaaaccctttcacatttgtcttataacattgtattcattgtcccatccacacttaagaaggaaggagattatatagggtatgttcaccagaggcaggaatgggggccatcttagaatgttatttgttgcattcctctggagaaccctggcacatacacaaggttagtgyatgagtaacaattcgggtccactgtgcatctctccaaacccaatctgtcctgtattttaactaccttcacacaaggggcaagaatgttaaccctcaaggatgctgaaatattcagttcagcccagaggactccggcagacttgaattccatgtaa

SEQ ID NO: 894992 - DNA, 620 bp, Homo sapiens
agctctgaatgcagaagaaaattttggagatgagcaatatgtctcctatagtagggccaaaagggaaaagagaaaatagggaaggcaaagaaataggggaaacaccattcccaataggaaaagaggcaaaacctcttgacaaccctaattggaactcctttctgtggtgtttttccttctttcatggtttaaaacggcttctatctcttttataatgttcttccaacctgggaaaagttaattttccaaaccttaaaatgcttggcttagagttgagctagggggaagggaacccagaagcctgatatgccggcaaaagggtaaaaatttcttacggatcgggctttcagcttttctctccctgtgcaaacaagtaaaagggttaataagaaccattgtgtatattctctgtaaatgtataattartgaaaaaggatttgtgaggttgctcttaagctgtagacaatctggtgtgctttgcatgtctttctgtatggttctgtcaaagaaagggtatctcaggttaggatgcaggcccaggaacccataagcctgctgttcaagccaacccaacagaacagtcagtaacaaacttgcctgcaggcctccatcttgtttca

SEQ ID NO: 894993 - DNA, 561 bp, Homo sapiens
tcttaatatgttgcccaggcttcaaggagttttgtttgtttgttttttgggtgttttgggttttcttgagacggagtttctctcttgttgcccaggctggagtgcaatagcatgatctcggttcactgcaacttccacctcccgggtttaagcgattctcctgcctcagcctcccaagtagctgggattacacgcatgcgctaccacacttagctaattttgcatttttagtagagatgcagtttcaccatgttggttaggctggtctcgaactcctgacctcaggtgatcctcctgyctcggcctctcaaagtgctgggattacaggtgtgagtcaccatgcccagcctcaagcagtttttttaaagaatcaggacagtcgtaaacgttcagttaaacagaaggtggaaggtacagcctaggagggtgctagtggattgtctgaagaaagcaaacagcagacagacaagattagcattgacagcaagaccacatccgcatcacacaaaaggaagaggaggctggcaggaatccaggaaaccttagcgatgaagtcagcaa

SEQ ID NO: 894994 - DNA, 643 bp, Homo sapiens
ttattccaagagttgtgcagctctcgtcattcttaacgaaagtccaagtatgaagcttttgttcttccaggctctgcccatgatgtgctgcctcagggtgtctgcactttgttcagattcctcttcccatctgcccgctcccaccttaaaccaaatagattttcctgctagtgtagagtaactgcagctctgaaaaatcatgatttagtccaaaaagtggaacacttatataaatgtattgggagcttgctgtgtaacttcagggargtattaaaagaagaaaatataacttagcattctggagatgtgtgttttatgtcaaagccatgcaccttggtgagccaagtaaacgttgctgctaacttggctccaggtcgtattttctggaagcaaatgaatatcacgctcctgcccaatcataacagtcacttaatttactctttccaattttttagctgtctgcaagaaatcacactcaggaggcaaaggaggtgattatacagaactagaaggcacaggacggccattcagtccagtccatactttttgtggctgggctttagccatacctcatttcctcctccatcaatcaaggcaacaaaattgccttcatttttgtaacaagcatttagcattcttatgc

SEQ ID NO: 894995 - DNA, 632 bp, Homo sapiens
aatcccaggactttgggaggctgaggtgggcagatcactggagcccaggagtttgaaaccagcctggctaacatggtgcaaccttgtgtctacaaaaaaatacaaaaaatgagcagggcatggtggtgcacccctgtagtcccacgtacacagaagactgaggtaggaggatcacttgagcccagggaggtcaagactgcagtgagctatgattgcaccactgggctccagcctgagcaacagagcgagaccttgtctcaaaaaagaaaaaaaaaaaaaaaacccactacgtgaaagtcagtcacaaagggccacatcttactgtttcatttatctgaaatgtctagaattggtaagtctatataratggaaaacaggttagtggctgcctagggatgaaggcatggaaggaaatggggaatgactgctaatggctatggggtttgttttaggggtgatgaaaatgtcccaaaatagtggtaatggttgtataattctgtgaacatactatcaatcattgaattgtatactttaaatgggatttaattcacattacatctcaataaaactattttttaaagaagaaaatgttcaaggaacaagggttgctaaataacagaggataactgttg

SEQ ID NO: 894996 - DNA, 613 bp, Homo sapiens
acaaatagcattcaaatatttttaacgatgatcaacaggctacaatttatcatttttaaaaacataaaaccattatcatcttgctgaataattcatgacctttgtaacaaactggctgagaaccacttttaaagaacatcctggtccggctatcattacacacacgggagggtatctgtaggataaattcccccaacaattccctttccaggaagagacgcatatttttaatttcaatagacaacagccaaattgccctccaaagaggargtacattacactcgccagaaatatacatgaatggctggttttccccaggcttggcaatactttgccaagctaagaggtaagaatgggctttaaaataaaccctgatccagctcccaaggagaggactggggccttcggacccacatttcccagcacaggtgcttcaccagcctgccatggccccttctctgtccagtttagcaagggtgtggcagatttcctttcaggcacagagcccagccttccagacatcacacttaaactggttcctaccacatttgcaaggagaatctcttcttccaagtcagcagtgtttacaataagcagtatgcttttccctgag

SEQ ID NO: 894997 - DNA, 613 bp, Homo sapiens
acaaatagcattcaaatatttttaacgatgatcaacaggctacaatttatcatttttaaaaacataaaaccattatcatcttgctgaataattcatgacctttgtaacaaactggctgagaaccacttttaaagaacatcctggtccggctatcattacacacacgggagggtatctgtaggataaattcccccaacaattccctttccaggaagagacgcatatttttaatttcaatagacaacagccaaattgccctccaaagaggaggtacattacactcgccagaaatatacatgaatggctggttttccccaggcttggcaatactttgccaagctaagaggtaagaatgggctttaaaataaaccctgatccagytcccaaggagaggactggggccttcggacccacatttcccagcacaggtgcttcaccagcctgccatggccccttctctgtccagtttagcaagggtgtggcagatttcctttcaggcacagagcccagccttccagacatcacacttaaactggttcctaccacatttgcaaggagaatctcttcttccaagtcagcagtgtttacaataagcagtatgcttttccctgag

SEQ ID NO: 894998 - DNA, 575 bp, Homo sapiens
gtcccaaattgtgggaaatctatttgctctacgctttccacagccaacacccaaagggaaacctagacagatacacaagttcatctccataaactcatgaaaaacagaactacctaatagctagcactcagcccagacaggtttccacaagcattctcatttaaaaaaaaaaaattttgtgaggcagtgatatcttcaatgtttctcttatagcagaaacaatggtaagtttcaaaagatgtctctgacatcccgtctcaagcattgaccaatgatacaargtggaggagaatgaagtattgatgcaatttctctccagccttattaaatgatggagtagccaccagacagggtggctatcaatctctccaccaatctttcccctagaatggctctgtttctttggacattaaaggggtttttattatggagagtttcccattaaaacgcagcaccacagttgagtgcctgtgaaggagagaattacatgagcacggcctgtcgaagaccccatggacaaagggcaagagagaagcttccagataagtgatggcgtgtgccaagggcaagcttcc

SEQ ID NO: 894999 - DNA, 533 bp, Homo sapiens
cactctatatacatactatagaatattactcagtcataaaaaggaggccaggcatggtggctcatgcctgtaatcccagaactttgggaggctgaggtgggcagatcatttgaggtaaggagttcaagaccagcctggccaacatgttgaaaccccgtctctactaaaaatacaaaaaaaattagctggacgtggtggtgcacgactataatttcagctattagggagcctgaagcaggagaattgctggaacccaggagacggaagttgcagggagcagagattacgccattgcacttcagccctgggtgacagagtgagactctgtctcaaaaaaaaaaaaaaaaaaaaaaaamacaactaaaaacccacatgctgtatatgcatgtgacagaatattactcagccacaaagaggaatagttctggtcaccctacagtatggataaaccttgaagatgtgctgggtgaaggaggttagacacaaaggaccacacatgacatgattgtatttatatgaaatgcccagaatag

SEQ ID NO: 895000 - DNA, 624 bp, Homo sapiens
caaaaaaaattgacactcatgtcttggtaacatcgagtatccagtcagtcttcacatctccctgattttcttatacatttgcctgaattaaaatgcaaacaagattcccactttgcatgtggttgatatgcctctcaggtgtcttttcaactatgggtttccttcctccccactcccttttttctccttgccactcatttgttgaaggaactgggctgtctttccgataatttcccgtattctagacttgctggtagcatcctatgacactgtttcacrtattcctccatccctggatttcctgaaaacctgtggttaggatgtctagttagggactgaatcagattcacagctgatgtttttagcaagactgttttataaggggtatgtactccatcaggaggcaagtgagatctccaaatcactctggagaaacctccttctctctcttcccttctccctacgtgcctctcttcctcccttcctctctctgttagcagtcgttgatgataagctgatcattgctaagttctataatcccaacaaaggtttacaaaatgctttatcctcattctatccacccttcttttatgcttccattagaatatttccatagggacaaat

SEQ ID NO: 895001 - DNA, 663 bp, Homo sapiens
ccagatgcttcttgggccctctggaagccatggggatgtttccagaccgaaaggagggctttgctggggagcagatgtgctgcctctccccgacccaggattttgaggccatgtttccgttaatctggaccgagagccctctgggagagggaggcaggtcgtagggggcgggggtgagggggagcgagatgaggtcgtcgctggacgctgggctcccttgtcgttgtccttttccccagaatmcatggtcaggcctagggagccacccctgggtgctcgagatgagtccccaccctcactgaaggtcggtcactggatgtttgtgtgcatcgtaaggggcccaccgaagtcccgaagccttctcagggaccagcgagaaagaggagcaggcttgggagacagggaaggaaaatgcaggggaaagggctcacccctcgaccccaggtaaaattagaaggaacgtgtggcaacccaggtgcagctttggtcgctcgctcaaggactttgctagtcactaccattaattaattaatcactatcattaactaccaaggacaccgtttttattcccctaaaagcgtcaccttgaggggaatggagaattgggcagcagctatgcaaatcctgggacaggagacactgcctgaggaccctctctcactc

SEQ ID NO: 895002 - DNA, 661 bp, Homo sapiens
cctggggtaggggtagacctggagccggtggactcatatccttggaattcgtcaggacagctgctccggggccttggccctcagtcagtctggggctgaggagtagggaagctgggaacttggggcagaggaagaagatgcgtttagaaagacctccattatgcaaactggagtccatttatgcaaactggtcacccttccagtagctccaaagagtggcagtggagtggcatcttgattgatttaacctcttctcaggggacctgggtctgcgagggaggatatggctgcggggttggaataggatctgtctgagctgccagggtcagggtggtggccctagggaggttttagggccagggtggtcccgggctgtggcaggggytctcagatcgcctcgggctctcagctgcaaggtgaaaaataccatgaggaattgatctgccaagggcggtcttgtctcaaagcaagtggattgctggggtaaagaatctagagaccagcttaggactctgggaggaagaaaaaaaaaaaaagaatagcatagtcctaaggaactgcaaggatcaccagattaacccttcatacctggggaaattaaggccagacatgacacaggcctttcccaaggctctgtagcaagggcaatagcaggccagtt

SEQ ID NO: 895003 - DNA, 637 bp, Homo sapiens
agactccgtctcaaaaaaaaaaaaaaaaaaaaaaaaaaaaagaatgaggataaacctcttcctcacatcatgcaaaccacgtacaaaaattaactcaaactggatcaaagacctcaatataagagctaaaactacaaaattcagagaagraaaacacaggcataaattgtcatgacttttgatcaaccaatgacttcttagataagacaccaaaaacagaagcaacaaaagaagaaatagataaattgaacttcatcaaacattcttgtgcttcaaaagatatcaagaaaatgcaaagacaacacagaaaaataggagaaagtattggcaaatcatataagaactcctacaactcaacaataaaaagacaatccaatttaaaaatgggcaaaggatgtaaggcacccggcaaaggcacctgtagtcccagctactagggaggctgaggcaggagaatggcgtgaaccccggaggcagagcttgcagtgagccaagattgcaccactgcacgccagcctgggcgacagagcgagactccatcttaaaaaaaaaaagaaagaaaagaaaatatacaaacgcccaataagcacaagaaacactgctcaacatcagtcacgaaggaaatgcatctcaaaac

SEQ ID NO: 895004 - DNA, 682 bp, Homo sapiens
agttcctgtatccagagtcaaacctaaactcaacagtgggtattccaggcatatgtcaccgtttgagccctttgcccatcacagggtctcacttgttccacacaaggctcctcatggctccccacttgcaccccctgttttcctgccactctgatttttttttttttttttttgagacggagtgtygctctgtcgtccaggctggagtgcagtggcaggatcttggctcactgtaacctccacctcccaggttcaagtgattcttgtgcctcagcctcccaagtagctgggattacaggcatgcgccaccacgcccatgcctagctaaattttcagattccacccgcctcaatctcccaaaatgctggtattacaggcatgagctaccactcccggtactgccactctgaatttgatgctctcctctgccaaaatagtcttagaattgcaaacccacatgccacagatgtctctgcgaggcccttcatgaacccgttcctgaccttccttcatgcttagaatcatgggtatcttaccgtgtgatgctttgtagctggttattagcatacatgtgcgtctctgtccattagattgtaaaatgctggactgaggcactgtgtccaactccttccatctgaattcttcacagtgcctgggacattttgggccgcggtaacaggaa

SEQ ID NO: 895005 - DNA, 678 bp, Homo sapiens; identical to SEQ ID NO: 894134

SEQ ID NO: 895006 - DNA, 578 bp, Homo sapiens
actttggaggattttccctggtatagcagtggtgtttatggtagctgtccaaatttatttatacttcaaaccatgccagaaagttaaggatttctgtcaatgtctacacctagttctcttgttaagactagtaaaaagttctcttgtaaaaagttcatttttacctcgagaggcataagctcagagattattgcaggaggaagggtcaccccttgtgtttgcsccatgaaggcacactcctttttacctggtgggtgttgaaaaaatatttgaaggaatagacctgaatgaatggtaattattggtaggggtgggaaatggactaaatgacctagtgagatctttgttttgagatctaagtataagatcatctcttaaaccttttaacaatattttggtggaacctattagaaacttaacacattattgtgtgcaagatatctaaaaataagtccagttttttagaggcagtaacatttaagataatttaaaacattccatattagtgtaatgtcttgttagggaatgtggacagtaaaaacgaccatttgttaaattttttttcccctccaaaatat

SEQ ID NO: 895007 - DNA, 597 bp, Homo sapiens
agatatctaaaaataagtccagttttttagaggcagtaacatttaagataatttaaaacattccatattagtgtaatgtcttgttagggaatgtggacagtaaaaacgaccatttgttaaattttttttcccctccaaaatattgtctgatgtttgctccttcgtgttacttatggagagttactgtttatgacttaaagatatgggggtggagaggcctaggtaactgcaacaatgtatttaggtaatttacattaggtttttagagggctatgactrtctgcaaaaggaaaattcaagataccttgttataaacatggtatacagtgacctttggcatgcattttgttttgtaactacacgaagtgttaatttggattgaatctttgttttcacttgaaaaccttttttttttttttaagaaatagcttggaaatttaggctgccctgaggtgttttcgtgtgtctgtttatggttgacaagtatctagttatgagaagaaaatgtggatagaattaactgtattataggcgagaagggaattgccttataatcttgtgccactgaacacaagattagtagaagagtgggcttca

SEQ ID NO: 895008 - DNA, 577 bp, Homo sapiens
aaataaatgaagcttgacctctcacagcatatacaaatgtcaattcccaatggatcacagtcctcaatatggaaagcaaaataatgcagcttctacaagaaaacagacaatcttcctgcccctggaataggcaaagattttaaggaatcactagctccaagaataaaatgttgataaactggattttggtctgcactaagaactcttaagttgctgttgagagagtgaaaaggcaaaccatgaagtggaagacgctggtaatccacacttccaacaagactcctccagaatgtacaaataactacaaatcrgtaagaaaaagataacaatatattagaaataggcaagagatttgaataggcacttcgcaagtatccagatggtttgtaggcattttgatagccacatttgttcaaaatcaatcaccaaggaaatataaattagaacattgctggcagggtgatagggtttggattcgtgtccctgcccaaatctcacgtcgaataggaggaagggcctggtgggaggtgattggatcatgggggcggatttcccccttgctgatctcatgatagtg

SEQ ID NO: 895009 - DNA, 569 bp, Homo sapiens
cagatgtgtgcccacatgttgcctctgttgtctcccaggctcttcctcagcccccatagactagcgaaatcctcaggagtcagctcagacttgcccttccctggaagcctgccagagagctcccaatatgtttagtttctgtcctcaccacccagtgcctgcctctgggacagcacttagcccacaggatgacagtggctggctttcatgtctcttccctgacagaccctcaatcttcaaggtaagcaactatgctttactcattttgtccccagcccagtgtctgtgatggtacctgagacatagtggaggctcaggagacattgcctgaataaatgaggtgctgggtggatgcaatcatatgtatgtatrtgtgtgcatgtgtatgcgtgtgtatatgtgtgtgtgtgatacatatatatctgtagatgccctgattgtatgtcagcttgctgtttgggtacctgccatggtttgaatgtttgtcttctccacaactcatgtgaaatttaattgccactgtgatggtactaagaggtggaacatttaagaggtgattaggccacgag

SEQ ID NO: 895010 - DNA, 587 bp, Homo sapiens
gtgaactgaagatgatggttgatcgccttaattcacctccacacagctatggagtcataacttttaatatcagatgattttcttttagaatatttaaaagcacatacgtagttgtatctttcaaaactgatttgtaagttcttgtgttctgccatattcactaaagctataggcagtgcagtttccagctgctaaattatgcctattccccataaggaaaggatggaaaatgccaycgagacctcctgggctcttgttttttctttacccacatagctcattaatcgtggcccattttccatgtaaccaaaaacttagtctgggaatccttactagcttcaccagcatttaaaggcgttcctaccagtttgaattagcatggagaggaaattaaatcttttttatgttgtctctctctgtgatacaggctgctgctttctccatttcagattgatttatttatattttgcttctgctattttttttcctcaataaaacatcccattccatctcctaaatctctgccttacaaaaaccacagtgacctatcatttctttcaaattgatctataggtattactattttt

SEQ ID NO: 895011 - DNA, 563 bp, Homo sapiens
atggggataggaacccctgctctcagacctttctamcctttaccctgtgcatctcctcatctgtatcttttataatatcctttataacaagctggtaaatataagtagtgttttcctgaggactgtgagccattccagcaaattattgaactggagagaatcagaagaaccccaggtttatagccagtcagaggtatgggaggatgtccaggacttgtgattggcatcaaaagtgggggcagtcttgaggggctgatgccttaacttgtgggagctgacattaactccaggtagatatgtcagaattgcattaaattgcaggatgctgagctggtgtcagagaattggtggatgtgggaaagagcctgcacatctggtgtcagaagtgttctgtttgagaatggagataaacagtgcttttccagagggagtttgtcttgttcatactaattagctagagcttgtcctccccacttcaaatttgtgaatttttttttttaccagtggaatatgccataaaactgacataactaccaagctctagaatttaaatgatcttggag

SEQ ID NO: 895012 - DNA, 697 bp, Homo sapiens
ctccccacttcaaatttgtgaatttttttttttaccagtggaatatgccataaaactgacataactaccaagctctagaatttaaatgatcttggagggcttaagggagcttcttttcaacctcagacataccagaaagcaacgaattctgcagcagttttctggttaatatggcaatgcagacctagggaatatggagaggtggttatgcaatgaaagggkagacatgggaaacacaccagaagacataacattggaaaaacatttggcaaacataaagccatcccaaaaagataagttgcaacactgccagttgggcaagatgattaaatggcagaaatatttatattgtttaggtagaaagaagggaatagtctcagacatggaatagctaaactactgaaagaatttagaccatttggggtccttctgacccccgtgaaattggaaaccatgtaaattagattattaattataaataaaaatgctctggttataccacactttctgaggaaatcataagtcctgttaccctagtgtttggggactcctcttggctaaaatcactcccttggccccatcaccagctgcagtgattcaggggagtcccacctggttgttcctcttagagctgaaagtgctgaggaaggcaaggaattcttgaatcctagagagtccctattttctagaaaatggt

SEQ ID NO: 895013 - DNA, 580 bp, Homo sapiens
ggagggcttaagggagcttcttttcaacctcagacataccagaaagcaacgaattctgcagcagttttctggttaatatggcaatgcagacctagggaatatggagaggtggttatgcaatgaaaggggagacatgggaaacacaccagaagacataacattggaaaaacatttggcaaacataaagccatcccaaaaagataagttgcaacactgccagttgggcaagatgattaaatggcagawatatttatattgtttaggtagaaagaagggaatagtctcagacatggaatagctaaactactgaaagaatttagaccatttggggtccttctgacccccgtgaaattggaaaccatgtaaattagattattaattataaataaaaatgctctggttataccacactttctgaggaaatcataagtcctgttaccctagtgtttggggactcctcttggctaaaatcactcccttggccccatcaccagctgcagtgattcaggggagtcccacctggttgttcctcttagagctgaaagtgctgaggaaggcaaggaattcttgaatcctagag

SEQ ID NO: 895014 - DNA, 566 bp, Homo sapiens
gcttcttttcaacctcagacataccagaaagcaacgaattctgcagcagttttctggttaatatggcaatgcagacctagggaatatggagaggtggttatgcaatgaaaggggagacatgggaaacacaccagaagacataacattggaaaaacatttggcaaacataaagccatcccaaaaagataagttgcaacactgccagttgggcaagatgattaaatggcagaaatatttatattgtttaggtagaaagaagggaatagtctcagacatggaatagctaaactactgaaagaatttagaccatttggggtccttctgacccccgtgaaattggaaaccatgtaaattagattattaattayaaataaaaatgctctggttataccacactttctgaggaaatcataagtcctgttaccctagtgtttggggactcctcttggctaaaatcactcccttggccccatcaccagctgcagtgattcaggggagtcccacctggttgttcctcttagagctgaaagtgctgaggaaggcaaggaattcttgaatcctagaga

SEQ ID NO: 895015 - DNA, 566 bp, Homo sapiens
gcttcttttcaacctcagacataccagaaagcaacgaattctgcagcagttttctggttaatatggcaatgcagacctagggaatatggagaggtggttatgcaatgaaaggggagacatgggaaacacaccagaagacataacattggaaaaacatttggcaaacataaagccatcccaaaaagataagttgcaacactgccagttgggcaagatgattaaatggcagaaatatttatattgtttaggtagaaagaagggaatagtctcagacatggaatagctaaactactgaaagaatttagaccatttggggtccttctgacccccgtgaaattggaaaccatgtaaattagattattaattataaataaaaatgctctggttataccacactttctgaggaaatcataagtcctgttaccctagygtttggggactcctcttggctaaaatcactcccttggccccatcaccagctgcagtgattcaggggagtcccacctggttgttcctcttagagctgaaagtgctgaggaaggcaaggaattcttgaatcctagaga

SEQ ID NO: 895016 - DNA, 596 bp, Homo sapiens
gcatatggccattattactaccccatgaggttcagctgttagttagcagttatgtaaaaaaattaaagagttgcactggagtaatgtcagttgagttcaccctttctttcacttttcattgtgtcatggaattggaagtaactttgaagtttatctggtccaattcctgtcattaagttgaaacttaaggagtctggtggctgggcatggtggcaggtacctataatcctgcactttggtaagctgaggtgggaggatcacttgatgttaggagtttgagaccagcctgggcaacatagcaagaccctgactctacaggaaaaaaaaaaaagagtytagtgatttgtcaaaggtccatctgcttatttagtggttgagataggattatttaacctaagtttaaactcccagctaattttttttctattttaattccaaaaccaatatccaatatgaaatcacatcatggacatctcaaaacaaactttcctttagttttcaggggtaatttcactgggaaacataaattacacgtggagcaggcagccttgtttgtgaattaattaattttttttttttttttttttttttttttg

SEQ ID NO: 895017 - DNA, 596 bp, Homo sapiens
gcatatggccattattactaccccatgaggttcagctgttagttagcagttatgtaaaaaaattaaagagttgcactggagtaatgtcagttgagttcaccctttctttcacttttcattgtgtcatggaattggaagtaactttgaagtttatctggtccaattcctgtcattaagttgaaacttaaggagtctggtggctgggcatggtggcaggtacctataatcctgcactttggtaagctgaggtgggaggatcacttgatgttaggagtttgagaccagcctgggcaacatagcaagaccctgactctacaggaaaaaaaaaaaagagtctagtgatttgtcaaaggtccatctgcttatttagtggttgagataggattatttaacctaagtttaaactcccagctaattttttttytattttaattccaaaaccaatatccaatatgaaatcacatcatggacatctcaaaacaaactttcctttagttttcaggggtaatttcactgggaaacataaattacacgtggagcaggcagccttgtttgtgaattaattaattttttttttttttttttttttttttttg

SEQ ID NO: 895018 - DNA, 617 bp, Homo sapiens
tctgctgcctgaggaaaccctgtgagtacgggcatggagtgctgggtttaaggaaaaaccagcctgaagggcactgtctgggaaggatgggaaataatacctaagggtggctggggaactctaatcttggaagttatatcaaaagaggacaacaaccatctgccttggaagttttaggtgcaggttttcttccagttggggaagggattggggtgtgggggcactttccctctggtggttttgtagtaaacctttccaaatggacccaactacttagatgtatggacctattaacaagaaggcrtagatactcttcggctcataaccagtggaaaggcatggttcctgtattggaagcatctactactggagtgaaattaactcctagtctgttagttttccagagctgctgtaacaagtctccacaactggatggtacaaaataatggaaatttattctcttacagctctggaggttagaagtccaaaattaaggtgtcagcagggtgggtcccgttttggaggtgctgagggagaatccattccctgcctctctcccagcctctgatggttgcttcaatccttggcattccctggtttgtcagtgctgatgcatt

SEQ ID NO: 895019 - DNA, 633 bp, Homo sapiens
aggataaaataccattttcccagaatgcctgggatctgacctgccccagattaattgacatttccagattttggtaactataaccaaaataatgaatttatttgatgctgttacccacaaaatcatattacctaaggggcattgtctgtcaagatcatgagatgagcccatcttgacatccccaattgaaggtggcttcgtcatatgccatacattgtagaaaaatgttttkcatttgtgatcaagccatgcttttcccgaatgcatgattataaaaatatcttatgaagtatttctagtggttcaatgcatttgtgttggctcccagggagagaagagcttctgtataaacagccatcacaacttcaccatcagtgagcagatttacagaagaggaaacataaatgactaattcacataaagtgttcagcctcactcaaattgagatataattttatgcatgattttaatgccatcttacataatatattcttgtccatttttcattgggttgtaaccattttatatattcagagtcttaacattttaatggtaatatttctgatatacatcttttctcattttgttatttaatattttgttagctttttgacatatggatatttcacattt

SEQ ID NO: 895020 - DNA, 678 bp, Homo sapiens
ggctgaaaggggccaatgtagagctcaggctgtggcttccgtggatgcaagccccaagccttggcagtgtggtgttgagcctgcaggtgcacagaagtcaagaactgaggtttggacacctctgcctagatttcacaggatgtakggaaatgcctggatgtccaggcagaattttgctgcaggggcaggaccctcatggaaaacctctactagggcagtgcagaagggaaatgtggggttgaagcccccacacagagtccctactggggcaccaccttgtgcagctgtgagaagagggccaccatcttccagaccccagaatggtagatccactgacaggttgcactgtgcacctggaaaaactacagacattcaacaccagcatgaaagcagctgggagggaggctgtaccctgcagagccacaggggcagagctgtccaagaccatgggaacccaccttttgcatcagcatgacccagatgtgagacgtggagtcaaaggagatcattttggagctttaagatttgactgccctgctggatttcagatttgcatggggcctgtagcccctttgtttttgccaatttctcccatttggaatggctgtatttacccaatggctgtacccccattgcatctaggaagtgactaagttgcttttgattttacaggctcat

SEQ ID NO: 895021 - DNA, 678 bp, Homo sapiens
ggctgaaaggggccaatgtagagctcaggctgtggcttccgtggatgcaagccccaagccttggcagtgtggtgttgagcctgcaggtgcacagaagtcaagaactgaggtttggacacctctgcctagatttcacaggatgtatggaaatgcctggatgtccaggcagaattttgctgcaggggcaggaccctcatggaaaacctctactagggyagtgcagaagggaaatgtggggttgaagcccccacacagagtccctactggggcaccaccttgtgcagctgtgagaagagggccaccatcttccagaccccagaatggtagatccactgacaggttgcactgtgcacctggaaaaactacagacattcaacaccagcatgaaagcagctgggagggaggctgtaccctgcagagccacaggggcagagctgtccaagaccatgggaacccaccttttgcatcagcatgacccagatgtgagacgtggagtcaaaggagatcattttggagctttaagatttgactgccctgctggatttcagatttgcatggggcctgtagcccctttgtttttgccaatttctcccatttggaatggctgtatttacccaatggctgtacccccattgcatctaggaagtgactaagttgcttttgattttacaggctcat

SEQ ID NO: 895022 - DNA, 617 bp, Homo sapiens
catgttaatggttctgctctcccaataaatctagttacatatagatccttagccaatttactttttcattatagagaggagaaatcataacatagcatgaactagaactaatttaacattgtacacagtttaaaacttcagtggagttgaaattaagatcattgaaaccccacgagaaaatttacttcctgttccaagatacttgggcttcccagggctaaatggacagtatttattcagcatcctaggtgagtctcactcttaggtctracattgggtcacatctatggggatttcagcatggcttcacacaatctgtccctgccttcacctctgaggcaccaactccaagaaaaaactgtggatataccggtcaaattgggtcttcaaatatgatttactggggtaccagtatgtgtgtatgtatgtgtgtttgtcttgatatgggtctctcttcagggaaaaagacagagacacgcagagatacagagataaagagagagagagtgggagaaagagagagaaagaaataaagcactcacttccctcaaaaactcatacttgaaagctaaattaaaaattaaatatatttaaacttaacaaatggattcaaaagt

SEQ ID NO: 895023 - DNA, 635 bp, Homo sapiens
tgaatcaggctgtcattgtttttatcttgtcatgtggttagacatattagttgttgttttaccctggttctcttgcgattgtatttttttggttattttcttcagtccacagggtttgttttttggaggattgccttttaaaacagctgctcattgtgtgagaattggctcagcttaaatgagataatgtagtttctaaattcacctaactgggtgtgcataagtcagtatgttttattatatggaaatcaaaccaatgacaggaagacttgatatggaccccttattgccaatggacagccagcctccctcgaaacacctcsctcactgcgggtgacacatgaaggtctgatatttacttacagcacaaggtgcattagtcatgggaggttaggctatgctgtggtaataagtaacccccaaataccagtgtctaaacacaattcaagttcatttatcactctaagagagacagcatggaccagacagcttctctgcatgatctctttgcttctagggtcagtgcaatgtgaaaggaaggctgtgatcaggccaggaggccaatcccattggccagatcctggccacatgaattgatcatagctgcaaaggggtctgggaaatataaaggagcc

SEQ ID NO: 895024 - DNA, 667 bp, Homo sapiens
caagggtggaagatcccacttattcaatgccaagctcacccataggtacttccattttctcttagctttccagggtcacagcctttgttatcatctctgtacatggcctcttaaaatgtgtctatggcttaaaatgtgcctcggccttccgggtcctgagcactgacaccaygcctcctcatggggtccatatccccaggcttggacggattctctttctcagacattccaacacaaaagtcccctttagctccatttccctgtgataagctttggctgcttccaaggctcagcacaactccttttgagaaggcagggagtcgcctctgcacctgagtgttgaaggtgactttcccgagtgtcttcaaaagggcatttttctacttaagcttctggaagtgtgcttcctagagctgggttgcaatatctctgttctcaagatgtatgatgaggtcagtagaacgatctatgatcccatgagccaaacatgtttctgcctttactgcattagggacatgctggtactgtattagtctgttctcatgctgcaaataaagacatacctaaaactgggtaatttgtaaaggaaagaggtttaatgggctcgcagttccacatggctgggaaggactcacaatcatggtggaagatgaaggaagagcaaagg

SEQ ID NO: 895025 - DNA, 572 bp, Homo sapiens
tgattgctgtcttggtactaagccagtacaaagacaggaatgaagatttacaaagttttcaaagattataatgggcccttgggtgtgatattttaaataggagctgactttaagtcaaaagctttcaaatcaaccagtaagtacttaacagaagtcctttcttcaygacaaggatgaaacacagagtggattacgcaaggtgaatctggtcagcccgggcctgaggtcacgtctgactcccagcaatggtgttttgcttggagacttctactgccctcttggcccctctgtttgacctggcatggtccatctgtagtcactctcataacatgtcatacattcctacacattctcattttctgtgctccttcaactttttttttttttttgagacagagtcttgctctgtcgcccaggctggaatgcagtggtatgatctcggctcactgcaatctccgcctcccgggttcaagcaattctcctgactcagcttcctgagtagctgggactacaggtgcatgccaccaagccgggctaattcttgtatttttagtagagatggggtttcacca

SEQ ID NO: 895026 - DNA, 556 bp, Homo sapiens
gccgggcgcagtggctcacacctgtaatcctagcactttgggaggccaaggcgggcggatcacgaggtcagaagatcgagaccatcttggctaacacggtgaaacaccatctctactaaaaatacaaaaaaaaaaataaaaaatagccaggcgttgtggcaggcgcctgtagtcccagctactcaggaggctaaggcaggagaatgacatgaacccaggaggcggagcttgcagtgagccaagattgcgccactgcagtccagcctgggctacagagtgagactccctctcaaaaaaaaaaaaaaaaaaaaaaaaaaaaaaaamaacttgtactatgacttcaacttccaagtggaatgtagatgttgtgattgcccaatgttcccaacacaattactggacaaaaagccagacaaatgaccaaaatcttgtttcaagtcgccatacagttgtagaaacaataattagatgaactggaatttcacaggaggagacttctagaacagtaggaattttgctaatgtttagtaaggcctcatgatcagatttggcccac

SEQ ID NO: 895027 - DNA, 646 bp, Homo sapiens
gtgagccttccctcaacctttgccccttatacctggattcagcacccagtataattcatacgtggactgacctggggctgctcaccctgtgttcatccatccagtgtaaggctctcatgctgggaggtcctttctaataggtgggatgcccctttggaaagtgcctctcaaggctcctcagtggacataagtggaaccccctttccttggctggaggccccaagagaaattgtggtttgtgtccccagtagacattmttttccaatccccccatgggacaaagcccttccattctctcagactcaccgatgggctgcattctaaaacattgggataaacttgactcccagactctcaaaaggaaacatcgaattttcttgtgtaatacagcatggccactttataaacttccagatcaggaatcctactggcttccaaatgggacctctgcccccagtagtattttataggttgacctctttggtcataattcttctaaacggcttgagattccttatatctgaggttgtgtaactctttctaagtttgctctcctctcccttacatggttccttcctttactaggacagctgcatttatacttctacttctcctcttcagtcctttgtctctttaatttactggt

SEQ ID NO: 895028 - DNA, 593 bp, Homo sapiens
agttggagtgtctacaagtcaagcaatgccagcaatcaccagaagctaggcgggaggcacccaacagactctccctcacaccccccagaaggaaccaaccctgcaaatgctttcatatagaaggcctctccagaactgtgaaggactttctcctgtttcaagccacccagttagtggtgatttgttaaggcagccctaggaaactggtacacccagtcagtgcaataactttcaaatagttctgcttgcctccaacactcacactccatstgttcccatccttgattactgtggcattctgcacatggcactcaaagctgggtcaatgtgagccaagagaactcaggaaaggagagacataagagagaagaagaccctggagagagaggttttgagactggaaagtaatcatataagccattggatacttgcagaaatcttggggtggtcgctgaacttcccccagagcatgggatgggggaattcaaaggacagagaggcttctgttgccttctgcatgatgtataagaaatctcattgaatcctctctgccactgcatgggctggaactactacctgcacatacagttagg

SEQ ID NO: 895029 - DNA, 644 bp, Homo sapiens
tcatgacaacaacccctagggacgctctggctgccaaggaaaagtggggagtgggcatgcctgagagagactggcaggatagagacagaaagcaagaggaagccaactccttctgccaagatgcagagacagccacaggtagctcaggcggcccccacttactgatgcagtaatgcatggcagacacacaactgatgcagagaaggggacagaagtgtgatttcagcttgccagcagaaccctgaggttggaggtggggggtcctagggaagggatcctgcagccaggagaagacatcagggccaagtccactgcctgttcaactcttgcaactccaacaccatgcacaagaccagatatctgattacaatttaaatatcaatgaaaccatgtggcaagacttcctgcrctgtatttgatgcattcccaggacctccaaggttggagggcagtgatgtgtcagcagacaatgaccatgaagaaaattacctttggaaatttatgtaagaacagcctgcaaagtattccatgcagaccatgattcagagctttcgggctatttgcctgcctctggacatctccaatttgtcatcatctgagaggccaggacagagtctactaggctgtgtcacctctgatgatgg

SEQ ID NO: 895030 - DNA, 617 bp, Homo sapiens
ccctggagtggctctctatgtcatatcatccaggtcatggttacaatgtcacctcttccaaggccttccctgacaccatatctagcatagttcccatcttcactccctcatcacttcccaatgttttccctgcttaatttattgtagctttcrtcttcattgtgtatgtgggtagacagtataatctggggttagactctcagagtttaaatctcagctccactacttgagctgcatgacattgggaaagtccttaacctccttgtgcctcattttcctcatctgtacaatagggataatgttatacatagtttatgaaactacagtgagaataaaaggagagattaatgatatgaaaaccacttagaaggctgacaggcaggaggtgaggactacatcaatctttgtttctttatttactcattattgcccgactccctaccctagactgtcaactctggtgtattagtcaactcagcctactgtaacaaagtaccacaaactggagggcttaaacaacaggcatttattttctcaaagttctggaggctggaagtccaagaccaaggtttcagtggggctggttccttggaggcctctgtccttggcttggggat

SEQ ID NO: 895031 - DNA, 632 bp, Homo sapiens
aaaatattattttgtcaggattaacagtttgtcctatttcccttagttagtttcagaaatttccagaaatacttagatcattcagttgttaaagcatgcttaacaaagcctggcctctatgacagaagtcacatagacgcgcattttagaatttccccactcacctctcaaccctgcagtcatacatttataatgtctcatctcctttggtaaactgtcagatctgcagcctcaaaatctaattgttgacatatcaccaaatgaaaagtaacaaaaacaggtaaacatcaccaaaatgaagaacattgtcttagcatttaaactttaaaatgtatttctactactctggactcattttttccttccatcatctttaaaattgttataaatgagtatctgctcyactgtgtatggtcctgcaagaactaaaacttcccagagtattaaactgtggttaaaattcatgcagtatgtaactcgatgctgagaagaagctacatatgcatatgtatgctcaaaatataagaatttaagaaaaatgtacgataatgaaaaatgcatggattgaaagtgaaaagagctgttttgagcttcaattcatcgctctgtagctgtgtgactttgcacaaatc

SEQ ID NO: 895032 - DNA, 632 bp, Homo sapiens
aaaatattattttgtcaggattaacagtttgtcctatttcccttagttagtttcagaaatttccagaaatacttagatcattcagttgttaaagcatgcttaacaaagcctggcctctatgacagaagtcacatagacgcgcattttagaatttccccactcacctctcaaccctgcagtcatacatttataatgtctcatctcctttggtaaactgtcagatctgcagcctcaaaatctaattgttgacatatcaccaaatgaaaagtaacaaaaacaggtaaacatcaccaaaatgaagaacattgtcttagcatttaaactttaaaatgtatttctactactctggactcattttttccttccatcatctttaaaattgttataaatgagtatctgctccactgtgtatggtcctgcaagaactaaaacttcccagagtattaaactgtggtwaaaattcatgcagtatgtaactcgatgctgagaagaagctacatatgcatatgtatgctcaaaatataagaatttaagaaaaatgtacgataatgaaaaatgcatggattgaaagtgaaaagagctgttttgagcttcaattcatcgctctgtagctgtgtgactttgcacaaatc

SEQ ID NO: 895033 - DNA, 605 bp, Homo sapiens
tgttttcacccgtcctaagggctgctttctgcatctttcttagtttgcctctattgagtctgccagaaactcttactctttttaagattttgttcacgtttttattttatttttttattttttgagacgaagtatccctcttgttgcccaggctggagtgcagtggcgcaatcccagctcacygcaacctccgcctcttgggttcaagcaattctccagccacagcctcctaagtagctggtatcagaggctcccaccaccacacccagttaatttttgtatttttagtagagacggggtttcgccatgttggtgaggctggtctcgaacacctgacctcaggtgatatgcccacctcagcctcccaaagtgctgggattacaggtgtgagccaccatgcccagcccacacatatttttaattaacaaataataactatatatagttagggattacaatgtgatattttaatacacattttagaataattatatcaagctaatgatatatccatctcctcacgtattttcttttttgtagtgagagcatttaaaacccactctattagcagttgtactttctcttgacagtgtacctctctgtaa

SEQ ID NO: 895034 - DNA, 621 bp, Homo sapiens
accctggggtgatcctgatgttggaattattacataaaggttgtaaaatagctgttaaaactatgctcagtgatttaaagaaaatatgcaataaatgaaaacttaagaaatctcactaaatacatagaaacatgaaaagaaccaaattaaaattttagaactggaaaataaaatacttgaaataaaacttttactggatgaactgaacagcataatggaggtgaaagaggaaaggataggtaagttttaatataaatcaatagaattatccaaactaaagacaagaaagaaaaaaagactaaaaaaagtttgtcaaacaccaggaatctgcggtataatgttaaatgtactggcaaaaaaatcccagaaagagaatggggcagaaaaaaatatttgcaaaataatgacagaaaataaccctcatttggtgaargagaaagatgcacagattccagaaactcagaggaccccaaacaggagatgttgtattatatcaatatatatagattatatatgcagaagaccattttaaaaataatcaaatcaaactgctacaaaccaacaataaagagaaacctttgaagagagcaagaaaaaaattctacattacatgcaggagaa

SEQ ID NO: 895035 - DNA, 651 bp, Homo sapiens
tactggtggccatttcaatagctgttagctgcaaattcaacaagtataggatacctgtctccttcttgggactttcatggcataccccttttcccaataatgctgtgtggtaaaaaataatagtaataataatgctgtgaggttcagagagactgaataactctcaaaagtcatgtaaaaaagatatatgacagagttactatttgaacaaaggttttcagactcccaggtattccctgcaaagagaaggtatgaggaacaacccctttgtctctgtgaccccacagaagcctctgggaccccactttctgattcttcctcctattcctttttgtctttgatctgcttctatttctcctctcccttttcctcttgtcttttatctgatccwtgccaatcgtgctctccaaaatgaagaacctatgatccctcgattgttgacaacctgagaacatttcttgccctacccaggacagaaggaaatgacataaaaacattttattcattgggtgaaatgggattatttttgagctgctctgttcaacatcagtgaggctgctcaataaagagaagaggaaacctggcataaaagaagaaactgggcttcagctttgcatgcatatacatgtttattgcagcactattcacaat

SEQ ID NO: 895036 - DNA, 611 bp, Homo sapiens
catgacaaatggcatgttttttaaataacatctataaaacatcctgctatctgacccgaggctggagttattcatggcatgcaatgaatctatcccagagagaggcaaggcccagatagcattgtctctcgctgcacaggcccagctgggcaaagcgccaatgtggcgggagggaaggaggtatttctcaactcaggcaaggacttctggggaacaaccccacctccgcgtagatcctcccagatcattcgctgggtgggtcacctttacccagctgctgggctttctcatttttcrtctccttggatcgtgcaacagagcagtggttctcagactaccaggcatcggaatcccgcagagggctccttcaaacacagcgtgctgggctgccacccaggtctcttccgattctagggcagggcctaagaagccgcatctcaaacaagctcccaggtggaggtgatgctgctggtcccggagcccacgctgagaatcaccacaccgggggaaccctcactcaacagaatcaaacatggcaatggctccaggtggcctgcagactgggctgaggggggactcacagcatggcacataaattgactgagttccac

SEQ ID NO: 895037 - DNA, 597 bp, Homo sapiens
taccctggaggcagtgtaacagaaggtcagaaattaagagggtcacctgatgaggctactgcaatagtccaaggggatgatggtttgggcctggactaaactatggcaagtagggatggggagtagataccaagaggagagtagcaggtagcagggccagatgacggcctaaatcgaggggtacaagagagcttgcaygaaataaacaatcagccctggcaggactgactgggactgcccttgcaggacgaagagaggaagggttaaaactacatgtcttgaggctatttgccaatgtccttaggaagcagggagtatggctaatggagcttttagtcctaattagccaaaactgggatcctgccaattttagaggctttcaaggggcatgcttcaaggaagagtccccctgagcttaagtaatgagtgatggcctgccatccagcccaggggcaatgtctctaaccctgggtcatgccagaattatactcccttgactaaacacatcagtttatccaggacccaacatatttcattttatttaatattcccccaaaccccaagtagatgtacttactactcatttcacagataagg

SEQ ID NO: 895038 - DNA, 619 bp, Homo sapiens
gcaattctgtatcttataagtggagcatttaggccatttacatttaacgttagtattgagatgtgtggtaccattccattcatcaggttgtttgtgcatgcataacttggttttctgtgtatgtgttttttttaattgtatttttgtttcataggtcctttgagatttacgctttaagaaagttctgttttgatgtgtttccaagatttgtttcaagatttagagctcctttgaacagttcttgtagtgctagcttgatagtggcaaattctctcagcatttgttkgtctgaaaaagactgtatctttccttcatttatgaagcttagtttcactagatacaaaattcctggctgataattgttttgtttgaggaggctgaagatagggccccaatcccttctagcttgtagggtttctgctgagaaatctgctgttaatgtgatcgttaatacagagtgacaacttgattgggttgaaggatgcaaagttttgatcctgggtgtgtctgtgagggtgttgccaaaggagattaacatttgagttagtgggctgggaaaggtagacccacccttaatctggatgagtaccatctaatcagctgccagtgcagctagaat

SEQ ID NO: 895039 - DNA, 669 bp, Homo sapiens
ggctcaagagatcctttgctttggcttcccgagaagctgaaactacaggcagctgccagcatgcctggtctgcaatttacatcttttgtacactacagcacgttactgttcaaagcacatacaagtattaagctgcttaatccttgcaacactaccaagaagtaggagttattatcatgactgactctcttctacagatgrggaaacgaggcacagggaagtgaaaggcgtggtgggacagggacctgcggtctggatctgcttcatatagagaaactgggttcttaagaaggaaaatgggccttaatttctaaatcgtaacaagttcagccctcactcctcttttttttttttttttcactatcctggaaaaaaaaaagaagtggatagaaaggtactaataacaatgagtttaatttctcaaattttattattctttaaaaaggatacattggtacaggagtaaagacaaaaaaaatcaaaaaagaatcgagtattcaaagacccttgatggtgtaacatcaattattttaattttgtttttaaaatttttattttctaaactcctataataattgtttttcaaatggggaaaaagaacgaagtttttattactgcctttctttctacaatatattattcaatggagatactgaacctgtatttgct

SEQ ID NO: 895040 - DNA, 669 bp, Homo sapiens
ggctcaagagatcctttgctttggcttcccgagaagctgaaactacaggcagctgccagcatgcctggtctgcaatttacatcttttgtacactacagcacgttactgttcaaagcacatacaagtattaagctgcttaatccttgcaacactaccaagaagtaggagttattatcatgactgactctcttctacagatgaggaaacgaggcacagggaagtgaaaggcgtggtgggacagggacctgcggtctggatctgcttcatatagagaaactgggttcttaagaaggaaaatgggccttaatttctaaatcgtaacaagttcagccctcactcctcttttttttttttttttcactatcctggaaaaaaaaaagaagtggatagaaaggtactaataacaatgagtttaatttctcaaattttattattctttaaaaaggatacattggtacaggagtaaagacaaaaaaaatcaaaaaagartcgagtattcaaagacccttgatggtgtaacatcaattattttaattttgtttttaaaatttttattttctaaactcctataataattgtttttcaaatggggaaaaagaacgaagtttttattactgcctttctttctacaatatattattcaatggagatactgaacctgtatttgct

SEQ ID NO: 895041 - DNA, 595 bp, Homo sapiens
tgagtcatctccaccacagggccctctcttttgtgatccagcgatacttgttcacagtcaaagcccaggaagagtggaaagattaacctttgtgagccaaaccgtgtgacacttgattacttgacagaactaatccttctgtcctgatgacagaamttcaactacacaggtacatgcaagctaatatctgttgtaatgcctcccagtttctctggagaattccttagtttcctggacatctctgaaatgcaaagttttggcaacgagtctctgaattaacctctgaaaatctcacccagccaagatggccttcttgagaagactgaagaacatggttggtttcaggctgagctggaagtggtttacctcccaggagaggttccccacagtggtgtttaaggcatggggtggaccaacaccaggaagactcagacatcacaccacccaccttcaactcagtcacatccacctacattttctgaaaacaaaaggcagtctccccaaaaagcactgagactcttgtgtaggtaatctgagcagacaccaacttcccagggcttccttttatccaggagagcttggctgttctttttaa

SEQ ID NO: 895042 - DNA, 492 bp, Homo sapiens
ctcccgctgctcacaacccgccaatgctgggcttcccatcacacagacccacggcccttagggaacctggcagcaccccttcatcacgtggcccctctttctgtgacctcatctccactcctcccctctctccatctggccgccctgacctccctgcygctcctcaagctcagaaggcaactggcaaggcaactggctgttccatgtgtctggaatgttcttccccagatagctcccggctcccccttcgcctcccacaggccctcactccagtgtcagtctttccatgactgtcactctataaaatcctaacccccaacactctccatttgctgcctctgcctcatttttctctccttagcatttatttccaccacagcaggcctttgctcatttgtcttattgtctgtctgtctcctgcctgaggatggggacattcatctgtttggctccccgctgcatcctcggcacccaggacaggggtgggcacgg

SEQ ID NO: 895043 - DNA, 578 bp, Homo sapiens
cagactggtgctcgccgctcactgtgaaggcaagcaggcttctgcctcagttttttccccctttctcctctgatccattccaatcaacaccactgacagtggacagactgctgtccgggtaagagtgagggggacagagggcctgaagttgctccattcgtcctcatcacgatgggtaaagaagggacttcatgtccatgtgcagttagcttccaaaagacaaggaaatctcccacctagaaggggacccccccaayaccaaccacaggctgggccccccctcttcagccggcccctgcccaggtcctgctgaccaagcctcctcaggacacaaggtcagttcaggacttcagtggcctcatcccttgcatcccaccttctgagttaaagtctttcagaaatacagcaccatgggcttctagagctgcatggaaccctggagatcatcccactccactcgttgaacagtgggggaagccaaggttcagcaaacgggattcttccctcaggcttcatatgcaatggaagggcaccagctaaaagctaagcgctttgactcagagccaaagaccagggac

SEQ ID NO: 895044 - DNA, 640 bp, Homo sapiens
tcactacaacctctgcctcccagttcaagcgattctcctgcctcaaactcctgagtagctgggcctacaggcgcctgctaccatttccagctaatttttgtatttttagtagagacagggtttcactatgttggccaggctggtctcraactcctgacctcaggtgatccagtcaccttggtctcccaaagtgctgggattacaggcgtgagccacgtttggccaacactcacttttcccaaaatgtcatgataataatattcagtgtggaaggactgaattctgagtcacctgcaaaccatgatacagtctgtagcagtggtactgagtgtaatccatagaccagtgccattttgcaaaatgttgactgaccatgatgagagaagtacggaaagtaagaagggcttgtaaaattttagagcaagttgacatcactgtgacatcagtatgagctcagtgctccagttcctctaaataaggtgccgaccacttcagacactgcagcattactcacatttgggcactcattggtagggccacattacaacatgtgaccttttaaggtcagtttgtcaaggataaatcaaattatatgaaaatctgagaaaagggaagcacttattttcataacttattttca

SEQ ID NO: 895045 - DNA, 694 bp, Homo sapiens
gaggaggaaggacaagggcactcctctacctggaagttcaaccttcccttgagggatactttctggaagtggcacacagtccttccattctattggtcagaacttggtcacatagttgcacatggcttcaagggaagctgggcaatgtwgactttgttctgggcacccatcttttcagctaacattgaggaagaagagacaaacaagtactgaaaacaacaaccaatcctgcataagttgaaaatcaccttgagtgcaaatgttttttagcacaggactgcacacctttatgttttcctaggatcacagtcaaaaagaagaagctttaagaaatggttctgaggactttcttctttgttaagctcactttgcaacataagaggaattcagacctcatagggatgtgagctacatagttattcaccatataccctcaggaagaagtagagctaaactgagaagcactacaaagaaaaaataaatgaagaagaacaaaaatgaagataaagggtcactttcttaatgcctcatcctatgcattttgtagaatttgaaacccctggaatggaaagcataaagctctgacaatctgggctgcattcagccttggcagaaaccaggatgtgaccactggctcattcctaatgtttcaggtgggtaacaaatatttgctttttccggggagttgaccaca

SEQ ID NO: 895046 - DNA, 621 bp, Homo sapiens
aaagtaggtacagaaatagagcgaattactattaacaagtttagctgcaagaacaatttttttctgacgttgggcaccgaggtgaccttcttgtaagtggttcaaacttggatttattgtcattgtgttctcatcattctactataagtggatcaggcaccaccgacacaagcacacattcatttatgcattcagcacacacgtatggtgcacctagtgtatgcatcatgccaggaactgaggaagagaagatgatgaggacttctgtcctccagaaactcatgatctgctgggggagacgagtatgcaaatgtatcctttaagagmactgtcagaagtgcaatgagagagagaaactgtccgttcacaagactcactccttcatacctggatgcaatacagatggaggtaagatttaggactttctgcagagccactgcattttaagtagactcaaactgcatctttctaggaagcgaggcagtatttatctgtccaagcaaaaattgaatgaagcacatgacttccatggatgcaaacattataaacaaggtctctgtgtgaatttgcaggattgaatctcccagattacagttgaaccctaccacctagaaatactat

SEQ ID NO: 895047 - DNA, 613 bp, Homo sapiens
ccaacacttcttccactctctcagttaccgagccaagacacagagttgcttgtgagtcatttctctacctcatcccccacccaaccttcctgcgagatcctgctcacgttacctcctaaatgctgttacgtgacttcaaccacgtcagctttttatgggggaggagaggcacctgcatatctgtgggagcaccaacctctagacatctcctgccaagttactgcaatgtgcagaaaagaggaagaaagcaagcccaagtcgcaaagtctttgccagtccttctaccaaccacaccttcggtggagatgtgggtctgtggaaatgcagagacggactgaaagccaaatgggccaatgagagctctgaacaaaacattaagcttgtttttctttaaggcaatacgattaacagtggtccattaagaatccgtttaaaaawaataataataatactttttctgactattgttggggaagaataactcctttatggggagtatgaactcaaagacatgatattgtaaaggaggccttgaagaagagagggactaagaaatgtgatggcgtggtctgttacatgtgcaggtgctgtgtgtgagggaagcactgaggac

SEQ ID NO: 895048 - DNA, 613 bp, Homo sapiens
ccaacacttcttccactctctcagttaccgagccaagacacagagttgcttgtgagtcatttctctacctcatcccccacccaaccttcctgcgagatcctgctcacgttacctcctaaatgctgttacgtgacttcaaccacgtcagctttttatgggggaggagaggcacctgcatatctgtgggagcaccaacctctagacatctcctgccaagttactgcaatgtgcagaaaagaggaagaaagcaagcccaagtcgcaaagtctttgccagtccttctaccaaccacaccttcggtggagatgtgggtctgtggaaatgcagagacggactgaaagccaaatgggccaatgagagctctgaacaaaacattaagcttgtttttctttaaggcaatacgattaacagtggtccattaagaatccgtttaaaaaaaataataataatacyttttctgactattgttggggaagaataactcctttatggggagtatgaactcaaagacatgatattgtaaaggaggccttgaagaagagagggactaagaaatgtgatggcgtggtctgttacatgtgcaggtgctgtgtgtgagggaagcactgaggac

SEQ ID NO: 895049 - DNA, 636 bp, Homo sapiens
ctatctcgtaaagatacccgcagtgccatattcattgcagcattactcacaatagccaagatatgaaaggaaccaaagtgtccatcaatggatgaatacataaaataaattgtggtggatatatacaacggaatatcatttagccttttttttttttgagatggaatctcagtctgttgcccaggctggagtgcagtggcatgatctcgactgactgcaacctctgcctcccaggttcaagtgattctcctgtcttagcctcccacatagctaggattacaggcacccacgaccacaccccactaattattaaatttttagtagagacgggstttcaccatgttggccaggctggtctcgaactcctggcctcaagtgatccacctaccgtggcctcacaaagtgttgggattacaagcgtagccaccatgcccggcccatttagctttcaaaaagagattctgccaattgccacattatggatgaatctggaggacgttatgctaagtgaaataagccacacacagaaagacaaatactgcatgatctcacttatatgtaaaatctataacaaacaaacaaacaaagactcaatggggaaatggggagatgtaggtcaaagaatataaagtagca

SEQ ID NO: 895050 - DNA, 597 bp, Homo sapiens
caatatttgtgagcagataaaaaatcagcacagaaaaaggtgagaaatacacaatgtctttcatcaaggtgcaaggaaatgtaaaataacattaaaagtaccaactacataatttgaatataaagagaacaatagcaagaaaggagaggggaagtgatggcgatatggagacacagtctcttttgcatgcacagggcagaaccggtgcctcaggctggagggtgtctgtgagtaccccacaatgaargcaaaagagcacccagcattgaagccacagaccttgctccatgaatcctagctgatgggctggcacagagagatcaggagcagaacaaggaaatccataggaggatcctcccaaagtacttttttttctggtccaaaaatccttaaatctgtcagaagcaggaggttggagtgggagaattgcagagcctggaacacacctgcctgctgatgacccattctgagggggttctttccacttggcagcaatggacttggtaaaaaaaataatagatccttctccatggatcccatttccctttttttttttttttttttttttgagatggagccccaggcagaattaaagac

SEQ ID NO: 895051 - DNA, 671 bp, Homo sapiens
cgagggtaccataagattataatggagctgaaaaatctctatggcctagtgacatacagctgtagtaacactgtagcacaatgcatttctcacatgtttttggtggtgctggtgtacaaacctactgtgttgccagttgtataaagtatagcacatacaattctgtacagtacataatagttgataatgataatagttgactatgttattggtttacatatttactataccatacttttcatcattattttagagtgtactttttctatttccaaaaaaaaaaaaagttaattgtaaaacagcctcaggcaggtccttcaagaaggattccamaataaggcactgttatcgtaggagatgacagctccacacagattattgtccctgcagaccttccagtggcacagggacaagatgtagagatgaaaaacagtgatattgatgatcctgaccctgtgtagacctacgctaatgtatgtgtttgtgtcttagtttttaataaaaagtttagaaagttaaaaaaaaaatagaacaaagcttattgagtaaggatataaagaatgaaaatatttctgtacaactgaaccacatatttgtgtttcaagctaagtgagtacaaaagagtcaaaaagtttaaaaaattaataagtaaaaaaagttatagtaatcta

SEQ ID NO: 895052 - DNA, 622 bp, Homo sapiens
taattttaaaagagttttatggtttaaaaagttaagaagagctactaagccatgaaaagacgaggaggaagcttaaatgcacattactataccagataagaaaatctgaaaaggctacatagtgtatgattccaaccatatgacagtctggaaatggcaaaactatggagatgtaaaaagatcagtggttgtcagggcctaggaggtcgggagggatgaacagacacagctcagtgaatttgaggggcagtgaaactaatctgtatgatattataatggtggatccgtgtcatcacctgtttgtccaaacccacagaacatataacaccaagggtatacggtgtttatattaaagtataaccctaatgagaactctggactttgggtgataatgatgtgttgatgtaggttcagcccttgttacacgtcagccacccatgtgggaaaatgttgatagtggtrgaagctatgtatgtataggggcaggaattatatgagaacacttgtggtatatgctcaagtctgttgtgaacctaaaactgctctaaaaaataaagtctgtaggtatctatgaaagcgcagacacatggtccgtgagagcacgtcctctctgctataaatt

SEQ ID NO: 895053 - DNA, 652 bp, Homo sapiens
ggaaaaataaaaagaattatcaattgatgtgatcaaagaaaaatgtttatctcatggggtgttggaaaaggaacatcataaaaattaataggtagaataatcatcaaaaacaatctgcacaacaaatattacatagctgaggggaactatcattaaaatataatgtatacaaattgctgagaaactcactacaccttctaaatcatgtcaaaagagttgtttgcatataagctgtctgcacttcttctctctctctytttttttttgttcatattcactgcaaggtggcttttgtccacccatgcaaatcactcatatgaaggtcacaatgatgtccaggtggccaaagcctgtggctaatcctcagtcctcatctcaccgagacagcagtttcttagcccttctcctacctccactggcttctcttctcagctcctctgtagttccccctcctctttccaacctgtatgcattggaggggcccaaagctcaaccctaatgctcttctgcatcttggtccctaggtgatctcacctagtcacccagcctcagatagccttaggcttaggaatcacaaatatatctctcacatgacctctagactcatatcaacctctcaacatcacaatttggatatccaacaggcatctcc

SEQ ID NO: 895054 - DNA, 622 bp, Homo sapiens
ttaaatagattttttaaaggatgctctaaaatagcacaaatcatgaaggtgcagttgataaatctgactcaattacaattaaggatatctattcatcaagacatgatagaggagtaaaaaaaaaagtctagtcatgaactaggaaaagatatttgaaacccatgtaactgacaaaggattgctataaaggataggtaaagaactccttcaaaccagtgagaaaaagacaaataacatgattttttaaatatacaaataggattgccactgaaaagaaaagctaggtagtcaataaggatatggaaagaagctcaacctcacaaaaagtcaaggaattacaaataaaccaatgttaaaatatcactttacttaacatcagattgcactgattaccaaatgtcgacaagttgtggagaaatagaaactcttatgcmaatctggcaaaaaggtaattgacacaccctctttggcaagcattttgacaacagccagtaaattgaagaagtccgtattgttctgatagaaagaaactggaaacattatacctagttgcctatcaattggggattgaatcctgtggaatattatacacatgttaaaatgaatgaagcaaatatatttt

SEQ ID NO: 895055 - DNA, 589 bp, Homo sapiens
cccatcatctgaagggtggtctctgctttactcagcctagtgacttaaatgttaatctcattctaaaaaaataccttcacagtgacatctaaaataacatttgacccaatacctgggtactgtggcctagccacgttgacatgtaaaattacccatcatagacggtgatcattgtaataaaacaaacacatcatccacacttcctgagtcctgagcactttgcacacgctacttcattttgtgctcatgggaacctttctgctgaggttgtcccggacattctcaagtacatacatgaccagatgctgggtctccatggcaacaacatggtctcacttctgttcaagccgtgctttccttcccctrcaggatgtacaccttcagtctagccacagacctgaactccagaaaggatggtgaagccagcagcagatgcagcggggaatttcttccacaaacggcaaggagtcttagcagcttacaggccttgcaggtaatagaacattcccttttttcttttaagtaaactaagcaaaactacactttgtattaacttcacggtggacacagcttcgtaggtgtagctttt

SEQ ID NO: 895056 - DNA, 639 bp, Homo sapiens
taaaagcaagcctcaaaaagatcaacctcatctgcaagtaactttattacttgccagaacaaatgtcaacactatttataaaggaaaaaaaaatctatacgtttatcaatgttatattcaaaatgcctgtcacccaataaaatatggtgagatatgtgaagcaaagattgtgatccataactaggagaaaatatcagtccatcaaatcaggcccaggaatgatgggaatgatagaattagtagataaaagaattttaaatggctattataaatatgctcaagcatgtaacagaaaacatgaatgcaaacggaagagaaaaggaaggtattgaaaaamaaatgggatgtctagaaatgaaaaataatttttcaactgaaaagttcactagaggggatcaacagcagattaaaaactgcagaaaaaaagatcagtaagcttgaagacagggcaataaaacctgtcaaaacagaagtatatagaggaaaaagactggaaaaaatgaacagagcctcaggaatgttgtctaacatgcttgtaattggaattcaagaacaaaagaagggtgagagagagtagcgagaaaatgcattaggaaaaataatggcccccaaagttgtcaaatttgataaaaagtgtaa

SEQ ID NO: 895057 - DNA, 552 bp, Homo sapiens
tcagaaactcgggctgctgccttcctgactgtcacccagctggggagtgggggatggggcaagggggagttaaaatccacaaggttgtcctattgggttgtgctgctttttcttgattatgtgttcccttgactgctgcaaaccttcaagtattttccagagttcagataaaattgaactccaccccctttgttggggtgggtgggtggacggcaggtggggaygggaaggtcttggggaagtgatggcggaggaagcccaggacagtgtgggaccacgtccaaaccagagggtgggagaacacgtgaacacgtgaacatgagtgcagatggagccagtttcaaacaggattgaacaaatccgagagtagactcctagaaatacaactgcagagccaggggacgctggccggggacggtgggtttgtttatttgggttttgccagtttctgatgttccgtggagggacaggccctcacagttccccgctgcaccatttcctctgacgtcggtattcacaggcacaattagggaccatctttggagggcattt

SEQ ID NO: 895058 - DNA, 552 bp, Homo sapiens
tcagaaactcgggctgctgccttcctgactgtcacccagctggggagtgggggatggggcaagggggagttaaaatccacaaggttgtcctattgggttgtgctgctttttcttgattatgtgttcccttgactgctgcaaaccttcaagtattttccagagttcagataaaattgaactccaccccctttgttggggtgggtgggtggacggcaggtggggatgggaaggtcttggggaagygatggcggaggaagcccaggacagtgtgggaccacgtccaaaccagagggtgggagaacacgtgaacacgtgaacatgagtgcagatggagccagtttcaaacaggattgaacaaatccgagagtagactcctagaaatacaactgcagagccaggggacgctggccggggacggtgggtttgtttatttgggttttgccagtttctgatgttccgtggagggacaggccctcacagttccccgctgcaccatttcctctgacgtcggtattcacaggcacaattagggaccatctttggagggcattt

SEQ ID NO: 895059 - DNA, 613 bp, Homo sapiens
tgttttggccaatttctgccatttggaatggctgtatttacccaatacctgtacccctattttatctaggaagaaactagcttgtttttgattttacaggctcataggtggaagagacttgtcttgtctcagatgaaactttggactgtggacttttgggttaatgctgaaatgagttaagactttgggggactgttgggaaggcatgactggttttgaaatgtgaagacataagatttggaagggccagggacagaatgatatggtttggctgtgtccttacccaaatctcgacttgaatttcatctcccagcattcctacatgttgtgggaggaacccagggggagataattgaatcatgggggccggtcttttcctgtgctattctagtggtagtgaataagtctcacaagatctgatgggtttatcaggggcttctgcttttgcttcttcctcattttctcttgctgycaccatgtaagaagtgcctgtcagctcccaccaagattctgcggcctccccagccatgtggaactgtaagtccaattaaagccctttttcctctcagtcttgggtatgtctctatcagcagtgtgaaaatggactaataca

SEQ ID NO: 895060 - DNA, 655 bp, Homo sapiens
aggtagtacctttatttctagtcacagggtgagccctcatcccagcctgcttccaccactctgaaaggccaccatgtcatagcctaagttctcgtgtgttgttatgcccatggttgtgtggagtgttggcctgttccagcaccaaaaccaaaactgtaattttatcgtttcatttgatagcacaagctttctcatcactctattttttattttgctcaactcttcttgctttttctaccaagtaaaacttggattcattttgcaaactcctatctacaaaaatgcaaaaaattttcttggaaactttaattaaaattgcattctattatagattcagttaggaataactgatatttttaaatcagtttaagatagtgggatgatttcttatccaaaaacaaggtttgtctttccaatatatttctcaaaaatttttttgagtttttttcataagtcctgcacatttttattcagttgattccttgggtttatgttgtttttcttamtagtgtaaatagcatttttctgcaacattttctaactggttgttagaaaatgtttcttctaactgatagaagaaaatcaataactttttgtatgttgaggactaagctctgatttttttatcttgcctatattcttatctaaggggtct

SEQ ID NO: 895061 - DNA, 617 bp, Homo sapiens
aaaaccagtccccctgggcccctgaacaggagtcctgagaggatccagatgcagggccatggtcaggcacagtggaagggactcagcgccaaaccactcccaaccctaccctgagaataccagcagctccccagaaagcagatggcacaagtcctttccagaaaaactgaacagtctagggaacagccatccagatccagacatttgggagtccctccaaaaagcctggcttgccatttagctaccatccaccccaccccaaacacagaacttcttggctagccttttagggcctcactcagatatagacagatagccttgggtaaggcatctgaggagggcctccwacataaaagagataaactggagtaacagagaggaaaaaaaaaaaaaagaggaaccagataatacgtgaaccaaagaaaacttagaccccaaaaaccctaatttccttggaaagataagatgatgcatccaaaaaataagatgctatgaaaaagtcatgataaaaagaaagaggaaataagtaatatatatggaataaaaaattcagtaggacaattggaaaataaagtcaaggaactctttcagaacacagtaggaagagatgagattga

SEQ ID NO: 895062 - DNA, 478 bp, Homo sapiens; identical to SEQ ID NO: 894198

SEQ ID NO: 895063 - DNA, 643 bp, Homo sapiens; identical to SEQ ID NO: 892757

SEQ ID NO: 895064 - DNA, 649 bp, Homo sapiens
gtgctcctgtattggctgcgtatatatttaggacagttagctcttcttgttgaattgaaccttttaccattgtgtaatgcccttcttttttttaatctttgttggttgaagatttgttttgtcagaaactagtattgcaacccttgtttttttctgttttccatttgcttggtaaattttcctccacttctttattttgagcctcatgtgtctttgcatgtgagaggggtttcttgaatacagcacactgatgggtcttaactgtttatccagcttgccattctgtgtcttttaattgggacatttagtycatttacatttaaagttagtatggttatgtgtgaatttgatcctgtcatcataatgctagctggttattttgcagacttattaatgtagttgcttcacagtgtcactggtctgtgtacttcagtgtctttttgtacaggctggtaatagtttttcctttccatatttcatgctatcttcaggagctcctgcaaggcaggcctggtagtgatgaattcctcagcatttgcttgtctgaaaaggattttatttctccttcatttatgaatcttaatttgaccatatataaaattctgggttggaaattcttttctttaagaatgttgaatatggcctccaa

SEQ ID NO: 895065 - DNA, 659 bp, Homo sapiens
acgcccggctaatttttgtatttgtttaatagagatggggtttcaccatgttgaccaggctggtcttgatctcctaactcaggtgatccgcccacctcggcctcccaaagtgctgggattacaggtgtgagccaccgtgcctggctattttttgaccttttaatagtagccattctgactgctgggaggtggtatctcactgtggttttgatttgcatttctctgacagtcatcagtgatgttgagttgtttttcacatgctttttggccacatgtatgtcttcttttgaaaagggtctgttcatgtcctttacccactttttaatgggattgggtttgtgtgtgtgtgtagatttgtttaagttccttatagatgctggatatcaaatctttgtcagaggcgtggtttgmgaaaattttctcccattctgtttactttgttgatagtttttgtgtgtgtgtgtgtgtgctgtgtagaagctctttcgtttaattaaatagatcacatttgtcagtttttgcttttgttgcaattgcttttggtgtctttatcacgaaatatttgcccattcctatgtccttaatggtattacctaggttgtcttccagggtttttatagttttggattttacatgtaaatatttctgtatgttgattg

SEQ ID NO: 895066 - DNA, 567 bp, Homo sapiens
ccgtcaataagatccccattgctatagaaaagagaaaaaagcatgcggaatagaacgctgtttcttggagatttctcctgaaaaagtcacgttatttcttctcacctccattggcaaaaaaaaaaaaaaaaaaaaaaaaaaaaaaaaaaaaaaaaaaaaaagtcatgtggccatgggaaaatttaagtaggtgggatggaacagtcagaatgcattcataaaaaatgaactgaaaatatttggagaacarcaccaatgactatcatgaatgccaacatacatccctaacaacccagtgctgttaccctccaaactttttatgtcttgcaaagtattagaacttcatatctgaagccataccactcagagggaatgcaatacatattgacatctcctttaggatgtccatagagaattcaagaaaagaaataatttaaaagtgcttttgggtacagctatttagcactagagggtaagagtagagatagattgtaaagataataatagggttaggcataggattaggatctgggtcagagtcagggccggaagtatggttagaggtgg

SEQ ID NO: 895067 - DNA, 668 bp, Homo sapiens
gggctggaatttctttaacatatatgaaaagtcaaactgttaaaacaggtgtatagcatgaaaggtgattctttgaagagggaaattctacatgttctcataaatttcagtgtatggccttataataagagttcatttaatccttacccaaaactatcatacattttgaggcacttctataagagtgcccccaaacacaaaaggtaatgggaaaaacatggactgtcaaacaaccattcaaatcttggtcttctttattcataaaaattaattgtgaatgcatttattcagttgatccttaaaccaatcctatgagaagcaaagtctgtccatcaatctaaatgaccaaagagaaaaattgacaaactttaaggatatatgtgtataaatatggagatgtgcacttttgaaataacccttcaggaaggttataagaagttcaaggatttctgaagaaaataccttttcctttatagagcaggaccaagacccaccagtcttrtattttttcattatctgatattcttttgtcattggcacagttcattgcctactactctcatccagcatgaaaccaaatcaatgctcacaattctcaggtcaatttccagtatgttgaagtcatccttgtatagtgattttctattgtatcctaaaaaattaccata

SEQ ID NO: 895068 - DNA, 703 bp, Homo sapiens; identical to SEQ ID NO: 893611

SEQ ID NO: 895069 - DNA, 616 bp, Homo sapiens; identical to SEQ ID NO: 893392

SEQ ID NO: 895070 - DNA, 584 bp, Homo sapiens
gaaaggaatgcctgtttaaagtctcctttaactggaggatttaagacttgggattcagatgctgcttctcaggaagtggatttggaaccaagacctaggcttctaaagttggtcaatgagcagaagaaccaagggcaactgacagacagtaaacatcttttagagtaatttaaagcaattatcataaaacttctgattcatcagagatccagcccaccaacaataagatttttaaaaggaatttgaggctgttctrctgtttaacatgaaatacgagacagaaattggtgtcacggtctatgtccttgttactacaaataagcaggtacatttctctcaaaatatccaaggcttttgttgtagagccaaaattgatcaaaggttactgcaatctaaaaacaaaagaaagaaagggagagagaattctccagttgcccggttgctaagcaaccctagtctgttctggtaactgggtctgggggtctttgctttcatttgctgctgactttcactccatatataatatataccagcatgtttattctcctgtaaatgcccagcaaataaaaagcgataaagccctt

SEQ ID NO: 895071 - DNA, 656 bp, Homo sapiens
aaggatggtcattagcctcaggtgcagagccacatcccaccacttgctggctgggtaactaatacacacctcacagggttgtaatgaaatttaaggacatgttgatgtaatgaaactccaagcatacagaaggtgcttaacaaataatagcttgcatcmttatttattctcttcttgtgctgcacctctgtggctctctagtttccacatctcagttgcaggggacgctgatggtatgggggcctagaaattcgatggcagtgatttccacgctgagttccaccctgactcccaccacaggccaattcactctttactctgtctgtaagctccttgggatctgaaaagagccagtctcttctagtctagaaaaaattcttaagcaatttctataaatattttgaggacctttttgccttttaaattgccatttgtaatcaacagcccccagcagctgccctttggaaactggtgatctactttgtgtgtccatgtagcacacaaaaagcagaagccacggcaacatcataattttgaaatgtgactttctgttggatccccattgtcatggccctctgaccagtcatttgccataggcacagggaattcaactggggccattttcttcaatgcgaggtgaaatgcagcatgctgca

SEQ ID NO: 895072 - DNA, 686 bp, Homo sapiens
tgtccatgaaatcttcacaatttatgttcttctgcctcagctccagcctgtccctccgttcggggtccctgacttcccacaatgagcagtgagatccaaggctgataccagggataggtcctggatccgatatgatacaaccactaaacataatcctgtrgaaactatgaaaaaagtgaattttttgaatggtgctacattaagtgaaaaaagtaggtacacttgttttaaaggatgccaatttaaaggtgaaggtagagggtagagaagtatttgaaaatcttcaacagtaattatgtatgattagtagagatctgagtgatttcagccccctcttttacatttacatttttgatcacattggctctgcaattgattagtgttgctgttatgtattggtactttgatttttgttaatgagaagagaacaaagactttaaatgagaaattcattttaaaaaaaggttgaagaacttctagcatattcctaggggaaggaagatttgcagtgggtcaaacctaaacttgcctttttattttgcacagagatgatttagtttaagcaaaatatcatctatcatgttgaattaatgttgttaatttgcattttgctttgtatttatttagtcttccttttattttacacttgtgtatgagctagacatatgaaatgtgtacctagtttg

SEQ ID NO: 895073 - DNA, 593 bp, Homo sapiens
tcactgattcaatactgtttcattgagcctcgacattacagtgccattcactagagagagatgacataaatagccacttctctctggaagtttacatccagatacaggaactacattatcgtataaaacaaactattaagcctaaacaggaattccaaggagattatcacagatgtattttgaataggagaatcacacacacacacacacacacacacacacacacacacagagagagagagagagagagagagagagagaccctaagctttwtatatgcaacatgggacttggtgtgaagcaaagcaggtgttttcggagaaggtgagggtttgtcctcatcacaccacaccatcttcccgaggggaactgcacaattagtgaaggcttttcctgatctgtgtgttcagatttgggaatgatgacttttcattgttgttgttgttttcacgtggagaaaaatacatgttccttgcttcagagtaaacattctggaagcctttgcgattgttcagatttctttagaggccttgatgccacttaccattgctttttaggctgcagggaacataatgaaactgaagtctcttgtg

SEQ ID NO: 895074 - DNA, 603 bp, Homo sapiens
gtgataaacatctaatttcactcttcagcatgtgagtatctggtttcccaatgtcaattattgaaaaacctgtcctttccccgttgtatgtccttggcacatttgctgaaatcaactggctataaatgtgcaaatttatttctgggtctctgtgctgttccatttgtttatgtatctgtttttaatgccagtactatgctatattgcttactaatagagttgtagtatattttcaagtcggctagggtgatacctccaacttcttcttttggctcaggattactttcacaatttgtgtacattttgtaattccatatgaattttagaatttttttatttatgtgaagaatgccattggtattttaatataaattacatttaatccatatgtcactttgggtartatagacattttaataatgttaattttattttaattccttattaaacttaaatacatcagtcaagttaggcacacacaaaacaaacaaattaaatgaataaataaaacaaaaaggaaatctgctagggatttgattagaattacataggatctacagattggtttggaaaaactgacactatcaatctcccaattctttt

SEQ ID NO: 895075 - DNA, 445 bp, Homo sapiens
ttgggagagcaagggtcaaggagaagtaggcatctaggggttggctttaaagtatgtcatcaagcatgaagagctgaccctcacatgcaatctctctgacccaacaaacagaagacctgcaaagattagaagcatagaaagccaactgcaaaagaagagcttgagcagtaagtaacacaactaatccacrgcccaaacaaacagacagacaaccctgttcttgggtcttctgactccaaaatttgcccccagaatagagccatgagaacagattttctaaaattgagaattctgacagcagagactcctggattaagtgccaggtggagaaatagaagggtccccaggtcatttaaaggctgcagtaggggacaaggaacactggatagccatcatagccagggggcactagacagaacaatggcttcccaaagatattcagccc

SEQ ID NO: 895076 - DNA, 584 bp, Homo sapiens
cacggtgctaagaggaaagttcatagccctaaatccctacatcaaaaagactgaacgagcacaaactgacattctaaggtcacacctcaaggaaccagagaaacaggaacaaaccgaacccaaacccagcagaagaarggacataaccaagatcagagcagaactaaatgaaattgaaacaaaaaaaaaatacaaaagataaatgaaacaaaaagctggttctttgaagagataaataaaattgatagatcattagcaagattaaccaagaaaagcagagagaaaattacagttgacaccactgaaatacaaaagatcattcaaggctactgtgagcacctttatgcacataaactaggaaacctagaaaaggtggataaattcctagaaaaatacaaccctcctagcttaaatcaggaagaattagacatcctgaacagaccaataacaagcagtgagattgaaatggtaattgaaaaagttaccaagaaacaaaagctcaggaccagacggattcacagcagaattctaccagacattcaaagaagaattggtaccaatccttttgacactattccacaagg

SEQ ID NO: 895077 - DNA, 669 bp, Homo sapiens
gatgacaatgcctagcttctattatcaatgtatttattgcttagtttagtaacactaactgctattaaaaaacaaaaccccctatcttagggcttaacaccattaagagtttatctctagctccagccaattgcaatgcaagtatttggtggccagccttctacatctgattaaaaaaccctgggtccattttttttttttttttgagatggagtctcactctgtcacccaggctggagtgcagtggacgatcttggctcactgcagtcttcacccccgtggttcaagtgattctcctgcctcaacctcccaagtagctgggaatacaggtgcctgccaccacactcagctaattgttgtattttcagtagagacagggtttcaccaggtttcaccagggagtttgttagctgaaattctctcaaactcctgattttaggtgatccacctgcctyggcctcccaaactgctgggattacaaatgtgagcctgggcatatttttaatgggaaatataaagaggtaacatacactagacccttcaagttcttatgaaatgccaacattgaaaaatttccagttcttggaagaagttacctccagctacacatgccttctaccttagcccaaaggcaatgaagtaattggacttaggaggttaataagttag

SEQ ID NO: 895078 - DNA, 437 bp, Homo sapiens
atacaaatctcagtgcatagtgcaatgaaacacaatgtaagagacttttattggtcagtctgggactctgctggagatgcttgactgcttatacaatcccgcagaagtcagccacatttctcatttattgctttgtcagtatgtcttagcagtttggcataaataggtaaaatatttttagattagcatgaggtagaacatgcttcargtctactaataaaaccagtgccatctaaagctagcttatctatatattatatgaaatttgcaagatgaggacacaaactagagaagagatatggtgcacatattttgccaatatatggatatattggatatgtggaggaggggcctcccccacagacttcctgggccatggaacaatagcagttatgccagtggtgactctactatgaaaaaaagcacacacgtcaagt

SEQ ID NO: 895079 - DNA, 632 bp, Homo sapiens
cgttgccacattgtaaagtcagagtgaagattaaatgacataattaatgcagagtgcttgacacttagtagggcttcagtaaataggagctattctggtttgcaatctcatctccctagctgactaaattccttggggcaagtacagactcattgcatgttagtagcccacctctatcaagtatctgtcacaaaggatgtgctcagtagtatttgtggaatgactccataaatcagattcagagtttagaaagatcarttttggctttggttaatagattttggggatgtaagtttagaagttagtttacccagcaaaaaaagaatcatactttattttaagcaaaaagactagtttgttaattttatgtgtcaacttggctaagctatgatgcccagatactcggtcaaatacaagtctagatgttgctgtgaagaaattttttagatgtgattaacatttaaatcagtagatattgaataaagcagattatccttcataatgtgggtggacctcaccccattagttgaaggtgttaagagaaaaagactgaggtccctcaaggaagaagacaatctgcctctagaccaccttcagacttgagctgcaacatcaagtcttctttgcgtctc

SEQ ID NO: 895080 - DNA, 583 bp, Homo sapiens
aaggatgcccactttagccacttctattcaacatagtactggaaatcctggaaagagcaatcaaacaagagaaagaaataaaggacaataaattggtaaagaagaagtcaaaccgttgctgttcaccaatgatataattgtatatctagaaaaccctaagactcatctgaaaaattcctagatctaataatgaattcagtgaagtttcaggatacaaaatcaatgtacacaaattagtagcactgctatacaccaacaatgaccaagctgagaatcaaatcaagaacttaaccccttctacaacagctgcaaaaaaaaaaaaaaaagaatatacctaaccarggagtacaaaacactgctgaaagaaatcacagatgacacaaacaaatggaaacacatcccgtgctcatgaatgggtagaatcaatattgtgaaaatgatcatactgccaaaagcaatccataaattcaatgcaattcccatcaaaataccaccatcattcttcacaaaattagaaaacacaatcctaaaattcatatggaaccaaaaaagagcccacacagccaaagcaagactaagcaaa

SEQ ID NO: 895081 - DNA, 583 bp, Homo sapiens
aaggatgcccactttagccacttctattcaacatagtactggaaatcctggaaagagcaatcaaacaagagaaagaaataaaggacaataaattggtaaagaagaagtcaaaccgttgctgttcaccaatgatataattgtatatctagaaaaccctaagactcatctgaaaaattcctagatctaataatgaattcagtgaagtttcaggatacaaaatcaatgtacacaaattagtagcactgctatacaccaacaatgaccaagctgagaatcaaatcaagaacttaaccccttctacaacagctgcaaaaaaaaaaaaaaaagaatatacctaaccagggagtacaaaacactgctgaaagaaatcacagatgacacaaacaaatggaaacacatcmcgtgctcatgaatgggtagaatcaatattgtgaaaatgatcatactgccaaaagcaatccataaattcaatgcaattcccatcaaaataccaccatcattcttcacaaaattagaaaacacaatcctaaaattcatatggaaccaaaaaagagcccacacagccaaagcaagactaagcaaa

SEQ ID NO: 895082 - DNA, 658 bp, Homo sapiens
acacatcccgtgctcatgaatgggtagaatcaatattgtgaaaatgatcatactgccaaaagcaatccataaattcaatgcaattcccatcaaaataccaccatcattcttcacaaaattagaaaacacaatcctaaaattcatatggaaccaaaaaagagcccacacagccaaagcaagactaagcaaaaagagcaaatctggaggcatcacattatctgatttcatactacaaggctatagttatcataacagcatggtattggtataaaaataggcacatagaccaatgcagcagaatggaaaacccagaaataaagccaaatatttacagccaactgatcttcaacaaaacggacacaaacatacagtgggggaaggacacyttgttcaacaaatggtgctagaataattggcaagccagatgtagaagaatgaagctggatccttatctcatcttatacaaaaatcaactcaagacagatcaaaagcttaaatctaagacatgaaacaataaacattctggaagataacagaaaaaacccttctagacattggtttaggcaaagggttcatgaccaagaatccaaaagcaaatgcgacacacagatacatagataggacctaattaaactaaaaagcttttgcacagaaaaag

SEQ ID NO: 895083 - DNA, 635 bp, Homo sapiens
catggagtgggataagtaatattgttaaaatgtgcatactactcaaagcaacccacaaattcaattcaaaacaatacctataaaaattctggtgaagtttttcgcagaaatagaaaaaaacaattctgaaattcatatggaatcacaaaaggccatgaatatccaaagtagtcttgagaaagaagagcaaagctggaaggcatcacactacttgatttcaaaatctactacaaaggcayagtaatcaaacagtatggcactggcatgaaaatagatacacagaataacgaataagcccagaaattaactcacacatatacaacatatatgtgagttataatataatatatgtaatataatttttgacaagggtgacaagaatgcacaatggggaaaggatagtttcttcaataagtcgcattgtgaaaactggatatcgacatgtaaaagagtgaaattggatccttatcttacaccatatacaaaaatttactagaaatggattaaagacttaaacataagacctgaaactgtaaaacttctagaagaaaacatgggaaaatctgtttgacattgatcttggcaatgatttttttttggatataacaccaaaagcacaggcaacaaacacaagg

SEQ ID NO: 895084 - DNA, 635 bp, Homo sapiens
catggagtgggataagtaatattgttaaaatgtgcatactactcaaagcaacccacaaattcaattcaaaacaatacctataaaaattctggtgaagtttttcgcagaaatagaaaaaaacaattctgaaattcatatggaatcacaaaaggccatgaatatccaaagtagtcttgagaaagaagagcaaagctggaaggcatcacactacttgatttcaaaatctactacaaaggcacagtaatcaaacagtatggcactggcatgaaaatagatacacagaataacgaataagcccagaaattaactcacacrtatacaacatatatgtgagttataatataatatatgtaatataatttttgacaagggtgacaagaatgcacaatggggaaaggatagtttcttcaataagtcgcattgtgaaaactggatatcgacatgtaaaagagtgaaattggatccttatcttacaccatatacaaaaatttactagaaatggattaaagacttaaacataagacctgaaactgtaaaacttctagaagaaaacatgggaaaatctgtttgacattgatcttggcaatgatttttttttggatataacaccaaaagcacaggcaacaaacacaagg

SEQ ID NO: 895085 - DNA, 653 bp, Homo sapiens
aaaattcttttctttaagaatgttgaatattggcccccaatctcttctggcttgtagaatgttgaatattggcccccaatctcttctggcttgtagagttcctgctcagaggtctgctgtaggtctgatgggcttccctttgtaggtgacctgacttttttctctggctgcccttaacagtatttccttcatttcaaccttataatctgttgattgtgtgtcttggggtttatcttatcatggagtatctcaatggttttctctgtatttcctraatttgcatgttggcctgtcttgctaggttggggaagttctcctggataatatcccgaagtgtgttttccaacttggttccattctccctgtcactttcaggtacaccaatcaattgtaggttgttttttcacatagtcccatatttctgggaggctttgttcattccttttcactcatttctctctattcttgtctgcatgtcttatttcagtaaggtgttcttcaaactctgatatcctttcttcagcttggtcaattcggctattgatgtgtatatgcttcaaaaggtctcaagctgtgtttttcagctccatcaggtcatttatttcctctctaaactgtttattctagtcagcaagccctctaaccctttatca

SEQ ID NO: 895086 - DNA, 653 bp, Homo sapiens
aaaattcttttctttaagaatgttgaatattggcccccaatctcttctggcttgtagaatgttgaatattggcccccaatctcttctggcttgtagagttcctgctcagaggtctgctgtaggtctgatgggcttccctttgtaggtgacctgacttttttctctggctgcccttaacagtatttccttcatttcaaccttataatctgttgattgtgtgtcttggggtttatcttatcatggagtatctcaatggttttctctgtatttcctgaatttgcatgttggcctgtcttgctaggttggggaagttctcctggataatatcccgaagtgtgttttccaacttggttccattctccctrtcactttcaggtacaccaatcaattgtaggttgttttttcacatagtcccatatttctgggaggctttgttcattccttttcactcatttctctctattcttgtctgcatgtcttatttcagtaaggtgttcttcaaactctgatatcctttcttcagcttggtcaattcggctattgatgtgtatatgcttcaaaaggtctcaagctgtgtttttcagctccatcaggtcatttatttcctctctaaactgtttattctagtcagcaagccctctaaccctttatca

SEQ ID NO: 895087 - DNA, 644 bp, Homo sapiens
tagtttgagtcttttggcactttgaatatatcaacccactcccttctggcctgtaaaatttgtgctaacaagttcgctgatagacttatgggggttccattgtgtgcgatgatttcttctcttgatgctttcaaactttttctggttttcacttttgacaatttaattaaactgttaaactgtgtcttggggtattattctttargttgagcttgattggcttgggttaagctttatgaatctgaatatccatatctcttccaaaatttgggaagtttgtagctttaaataagatttctgcccctttctctctcttctcgaattcccaaaactcataatttattcacttaatggtgtctcataggtctcttatgctttcttcacttttttactcgttttttttttctttttgtttctctaattggctaatttcaaatgtcctgccttgagttcactggttctttcttctgcatgattgactatgctgctaaagatctgtattgtattttctattctgtcattttatcattctgcttcaagatttccatttggttgtttttatactttttatttctttattgaactactcattttattaatgcattgtttccctgattttgttttctatctgtgttctcttgcat

SEQ ID NO: 895088 - DNA, 635 bp, Homo sapiens
gggaggaaaagcaaagtgacttagaggcttcaaaaacaactcatccaagcccataaatttggcagcctaaacaggcattgacaaagaaggatgtactctttctgaaccttatgcatttcaaccatgtgtggccactgttatgacttgtgtcccctcaaaattcatatggtgagccctaaccctgaatgttcctgtatttggagctagcattgatgtccttataagaagaagagacaaaagtgttgtgcatgcacagagaaackaccatgtaaagacacaatgagaagacagtcatcttcaagtggagagaggcctcaggaaaaattaaacttgccaacactttgatctaggacttccagcctccagaagtataagaaaatacatttctgttgtttaagttatccagtctgtggaattttgttatgacaatccaagctgtgacgaatatacccacccacccagtaccctttgtggattactgtgcttggtgtttcccaaaggcttaaagagaatacagcatctcctctatcagcatcggggtaaatcgaggcaccaagatgcatattcttggcatgcacataccatttctgcatacctagaatgtacacttgccgccctcccttgcacacacctgc

SEQ ID NO: 895089 - DNA, 620 bp, Homo sapiens
taaacaagaactactatatatctgccctaacaaagcctaaaaacaagactttccaggacaaaactgatcaggcagtgaaataactactttctaaaacaaaattcaacactttacaggaagacaaacaaacaaagtgcagattcttagcattgcagtatcaatgtcctgcaaacaacaaattactatctatatgaagaataaggaaatgtgtcccaagattaggagaaaaaagttaatataaagagactcagatataacacagacatttaaaagagtaaacataactttaaaataactattataaatatattaaaggaycccatagacaaagtgtgtgaattgtaggactgtccacagagacatatatggaaattgaaaattgagtgaaatagtctgaatactaccaaaggatgaaaaaaaagtattaaagagcaaactaatccaaaatgtgtgaaggaggaaaatggcaaagataagagtagagattaatgaagaagaaaatgaatgaactgtagaaaatatcaacaaaagcaaaagttgagccattaaaaagatcaacaaaattgacaagtttccagctagctgaatcatgaaaaaatgagaaaacaaacaaatttggt

SEQ ID NO: 895090 - DNA, 605 bp, Homo sapiens
ccctttctttgcatattcactagcatctgttatttgtctttttaatggtagcatttaactgaggtgagatatttcattgtgcctttcatttgtgtttctttgatgattagtgatgttgaacatttttttcatatgactgttgacaatctgtatgtcttcttctgagaaatgtctattcagatacttgctcattttaaattcagattattattatttgccattgagtttgaattccttatatattctggttattaactccttgtcagatggttagtttacaaatattttctcccattctgtaggatatcttttcactctgttgattrtctcttttgttgtatagaagatttttggcttgatattatctcatttgtctatttttttgttgttgttgcctgtgcttttgaagttttacctcaaaaatctttgcccagatcaatatcctgtactatttctccatttacttttcagtagtttcatagtttcaggtggtatgtttttaattgaattttagatattgtgaaagatagggacctagtttcattattttgtatatggatatccagttttaccagaactatttattgaagagactgtctttcccc

SEQ ID NO: 895091 - DNA, 619 bp, Homo sapiens
aggccaatttgtatggatttaacatgcatagtgagagcagagctttttggactcagacctaaattcaaatcctaggtcttgtatttacttgctctgtgacttaatgcaaattatttaacttctctgatctatagtttcctcatctataataaggaaacaatgttatttatctcatagttcattgtacagattaaatgggataatgtacatgaatgccaaaagtaacagattagtgtcagttcaaatgaactatttttcctataaaaaatacttcaacatgatgtcctttaggttcatccaggttgtctcaaatgacaggatttcattctttttaatggctgaatagtattctattgtatatatatacccaattttctttatccattcatccattgttgaatgcttaggttgattttacatattggctaatgtgaatagtactccaataaacatctggatgcwaatatctcttcaacatactgattttcattttctttggatatgtactgagtaggggattattggatggtatgagagtgctatttttaatttcttgaggaacctccatactgtttttcaaaatagctgtacttatttacattcccaccagcagtgtgta

SEQ ID NO: 895092 - DNA, 656 bp, Homo sapiens
ggattattggatggtatgagagtgctatttttaatttcttgaggaacctccatactgtttttcaaaatagctgtacttatttacattcccaccagcagtgtgtaagggttcccttttctccacatccatgccaacgctagctatcttttgatttttcaatcattgccagtctgactagagcgaggtaatatctccttgtggttttgatttgcatttccccaatgatgagtgataggagcacctttcaaatctctgttggccatttttatatcttctttcaagaaatgtctgtgcaggtcttttgyccattttttaattggctcttttgttgttgttgagttatatgagtttcttatatattttggacactaaccccttatcaaatacatagtttgcaagtatattctcccattctgtaagttgtctgtttgctctgttgattgtttcctttgctgtgcagaagtttttagtttgatataatctcatttgtctacatttgctttcactgctctagattctgaggtttcattcaaaaaatcctcgcctagactcacgttatggagcttttccactattttttcttctagtagttctgaatcttacgtttaagaatgtaaccatttttggctgggcgtggtggctcacgcctgtaatcc

SEQ ID NO: 895093 - DNA, 655 bp, Homo sapiens
actgtttgagactagtttgcaaactatgcagttcccctgcttctagatcttttctccactgtcaaacatatttaagtacagtaaaatcctaatggagggcatcataatggaacacatggtacaccttaaatttagtagaataaagagaaaccatgaagtataggatgttttcttgtatattgcactcattcattctttcgagagacacatttttcaggttggacaacatagtaagaccccatctctataaaataaaataaaataaaataaaataatataatataattaaacaggtatggtggtacatgcctgtagccctagctatttgggaggctgaggtgggaggatcattccagcccagtagttcaaggctgcagtgagctatgattgtgtgactgcactccagtctggttgacagagtgagacttctctaaaagagcttctttgcatcaatataatgaaaaaaaaatagaaaaagaggaaacaaaagacacattttgagtttaygccctgtgtcaggccctaaagcaatagatgatatgaataagaccatcctgttttcaacaagttcttcatggaaagtaaccaatcaattataaaataagcaatcaagtaattactggaattataagtatattcttaaacaggtttatac

SEQ ID NO: 895094 - DNA, 633 bp, Homo sapiens
ataactaattgcatgaccttgaacttgccttttctgagcttgttttctaagctgagtactacgatttccttctcttataacaagctatgattttaaaaggatgaacatcgtggctgcatcacgaggttgataactaattcaagtttcttagtaactgtgaaataaaacttacaaatcaggactaaaacaaaggggcagtgatttgaaaatagctctccataaaaatgttaaacaggatcataaatagaaaattgtgcctctggagcctttttcttccagaccatttggtcattcaaaaaatgtttatcgtgtgtcccactacctgtggcacacaggtctggaagctggtgaggtacaaaggcagcagctgggggaacctgtgaagagtgtagggcatcccacagctgtgtgcagcagaggacttgaacttggagccagcatgagtaagctgagcagtgagagkaggttaaaggtgcagagtaggatgttggtatctcattttatgataaggaacaattcccaacaaacacagctctgttctgctctgacctggggttgtcagaagtggagccaaagccatcctgacctctatcctggtgaggttagtaaagagaacatctgctggccatacag

SEQ ID NO: 895095 - DNA, 552 bp, Homo sapiens
gggaaagtttggaacttcctagagtcttgttgaatggccttgaccaaaatgctgatagtgatatggacaatgaagtccaggctgagctggtctccaatggagatgagaaacttggtgggaactggagtaaaggtcccactcactatgctttagcwaagagactggtggcatttttcccctgccatagagatctgtagacctttgaacttgagagaaatgatttaaggtatctgatgtaagatatttctaagcagcaaagcattcaaaagatgacagagcataaaagtttggaaaatttgcagcctgaagatgcaatagaaaagaaaaacccattttggggggagaaattcaagctggctgaagaaatttgcatgagtaacgagaagccaaaggttaatcaccaagacaataggaaaaatgtctccagggcatgtcagagaccttcatagcagctctttcatcacaggcctggaggcctaggagggaaaaatggttttgtgagccagactcagagcccctctgctgtgtgcagccttgggacctggtgcccta

SEQ ID NO: 895096 - DNA, 667 bp, Homo sapiens
agatggttggaggacctgtctttgaagactgaactggataactcaggggaaagtctaccctaggattcctagactctccctgcagccactttctactttgattcatttacaaaaaaggttgtaacttaataccttcttggtctgataaatgctctaaatatgtgagttagtggagtgaaggagacaagagaaaggttaggccagcggggagtgcaggcttctcctaaataaagcattgaacagcctgggcttttgagcgcagcccagcatctaaggtagatagtgttctcgtacttgtttgaaatgtcccagaaataccaacgttttagcatccaagctgtatcccttagaatgctccttgttccatggtatatatacgccacattttctttatccagtctatcattgatgggcatttgggttggttccaagtctttgctattgtaaatagtgctgcaataarcatatgtgtgcatgtgtctttacagtagaatgatttataatcctttgggtatatacccagtaatgggattgctgggtcaaatggtatttctgcttctagaaccttgaggaattgtcacactgtcttccacaatggttgaactaatttatactcccaccaacagtgtaaaagagttcttaaaaaaaaaatgttccttgttcccaa

SEQ ID NO: 895097 - DNA, 659 bp, Homo sapiens
tggctcaatttcttcatctgtgaaatggagattacagtaccagtcacttgttggggtggttggaaatgacataacctgtgtgatgctttggatagttctagccatgttaaacacccaatgcatgatagtgataatgttcttattttatcatagtccttgtccctgagaaggcacacttgcatgggtgcagagggattggaggctggctctggttcaagacggctgcttttcctcagttccctccctgctatcccgacagtgggggctcaggagagactgaacaattgtgcaaacaagaggagtgagcctttcaggagaccacagaactttttgttttataaaaagcttcaaatcaggctgccatagtggccttggtatttttgtatctatcttttcagcttctatttagagtgcagagttggcgtgggaatgttttcctttatttcaagctttaagtagttgttggrtaacagctgtttttaaagataatctttgaggcactgagatgctgctgtaaaaacaaatttcttgaatacaaaaaagtcttccttattttatgtgctggattttatttttctgcatgcttttgttcatgctgtcacttctagaattctctttctatcctaactcttgctcctctgctattgtcaaaatcatcc

SEQ ID NO: 895098 - DNA, 636 bp, Homo sapiens
ttttttttttcaaggaaagaagacatgaacaaatatttagtgtggtttagtttgaggtagataatattttaataaaaaaattaataatgcctcaaaaaaatatggtctggggccagcagcatcaactaggatcttattagaaatgcagaatctttggtcccacttcaagcttgtcaaatcagtrtctgcattttaacaagactcctagttgattcaaatgcataatacaagttttagaagcactgctctgtatcacttttttggtatccacatctctgatgagagtaatgtggtcctctctatttggggggttatccttggtttttgaagtactgagtgactagaaagataacagaatggttaaataatctgtcaccccgtctgtgcttaactgtcaatcagttccttgcacatatgaacttctccacctgtaccacccatcttctctagctagattctaactgtaaaacccttcagggaaggacattcattctttatttggtgggttttgtttgtttgttgtctgttggctaaagatagtactcatcagtgtcactgtgggtttctcttgggacagaaggtggcaaaattggatgttgtcatttctttttttctggttcctcttccgacacccac

SEQ ID NO: 895099 - DNA, 614 bp, Homo sapiens
gggacagatttagtgctttgggtccacaagaaggaaagtagaggggttccctggttctttgttggatgctagaatagctccagaggtgaatgtggttctcagactgtagtgtatttttagaagttggtatccaggacagtttatcatgtctggacaatgctgagcaattcaatgctagaatttaataattaggacaacagtctgtgcatggtgttcatccttaaaattcattttaygagtcatgctaccttaggcataattagaataagaccgcacacagtggattttcccccactcattcttttcatttgtactatgtgattatggcaatgtatgtggtcttcccattggatcctcattatttctctgtgtagtttcataacaaaaaaactatcagtctgggattgctgtcagctgatttttttctagtcactgagttgctcaagttactgtttcagcaaaatgggtagcaaccacagcaatttaaaaataaaactattttaaaagcaataaagtatttttgttgttgttgttgttcttgctgttggtttagaataagccacgtcagtctttcaattcttaactgttccaaaattcaatctgaggtcttggtg

SEQ ID NO: 895100 - DNA, 606 bp, Homo sapiens
cttctagacattggcttaggcaaaggcttcatgattaagacccccaaagcaaatgcaacagaaacaaagataaataggtggaacttaattaaactaaagagcttctgcccagcaaaaggaacagtaagcagagtaaacagacaacccacagagtgggagaaaatcttcacgatctatacatctgatgaaggactaatatccagaatgtaccaggaactcaaacaaattagcaagaaaaaaaaacaatcccatcaaaaagtgggctaaggacagaaacagacaattctgaaaagaagatatacaggggccaacaaatatgaaaaaatggtcaccatcactaatgatcagggaaatgcaaatcaaaaccacaatgcaataccacctcgctcctgtaagaatggctataatcaaataattwaaaaaaaaaagattttggtggggatgcagtgaaaagggaacacttctacactgctggtgggaatgtaaactagtaaaaccactatggaaaacagtgtggagattccttaaagaactagaagtagaactaccattggatccagcaatcccactactgggtatctcgcagaggaaaataagtcattatac

SEQ ID NO: 895101 - DNA, 541 bp, Homo sapiens
gtggtgagtgcctgtagtcccagctactcgggaggctgaggcaggaggatggcgtgaacccaggaggtggagcttgtagtgagccaagattgcaccactgcactccagcctgggcaacagagcaagactccaacaacaacaacaaaaaatgacccccaagctgggctttgtttcctakgcaaaatatctggtaaaggctagtccaagaacattttggaatcttgccattttctgtgctaatgtggaccaagtcattcttcagtcctttgtagaaggggtcagtgggaactagggtaaagcaagagaggcactagctttgggcacaaaatataaaggggcaccttaaatcaaaatctaaattaatactctatgacgaacataagtaaaggtatgatcagtactacagatgtttccttttgccttacattccaatggcatggcatggcactgcagaggggtgaacatatggtggtaccctgacatgcagctagaaaggagaggaagctgagtcccaccagcagagacgctgagaaaacaaatt

SEQ ID NO: 895102 - DNA, 599 bp, Homo sapiens
tccttatgttgcactgactaggccatgtgcaagccacatcttgtgaccaccatagtccctgtcctctccatctaaagaaacaaagcaggcagttagaaacaggtttcttttttgtttcaaatgatgtcattcaggtccagcaccagggatctgctgtctgttctcattttttctgtgctgagaagctctcttggctctctcttgacattggcacaacagaggctgagagctgggagggagattgaaagggctgatataccaccagctctaaaaacacatgacagcagaaagccaggctattactaatgctgatcagctyagaggcaatgcaatcaaaaccttcaattacacctgggtgatttaatcaactccctgtcaaactcaggctggaactcctctggtactgtacaaatacagtaattaccatgccagcttgcaataagatatcatttcagaggattagaaaacacattctgttgtcaattaccaacagccaatttataggccccgaaacaaacaatattttttaattgctgcctttgtgtcattatcacaaaattacttctgttatgaggcattaaatcatctcagcgatgttg

SEQ ID NO: 895103 - DNA, 638 bp, Homo sapiens
tttcttaaaaaggtggaataaaaaatgacttcataataaagaaatataaaataataaagaaaacagggggaaactaaaataatttgtcaaacatttctatttccttttttattctatttcagcctaacttctgttcttctattcctcacctacagcaattttcctaatgaaatttcacacctgtccatttctgacaccatttaacgtttagtaataatgcaagtgttaacaatgtattttgggtatatgtttctgtgtggcctgcattgcaagtagattcataaagaatttcagaaatcccaattctatttttcttttccattttattcagtttggttttggtgtagaaaaagacttaagcagtgtacctaattttaatttccaaaattgattttctactctattttctgctgcttgcttaggaaacaaaatttaccaagtctatctcctaaatgattaacctcagcaacctttggcaagcaaactattytaagagaccctgggactgtgttatgctccctctctttgcccaaatgcatttttaaaaaaagttagaaatcaaaggaaaaatgtggaagtgaaaaagaagccaagtggttaaaaaaaaatagaaagaaagtatcactaaggatcataca

SEQ ID NO: 895104 - DNA, 593 bp, Homo sapiens
tgtggcaatgagaagaatgtatatactttttttggtgtgcgggggaggttggagatttctgtaaaggtctatcagatccatttggtccaatgctgagtttaagtcctgaatatctttgttaattttctgcttcgaggatctgtctaatactgtcagtggagtgttgaagtctcccgctattattgtgtgggagtctatgcctctttgtagggctctaaggacttgctttatgaatctggatgctcttgtgttgggtgcatatatatttaggagagttcggttttcttgttgaattgaatccttaaccattatgtaatgctcttccttgtcttttttgatctttgttggtttgaaatctgttttgtctgaaattaggattgcaatccctgcctttttcctgttttccatttgcttggtagatttttckccatttctttattttgaccctatgagtttcattacatgtgagataggtctcttgaagacagcataccattgggtcttgtttttttatccaactggccattctgtgccttttaagtgaggcatttagcccatttacattcaaggttagtattgatatgtgtgaattt

SEQ ID NO: 895105 - DNA, 591 bp, Homo sapiens
gttccttcagtctttgaatttgctgtccttggggtgaggtttttttttttctttttaaattctagttgatgaacttcaggatctgattgtgttataaggtggctttgctcaacaggtttcattactggaagattttagggggccaagcttcagctcaggattcctgaattgtatggacagcatgctctaactctgggggactggtatagggcaccagctttgttctcaggctcctctaggttagaaacctgatgtattggagaggctgaattgctcccagactgctggtcacaacactccagtggatggtgtgagccaaagcactttgtagggcagcggcaatgggatctgtctttatttactggtgcaagcagcagtggctagtggcagcgtggcagggtgtgcacttgtcggctatggcagtatgctaacaggtgccwgggtgctgactttcatgcaggtgttcacagcaacaacagtggcagtatggcttgagatggggccctcactggcaactatgcatgtggttgcaccagtggtggtgttaacacaggggtgggcccctggtagatgaagaactgtgtgcaacct

SEQ ID NO: 895106 - DNA, 618 bp, Homo sapiens
acttttatattttttgatgagcatctttatagcttataatgaacctccattaaagaacatgacacttctaaaatttcttttcctgggatgcttacgtatcatttctaacaaatacacttttatggagtctactaccagagatatcgaggcaatcagaggactttatgaatatattggctgctattattagagaggggcctcacttacaactaccatgcacatatatgcagatgtgtaagcaatagaagataaggaatatgagcatgcattttaaagtaaactatattagatacttaaaatcttatataaacttaatgttaagatataaaaacagayggtgtttttacttgggaaactcatagcagctatcattgaaggtaatgcccaggataagttcacatgctttccatagagttataatttacagtatgaagggtactcacagatataattcttatggaagtctgaaactgtctatcacaaaaaatgaaagttattctttgaggtaactattaaatataggcattagctgcaaatatagctgtgctttgattttattcttgctttgattttatttgatgactttgccagtgttgtgtgttccttgaaatatgtttt

SEQ ID NO: 895107 - DNA, 550 bp, Homo sapiens
ttagccagaacaaggacattaggagcttctcttttaccactgcagctgacacaatactgggggatcaccaaaatgctatagacactgctgagaagtatttacttacaaccagaaacatcagggtaatgatgaccaacacagccttaaggatcccctcagcttgatgacacattaaataggtttcttcctgattgtaagtccgtgaccttccttttcttagagcatttaccatttactttagaaaacttgtagttgtaaattytttctgccgctttgaaaggaatgtaaatctcccagcctaccagttttacagcccaggaaatgtctttctcaaggacttggaaacaatctctttgaaatgtaaatactgaaggggactgtgggagggtaggagactaacttgaatgggcaccaattagcaaacacagaggacctaatcacagagaaacacagtctcacactcaggaataacatagtgtgctccacaactcccattcgtcaataacccactaaatgtcccctagtgcttgtccaccacagcacttaaaaa

SEQ ID NO: 895108 - DNA, 637 bp, Homo sapiens
tggtttttgagaaatttgattgtgatgtgccttgggttaattttcctcatgttcttgtgctttggatttgttgagcttcttggatctgtgggtttatagtttttcatcaagtttggaaaagtttcagttgttataccttsgactctttttgtgctcctttccccaaagactccagttacacatgtattagggtccttggaattgtcccagaggttactgatgttcttattatcattttaaaattatttttctctgtgtttttccttttagatagttgctatctttatgtcttcaagttcactaatcttttcaactgctatgtctattctgccactagatacattccatgtattttttcttctcagacattctaattttcaactttagaagttttggaagtctttttttgcatatcattcctatgtctaattacttcttcatggatgtctggaatatgggtttttgtttaatgttagtgcttaagtcttctattttattatttgttttctatttgttcattctgttttttgttactctcagcatcttttcttgatttcttttgagttacttgaactttgttttagaattctattttcatttatacctaatattttacatatattgttatttttattag

SEQ ID NO: 895109 - DNA, 627 bp, Homo sapiens
tatgtatataaaaatttgggggccgggcgcagtggctcatacctgtaatcccagcactttggaaggccgaggcgggtgcatcacgaggtcaggagatcgagaccatcctggctaacatggtgaaaccctgactctattaaaaatacaaaaaattagccgggcatggtggtgagcgcctgtagtcccggctactcgggaggctgaagcaggagaatggcatgaacccaggaggcagagcttgcagtgagccgagatcgaactactgcactccagcctgggcaacacagtgagactccgtgtcaaaaaaaaaaaaaattgggggagcttgcatacctgaaaatatctttttagaacttggcacttgaaaaattaaggtttcttcacagcaactttgcctaagtttgaatggtaattttcagcttttggacmatgctgtgaattgctataagtaggcgcatgcatttctgggaataaacttaacttatataagggaagcgggaaaaaaaaaagtgactggcacctaatacggagcctgcaaaaagtacaactactttctagactaggggcagggaaattagataaatatatttgtaggaattgtaagtgaaatacaattacagaaattga

SEQ ID NO: 895110 - DNA, 716 bp, Homo sapiens
tcttgttgtgaagatagtgggcaactggggagtttagaggggattattgttacggccaggaccctcttaggttcttgagactgatctacctgctttgcagccctactggtcctattgttcccttggctaatgagggacccatctctctggtggcccttacagtgaatgactgccatttggtgaggaatctgtactgcttccaagagaagcaagattagatattgatgcttgattggggagtttttggctgttaatactcccctctccttccatatggctgtgtgggtgtgcagcatgaaaaactcatactttgaatcagtatataagtttaaccttttgctttctcccaattttaaggctctaattaaggcagttggtgctgctttctatgctgaggtatgagaagaaagggctttggcctttataacctcatttagactcactgttgcataccctgctttcctagtcccttctcccataaaactagtaccataaatatagtattctgcctctggattattaaggggcttatcctgtaagttgggtctactggaatatttttgttctatggcttttaygcattgatgctataaagcctcatcatctacagatgggaatagtgtcccctgggtcaaagtctgttataccctcagagagatgtcaggggtgtctaataaaagagcttggtatttggtcagcctccttccaaaatggtg

SEQ ID NO: 895111 - DNA, 617 bp, Homo sapiens
tcttcacatttactcataatcagtataatgggaaagatattgaaataaaattactgtggatgaggagtatatcacatagtgttcagtatgtagaaacagctttacaatgggtaagcatgccaccttctctgagccacactaatgccatcckcaagagatagtaactatgtttgccatatcaaaacccagccttttaaagtaaacattgttttatatagatggctaagctctacaccatgctccttaatggaaagaatatatgtaggggcaagaggacatacgacttttaattgtggtactccaatgcaggtagaaccacaaacagtattttgcaatctgtgtcttttccgttacataatttctatcattgaggtgactttatcttctgactttgttcagggccttgtggtaagcttgctatcagagcaaaaaatacatatgatgagtgggtcttctttaactcactccagcatcactaaaatgttcattgctgataaaatgtaggttataaccctctagcaatgtaaaatctaattagtatttctaatgataaatcagtaattcaaaataattactctctaaagacagacttttagccattgtgactaaagatttta

SEQ ID NO: 895112 - DNA, 617 bp, Homo sapiens
tcttcacatttactcataatcagtataatgggaaagatattgaaataaaattactgtggatgaggagtatatcacatagtgttcagtatgtagaaacagctttacaatgggtaagcatgccaccttctctgagccacactaatgccatccgcaagagatagtaactatgtttgccatatcaaaacccagccttttaaagtaaacattgttttatatagatggctaagctctayaccatgctccttaatggaaagaatatatgtaggggcaagaggacatacgacttttaattgtggtactccaatgcaggtagaaccacaaacagtattttgcaatctgtgtcttttccgttacataatttctatcattgaggtgactttatcttctgactttgttcagggccttgtggtaagcttgctatcagagcaaaaaatacatatgatgagtgggtcttctttaactcactccagcatcactaaaatgttcattgctgataaaatgtaggttataaccctctagcaatgtaaaatctaattagtatttctaatgataaatcagtaattcaaaataattactctctaaagacagacttttagccattgtgactaaagatttta

SEQ ID NO: 895113 - DNA, 635 bp, Homo sapiens
taccaataagcaatcatcttctcatacttatttacacataagtagttaacagtaaaaaatatgtcacacctgccaggtgtggtggctcacgcctgtaatcccagcactttgggaggccaaggtgggcagatcacctgaggagtttgagaccagcctggccaatgtggtgaaaccccatctctattaaaactacaaaaattagccgggcgtggtggtgggcacctgtartcccagctcctcaggaggctgaggaaggagaattgcttgaacccgggaagtggaggttgcagtgagctgagatcacgccattacactccagcctgggtgacagagcgagaccccatctcaaaaaaaaaaaaaaaaaaaagtcataccattaaaacagtgagaataatgagttcagggtaactcagcagcatagtagcgtcaccacaacacctgtatcaggtgctagacaagagcaacaacaaacaatgcaggcttccagtctccacctacgatgctgttatacttaaaaggctgctgtgcatggtgtttattattaattaattaattattgattgatttaagggagaagaaacatgggaagcagttgagggactgggaagtcgatcctctagggatgaggaaacgtt

SEQ ID NO: 895114 - DNA, 565 bp, Homo sapiens
gtggctcatgcctgtcatcccagcactttgggaggcagaggtggcaggatcgcttaaggccaggagttcaagaccagccgaggtaaaacagcaagacacccattctctacaaaaagacttaaaaattcgccaggcacagtggtacatgcctatagtcctagctactcagaagactgaggcaggaggatcgtttgagcccaggagctcaaggttacaattagctatgatcgtgccactgcactttagcctgggtgacagtgagacctcatctctttaaaaaaaaaaaaaaaaaaaaaaagactccatgaaggcaaaccatgacaaaagtttgctgttgaatgaggtgtgacrgagacaactgcataacactggaaaaattctggaaaaacctcccgacttagattactttgcaagtattgctgagttctaggtccaccttaaaaaaatgtaaatggaagttgtggctgacaaattatggctgaagtttacacaaggaagatacttcagtcagaggacacttagacaagaaaaagaccttgggcctatctcaaaacattcctagtac

SEQ ID NO: 895115 - DNA, 565 bp, Homo sapiens
gtggctcatgcctgtcatcccagcactttgggaggcagaggtggcaggatcgcttaaggccaggagttcaagaccagccgaggtaaaacagcaagacacccattctctacaaaaagacttaaaaattcgccaggcacagtggtacatgcctatagtcctagctactcagaagactgaggcaggaggatcgtttgagcccaggagctcaaggttacaattagctatgatcgtgccactgcactttagcctgggtgacagtgagacctcatctctttaaaaaaaaaaaaaaaaaaaaaaagactccatgaaggcaaaccatgacaaaagtttgctgttgaatgaggtgtgacggagacaactgcataacactggaaaaattctggaaaaacctcccracttagattactttgcaagtattgctgagttctaggtccaccttaaaaaaatgtaaatggaagttgtggctgacaaattatggctgaagtttacacaaggaagatacttcagtcagaggacacttagacaagaaaaagaccttgggcctatctcaaaacattcctagtac

SEQ ID NO: 895116 - DNA, 605 bp, Homo sapiens
tgcgacagaattgctcatgcagaagattaggaaagcaagctgattaaatagacatttatgcaagggactggtaacccctttaaatgaagatgctcaaacacgggtgcaagagatggctgtctccataattctacaatgctgctcttcttccaaacaggctcctaacacatatgacatacagcaatgcaataaagtgaagtgaaataataccaggtataatagcaatgaaaaagtwtggaatatggcgagaaggtggctgtatgctgtaaagtggggaaaattttactttaccactgtagtgtgggaagtttactgtatttacagtctagacctacctagccaaattctctgtccctcaatgttatgcctgcttttcacagcttctttccttcttctatacctttgaactcaaaaattctcaaaagtctcaggttcttttcattagaacccatagtaacagtggtggcaaggagatgtcatttgtagactgcatatcgccatctgtactacagtaagctctctaatcattttacctactagttcctttagactcccccctaccaggcactttgctttacagctttgtcaatcctaggaacaaatac

SEQ ID NO: 895117 - DNA, 616 bp, Homo sapiens
tcaatgtaagactttactaggtggattagtcagggtggggtaggttacagcactgtaacaacaaaatctccaaatttctatagtttgacacacacaagtttatacatcactcatactatgtatataacatagatcaatttagatctctgtaccatcagtgactcaagacacaggatgacaaagaacttatcatctggaatattgttggtggcttttacggaggaagaaagagtctgaatcatacatgagttttgtattgcctcaattcaaaagtttcatgtagggattgctattaaggtgttctggtgctactaaatcctaaaattctacattataaaaaaaacagtaaccaagaagtgaaagcaacgtaagtgctcatccatttccaatgaaccttgagggcattatgctaagtcaaataagtcagacagagaaagacaaatactatgatctcatatgcagaatstaaaaaagtaaaactcatagaaatacagagtacaatggtaattgccagtggctgaggctggggaaaatgagaagatgctggacaaagatacaaactttcagttatgaaaacgaagttatggagatctcatgtacagcatgataactatac

SEQ ID NO: 895118 - DNA, 555 bp, Homo sapiens
tgaaagtaaatgttaagaaggtttttcacactgaaaattaataaaatattatttatgaaaagtaaatagcaaaaaaactctttagtacataattcaagatataaagataaatatatactgtttaaaatatttgtgcatattatattaacattttatgagcttaagtcatarttacttgcacattttaatcagacatgagtttctttaacaagtctatcacagagaaaaaaatggaagtatatttaaactccaaatattaaattaagtaggattaaagaaacaaaaagcacctgttttggtaagaacctacatagcattctttcggcacccgtgagtgatgaaacagaccagagcacagaatgaattttcagcaatcagacttgattgttatagctttaattaatgtacaggcttttttgataactatgagaaatcacgattttgttgcccgactccagaaaatatgaggttaacagtaaaggtgtaatttttgttatcaaggatttttctgttgtggttgctgttatttctggcaggatttccaaaacagttgag

SEQ ID NO: 895119 - DNA, 555 bp, Homo sapiens
tgaaagtaaatgttaagaaggtttttcacactgaaaattaataaaatattatttatgaaaagtaaatagcaaaaaaactctttagtacataattcaagatataaagataaatatatactgtttaaaatatttgtgcatattatattaacattttatgagcttaagtcatagttacttgcacattttaatcagacatgagtttctttaacaagtctatcacagasaaaaaaatggaagtatatttaaactccaaatattaaattaagtaggattaaagaaacaaaaagcacctgttttggtaagaacctacatagcattctttcggcacccgtgagtgatgaaacagaccagagcacagaatgaattttcagcaatcagacttgattgttatagctttaattaatgtacaggcttttttgataactatgagaaatcacgattttgttgcccgactccagaaaatatgaggttaacagtaaaggtgtaatttttgttatcaaggatttttctgttgtggttgctgttatttctggcaggatttccaaaacagttgag

SEQ ID NO: 895120 - DNA, 555 bp, Homo sapiens
tgaaagtaaatgttaagaaggtttttcacactgaaaattaataaaatattatttatgaaaagtaaatagcaaaaaaactctttagtacataattcaagatataaagataaatatatactgtttaaaatatttgtgcatattatattaacattttatgagcttaagtcatagttacttgcacattttaatcagacatgagtttctttaacaagtctatcacagagaaaaaaatggaagtatatttaaactccaaatattaaattaagtaggattaaagaaacaaaaagcacctgttttggtaagaacctacatagcattctttcggcacccgtgagtgatgaaacagaccagagcacagaaygaattttcagcaatcagacttgattgttatagctttaattaatgtacaggcttttttgataactatgagaaatcacgattttgttgcccgactccagaaaatatgaggttaacagtaaaggtgtaatttttgttatcaaggatttttctgttgtggttgctgttatttctggcaggatttccaaaacagttgag

SEQ ID NO: 895121 - DNA, 607 bp, Homo sapiens
ccaatataccatttcttacctatcagattgcaaaaatccattttttttttttttggatttttgaccatatctctgcagcaaggctgtgagaaaacaagcacccttgtacattctggtgagaatacaaaatggtatcactttgtatggagaggaatttgactatctaatgaagttatacatgcatttgatctttgactcagtaagaaatcccactcttaggaatctcttccagagaacaaagaaggagacaaaaattkagaaaagggggattggtaaaaagtaacttaattttatacatttcagtattatttaaatattttatagttcatttctatttttgtttaaatgatgtaaatattaagatatacctatattcaagtgttatattacttgaataggtaaaaaaaaacccacaaaatttaaaaatgttaatatccaggaaatacagcaataaaagacctagagtgaaaggcaaaaccaacttcaagacaattagtaaaagaagatctaaaaagcagtaaaagaagatcaattaaaaaattctatcaattctcaatttaccattaaaagacccatttttggaattccatattttatttccttttac

SEQ ID NO: 895122 - DNA, 559 bp, Homo sapiens
aatgctatgttttaccgcctagattctcctcttaggaccttgccctaggacctgggagtattggctattaaaggctcacaactgaatcctttttcaggaactaccttcagaggccaaatgaagctgcaccaaccaatgttacatcctttctcagaggaggcacccatctaataaagtaatctatcccagctccacagctcccaaggcactagatgaggcccctgttgtaactacactgacgtttaacttctccctatgcccaaccgtgtttgtttttcttttttgaacttcctcgctggcgttgattatactggcattattgaataaaatttctgcatgtatrtctgtctcaaaaagggaccattctaaataaactatatacttgaatatattcaaagataaagctaaaagtttgtgaccacacatagtctgataccagctctgtcttttcccttaactaagtctgtgagaagaaaattttaacataaataaataaaatttatcattggtttactatgtgctagacgctattttgaaatttaacataaaaaattcttta

SEQ ID NO: 895123 - DNA, 656 bp, Homo sapiens
aggtttcagccataattacctacttgcagttccttatattctctttttgtttttctcctcatttggagcattattcccacttctgttaatctaggtaactcccatttgttttgaaatgctgtttatatagcatttcttcatggaagtcttccttaacaactcaagtctggaactaagtatcactcttaaatcctcatagaaaatcttttacttagtttacatatagagagcaactttatttatgcattagataaatcccatgcttccttcagggaaatacagcaccatgtgagggcacaaagcttagaaaggaarggatgggcaacttttcatgctccacttactccctttttcaggctttctcgtacaaggcacaatttgaacaaccataaatgatggctctaggtagcatttatcaaatggtattgtaatcacctgtttacttattcatatccccatctagttcattaaggagagggactatgttgcattgttatatccccagcccctagcatggtgcctttcaaatagaaaacactcaataaatatttgataggcaaattgattaagttaatgaacaaagcatgtgaaaataatagtttgcagtagactacacctttgcacaagttgccctaaagagaaaggcaaaagaaaaa

SEQ ID NO: 895124 - DNA, 660 bp, Homo sapiens
ctgcatctttcacggcttgacagctcattgctatttttttttttttttgagacgaagtttcactctggttgcccaggctgtagtacaatggcacaattttggctcactgcaacctccacctcacgggttcaagtgattctcctgcctcagcctcctgagtagctgggattacaggcatgtgccatcacactcagctaattttgttttttcagtagagatggggtttctccatgttggtcgggctggtctcgaacccccgacctcaggtgatccgcctgcctcggcctcccaaagcgctgggattacaggtgtgagccattgagccaacagttcatttgtctcttcacctactgaaagacatctgggttgcttccgagtgttggcaatcatgcatargcgactttaaacatctgtgtgcaggttttgtgtagacataagttttcaactcctttgggtaaataccaaagagcatgatagctggatcacatgaaaagagtgtgtttagtttcataagaaaccaccaaactggtttccaaagtggctgcaccattttgcattctcagcagcagtgatgagagttcctgttgctccacatccttgccagcatttggtgttttcgatttcggccaccctattaggtatctagtggtgtctcattgc

SEQ ID NO: 895125 - DNA, 650 bp, Homo sapiens
agatacagacaggttacaatgaagtgaagcaaatatagaggggagaaagcagagtaagaaaagtaggaagtatctagaaggagaagcaaagtcgaaaagaaaatctgtttgtttcttttttaaatgggcaggtcctatcaggattgaagaggttaaagaaacaataaaggagttaactgattaaacaaggttccagaagagatgagaaggtaagatcaaggcaacacatgattatgcaaaatagctagcacagtgagtcctcagtgagtaatttgaatatatgaagaagtagtattgatttttttttaatgagctggaaactagtatgtttcaaaggcacaggaggaatcagtctatggaaaagagaaggaattcttatttcatttttaagtatgtaatatacaatggatttaaataagttttctgtgaaacataagcaaatgttttaaatatttttagtaagtgtacttttaacactaaattggtatgcatttaacatattcttyatactttatttagtccctattttaaaaattattcccactttgctatgtctccccatctaatccagaattatactcatctcaacattgataaattacagtctaagttggattctgtactttcacatcttgtcttaaaggaggaac

SEQ ID NO: 895126 - DNA, 615 bp, Homo sapiens
ctgttcatatccttcgcccaattttgatggggttgttttttttcttataaatttaagttccttgtagattctggatattagtcctttgtcacatggatagattgcaaaaattttctcacattctgtaggttgcctgttcactctgatgatagtttcttttgctgtgtagaaactttttagtttaattagatcccatttgtcaattttggcttttgttgccattgctctttggtgttttaatcataaagtctttgttcatgcctatgtcctgaatggtattgcctaggttttcctctagggtttttttggttttaggtcttgcatttaagtcattattccatcttgagataatttttctrtaaggtgtaaagaaggggtccagttttaattttctgcatatggctagacagttttcccaacaccatttattaaataggtaatcctttccccattgcttatttttgtcaggtttgtcaaagatcagatagttgtagatgtgtgacattatttctgaggcctctgttctgttccattggtctatatatctgttttggtaccaatatcatgctgttttggttactgtagccttgtagtatagtttgaagtcaggtagcg

SEQ ID NO: 895127 - DNA, 589 bp, Homo sapiens
agtatttctatacaccaataatgaactggctgaggagaaaataaagaaggcaatcccaattacaatggctattaaaaaaatctataagtatacttagccaaggaagcaaaagacctttacaaagaaaactacaaaattctgatgaaagaaatttaagagaacttaattgaatatgaagacatcccgtattcatagattgaaagaattaacattgttacaatgaccatactgctcaaagcaatctacagattccatgtaattcctttaaaaataccaataatattcttcacagaaaaagaaaaaaaaatcttaaaatttatatggaatcaaaaaagagcttgaaaaaccaaagcaatcytaagtaataacaacaaagctggagacatcacactacctgactttaaaatatattacaagaatatagtgaccaaaacaatatggtatgataggaaaaatggtacatagaccaacagaacagaatagagaacccagaaataaatccatgcgttttttatccaaatgatttttggaaaagttgtcaagaatattcaatgaggaaagaacatccttttcaataaatagtgctggg

SEQ ID NO: 895128 - DNA, 687 bp, Homo sapiens
ttgggtatataaccagcaatgggattgctgggtcaaatggtgtttctggttctagatccttgaggaatcaccacactgtcttccacaatggttgaactaatttacactcccaccaacagcgtaaagcattcctatttctccacatgctcttcagcatctgttgtttcctgactttttaatgattgccattctaactkgcatgagatggtatctcattgtggttttgatctgcatttctctagtgaccagtgataacgagattttttttcctatgttttttggtcacataaatgtcttcttttgagtagtgtctgttcacatcctttgcgcactttttgatggggttgtttttttcctgtaactttgtttaagttccttgtagattctggatactagacctttgtcagatggatagattgcaaaaattttctcccatctgtaggttgcctgtttactctgatgatagtttattttgccgtgcagaaactctttagtgtaattagatcccatttgtcaattttggcttttgttgcatgcaattgcttttggtgttttagtcacgaagtctttgtacatgcctatgtcctgaatggtattgcctaggttttcttctagggtttttgtggttttaggtcttacattgaagtctttaaaccatcttgaattaatttttgtataaggtgtaag

SEQ ID NO: 895129 - DNA, 578 bp, Homo sapiens
attatgtatattgtgaactaaagaacagaaaacttgagctattgtctatatttttagagaccaggtgttaaaggaggatttagaagcaaatattctaagtgacatctccatgattagcttgaaatcctgcactgcctcctgtacttatcaaaaatgtttctaataccctaagactttagaacctagcataggatttactgatctgccttttctagttctagtcctgcaatamttttctctttaaccatattcttctttagtcacttggcgttgtttcctttttttgtttcagagccttataaattccttccttagcaaaaagacttttttcaacctaccttgaactcccaagcacaagctcgttcctttgtcaaggtgtatatgttgtttccccctgagggacactatctttgaagaccttttccaactgctttggtgtgtctttgaagaaatcttatatctcaaacatttaaagatctacagatttatattttgttggcaatgtattatgtaatcctcatactgtatcttaaatgggaaagatgccagcagcactgaacttgccaaaataatactga

SEQ ID NO: 895130 - DNA, 680 bp, Homo sapiens
ataatgaatcagggaaatgcaaattaaaactgaaatgagatacaaacacatacatagaatagcaaaaagtgttgtcatgtgtattagtccattctcatgctcctaataaagacatacctgagactgggtaatttataaagaaaaaaggtttaattgactcacttttcagcagggttgggtaggccccaggaaacttacaattatggcagaaggggaaacaaacatgtccttcttcacagggcagcaggaaggagaagaatgagagcygagcgaagggggaagccccttataaaaccatcagatctcatgagaacttactcactataacgagaatagtatgtgggaaatagctcccatgatttaactgcctctcacaggttccctcccatgacacatggggatgatgggaactacaattcaagatgagattgggtggggacacagccagaccatatcagcaaggatgtggagtagctgaaattctcattcatagttgttgggagtgtaaaatggtataaacactttggagaaactttggccaatattataacatatgaactagcaattcaactcataggcaatttagaaaaatgaaaacgtactttcacaagaagatgtgtagatgcatgtttcatagcagttttaattgtgatagtcaaacaagagtcttgaaacaatgt

SEQ ID NO: 895131 - DNA, 680 bp, Homo sapiens
ataatgaatcagggaaatgcaaattaaaactgaaatgagatacaaacacatacatagaatagcaaaaagtgttgtcatgtgtattagtccattctcatgctcctaataaagacatacctgagactgggtaatttataaagaaaaaaggtttaattgactcacttttcagcagggttgggtaggccccaggaaacttacaattatggcagaaggggaaacaaacatgtccttcttcacagggcagcaggaaggagaagaatgagagctgagcgaagggggaagccccttataaaaccatcagatctcatgagaacttactcactataacgagaatagtatgygggaaatagctcccatgatttaactgcctctcacaggttccctcccatgacacatggggatgatgggaactacaattcaagatgagattgggtggggacacagccagaccatatcagcaaggatgtggagtagctgaaattctcattcatagttgttgggagtgtaaaatggtataaacactttggagaaactttggccaatattataacatatgaactagcaattcaactcataggcaatttagaaaaatgaaaacgtactttcacaagaagatgtgtagatgcatgtttcatagcagttttaattgtgatagtcaaacaagagtcttgaaacaatgt

SEQ ID NO: 895132 - DNA, 628 bp, Homo sapiens
aatcacctcatcttgttttattcttagtcatttgcatttctacatacatttaaaaatattcctgtcaatttgtatgcaatcacacacacatttcacacttgtgtgcatgtattttcacaagattttttatgggaattgcattggatctatacatcaatttgattagaagtcatatttttagagaaagggaaagaggtgtgtgtctaatatatatacagagagagattatgtaagtagtaggctcactgaatttgggagactgataaattcaaaatctgcaggccaggcagcaggctggatgcgtgctcaaggaagagtggatgtcacagctggagtccaaaggccctctaattgtcaggtttccctcttcctaggggaggtctgtctctttcttaagccttcaactgatggcatgaatctcacccaygttatggagggtactatacttttctcatattctacttatgtgttaatttcatctaaaaatacctgcccagcaacatgtagacctgtttcaacaagtatctgtgtactatgggctaaacaagtttacacataaattaactatcctgtataatatggtttggctctgggtccctacctaaatctaaccttgaattgtagtaat

SEQ ID NO: 895133 - DNA, 678 bp, Homo sapiens
ggattcatcttactaacttatgtttaagatacttttcatgtgcgtccatgtgaagaggccaccaaacaggctttgtgtgagcaacatggctgtttatttcacctgggggcaggccggatgagtccgaaaagagtcagcgaagggagataggggtggggacgttttataggatttgggaagttaatggaaaattacagtcaaagggggttgttctctggtgggcaggggygggggtcacaaggtgctcagtgggggagcttctgagccaggagaaggaaattcacagggttaatcactcagttaaggtggggcaggaacaaatcacaatagtggaatgtcatcagttaaggcggggcagggccttttcacttcttttgtgattcttcagttacttcaggccatctgggcataaacatgcaagtcacaggggatgcgatggcttggcttgggctcagaggcctgacattcctgccttcttatattaataagaaaaataaaacaaaatagtgttgaagtattagggtggcgaaaatttttgggggtggtatggagagagaatgggtgatgtttctcagggctgcttcaagcaggattaggggcagtgtgggaacctagagtgggagagattaagctgaagggaggtcttgtggtaaggggtggtattgtggggttgttaga

SEQ ID NO: 895134 - DNA, 463 bp, Homo sapiens
aggtcgtacatttaagtctttaattcattatgagttgatatttgtatacagtgagagatagggatctagttttgttctgctggctatggctatccaggttcccagcaccatttgttaaagatagcgtccttctcttgtgtatattcttggtgcctttgttgaaaatgagttggctgtgaatgaagggatttatttctgagttctttattctgttgccttggtctatgtctctgtttctatcccagtaccgtaccgttttgattactatagctttctagtataattggaagtcaggtaattgtaatgcctccagctttgkttttttttgtttgtttgttttgttttgtttttttcctcaagattattttggctattctgggtcttttgtggctccatataaatttcagaattatttattttatttctgtgaagaatgtcattggtatgttgatagagattgcat

SEQ ID NO: 895135 - DNA, 640 bp, Homo sapiens
tcactgattatattattttattacaagttacttaacctttctgagcttgtttgcatatataaattgagttaatatctaattcacagagtactgtaaagattaattgtgataatttaagtaaagtgtcttccataattaccattcacaaaacattagttttctgatatccttttagcttcactgattgattgtaagaagataaattggatgagcgtgatatgagggtgctaggaatggaagatgtcaaytccattgacagccagagccatcagatattttatggttaagatgatgcacattttttctccttatttaatatgtcattctctcaaattttaatatttaatttgtagtattaatattgattaacttctagatcactcttacagataaaatgttcctctttttattttatatattttccttcaaattgcctgaatattttaaagtgtccaatgcagatcatggtttagttcattctcaccacaaatcacatcgcatctttattattgtcaccaatttaactacctttaacagtgttaacctctcagttcttatgaaaaaataaaatggttttctgagtttggtataaaaatttactcttttatgggtaagaaccactttttagcatatttattat

SEQ ID NO: 895136 - DNA, 529 bp, Homo sapiens
tcctgacggtagaatttcggatatcagttgaggaatgggaatggattctcagggcaaacaatgttacttgccctccaaaaatcagactgggaggccctgcagctggcagtgagttggttccattggactaaatattgacaaagattcttctactccttttgaaaatatatcttacagaaggctctgccaagccttgcttgaactcccaatgagaatctgcggggaggaggtagagagatgggagaagagaagagaatgaaaagcaagagagagcaaaacaaggcaaagagaaaatcaatgcctcattgcaagcaggtgggagctgtggttgtgatgaatatttactgtgtagtggtctaatgattytagaaattttttttgactgtaccgagcgcttgtgggattgtttttcaagaaataaaatacattaaagctcagtcgttaagagcttaaaggaggagggattgcaggctccaagcccattagcacaccctgtcattaagtaaggcctcattcctaatgcattttt

SEQ ID NO: 895137 - DNA, 638 bp, Homo sapiens
aaatttagagatactggtgtaagcttatggtttcaaatgtatgcatttgagtgtgtatttacatgtacatatgtgtatatatgtacacatacatatatatgcatacatatgtgtatagatgtagatatagatatataaatatatggtcatacacatgtatgcatgtattccctatctctgaccactataaacagaaatattcattaacaatacacatatctagcaactcagagatcatgattttttaaatcatattccccacttaaaggaaaaacattttcagggctactatgtcataattaagragctctcaaaaaaaatgatgaggacatgtgacagggatacaagtactagcttaaaggggatccactgtttagatctggaaaactctgaacaccaagattattaagtgtaataattaaaaacaattgaaaaaatagaaatctatgcacccaaaccaatcattaacagttaaatatgtatgtacatacatacacaaatacataaataaacttgtaaatgggaggtggttaagttccagctaataaatgtgatgcacatgccataatgggaaaattatccttttgcaaacatatagtaaaattttgttaatttaagaatcatcaatggatgataag

SEQ ID NO: 895138 - DNA, 569 bp, Homo sapiens
agtacttctctagccacatctcttccctgttccctgagttcaccttgtcctcaattcagcatttagttcaccgaattaactgaaattgtatttccccactttcctatagggtctccaggatgtaagtcagagatcaggctgcggtgtagagccaccatttccttgacctaatttggactcttctcaaactcaccacaaagcaccttaggcataatgatcagttgcatgtaaggtgttgatgccctcactttggtcatcttaggccactaacatactagttcaaggagtagaaggaggtcagcaggtcagatatttgctggggcstattatggagggcttaggaactcactcatgccaaggaggcacaggataagaataaaagctcatttcctgccctggaagaaattgggttttagttgggaagacaagaccaataggcagtaaatggtcttggccttgcctgtgtctgaagcctcctctcttcaagattctgcttcaagattccttttatttaagcatccctctatatagctgaagattccaggaagaggaactggaataactggtga

SEQ ID NO: 895139 - DNA, 603 bp, Homo sapiens
tatgcttagcaaatagccatgtagccattttcaatattgttagtcattcacttatcaatcagttgctataaaccctgtaccctgttaaaggctgagactcccagtttctgccctcagaaacctcacagtccaatgggaaaggaccacaggagaaccagcagttaggatgcaggatggtaagtactttattaataatcactttttaaaacactatcactaatgggtgacaaccattttttgctagccactgtgtgctacatgctttatgtaagtcaagtacataatctttctagtctaaatatgtgagttcaaatcccagcattaccactgaataattatgaaatctttggcatatttattaactctttgacacttggttattcatcttgtaaataggtacagaagtcagaaaaartaggatgggcacggtgggtcacacttggcaacatagtgaaaccccatctctactaaaaataaaacaattagccaggcatggtggtatatgcctgtggtcctagctacttgggaggctgaggcaggaagatcacttgagcccagacgtttgaggctgcagtgagctgtgatcacattattgtgctccag

SEQ ID NO: 895140 - DNA, 580 bp, Homo sapiens
ggtgacactgaggtgaattcggcaagcttcccctttatctcccttatatctcagactgggaaccagggtcttggactttgaaactaacaacaggcgcagaccaaaagagaataggaaaaacaaacaaacaaaaacaaacctgggccgggcacggtggctcacgcctataatcccagcactttgggaggccgagaygggtggatcatttgaggtcaggagttagagaccatcctggccaacatggtgaaaccctgtctttactaaaaacacaaaaattagcagagcagtagtggtgcacgcctgtaatcccagctactcatgaggctgaggcaggagaatccttgaatccaggaggcagaggttgtggtgagctgagattgtgccactgcactccagtccgggtgacagagtgagactctgtcaaaaaaaaaaaaaatctggcttctctctggacaaagtggcgggaaagggacagaccagcagaggcctggcagggagatccatgcctgggcacacgtggggaagagcaggcctccccagccacaacagcctgagcagctgccctccccagccgccctcc

SEQ ID NO: 895141 - DNA, 614 bp, Homo sapiens
ctcaaactcctggcctcaagtgatccacccgcctcggcctcacaaagtgctggattacaggcatgagccactgcgcccagccctgggttttattggaatggcagattcattcctctacataaaggcagagcttcttaatagcagtccctgtcccatggctgcagctctagttgggtctttcctttgtccattcacatctaggggtggccattggcctcctgctgttatattccctgggttctttgccattcattattggttcccttaaccccacccacacctctgtaartagatctttcattaaaaatgtctccattatttctttgaatgtgtcaactattttctgcttgacttccatcaatatatgctacctgacattgacacgaattaattctaataggaaaagtttacaaagtgaaattcaaattctttgacactccttttattgagaggtagaatttatttctcctcttctttaaccttggctgaattataactgctttgaccaatagagaattgtagacatgatactatgcaacttcagaaactagatgagaaagaagtaatccttttgggcacttgctttctggatatcccctgtccaaacatttctt

SEQ ID NO: 895142 - DNA, 674 bp, Homo sapiens
tgaagtagcagttctctctttgaactaatgctaatgcagtttatgaattacatggtactgcaatccctcacaaggcttttctttactataaataaaatactctaaacaagagccaaatattttactagacaaattctattaccaaaaaaaagacwcaaagctctggtatgaatgcattagttaaatatatacgaaatagatggaattgcctaagaatgcacaaaatcaaacaaaaggtggattctgattacaaaataacttttttttttggtggaagagaaagcaatgtaaaaagcatgagtcacattttagattctaacactccttagtagtggcttccttttcagtctcatgataaacaacttgtctatgattctctttcttcctttagtaactagagacaaaagtgcttcagcagtggagctgacaaagattccagttactctctcccatgtgtctgtgctgtgcacatgttgtgtcttacacttactgtgggacatcagtgttgatctttatagcacatatttcggagtaaccctgagaacaatatgcatgcaatttctgatgcagaacaggtgaacacagaagaatgcacagaggaattatgatgacttagacttagatgttacttagatataaaatgtatgatagaatgttggtagatccaaaatttg

SEQ ID NO: 895143 - DNA, 674 bp, Homo sapiens
tgaagtagcagttctctctttgaactaatgctaatgcagtttatgaattacatggtactgcaatccctcacaaggcttttctttactataaataaaatactctaaacaagagccaaatattttactagacaaattctattaccaaaaaaaagacacaaagctctggtatgaatgcattagttaaatatatacgaaatagatggaattgcctaagaatgcacaaaatcaaacaaaaggtggattctgattacaaaataacttttttttttggtggaagagaaagcaatgtaaaaagcatgagtcacattttagattctaacactcyttagtagtggcttccttttcagtctcatgataaacaacttgtctatgattctctttcttcctttagtaactagagacaaaagtgcttcagcagtggagctgacaaagattccagttactctctcccatgtgtctgtgctgtgcacatgttgtgtcttacacttactgtgggacatcagtgttgatctttatagcacatatttcggagtaaccctgagaacaatatgcatgcaatttctgatgcagaacaggtgaacacagaagaatgcacagaggaattatgatgacttagacttagatgttacttagatataaaatgtatgatagaatgttggtagatccaaaatttg

SEQ ID NO: 895144 - DNA, 563 bp, Homo sapiens
ataatgcaccactagatgcatttttcttttgaattcttcttgaaaacaaagatgctgtaactaggagagaaagaaagggacaaattaggagtttgttcaataaaaatgtttctcagaatgggatcgtctgatgatttgtaccagaattctctaagggtaggccaggaatcttgattcttaacaaggtcacctkgtttacatcaaagttgtttcctcatcaatgacatagaacagtgttccaaatattttaaaagaatcctaagttctgactgggcacagggactcacgcctgtaatcccagcactttgggaggctgaggcaggtggatcacgaggtcaggagatcgagactgtcttggtcaatatggtcaaaccccgtctctactaaaatagaaaaaattaactgggcatggtggcatgtgcctgtagtcccagctacttgagaggctgaggcaggggaattgcttgaacccgggaggcagaggttgcagtgagctgagattgcatcactgcactccagcctggtgacagagcaagactccgtctcaaaaaaaaaaaaaaaat

SEQ ID NO: 895145 - DNA, 608 bp, Homo sapiens
ctagtccaccttcttgtctttaggaaggattgtatttaagccattttagatatattgttgctcagctttccatgagaaatctcttttagtatatcatttatcagctgacatgctttctttattgtgtacttttggacataagaaatgtttaagacaatataagggaaatcatatggtccataaacttcctaccaaattctcccatacagaggcctgttctcagtgccatattttagagctataatgagcggcaaacccagggagaataacttcattaagtaatcctcactacttamctgctgtgttgctttggggcctgagagtctctgtgattatagtcaggtgaaggcctccccgtcaggcatctacatgctggcaacactgagactagggttctttcatggggactttgtcaaaatggacacaaacatttgttgagaatgattaaactcataaaggaagaagtgtctatattttactagagattaattgaaacatactacaaaacacttcaaagcttcctgtggggttctgatgtaaactttcatttctccttcactaagggcataatgcgaatgcttaaccagaaggatgaatcatgtaaagct

SEQ ID NO: 895146 - DNA, 608 bp, Homo sapiens
ctagtccaccttcttgtctttaggaaggattgtatttaagccattttagatatattgttgctcagctttccatgagaaatctcttttagtatatcatttatcagctgacatgctttctttattgtgtacttttggacataagaaatgtttaagacaatataagggaaatcatatggtccataaacttcctaccaaattctcccatacagaggcctgttctcagtgccatattttagagctataatgagcggcaaacccagggagaataacttcattaagtaatcctcactacttacctgctgtgttgctttggggcctgagagtctctgtgattatagtcaggtgaaggcctccccgtcaggcatctacatgctggcaacactgagactagggttctttcatggggactttgtcaaaatggacacaaacrtttgttgagaatgattaaactcataaaggaagaagtgtctatattttactagagattaattgaaacatactacaaaacacttcaaagcttcctgtggggttctgatgtaaactttcatttctccttcactaagggcataatgcgaatgcttaaccagaaggatgaatcatgtaaagct

SEQ ID NO: 895147 - DNA, 633 bp, Homo sapiens
agacatattggctttcctttcaccttctgcatgattgtaagtttcctgaggcctcccatccattttctgttaagcctgtggaactgcgaatcagttaaacctcttttctttatgaattacccagtcttaggtacttctttacagcaatgtgagaacaragtaatacagaaaattggttccaggagtggggcactgctataaaggtacttgaaaatatggaaatgattttggaactgggtaatgggcagaggttggaacagtttggagggttcagaagaagacaggaagatgtgggaaagttcagaacttcctagagacttgttgagtggttttgaccaaaattctgatagtgatatggacaatgaagtccagggtgagttgatctcagatggagatgaggaacttacaggggactgaagtagtcactcttgctatgctttagcaaagagattggtggcaatttgcccctgccctagagatctttggaactttgaacttgagagagatgatttagggtacctggcagaagaaatttctaagcagtgaagagtttaagagatggcctggctcctcctaacagcatatagtcatgttcacaaagagatggtctgaaattagaacttaagtttaaaa

SEQ ID NO: 895148 - DNA, 713 bp, Homo sapiens
gtaaatgcagaagaagcccctgtacctgaagtactccaatatttgggtagttaattaaaagcatcagttaaatggggaatcataaggaaatgctgcatacgtgcatgaatttattttaacttcaaacataagtacatggtttcatttgccaatatttagatgaagaaccaaggtttattctctgagtatagtgtttaattctgtgtcatctttcttgcataaaccatggccatatttcatcatctactgtgttcaactttgctttcttgaaagtagtgtaaaccaaaagtatctgagacaggtctcaatcaatttagaaaatttattttgccacggttaaggatgtgcctgtgatacagcctcaggaggtcctgatgacatgtgcccaaggtgtttgggggtacagcttgattttatacattttagggagacatgggatgtcaatcaaggcatgtaaggtgtacgttagttcagtctagaaaggygggactactcaaagcaggggcttccagatcataggtggttttaaacgttttactgattagcaattggttgaaagagttattatcaatagaaaggaatgtctgggttatgataaggagttgtgaagaccaaggttttatcatgcagatgaagcctctaggtagcaggcttcagagagaatagatttcaaatgtttattatcagacttaaagagtctgttctatcagtaa

SEQ ID NO: 895149 - DNA, 605 bp, Homo sapiens
atgggtgctacaggcagttagcagctgctctcaagcctttgtaacattccagtcccattctccatactgcagtctgagtctgtgtgttttgtttttttcaaaatgcacatttgagtctcatgttccccctgcttgaaacttaatggtcatttcttacccaccttcccaatctaatcttcctctacacttctgcagccctagccacgtgggtcttctttcagtcctttgtcagggctttctgttgtcgcaaagcctttgcaaggcctgctccctctgcctggaatgctctttctcctctccccaagttaacccttsctgggccttcagatcacagccctatagccacagcctcagggaaaccttccctggcctccccactaggtagcatattactcttttttttttttttttgagatggagtctcgctctgttgccaggctagagtgcaatggtgcgatctctgctccctgcaacctccgcctcctgggttcaagcgattcttctgcctcagcctccatatagctggtactataggtgtgcactaccacgcccaactaatttttgtatttttggtagagacggggtttcaccatgttggccaagat

SEQ ID NO: 895150 - DNA, 639 bp, Homo sapiens
taaagtgcataattaccattatcatgatttaaactccctctctcctctctctctctctccttctgtctctctcacacatacacaaacaatgcacttgcatatgtatacatgaaaagaatggctgaaaagaaaaagatgaaaatgtaaaagtaagtgtgattactattttgttaataatttttttactctcattttttagtgactgaatattttaatagtgaggaaaatcaataaatgtatacagtgtwttttatttttaattattaacagatgagccttcccatgttgctctggctggacttctgggctcaagtgatcctcctgtttcagcctctcgagcagctgggattacagaggcatgccgccatgcctggctaaatgagtatattttaaggatataaatatatgaaaaacaagctgggcatggtggctcatgcctataatcccagcattttgggcgataagttgagaggtagagatagaagaatcctttaaggccacgaattcaagaccaacctgggccacatagtgagatcctatctctacaaacaacaacagcaacaaaaaacagtagatatttaacttggcagaaaatcaaaacaggactgcggaggaaaaggatgaggaaagaccattaaa

SEQ ID NO: 895151 - DNA, 671 bp, Homo sapiens
gaaagcattcagtaatatgcattcacaaagagatgatttaaaattggagcttatgtttaaaagggaagccgagcataaaggtttcaaaaatttgcagcctgacattgcagtagaaaagaaaatcccattttctggagaggaattgaagagggctgcagaaatttgcatgaataaagaggaaccaaatgttaatagccaagagaatggagaaaatatcttcatttcaggtcagaggtcttctctgaggcagtccctcccatcccagacccaaaggcccaggggggaaaaatgaattcatgagctgggcccagagccatactgctctctgcagcttcaggagttggtgccctgcatcccaggtgctccaaatccagccatggttaaaaggggccaaagtaccacacttgccgttacttcagagagtgcaagccttggggcttccacatggtgttgggcctttgggtacacagaagacaagagttgagctttgggaacctctgcctagatctcagaggaaatgaaatctaggtagasgttcccaaacctcctggaaaaggaagatgtccaggaaatgcctggatgtccgggcagaaatctgccacagggttagaaccctcatggagagcctctgttagggcagtgtggaagggaaatgtagggttggaggccca

SEQ ID NO: 895152 - DNA, 654 bp, Homo sapiens; identical to SEQ ID NO: 892783

SEQ ID NO: 895153 - DNA, 638 bp, Homo sapiens
caccttgaccctgcttttaggcagagcttctccaatctatcagcctctccatttgacagccatttgctccctttaattttttttttagtatcatttacctgaatttgtgaaatatagaaaagcattagatatagacttgcaatgctctgtcctaaatagtaaaatgtaaggtcatttctttctttttttttttttggacacagagtctcactctgtcacccaggctggagtgcagtcatgcgatctcggctcactgcaacctctgcctcccargttcaagcgattctcctgcctcagtctcccaagtacctgggattacaggtgcctgccaccacacccggctaatgttttgtatttttagtaaaaacggggtttcactatgttggccaggctggtcttgaactcctgatctcaggcgatccacccaccttggcctcccaaagtgctggcattatagtcgtgagccaccacgcacggccagaatgtaaggtcatttctaatagaactttcctcttccttatttgctccccttcctggaaagatatttagcttgttcttatcttagtacttcttttctacctctaaaactatgtagtgaagtatgatcaatcaagcttaaaatatcttagttgcaaagg

SEQ ID NO: 895154 - DNA, 663 bp, Homo sapiens
tcactcgcggttaggagctggagaccagccaggccaacacagcgaaaccccgtctccaccaaaaaaatacgaaaaccagtcaggcgtggcggcgcgtgcctgcaatcgcaggcactcagcaggctgaggcaggagaatcaggcagggaggttgcagtgagccgagatggcagcagtacagtccagcttcagctaggcatcagagggagaccgtggggagagggggargaggagggggagagggagagctgtggattttttatagattccctttgtcagattgagaaagttgccatctgttcctagtttgttcagtgtttttgtcatgaaagggtgttgtattttgtcaaatactttttctgttgactttttgtgttgaaatccacattggatttcattgtttcctaagaaataagtaaaactcatttattccaagtgatatttaataatattaaactcaattagaaaagcagctttgtggtatttgtcaaatgttattcgaagcatattctgttctctcttaaccataaaggcctaaccccaaatatttatctgttaataatttacacgagatgatcgtgtaaattttttttattctgttgatatgtgatatttgacaaaccttggcaaaagaatatccattggccaagaatttttttaatga

SEQ ID NO: 895155 - DNA, 599 bp, Homo sapiens
gacacaataatagtggggatctttaacaccccactgataacattaggcagatgatacagacagaaaattaacaaagatattcagaacttaaactcagcactggatcaaatggagctgatagatatctacagaactgtccaccaaaaacaacagactatacattcttctcattgtcatctggcacacattctaaaattgatcacattataggaagtaaaaaactcctcagcaaatgcaaaagaactgaaatcataacaaacaatctctcagaccacagcacaatcaaattagaaatcaagactaagacattcactcaaaaccatatagttacatgaaaactgaataacctgctcctgaataacatctgggtaaataatgaaataaagacagaaatcaggaatttatttgaaattaatgagaacaacgatacaacatatccaaatctctggaacacagcraaggcagtgttaagagggaaatttatagtactaaatgtccacctgaaaaagttggaaagatctcaagctaacaattaacaccaaaactaaaataattacagaaccaagagcaaatacataccaaagctagcagagacaaga

SEQ ID NO: 895156 - DNA, 605 bp, Homo sapiens
ggatagttaccgctcttttattattatactttaagttctagggtacatgtgcacaatgtgcaggtttgttacatatgtatacatgtgccatgttggtttgctgcacccatcaactcgtcatttacattaggtatttctcctaatgctatccctcccccatacccccaccccacgacaggctgtggtgtgtgatgttccctgccctgtatgcaagtgttctcattgttcaattccctcctatgagtgagaacatgcggtgtttggttttctgtccttgtgatrgtttgctcagaatgacggtttccagcttcatccatgtccctacaaaggacatgaactcatccttttttgtggctgcataatattccatggtgtatatgtgctacattttcttaatccagtctatcactgatggacatttgggttggttccaagtctttgctattgtgaatagtgccgcaataaacaatacgtgtgcatgtgtctttatggtaacatgatttataatcctttgggtatatacccagtaatgggatcactgggtcaaatggtatttctagttctagatcctcgaggaatcgccacactgtcttccacaatggttg

SEQ ID NO: 895157 - DNA, 605 bp, Homo sapiens
ggatagttaccgctcttttattattatactttaagttctagggtacatgtgcacaatgtgcaggtttgttacatatgtatacatgtgccatgttggtttgctgcacccatcaactcgtcatttacattaggtatttctcctaatgctatccctcccccatacccccaccccacgacaggctgtggtgtgtgatgttccctgccctgtatgcaagtgttctcattgttcaattccctcctatgagtgagaacatgcggtgtttggttttctgtccttgtgatggtttgctcagaatgacggtttccagcttcayccatgtccctacaaaggacatgaactcatccttttttgtggctgcataatattccatggtgtatatgtgctacattttcttaatccagtctatcactgatggacatttgggttggttccaagtctttgctattgtgaatagtgccgcaataaacaatacgtgtgcatgtgtctttatggtaacatgatttataatcctttgggtatatacccagtaatgggatcactgggtcaaatggtatttctagttctagatcctcgaggaatcgccacactgtcttccacaatggttg

SEQ ID NO: 895158 - DNA, 610 bp, Homo sapiens
aaaggaagaccacagggcctcaggaaatctgagctgaaggaatcagcatctcccaaggtagaagtgaaaaggactgctttggaggtgtttccaggggtaaaatgtactgtaggaaaactgcatagaggcaaagaatgtgcagtggytaatagctgagaaatgtgattggcctacatattgtgacttaaatagtgaataaaaggatctgagttgatgcttcaattctcactatatatcaggggtatgccatagcagaaaagggaacattagagctaaagagttttttttttgtctcacttattctatctgggaacacctctgccctccttgcagaaaacaggagtgtcatgtgggcaatactagggagtgtaagactcatccatgtcctcatagattttaaaacccagatatatacacaatattgacatggggctatgtttgcaaaaggcagtcataaaaggacagggttcctatgttaaaggacagattggacagtattaatgtttcaaggatgaagaataaggacatttattggagaaaaatatcagactttggaaacaaatgaagtgaagtttcagaggcaggattctatccaattaaaacaaaaaga

SEQ ID NO: 895159 - DNA, 679 bp, Homo sapiens
ccccgttttctttatccagtctatcattgatgcacatttgggttggttccaagtctttgctattgtgaacagtgctgcaataaacatatgtgtctttatagtagaatgatttataatcctttgggtatatacccagtaatgggattgcagggtcaaatggtatttctggttctagatccttgaggagttgccacacgatcttccacaatgattgacctaatttacactcccatggtgtaaaagcattcctatttctccacatcctctccagcatctgttgtttcctgactttttaatgatcgccattctaactggcatgagatggtawcttactgtggttttgatttgcatttctctaatgaccagggatgatgagctttttttcatgtttgttggctgcataaatatcttcttttgagaaatgtctgttcatatacttcacccactttttgatggggttgttttttttttcttgtaaatttgtttaagttccttgtagattctggatattagccctttgacagatggatagatgatagattgcaaaagttttctcccattctgtaggttgcctgctcactatgatgatagtttcttttgctgtgcacagcctgaaatatttacttactggagctctatgtaaaagtctcccatatcctgcactaaatcataaatgtaa

SEQ ID NO: 895160 - DNA, 679 bp, Homo sapiens
ccccgttttctttatccagtctatcattgatgcacatttgggttggttccaagtctttgctattgtgaacagtgctgcaataaacatatgtgtctttatagtagaatgatttataatcctttgggtatatacccagtaatgggattgcagggtcaaatggtatttctggttctagatccttgaggagttgccacacgatcttccacaatgattgacctaatttacactcccatggtgtaaaagcattcctatttctccacatcctctccagcatctgttgtttcctgactttttaatgatcgccattctaactggcatgagatggtaacttactgtggttttgattygcatttctctaatgaccagggatgatgagctttttttcatgtttgttggctgcataaatatcttcttttgagaaatgtctgttcatatacttcacccactttttgatggggttgttttttttttcttgtaaatttgtttaagttccttgtagattctggatattagccctttgacagatggatagatgatagattgcaaaagttttctcccattctgtaggttgcctgctcactatgatgatagtttcttttgctgtgcacagcctgaaatatttacttactggagctctatgtaaaagtctcccatatcctgcactaaatcataaatgtaa

SEQ ID NO: 895161 - DNA, 679 bp, Homo sapiens
ccccgttttctttatccagtctatcattgatgcacatttgggttggttccaagtctttgctattgtgaacagtgctgcaataaacatatgtgtctttatagtagaatgatttataatcctttgggtatatacccagtaatgggattgcagggtcaaatggtatttctggttctagatccttgaggagttgccacacgatcttccacaatgattgacctaatttacactcccatggtgtaaaagcattcctatttctccacatcctctccagcatctgttgtttcctgactttttaatgatcgccattctaactggcatgagatggtaacttactgtggttttgatttgcatttctctaatgaccagggatgatgagctttttttcatgtttgttggctgcataaatatcttcttttgagaaatgtctgttcatatacttcacccactttttgatggggttgttttttttttcttgtaaatttgtttaagttccttgtagattctggatattagccctttgacagatggatagatgatagrttgcaaaagttttctcccattctgtaggttgcctgctcactatgatgatagtttcttttgctgtgcacagcctgaaatatttacttactggagctctatgtaaaagtctcccatatcctgcactaaatcataaatgtaa

SEQ ID NO: 895162 - DNA, 662 bp, Homo sapiens
caaacccaaagccaatatcatactgaatgggcaaaaactggaagcattctctttgaaaaccagcacaagacaaggatgccctctctcaccactcctattcaacatagtgttggaagttctggccacggcaatcaggcaagagaaagaaataaagggtgttcagttagaaaaaggggaaatcaaattgtctctgtttgcagatgaaattattgtatacttagaaaacccatcatctcagccaaaatctccttaagctgataagcaactttagcaaagtctcaggataaaaaattaatgtggaaaaatcacaagcattsctacacaccaataacagacaaacagagagccaaatcatgagtgaactcccatccacagttactacaaagagaataaaatacctaggaatccaacttacaagggatgtgaagaacctcctcaaggaaaactacaaaccactgctcaacaaaataaaagaggacacaagcaagtggaagaacattccatggtcatggataggaagaatcaatatcatgaaaatggtcctactgtccaaggtaatttatagattcaatgccatccccatctagctaccaatgtctttcttcacagaattggaaaaaaaactactttaaaattcacatggaaccaaaaagagaccgcat

SEQ ID NO: 895163 - DNA, 700 bp, Homo sapiens
ctgagtgccaaaacgatcctggcaccttctcccctctctcttgcccgctctctcgccatgtgacatgccttctcccccttcatcttccactatgattgtagacttcttgaggccctcaccagcagaaggtgatggcagtatcattcttgtacagttggcagaactgtgagccaaaataarcctcttttctttataaattacccaacctcaggtattcctttatagaaaggcaaaatgaacgaatacatctgataattagtgatgtttttcatttttagtatgtttgttggtcacttatatgtcttcttttgaaaaatatctgtttttgccctttgtctactttttaatggggctatttgttagattgtggatattaaccctttgtcagatgcataatttgcaaatattttttcctattctgtaggttgtcttgtttactctgttgcttttttcctttgctgtgcagaagtatttttttgtttaattaagtctcatttgtctatttttgtttttgttgcagttgcttttgaagacttggtcataaattcttttcctaggctaggtacagaagaatttttcttaggttttcttctaagaattttatagtttcagatcttacatttaggtctctaatccatcttcagttaatttatatatatggtgaaaagttttggttcagtttcattcttctgtatatggc

SEQ ID NO: 895164 - DNA, 629 bp, Homo sapiens; identical to SEQ ID NO: 893582

SEQ ID NO: 895165 - DNA, 499 bp, Homo sapiens
gcaggagaaacagcacaggtttgtttttcggttggttcttttttttttttttttgagataaggtctcactactgaggctggagtgcagtgggtgggatcttggctcactgcaacctctgcgtcctgggcttaagctatcctctagcctcagctcctgagtagctgggaccacaggcgtattggccaggcccggctattttttatttttattttttttgtagagatggggtttygccatgttgcccaagctggtcttgaactcctgagctcaaagcagtccgcccaccccggcctcccaaagtactgagattacaggtgtgtgccatcacgcctggtagttttttgttttttgttttgagacacagtcttgctctgttgcccaggctagagtacagtggcgcaatcatggctcacagcagcctccacctcctgagttcaagcaatcctcccacctcagcctccttagtagctgggacaaaaggtgtgcactagagacagg

SEQ ID NO: 895166 - DNA, 511 bp, Homo sapiens
cttgccactgggggcagctcctgccagggtggcaagcacgggcgagcacaggggtgggacagcctcctggactgggtcaccttgtctccaacactgctccctgatactggcagagtctggagtggcagtgagcccagagcgtgtccctgtcccccacccaggtcagcaaccctgagatccgggggaacgtggctcccaagatctactctggagcatcaggagaaccaagcggcctcaacagtcccagatggaaggacgctaaggttcccaacacctttgggcaagggcctcaragttgcctttgctctggccgttggacgggtgcctgggttccaagtggccctcaccacctggtcacaaacttgaaatgtccagtttccccagctgtaaaatgaggatgtcaatgagatgctgaatcgccaccgtcacactggccatttacaaagcctgggtggacacggcagaaggagggcttctaatatgccaggctggccatgctgcccgccgtgcc

SEQ ID NO: 895167 - DNA, 617 bp, Homo sapiens
ctctcggaccgacttcggagtctcgatcctccggaccaacgaaggggccccgggaaaccccagatatgcaacgcctcccccgcccgccaggcccggacggcctcgccctcttagcaacctacctaaaacggcctcgcagtggccccaaccgcgcacttgctgcttgtaacccaggcctcggcccaaaacccgcgactggcctggtgtcctagagctctgtacacaccaccctcccgacctcagccctccaactcccgataaccagccgacctcctccaaccgtgcggaagaaaagggttggctatttccgtggcccaagtaatagtcaggccgaaatctcgcgatacaacttagcttccgggaagaaggcgagcggtgggaggagacgcgacgtgggggcgccatttttctcgccgcgcagggaggactgactaacgtgggcggagctctagctcgcgtatyctgaggaggcggggttggcctaggcgaagatccggactctgggtgttttgctaccgtgaccgtttaggtgagtggaatagccaagaacatttcggcaaataacaaaaacaaaacgtgcggtcacttgtgagtggatgagaactgtgaggaaacag

SEQ ID NO: 895168 - DNA, 627 bp, Homo sapiens
ttcaacattcaacattcttaaagacaagaattttcaacccagaatttcatatccagccaaactaagctttataagcaaaggagaagtaaaatcctttacagataagcaaatgctgagagatgttgtcaccaccaggcctgccttacaagagatcctgaaggaagcactcaatatggaaaggaaaaaacccatacagcctctgcaaaaacataccaaattgtaaagaccatcaacactatgaagaagctgcatcaactracaggcaaaataaccagctagcatcataataacaggatcaaatttacacataacaatattaaccttaaatataaatgggctaaatgccccagttaaaagacacagactggcaaattggataaagagtcaagacccatcagtgtgctgtattcaggagacccatctcacttgcaaagtcacacataggctcaaaataaagggatggagaaagatttaccaagcaaatgaagagcaaaaaaaagcaggggttgcaatcctagtctctgataagacagactttaaaccaacaaagatcaaaaaagacaaagaagggtattacataatggtaaagggatcaatgcaaaaagaagagctaactatcctaaatat

SEQ ID NO: 895169 - DNA, 592 bp, Homo sapiens
atgtcaggttacccacaaagggaagcccatcagactaacagtggatctctcagcagaaactctacaagccagaagagagtgggggccaacattcaacattcaacattcttaaagacaagaattttcaacccagaatttcatatccagccaaactaagctttataagcaaaggagaagtaaaatcctttacagataagcaaatgctgagagatgttgtcaccaccaggcctgccttacaagagatcctgaaggaagcactcaatatggaaaggaaaaaacccatacagcctctgcaaaaacataccaaattgtaaagaccatcaacactatgaagaagctgcatcaactgacaggcaaaataaccagctagcatcataataacaggatcamatttacacataacaatattaaccttaaatataaatgggctaaatgccccagttaaaagacacagactggcaaattggataaagagtcaagacccatcagtgtgctgtattcaggagacccatctcacttgcaaagtcacacataggctcaaaataaagggatggagaaagatttaccaagcaaatgaagagcaaaaaaaagc

SEQ ID NO: 895170 - DNA, 635 bp, Homo sapiens
agattcacagccgaattctaccagaggtacaaagaggagatggtaccattccttctgaaactattccaaacattagagaaagagggactcctccctaactcattttaagaggccaacatcatcctgataccaaaacctgrcagaggcacaacaaaaaaagaaaatttcaggccaatatccctggtgaatatcactgggagaatcctcaataaaatactggcaattcaaatccagcagcacatcaaaaagcttatccaaaatgatcaagtcagcttcatccctgggattcaaggctggttcaacatatgcagatcaataaacataatccatcacataaacagaatcaatgacaaaaaccacatgattatctcaatatatgcagaaaaggagtttaataaaattcaacaacgcttcatgctaaaaactctcaatgaaataggtactgatggaacatatctcaaaatagtaagagttatttaggataaacacacagctaatatcatactaaatgggcaaaaactggaagcatcccctttgaaaactggcacaagacaaggatgccctccatcaccatttctattaaaaatagtatcggaagttttggccagggcaatcaggcaagagaaagaaataaa

SEQ ID NO: 895171 - DNA, 635 bp, Homo sapiens
agattcacagccgaattctaccagaggtacaaagaggagatggtaccattccttctgaaactattccaaacattagagaaagagggactcctccctaactcattttaagaggccaacatcatcctgataccaaaacctgacagaggcacaacaaaaaaagaaaatttcaggccaatatccctgrtgaatatcactgggagaatcctcaataaaatactggcaattcaaatccagcagcacatcaaaaagcttatccaaaatgatcaagtcagcttcatccctgggattcaaggctggttcaacatatgcagatcaataaacataatccatcacataaacagaatcaatgacaaaaaccacatgattatctcaatatatgcagaaaaggagtttaataaaattcaacaacgcttcatgctaaaaactctcaatgaaataggtactgatggaacatatctcaaaatagtaagagttatttaggataaacacacagctaatatcatactaaatgggcaaaaactggaagcatcccctttgaaaactggcacaagacaaggatgccctccatcaccatttctattaaaaatagtatcggaagttttggccagggcaatcaggcaagagaaagaaataaa

SEQ ID NO: 895172 - DNA, 671 bp, Homo sapiens
tacttaacaaactaatgcaggaacagaaaatcaaatactgcatgttctcacttttaagtgggagccaaaagatcaaaacacatggaaacatagatgggaacaccaaacactggggcctactggagggtagaaggtgggaagagggagaggatctggaaaaataactaatgggtactaggcctaatacatggtcaagaaaataatctgtacaacaaatcccccatgatatgagtttacctatatagcaaacctgcacgtgtacctttcaacttaaaagttaaaaaaaaaaaaaaaaaagaagaagttggaaaggggaagcaaatggattttyccctggagcttccagaagtaatgcagctctgccaattccttaattctggctttgtaaaactcatttcagacttctgacctacagaacaataagataatttgtgatgttttaagacattaagtttgtgataatttcgttacaacaggactaatataactaccaacattgctttcaataaatactgttaatgttcaacactattttctctacaaaggcttctatgacctattccttgtaatggatatgtcctatatcaagggtttcacaccagaacagtcttttttagtgcgttaattgtctgaagtacactctaaaccttttgagagaagggatcatcaga

SEQ ID NO: 895173 - DNA, 711 bp, Homo sapiens
aatgtgtctggcaacgtgtagcctctgtgcctttgttcctgttattcttctgatgggatgtccctcttcatttacaattttctccctaacatttgattatgacagttttcaagcacataaaaaatggaaaggatactagttgattcctattcttcactatctacatgctacaattagtattttatttgacttaacatgtgtattacatctatctttttttttttttttttttgaggcagcatctcactgtcacccacactggagtgcagtggtatgatcatggctgatacagcctcaaactcctggtttcaagcaatccctctgccccagtctcccaagtagtggaaactaaaggcaggcactatgacacctggctmttcttttttcttttatagaaacagggtcttgctatgttgcccaggctagtctagaactcctggcctcaagcaatcctcctgcctaggcctcccaaaacattgagattacatgtgtaagccactacacctggcctatccattcattaattcatacttgcttggggagtgtatttcaaagcaagtttcagacttcagtatacttctaacctaaccattgcagcatgcatgccacttatttatgtttttagatagaatttacatacaataaaatgaacaaatcttaaatgtatcatcttatgactgttaccaatgcttacaactgggtattccaaac

SEQ ID NO: 895174 - DNA, 608 bp, Homo sapiens
ccaaaggaaaagaagagaaatgaaattagtcttgctgctcttgcttccagctagggctgcattaaacggaaagtgtgctgagcggggcagagtggcaggagaggtggggaggggctgtgacagttagaggagggaggggttggcatagtccaggagggcagacatcagggttcaggcagaactgaacaacagtggagccagaacacaatattacttgtggaatgagatttgagagagtatcggatagactcctttactcaaaatataccccgcagcggggacaaaacattttggtggatacacacttgcatataagcaccatgttctctgccaatacacagaacatcaaaatacaaataaggttgttctttttttttccctgtaaattyggtgaagttggggctagatctgtctacttcatctggtattcccaggacctaatacatagtaggtccttaaaaagtatttgttgaatgaataaatgtatggataggagagatggaggacaatgtaagaatattgggaatggatgggaaaagaccctgaaggctcaaatcatctgtattcctgttcttggagccagcagagcctggacattggagttccca

SEQ ID NO: 895175 - DNA, 665 bp, Homo sapiens
taattaaggttaaatgagttcttaaggatggggttttaacctgataggattggtggccttataagaggaagatctctctctctctctttctccctctctctctcttcctctctctttcttcctctctctctctcttcctctctctctctcccccccctctctccctctctctccctctctcttcctctctctctcttttcctctycctctctcttcctctctctctctcttcctttctgtttcttcctctccctctccctctctcccccactccacccctgaggaaaggccatgtgagtacacagtgagaaggtgaccatctgcaagccagaaagagggcccttaccagaacccagcagtgtcagcaccctgatctcagacttccaactaccactgaaaaagacagaaaggagagaatatggtggaatgtggctctccctagacaattgtcagaaagctcagttggttctcagttttgggggattaggagcaattctgctggaggcagagggttgaaccagatgacctcttggattccttctctctgatgatgctgggaagacatttctcatggtcttgaaccacgagataaattgctgctgtttaagccacccagtctatggtattgtgttatggcagctggagctaagatgatatctattgtc

SEQ ID NO: 895176 - DNA, 505 bp, Homo sapiens
ccataccatatgtataatagcaactctttttaaatagctcaagctgctttaaagcactatacaactaattctcccaatgctactttgaaaaacccaagttaaactgcttacttaatcaaggcagtgggtacactagaactctcattcatatactaaatgttcttctgtatctccagttccasatactagtaaggtccactttcaattacacttccactattagaacagatgaaaagttaaacattcaatcagtcaggagaatgtgaaatattaccatggtttacccaactattataatctctcaggcactgagaactcagcataaagtggttattccatgatgtcagcatggaaacgtatccattatttagctatccattaattcagccaatcttcctttggatctacttatagctcaggctgctataggttgttctaaacctaacttggattgtcctagtgttagtttaggttatcttcattcttaaatctactgtttgattgt

SEQ ID NO: 895177 - DNA, 570 bp, Homo sapiens
cctaatccatcacataaagaaaaccaatgatgaaaccacatgattatctcaatagatgcagataaggccttcgataaaattcaacaccccattcatactaaaaactctcaataaaatagacattgatgcaacatatctcaraataataagagctatttatgacaaacccatagccaatattatatggagtgggcaaaagctggaagcattctctttgaaaactggcacaagacaaggatgccctctctcaccgctcctattcaacatagtattggaagttctggtcggggcagtcaggcaagagaaagaaataaagtgtattcaaagaggaagagaggaagtcaaattgtctctgtttgcagatgacataattgtatatttagaaaatcccattgtctcagcccaaaaactccttaagctgataagcaacttcagcaaagtctcaggatacaaaatcaatgtgcaaaaatcacaagcattcctctacaccaataatagacaagcagagagccaaatcatgagtgtactgccattcacaattgctacaaagagaataaaatacctacaaat

SEQ ID NO: 895178 - DNA, 640 bp, Homo sapiens
ggatataatgccagaacttaaatacaagagcgaaccatttatatttcatgttgattagtagcaagttgtaaaggtttttaaacaaggggatggtgtacacagtgctatgctttgggaaggttagcctggcagtgttatcccaaatggatttaatcttgggatggtaagaatcttgggatgaagatcttgtttacaagggagtttctgaaggtctgagttagaatggtgccaaaagaaataggacagagaggatakaaaatagatacattgtaaagataaaagctacatgactgaaagctggtaggctctggggaacaagcatcaaaaatggaggactgaataaattcattaatcttgcctcctccagaaaatgcacaaaatgggcagggcaggaggaggaggctggaaagattcacaaaagacaaacccacgaggacaaaatgggaagaggagataatagcaataaaactttggaagctggagaacagagagggaggtggtaaatagcttagcacaatccgaaaggttgaattctagccagcttaaggaaaccaaggagcaaccccaatttacaccaaaacaaacagtaatcagtaacactacaaataaactagaaaaaggggtaaaagtagtgtgaaaa

SEQ ID NO: 895179 - DNA, 659 bp, Homo sapiens
tgacataaagagctccatcaacaccaaaaatgtcacagtatcagtgttctcaatagttcctgtcacatgtttagtatttggaaatactcttcaagtacacttgtgaacacaatatggaaaagacgaggtcaacacacaggaggacaactagtatgggaaattgaagtgaagctctataatgttgtgtttaagagatatttcaatgatctaagcctgtattagtttaraagcttgttgtaatgttgcccttggaatgtaaagcacataattttgccagcatcctttcttttccctcctgtcaaacatttcaaagattagggtcgtgttggcagcttaaaagcctctgccaaagttaacagaatctctgttttttcttcaaaattgttcaagcaaaagatgcagatccttgataagtgtctttatctaatcccagcttgccttatcactattgactctctactttgtggaggagtacatcaatttcaagacgaccttaaatatactgcacaaaaagtacttcattgctttctatttttgatcagtgttacacaaaagattgatggactcattgagggggtaagttttgatgattatttcttagctcctgtgcttacagaacattctgatcacagctccccacagattaggtgagggtgaga

SEQ ID NO: 895180 - DNA, 636 bp, Homo sapiens
taaaaatcatgtcctagatagattatactggataattattgacatattttgcgtatgagctttcctaacttttgtcagtggtttctactgagctactgagaataagaaaagaatccagacaaagcaactttgaaaatataattttaggccgggcactgtgactcttacctgtaatcctagcactttgggaggctgaggtaggtggaccacctgaggtcgggagtttgagascagcctggccaacatggtgaaatctcatctctactaaaaatacaaaaattagcccggcatggtggtgcatgcctgtaatctcagctacttgggaggctgaggtgacagaacccgggaggtggaggttgcagtgagcagagatcatgccactgcattcagcctgggcaacagagtgagattccatctcagaaaaaaaaaagaaatatgatttattaaggtaaatatcatttgtaaaaacaatggtgtcattttaaactcaaggttaatatatttataggtctgaaaattattatatccataacccaatttataatctttccaaaccccacgacttactcctctcccatgctttccgagctcaagcaactctaccatttagatcccacacttaggaagccgacatta

SEQ ID NO: 895181 - DNA, 636 bp, Homo sapiens
taaaaatcatgtcctagatagattatactggataattattgacatattttgcgtatgagctttcctaacttttgtcagtggtttctactgagctactgagaataagaaaagaatccagacaaagcaactttgaaaatataattttaggccgggcactgtgactcttacctgtaatcctagcactttgggaggctgaggtaggtggaccacctgaggtcgggagtttgagagcagcctggccaacatggtgaaatctcatctctactaaaaatacaaaaattagcccggcatggtggtgcatgcctgtaatctcagctacttgggaggctgaggtgacagaacccgggaggtggaggttgcagtgagcagagatcaygccactgcattcagcctgggcaacagagtgagattccatctcagaaaaaaaaaagaaatatgatttattaaggtaaatatcatttgtaaaaacaatggtgtcattttaaactcaaggttaatatatttataggtctgaaaattattatatccataacccaatttataatctttccaaaccccacgacttactcctctcccatgctttccgagctcaagcaactctaccatttagatcccacacttaggaagccgacatta

SEQ ID NO: 895182 - DNA, 640 bp, Homo sapiens
agttcgtctgtgttatagcaaatattaacacttcattccattttattgctgtataacttcctatgtatggatataccacattttgatttctttatactttcttgactagtatgaatactgctgctatgaacattcttgtacaagcttttgtgtagacatatgttttcctttctcttgggcatatacatattgwagtgcaattgctgggttataaagataactacatgtttaatatttggaggaattgttaaactgttttccaaagtcatggccctgttttacaatcccgtcagcaatgtgctgatccaatttctccacatctttgccaagacttgttactgtcttttcattgtagtcatcctagcaagtagaaagcgctgtttgtggcatagatttgcatctacctaatgactaattgacttgagcaacttttcagtacttattgttgaattgtatatctccttgaagaaatgatcattcaaatcttttgctcattttaaaaattgggttgtctttttgtaactgagttgtgatagttctttatgcattttggatttcagtcccttattagatatgtcatttgcacatattttctgacattctgtgagttaccttttgactttcttgctggtgttctttg

SEQ ID NO: 895183 - DNA, 640 bp, Homo sapiens
agttcgtctgtgttatagcaaatattaacacttcattccattttattgctgtataacttcctatgtatggatataccacattttgatttctttatactttcttgactagtatgaatactgctgctatgaacattcttgtacaagcttttgtgtagacatatgttttcctttctcttgggcatatacatattgaagtgsaattgctgggttataaagataactacatgtttaatatttggaggaattgttaaactgttttccaaagtcatggccctgttttacaatcccgtcagcaatgtgctgatccaatttctccacatctttgccaagacttgttactgtcttttcattgtagtcatcctagcaagtagaaagcgctgtttgtggcatagatttgcatctacctaatgactaattgacttgagcaacttttcagtacttattgttgaattgtatatctccttgaagaaatgatcattcaaatcttttgctcattttaaaaattgggttgtctttttgtaactgagttgtgatagttctttatgcattttggatttcagtcccttattagatatgtcatttgcacatattttctgacattctgtgagttaccttttgactttcttgctggtgttctttg

SEQ ID NO: 895184 - DNA, 604 bp, Homo sapiens
caaaggattataaaacatgctgctataaagacacatccacacgtatgtttattgcatcactattcacaatagcaaagacttggaaccaacccaaatgtccaacaatgatagactggattaagaaaatgtggcacatatacaccatggaatactatgcagccataaaaaatgatgagttcatgtcctttgtagggacatggatgaagctggaaaccatcattctgagcaaactatggcaaggacaaaaaaccaaacacctcatgttctcactcataggtgggaattgaacaatgagaacacatggacacaggaaggggaacatcacacaccagggcctgttgtggggtgggaggagggagggatagcattaggagatatacctaatrttaaatgaagagttaatgggtgcagcacaccagcatggcacatgtatacatatgtaacaaacctgcacgttgtgcacatgtaccctaaaacttaaagtataataaaaaagtgaagatgtacacaaaaatacaaaaaagacaaaaaaatataacaaagaggttaagaacacaaattctggaatcagccttcctgggaatgaatcctagctttgctcctt

SEQ ID NO: 895185 - DNA, 581 bp, Homo sapiens
cctttttattcaggtagattcaattaaaatcacacacatttattttctttatatacctaacaccaaacagtattcaggataccaaagggaatatagagatatgaaattctaggttctgccattaagcagttttctgtttgtwtgtttgtttttgagatggagtctcactctgtcacccaggctggaatgcagtggtgcaatctcaactcactgcaacctctacctcccaggttccagtgaatctcctgcctcagactcccaagtacctgggattacaggcacatgtcacaacgccctgctaatttttgtatttttagtagagatggggtttcaccatgttggccaggctggtctcgaactcctgacctcaggtgatctgcctgccttgacctcccaaagtgctgggattacaagcatgagccactgtgcctggcctcattaagcagtttttaaaagttagttggagaataagcagatgtgtaaatgagctactctaggtgctatagtcaaggggaggaggagaaggagagaggtcagaggaaggagggtttatacctccttcagagagtcaatgttggctt

SEQ ID NO: 895186 - DNA, 581 bp, Homo sapiens
cctttttattcaggtagattcaattaaaatcacacacatttattttctttatatacctaacaccaaacagtattcaggataccaaagggaatatagagatatgaaattctaggttctgccattaagcagttttctgtttgtttgtttgtttttgagatggagtctcactctgtcacccaggctggaatgcagtggtgcaatctcarctcactgcaacctctacctcccaggttccagtgaatctcctgcctcagactcccaagtacctgggattacaggcacatgtcacaacgccctgctaatttttgtatttttagtagagatggggtttcaccatgttggccaggctggtctcgaactcctgacctcaggtgatctgcctgccttgacctcccaaagtgctgggattacaagcatgagccactgtgcctggcctcattaagcagtttttaaaagttagttggagaataagcagatgtgtaaatgagctactctaggtgctatagtcaaggggaggaggagaaggagagaggtcagaggaaggagggtttatacctccttcagagagtcaatgttggctt

SEQ ID NO: 895187 - DNA, 723 bp, Homo sapiens
aaaatgctttatagtggtttccaaggtagtgatatttaatttttttaatattttttattttatttttccgtaagttattgaggtacaggtggtatttggttacatgagtaaattctttagtagtgatttgtgagattttggtgcacccatcacctgagcagtacacactgcactatatttgtagtcttagatccctcagcccccttccactcttccccccaagtctccaaagtccgttgtatcattcgaatgcctttgcatcctcatagcttagctcccacatatcagtgagaacatacaatgtttgattttccattcctgagttacttcacttagaataatagtctccaatctcatctccattaaatgctgttaattcattcctttttatggctgagtagtattccattttgtgtatgtatatatatatatatacacacatacatacatacatacatacatatacacaccacagtttctttatccacttgttgattggtgggcattgggttggttccatgattttgcaattgtgaatcgtgctgctataaacatgcctgtgcaagtatcttattcgaataatkacttctttttctctgagtagatacccagttgtgggattgctggatcaaatggtagttctacttttagttctttaaggaatctccacactgttttccatagcagtggtactagcttacattcccaccatcagtgtagagt

SEQ ID NO: 895188 - DNA, 656 bp, Homo sapiens
cttttaaactataattacatgactctctaagtctgttccttgaaagggaagggagctgatgttctgctgttcatcactgtgtcatcgttccccccagctaccttttggtcgcagacacttttatatgggtgtgtcctttaaagtgcaacccactggcaactcagcattgctcatgatccctaaccattttaagtctcactttccagatctgggaagtgaaattgctcacttgactatgttgtagagaaaacactggctctggacaggaggaaacagcttggcattgagctctgcatgaataggatgtggggcactggaagtctttggaattcaatttatagttataaaaatggtacttgaggctgagtgcggttgctcacacctacaatcccakcacttcgggaggctgaggcaggtggactgctcaagtccaggagtttaagaccagtgtgagcaacttggtgaaaccctgtctctacccaaaatacaaaaattagccaggcatagtggtgcacacttgtggtcccagctattcgggaggctgagtggaaggcaggtttaggcttggaggtggaggttgaagtgagccgagatactgtatccagcctgggtgacggagccagacactgtcaaaaaaaaaggcacttcgactagaa

SEQ ID NO: 895189 - DNA, 562 bp, Homo sapiens
gtattcattcagcaatgtccaggtaacatagccatctatcctctttggtggaattatctttaaagatagaaatagctggatggctatcttggcttaatgtcattgacaattaaatgatcagatcaaattctcatattctaatattatgagcaacagtgttgttttgactaaaatttagattctcatcttggttttccttcaggaagaatgcagggtgtcttgagggcatgttatgtccaggtcacttatcagttctatttctctttgcaaaaaaaaagtggcatcctgataaattttaagtgaatttttaacctcatatgactattttacaggacaattatcygcatagcttttcctgtcattagacatctacatgcatctgaacccagattcctcctcattcattgtctttcctcctatcaaacaccagaccttctcttatgctctgatccctttccttatttatcactacaaatacagttcttttgttaatctatcttttcttaaaatatttccttctccctctctccttgattatgctcttgctctattatttcccaaa

SEQ ID NO: 895190 - DNA, 626 bp, Homo sapiens
atgtcaaacacttacactgatttgccctttgccttttcaaagtagaaataatcacttagaccctagaaataacagttgatcacccccaaacctctccatatggcttggcataaggactgctttttactggcacacagagtggttgctgctggcaggactcaacttctataactttcaaattaattgaaggcttgcatgtaccttcaccctctggacagtgaaggagaagtggactcagtatcggaagcctctctccactcaggagtccagtatcttgcctcctggaatatttaacattaaatcaactttcacagctacgtactgtcttcctcttcctttaactgttaccataccttcgacagtaggtcacaaatrtagtcattttcatcaatgttgttttgttacatattgatgaggaaaaaatatctggccaccgtctgcgtggagtttgcacattctccccatgtccacgtgcgctttctccaagtgcttgggcttccttccatatgccaaagctgtgtccattaggtgaactgttaggtttaaatagctctatcctgagtaagtgtgggtgtgagtgtggccagcaatgggatggtgttagtccacagtgggttcccaccttg

SEQ ID NO: 895191 - DNA, 624 bp, Homo sapiens
gaaattcttgtatgtgcctgggtccatttgtaggaacactatacattttatttatcttcctatatagtattataataaatatagcattacaatttataccgctattttgtagggcaaatatcctttcctaatttttattattgtcttttaaattcttggacttttcttctgccacatgcgttttataattaatttgcctagtttcaggaaaaattcttctttgattttgattaaaaatactttgattgatttgcttgctttttcacttaggatgccttagtaagatttgcttatacttccattgttggattcttcctgtccattttggcatcaaggtaagaatgacttataaaataagtctagtagccttccttcttgatctgtgttctgtgatagacagcattatctgtttcatgaaggcttgtaaaagtttctggacttgatttatcatcctttytgtggggatggattgggtagtggtagcagtcatggattgaggtgaagattttctattctagcggcaattatgataatttatatttttgtaaataaatgtcgtatattcatctaaatagcataaaaattgtgtcaagttttatttttttagtttgcaaactaaaaaat

SEQ ID NO: 895192 - DNA, 662 bp, Homo sapiens
gtccttagggaactttaagtctcattcaatagataaagcacaaaaagcaaataaatatagttacattttaatagtaaggaaaaacaaattggatataatggagatcttattgcccaacaacattctcaatttattttattaaacagcatcttgaattccccttggaaaatgtctccacacccagtcatatgaagtcagcctcaccctcaggtcaaggactaggttaggacagctaagcccaagcagcgtcttccatcattctaatgacatctttggctttcagagtgtggatcatgagatactgtaaatttttaagagagccatggcgatactcacatctggtgatactcattgttwtacatctatagtacactacaaacaacattggattgtgtgatgttccaaatgatatcatatgtttatgaagctggtttttcagttattattatgataaaaacaagtgctgcatgaaaaaattaatatgggacaagaaataagagtggaagtgtctaatctgattctaacatttgagaaattttgccgtagcccacacatcccattactaagtaattatgtttatttaaaaataaaagtgcttttaaaaatatatatgtgtattatatattcaagcagctactatgttgttagggtatggatactta

SEQ ID NO: 895193 - DNA, 597 bp, Homo sapiens
catcatcatagtaataacaataataagcaaatagcttcacaccataccctaaggataaactaagtcaaacagaaatatttaagtttgttttattggttaaagcagaatagtaaaatcattttaatgattttaacatgtcragtttaacaaagtgcatgataaatataaaaattagttgtttaaaaatcatcttcaaaatatgtatttcaaatcaataaggtcctctatattaatttgaaagtcactatgttttgatctgtttttaaatatttttctgtatggaacttttgaatgacatgtgaagaacatgtactgctaaaggatgtataaattaattcatcttgtaataaacagcaatcttattatttaaaacattaatgttaaaatgcattgctagctctgatatatttatttccacatatcaaattcattatttttacctatccaaataccacattctagtatctaaattggtaactcttatacccagatatgtgttgcacttaaaatatcttattgcttataaatatgtttcttcctttgcctgggttttttttgtttgtttgtttgtttgtgttttttttttttgggattctc

SEQ ID NO: 895194 - DNA, 624 bp, Homo sapiens
ccacttctaattctagcttttttgctattttcactacatctgcagtaacttcctccactgaagtcttgaacccctccaactcatccctgagagttggaatcaatttctttcaaactgctgttaatgtggatattttggcttcctcccatgagggacaaatgttcttaatgacatctaaagtgatgaatcctttctagaaggttttcagtgtactttacccagatccattagaggaatcactacttatggccgtgaaagcctaatgaaatgtgtttcttaaataataagactcagaagtctaacttattcctcttattccttgatccatgtgctacataatatatgttgtgtcagcaggcatgaatatattattctccatttaaatctctatcagaactcttgggtgactagttgcattgtcaatgggcagtaatatttagaaataaacctctttaakcagaaggtctcaacagtggcttaaaatattcagtaaaccttactgtaaacagatgtgctgtcattcagcctttattgttccatttgtagagcacaggtagagtagatttagcataatttttaagaaccctaggatttgcagaatgatatatgagcattggctctgac

SEQ ID NO: 895195 - DNA, 577 bp, Homo sapiens
cgtatcagtcatgtttaattatatagcagtatggcctcagtgaaatgaggccatactcatttcactgatatgtgaaatgagtatcctcagacatgatacagcctgacttccaattctggtttgacctaatctccttaccacgaaactaagaaaatgttctctgaaccgcattgctgttagatgggggaaaaaatattgtcaggctgcacgtggttgcccctgcctgtaagctatgattgcactactgcacttcagcctgaatgacagagcaagaccyagtttcttaaaaaacaaggaagtattgcctagagatacattttcaaaaccatagccactatctgtaggcagctactaagaatgtgaaatgtgactcctctgaattgagatgctctgtaagtgtaaaatacacacttgatttcaaagatttagtatgaaaaagatataaaataatttttatattaattatatgttgatataatttggatatattagattaaatgaaatatattagaattaatttcagtggggcatggtggctcctgcctgtaatctcagtgagttgggaggctgagacagg

SEQ ID NO: 895196 - DNA, 608 bp, Homo sapiens
ccactcacacatgtccatgtgttcttattgttcaactcctactatgaatgagaacgtgtggtgtttggttttctgttcctgtgttagtttgctgagaatgatggtttccagcttcttccatgtccctgcaaaggacatgaactcatccttttttatggctacataatattctatggtgtatatgtgccacgttttctttatcaagtctatcattgatgggcatttgggttggttccwagtctttgctattgtgaatagtactgcaataaacatatgtgtgcatgtctttatagtagaatgatttataatccttagagtatctacccaggaatggggttgctgggtcaaatggtatttctggttctagatccttcagaaattgccacactgtcttccacaatggttgaactaatttacactcccaccaacagtgtaaagcattcctatttctccacatcctctccagcatctgttgtttcctgacttttgagtgatcgccattctaactggtgtgagatggtatctcattgtggttttgatttgcatgtctctaatgaccagtaatgatgagctttttttcatatgtttgctggctgcataaatgtctt

SEQ ID NO: 895197 - DNA, 616 bp, Homo sapiens
caagaccattctaagcaagacagtgagatactgtctctccaaaaaaaatttttaagtagccagacaacagggtgcatgcctgtagtcccagctactaaggaggctaaggcaagaggacaacttgagcccaggagttcaaggctgcagtgagctattattatggcactgcactccagcctggatgacaaagtgggaccctatctctttaggaaagaagaagaccttaacataataaaagtcatatataaaaattccacagcaaacatgatactcaacagagaaagctttcctcctagttaaggracaagacaaataagtccactcttgccactactattcaacatggtactggatgttctggtagagcaactcaacaagaaaaaaaaaaaggaatacaaattgtaaaagaagacataatcttatatataaaaaaccctaaagagtacacacacacacacacacacacagtagaactaataaatttagtaaagttgcagaatacaaaatcagcactcaaaaattagttgcatttttatgcacaaataatgatcaatctgaaaaggaaatcaagaaaacaatcctatttactataaatcaaaaataaagaaatacttag

SEQ ID NO: 895198 - DNA, 610 bp, Homo sapiens
tcttgaattcattttggaatcttctgggcagctctgaaaaatcccaatgccaagacccaaccccattaaatcaggcacactaaatcagaatcttgggggatgaggctcaggcattcatattttttttaaaaagcaggaaagatctaaaattgacaccctaacatcacaattaaaagaactagagaagcaasagcaaacacattcaaaagctagcagaaggcaagaaataactaagatcagagcagaactgaaggaaatagagacacaaaaaacccttcaaaaaatcaatgaatccaggagctggttttttgaaaagatcaacaaaactgattgatagaccgctagcaagactaacaaagaagaaaagagagaagaatcaaatagatgcaaaaaaaaatgataaaggggatatcacaactgatcccacagaaatacaaactaccatcagagaatactataaacacctctatgcaaataaactagaaaatctagaagaaatggataagttcctggacacatacaccctcccaagactaaaccaggaagctgaatctctgaatagaccaatgataggctctgaaattgaggcaataattaatagcttaccaac

SEQ ID NO: 895199 - DNA, 610 bp, Homo sapiens
tcttgaattcattttggaatcttctgggcagctctgaaaaatcccaatgccaagacccaaccccattaaatcaggcacactaaatcagaatcttgggggatgaggctcaggcattcatattttttttaaaaagcaggaaagatctaaaattgacaccctaacatcacaattaaaagaactagagaagcaagagcaaacacattcaaaagctagcagaaggcaagaaataactaagatcagagcagaactgaaggaaatagagacacaaaaaaccmttcaaaaaatcaatgaatccaggagctggttttttgaaaagatcaacaaaactgattgatagaccgctagcaagactaacaaagaagaaaagagagaagaatcaaatagatgcaaaaaaaaatgataaaggggatatcacaactgatcccacagaaatacaaactaccatcagagaatactataaacacctctatgcaaataaactagaaaatctagaagaaatggataagttcctggacacatacaccctcccaagactaaaccaggaagctgaatctctgaatagaccaatgataggctctgaaattgaggcaataattaatagcttaccaac

SEQ ID NO: 895200 - DNA, 573 bp, Homo sapiens
agtacttctctagccacatctcttccctgttccctgagttcaccttgtcctcaattcagcatttagttcaccgaattaactgaaattgtatttccccactttcctatagggtctccaggatgtaagtcagagatcaggctgcggtgtagagccaccatttccttgacctaatttggactcttctcaaactcaccacaaagcaccttaggcataatgatcagttgcatgtaaggtgttgatgccctcactttggtcatcttaggccactaacatactagttcaaggagtagaaggaggtcagcaggtcagatatttgctggggcstattatggagggcttaggaactcactcatgccaaggaggcacaggataagaataaaagctcatttcctgccctggaagaaattgggttttagttgggaagacaagaccaataggcagtaaatggtcttggccttgcctgtgtctgaagcctcctctcttcaagattctgcttcaagattccttttatttaagcatccctctatatagctgaagattccaggaagaggaactggaataactggtgaggtc

SEQ ID NO: 895201 - DNA, 608 bp, Homo sapiens
agcggtgggagaattacttgaacccaggaggtggaggctgcagtgtgctgagtttgtgccactgcactccagcctgggtgacagaccaagattccatctcaaaaaaaaaaaaaaaagaatgattgtttttgctatatattcctataaaagaggcgttggcaaacttactgtgtaaagaggccagatagtaaatgttcttgactttataggccatgtggtcacctctgtcttaattacmaaagcagccataaaccataagtaaatgaatggttgtgactatgttccaataaaatgttatttgcaaagaaaaaaaaaatgaattttgcttggggccataatttgccaatttcttctctacaaaagaagtttagttaatagtaatttcccaaatggaattatttaaatagttgccattccaagtgtcttatttttgttcaaatttatgtttttctttatttgtttattttgaaataggagcacctaggctaaaatgtcaagaactcttaaattatatcatggatacagtgaaagattcatctaatggtgctatttacggagctgattgtagcaacatactactcaaagacattctttctgtgagaaaatac

SEQ ID NO: 895202 - DNA, 705 bp, Homo sapiens
caattattatccccatcttacagatgaggaaattgttggttagtaaaatgaagaaacctgccgaaagataacttcaaacagcaggtttgggatttgaacacaagcactttgactccagaaaccatgtaattaccccttctttatacctttttgctgtagaattattccaatcaccgaaacattcacattactgttattgagaactgtaggaggccaagtgttgcgttatacaaagaaaatgcaggcattaaaagaaacaacctatatcctgaagactygtagagttttagagctacatgatggttgttctttcgttcctccattggatccttcaacatttttgaacatctattattttaaaggccttgagctgggtgccagggatataaagatgaaagaacagaattcatatcttgatgagctcctaatctagtacaaggaagggagttacaatgcatggaacaaatagaatgcaggaaccagcatggccgcatctccagccccagtccaccccatggggacatggcaaacttgtctttctgaggtcagatacagcttcagaaatctttcaacacgaagctccagttgatatagtgtactactacctaagctatataatatagcctattcctcctaggctataaaactgtaagcatgttaccatactaaatcccactaattaattggattcagtatttgaaatgg

SEQ ID NO: 895203 - DNA, 648 bp, Homo sapiens
gggatatcttactcagtaatttaaatcttgatctgatttcagagaatgaattcagtagtcatccagatgtgcaaaccagcaacctgagaatcattcctttttgttgttgttgttgttgttaatgatactttaaattctggggtacatgtgcagaacgtgcaggttttttacataggtatacatgtgccatggtgttttgctgcacccatcaacccatcagctacattaggtaattctcctaatgctatccctccccttgtccccmacccccgacaggccccggtgtgtgatgctcccctccctgtgtccatgtgttctcattgttcaactcccacttatgagtgagaacatgcggtgtttggttttctgatcttctgttagtttgctgagaatgatggtttccagcttcatccatgtccctgccaaggacatgaactcatccctttttatcactgcatagtattccatggtgtatatatgtcacattttctttatccattctatcattgatgggcatttgggttggttacaagtctttgctattgtgaatattgctgcaataaacatatgtgtgcatgtgtctttatagtagaatgatttataatcctttgggtatatacccagtaatgggattactgggtcaaatga

SEQ ID NO: 895204 - DNA, 648 bp, Homo sapiens
gggatatcttactcagtaatttaaatcttgatctgatttcagagaatgaattcagtagtcatccagatgtgcaaaccagcaacctgagaatcattcctttttgttgttgttgttgttgttaatgatactttaaattctggggtacatgtgcagaacgtgcaggttttttacataggtatacatgtgccatggtgttttgctgcacccatcaacccatcagctacattaggtaattctcctaatgctatccctccccttgtccccaacccccgacaggccccggtgtgtgatgctcccctccctgtgtccatgtgttctcattgttcaactcccacttatgagtgagaacatgcggtgtttggttttctgatcttctgttagtttgctgasaatgatggtttccagcttcatccatgtccctgccaaggacatgaactcatccctttttatcactgcatagtattccatggtgtatatatgtcacattttctttatccattctatcattgatgggcatttgggttggttacaagtctttgctattgtgaatattgctgcaataaacatatgtgtgcatgtgtctttatagtagaatgatttataatcctttgggtatatacccagtaatgggattactgggtcaaatga

SEQ ID NO: 895205 - DNA, 640 bp, Homo sapiens
tataaatttccctcttaacaccactttagctgtgtcccagagattctggtacattgtctctctgttctcattggtttcaaagaacttatttatttctgccttcatttcgttattttcccagtagtcattcaggagcaggttaatcaatttccatgtagttgtgtgattttgagtgagtttcttaatcctgagttctaatttgattgcactgtggtctgagagactgttggttatgatttcagttcttttgcatttgctgaagagtgttttacttccaattatgtggtcaattttacaataagtatgatgtggtgctgagaagaatgtgtattctgttgatttgtggtgcagagttctgtagaggtctattaggtccccttgatccagagccgagytcaagtcttgaatatccttgttaattttttgtctcgttgatctgtctaatattgacagtggggttttaaaatctcccactattattgtgtgggagtctcagtctatttgtaggtctctaagaacttgctttatgaatctgggggtgctcctgtattgggtgcatatatatttaggatagttagctcttcttgttgcattgatccttttaccgttgtgtaatgcccttctttgtcttttttgatcc

SEQ ID NO: 895206 - DNA, 670 bp, Homo sapiens
ttcttctgttccatctccttcttatttgactgcttaacagaagatagtgtcactgaaggcatattactttgcacaaggagattgcgttttctttttctttctttctttctttcttttttttttttttgagacagagtcttgctgcratgcccaggctggagtgcaggggagtgatctcagctcactgcaacctctgttggccgggttcaagcaattctcctgcctcagccttctgagtagctgggactacaggcacgcaccagcacacctggctaatttttgtatttttagtagacacaaggtttcaccatgttggtcaggctggtctagaactcctgacctcaagtgatccgcctgcctcagcctcccacagtgctgaaattacaggcgtgagccaccatgcccggctgagattgcattttctaagcaacaagcaaaaagtgtaaaaccctgcaaaaacttagggaacctgaaaaaatagattttgcattttggtgagtgggggggtgcagaaaaaaacacattttgcttttttattttttttcatggtttaatgactacttaaaattaagacgagctcagacaaattcagtggaaccagctctcccttctatgttttacatggagagatcttatttatctgtaattctcagtacccagactagtgatt

SEQ ID NO: 895207 - DNA, 670 bp, Homo sapiens
ttcttctgttccatctccttcttatttgactgcttaacagaagatagtgtcactgaaggcatattactttgcacaaggagattgcgttttctttttctttctttctttctttcttttttttttttttgagacagagtcttgctgcaatgcccaggctggagtgcagkggagtgatctcagctcactgcaacctctgttggccgggttcaagcaattctcctgcctcagccttctgagtagctgggactacaggcacgcaccagcacacctggctaatttttgtatttttagtagacacaaggtttcaccatgttggtcaggctggtctagaactcctgacctcaagtgatccgcctgcctcagcctcccacagtgctgaaattacaggcgtgagccaccatgcccggctgagattgcattttctaagcaacaagcaaaaagtgtaaaaccctgcaaaaacttagggaacctgaaaaaatagattttgcattttggtgagtgggggggtgcagaaaaaaacacattttgcttttttattttttttcatggtttaatgactacttaaaattaagacgagctcagacaaattcagtggaaccagctctcccttctatgttttacatggagagatcttatttatctgtaattctcagtacccagactagtgatt

SEQ ID NO: 895208 - DNA, 670 bp, Homo sapiens
ttcttctgttccatctccttcttatttgactgcttaacagaagatagtgtcactgaaggcatattactttgcacaaggagattgcgttttctttttctttctttctttctttcttttttttttttttgagacagagtcttgctgcaatgcccaggctggagtgcaggggagtgatctcagctcactgcaacctctgwtggccgggttcaagcaattctcctgcctcagccttctgagtagctgggactacaggcacgcaccagcacacctggctaatttttgtatttttagtagacacaaggtttcaccatgttggtcaggctggtctagaactcctgacctcaagtgatccgcctgcctcagcctcccacagtgctgaaattacaggcgtgagccaccatgcccggctgagattgcattttctaagcaacaagcaaaaagtgtaaaaccctgcaaaaacttagggaacctgaaaaaatagattttgcattttggtgagtgggggggtgcagaaaaaaacacattttgcttttttattttttttcatggtttaatgactacttaaaattaagacgagctcagacaaattcagtggaaccagctctcccttctatgttttacatggagagatcttatttatctgtaattctcagtacccagactagtgatt

SEQ ID NO: 895209 - DNA, 624 bp, Homo sapiens
caataatatttttcaccccatatatttaagtgaaaaattgaagaactaaaaagtgaaataaaacaaatcaggagagctgggtctgagcatgctggatcatgcctgtaaacccagcacttaggggctgagctgggaggattacttgaggccagacttttgagaccagcctgagmaacacagaaagaccatgtctcaaaaaataaaataaaataaaataaaataagaggcatgggttttcttttctttcagattttttagccacagaaatgcataaagaccccgaacaaaaatgtgccagtctacaatataatcaaaatagttaagatttaaaagctaattcctttggcgtgggaatcaatatactagttgccataataactaattacctagataagactaaatataaatgatagttacaaaatgacagtccaagttatagttaaacaaatttagagattatcctttattgtcatctgtaatgccttgatacttgaggaaaattggaagagcctagaaggacaacacattcctagcttaaactaattaatgcaattcagcttcatccagtaaatactgagtgagtgatatgtgaaagggattccctgcataaagatgggaaataaa

SEQ ID NO: 895210 - DNA, 624 bp, Homo sapiens
caataatatttttcaccccatatatttaagtgaaaaattgaagaactaaaaagtgaaataaaacaaatcaggagagctgggtctgagcatgctggatcatgcctgtaaacccagcacttaggggctgagctgggaggattacttgaggccagacttttgagaccagcctgagcaacacagaaagaccatgtctcaaaaaataaaataaaataaaataaaataagaggcatgggttttcttttctttcagattttttagccacagaaatgcataaagrccccgaacaaaaatgtgccagtctacaatataatcaaaatagttaagatttaaaagctaattcctttggcgtgggaatcaatatactagttgccataataactaattacctagataagactaaatataaatgatagttacaaaatgacagtccaagttatagttaaacaaatttagagattatcctttattgtcatctgtaatgccttgatacttgaggaaaattggaagagcctagaaggacaacacattcctagcttaaactaattaatgcaattcagcttcatccagtaaatactgagtgagtgatatgtgaaagggattccctgcataaagatgggaaataaa

SEQ ID NO: 895211 - DNA, 616 bp, Homo sapiens
cttttttataataaaacacttgatataggtctactctcttaataattgtcaagtgtacaatacaatattattaactgtaagtgctatgttttacagcagatctctggaatatgcttatattgcacaactgaaactttataccatttaaccaactccccatttcccctccctcactctagaccctgataattaccattctattctctgattctatgagtttcaccttcttaggtaactcatgtaagtagaatcatgctgtattcatccttctgtgactgatttatttcactaagcataacatactctaggcttatccaggttgtcacaaatggcagaatttccttcttttaggctgagtaatattacattgtatgtatttaccatattttaactccattcttctgtctatggtcatttaggttgtttccatatcttggctgttgtaaataatgctgygattaatcttaatcttaggttaaacatcacttgaccattaaattcttcccccacctttgccatacacttctaaaacatcctgtggttcttgcccactgattatacttgcagttactggtctgtatgtagcaacacagatagggaaagaacttcagagtag

SEQ ID NO: 895212 - DNA, 599 bp, Homo sapiens
attttcctatttaattttgcctttgcttgtacacttacaaaggttttgccatactaagataagtaatggatattaacatcaaaacacaatatctaattaaaggattatatgtgctaagaaatctgggcaccagcaatatgccatgactgagaatctacatagttaacattagaatttctgaacaaggtcacaaaacacatttgattatttaatattgkcgtgcatgaaaacaatgtatcaataaaaacatatgccaatgtctgttgaacagtaaaactaaaagaacatgctaataggaaataaggattaggccaaatgtcaaaggatatgctttgaaagattcataaatagtgattaaaaatgtagattaaaataaaactatctgagtgtaatgttcctgtgttaaattatccaagaaaatttggtcaccattactctctacaatttaaattgattgttgtcaacatgtttgcataacattagaatacccacaaaatgttgaattactctgttttagaggttagtgtttcagttccttttctctaagaacatgcattaaaagacttaagtttttattgtttctgaatgactaattttta

SEQ ID NO: 895213 - DNA, 711 bp, Homo sapiens
tatccatgtgttctcattatttaattcctacttataagtgagaacatgttgtatttggttttccgttcttgcattagtttgctaaggataatggcaaccagctccatccatgtacctgcaaaggacatgatctcattctttgttatggctgcatagtatttcatagtgtatgtataccatgttttctttatccagcgtaccattgatgggcatttaagttgattccatgtgtttgctattgtgaatagtgctgcaacgaacattttctgcatatggctagccagttttcccagcaccatttatggaatagggagtcttttccccattggttgtttttgtcagctttgtcaaagattacatggtcataggtatatcatcttatatatcagctctctattctgttccatttatccatgtccctgttttagtacaagtaccatgctgctttggttatkgtagtcttgtaatatagtttgaagtcaagtaacatgatgcctccagttttgttgtttttgcttagtatagtcatggctattcaggctcttttttggttccaaactattttaaaatagtttttatttttctagttttgtgaagaatgttgttggtagtttgaaaggagcagcactggatctatagaatgctttgggcagtatgggcattttcatgatattgattcttcttatccatgtgcatggagtgtttttccat

SEQ ID NO: 895214 - DNA, 696 bp, Homo sapiens
taaaatagtttttatttttctagttttgtgaagaatgttgttggtagtttgaaaggagcagcactggatctatagaatgctttgggcagtatgggcattttcatgatattgattcttcttatccatgtgcatggagtgtttttccatttgtttgtgtcttctctcatttctttgagcagtgttctgtaattctcattgtagatatctttcacctccctggttagctgtatgcctccgtattttattctttctgtggcaattgtgaataggactgccttcttgattttttcttggcttggctgttgttagtgtataagaatgctagtgatttttgtacattgattttgtatcctgaaactgttgattgtttatcagctgaaaaaattttgggcggagactatgargttttctagatagagagtcatgtggtcttcaaacaaggatactttgacttcctctgttcttatttggataccctttatttctttctcttgcctgattgctttggctaggacttccaagagggcatccttgtcttgtgttggttttcaagaggaatgcttccagctttttccctttcagtatgatgttggctgtggttttgtcatagatgactcttattactttgtattacgtccctttaatacttagtttttgagaatttttaacatgaagggatgttgaattgtattgaaa

SEQ ID NO: 895215 - DNA, 617 bp, Homo sapiens
tgtgtattgttatttaagtgagattgaaattgttaaaaataacattaaatttactattttattcatagacaaaaaattatatggaaactggattttttaatactgttcttaaattactttctacacaccctaatgaagacaaataagagtatcagaataccgtgtgatatcatttgaatattttacccatccaaatctcatattgaattgtaatctccaatgttgaaggtggggtctggtgggaggtttttgggttatgggggcagatcccttatggcttggtgctgtactggtgttagtgagtgagttttgtaaaagctggttgttgtaaagtgtggcacttctccccgtcactctcactcttgctcctgttcttgccattttaagtgcctgcttccacttttycctctgccatgagtaaagcttctgagaccccccccccgcaaagaagctgagcagatgtgggcttcatgcttactgtaaagcctgaagaaccatgagccaattaaactctttttttttttttaataaattgcccagtctgaagtatttcttcatagcaatccaaaaatagattaacacagtgttataaagttagaaaaataggctcatctagg

SEQ ID NO: 895216 - DNA, 617 bp, Homo sapiens
tgtgtattgttatttaagtgagattgaaattgttaaaaataacattaaatttactattttattcatagacaaaaaattatatggaaactggattttttaatactgttcttaaattactttctacacaccctaatgaagacaaataagagtatcagaataccgtgtgatatcatttgaatattttacccatccaaatctcatattgaattgtaatctccaatgttgaaggtggggtctggtgggaggtttttgggttatgggggcagatcccttatggcttggtgctgtactggtgttagtgagtgagttttgtaaaagctggttgttgtaaagtgtggcacttctccccgtcactctcactcttgctcctgttcttgccattttaagtgcctgcttccactttttcctctgccatgagtaaagcttctgagaccccccccccgcaaagaagctgagcagatgtgggcwtcatgcttactgtaaagcctgaagaaccatgagccaattaaactctttttttttttttaataaattgcccagtctgaagtatttcttcatagcaatccaaaaatagattaacacagtgttataaagttagaaaaataggctcatctagg

SEQ ID NO: 895217 - DNA, 550 bp, Homo sapiens
gaatttgttaagtttgcaatggcacatttttaggtaagttgtagagatctgctaggctgttttccactgcgctcccctactttcgtctttcaatctaccattctcattgctttttcacagttttacagttaagcttcttgaaaagtgtctgaattacctctgttgactgctggcaagtttttattgctggtaaagtcatgggatatttttcatggttccatccatagggcagatttttttttcttctttttttttgagacagagtctcgctctgttgcccaggctggagtgcagtggtgcgatttcggctcactgcaagctctgcctcccgggttcacaccattctcctgcctcagtgtccagagtagctgggactacaggcacccrccactacgcccggcgaattttttgtgttttttagtagagacggggtttcaccatgttagccaggatagtcttgatctcctgaccttgtgacccacatagggcagatttttgtcctcgctgtgcttgaacttgtagatcctttggtttctctgaagacccctga

SEQ ID NO: 895218 - DNA, 636 bp, Homo sapiens
cagatttgttacacaggtatacacatgccatagtggtttgctgcatccatcagcctgtcttatttctcctattgctatccctcccctagcccccaactcccgagtaggccccggtgtatgatgatgttccccttcctgtgtccatatgttctcattgttcacctcccacttatgagtgagaacatgtggtgtttggttttctgttcctgtgttagtttgctgagaatgatggtttccaacttcatccatgtccctgcaaaggctggttcaacatacgcaaatcaataaatgtaatccatcacataaacagaaccaatgacaaaaaccacatgaagarcagaactgtttgtgtcccttttcggtgagtactttgttctaccttgtatcctacctacctctgtgtgtgcctgtcaccttcactggaggaaaagcccctgcagggcagaaactcatctaaatcttttattcatctatttgtaatcgttggtaaaggctcagtaactattgtactatcttcaatgaaatacttggtcttatttggtccttataatatctcaatgattttattaggcattgatagtccttcctgaaaactgataacacaagttttgagagaccatatgtttgtctatggct

SEQ ID NO: 895219 - DNA, 636 bp, Homo sapiens
cagatttgttacacaggtatacacatgccatagtggtttgctgcatccatcagcctgtcttatttctcctattgctatccctcccctagcccccaactcccgagtaggccccggtgtatgatgatgttccccttcctgtgtccatatgttctcattgttcacctcccacttatgagtgagaacatgtggtgtttggttttctgttcctgtgttagtttgctgagaatgatggtttccaacttcatccatgtccctgcaaaggctggttcaacatacgcaaatcaataaatgtaatccatcacataaacagaaccaatgacaaaaaccacatgaagaacagaactgtttgtgtcccttttcrgtgagtactttgttctaccttgtatcctacctacctctgtgtgtgcctgtcaccttcactggaggaaaagcccctgcagggcagaaactcatctaaatcttttattcatctatttgtaatcgttggtaaaggctcagtaactattgtactatcttcaatgaaatacttggtcttatttggtccttataatatctcaatgattttattaggcattgatagtccttcctgaaaactgataacacaagttttgagagaccatatgtttgtctatggct

SEQ ID NO: 895220 - DNA, 472 bp, Homo sapiens
ttccagtgagtgggctatttctaataagattagtagttttttcattcatatttagatttctggattttcaaggtcatgttttagtttatatttgaaatgtgctggaggaaattagggaaacacctcattttagaggtgaattctgcaggccaggaactgcatacaccaaggtgttctgacagcccttccagacctggttcaggtagccccattccacagcctttctaggctgcagccagcacctaccacttcctcagtctcccccttggttaaatgggtcacagtcagtccaggttcttgagacagaaatccygggcatctgttatccttaatactttccttttcctctcagccaatcagcagccagattctataaatctactgcctcaaagttatctctttcattcctccaatctcaacacctttgcagccctcatcaatgataacctgagctatttcaagaactggttct

SEQ ID NO: 895221 - DNA, 589 bp, Homo sapiens
cagtgcaattcaccaccataaagaattaaaagagactaatcatatagtcatcttataagagggtaagggagacacctgataaaatgtgtaactgttattcctgattaagctcctagcaaactaagaactgaatggaacttccctgacttgataaggccatctactactgcagctactatgaaacttaacagtgatgcactggaagcattctctttaacatcaggaacagcacaaggctgtccaccatctctgctactctactctgtaatggatatcyttagccagtacattaaggcaaaaagaaataaagaacataaaaattggaaaggaagaaatgaaactgacattatttgaatttgatataatctacaaagatctaaaagaatgtatagcaatgtgttagaatttataagaatacaaagattgctagttataatattacagtggactgaatgtttatgtcccttcacaattcatctggtgaaatcctagcccccaaggtaattgtgtaagaaggtggggactttgggaagtgattaggtcatggaggcacaaccttcatgaatgagatgaattcccttattaaact

SEQ ID NO: 895222 - DNA, 576 bp, Homo sapiens
ggaggtgtttatgtgttgaatatgtactgacaatcagtatgggaaagaattgagaccactaactgacactcctatctactaataaagattgttatccttcttttttttttttttttggaaacaaattttgtgctctgtctcccaggctggagtacagtggtgcgatctcagctaactgcaacctccgcctccctggttcaagtgattcttctgcctcagcctcccaagtaggtgggactacaggcatgtgccaccatgcccggataatttttgtatttttagtatagacagggtttcacaatattggccaggctggtctcgaactcctgacttcgtgatccacccgcctcgacctcccaaagtgctaggattacaggtgcgagccagcgcacctggcctatccttcttttttggktttctatttttttcttctcttctagtcccaattcttttttttcttctactactctttccaactctaatctgttctcctgtatatagtcaccttttgattaactatgacaattaaaaaccccaggctatccttaccgatcgttatcacacatattgctaaac

SEQ ID NO: 895223 - DNA, 577 bp, Homo sapiens
aaggaaagttatttccatcatgaatattgattttactttatgccgtgcaactgaatatagtttagaaaagcatgtttttcttaaaccttcatcattattgcatttttctaggcaggtaacacactaaggagtgtctacaggagacaagaatgaaaaatcaatggattgagagttctttccacattactgcatagtaaatagcctggtaataagacttyaatagcttggtaataaggatttacacaaataaaaaacaaaatggtttaatttaaatgtgaaacattgtaagccttttaaaaaaacaaaacttcataagcatacttagtagaaaaaggaggggacaagagtataccagacatagaaatgatgatcttcaccagcggttttgactttggcttagaaagttattctcatccttgtttttttccttatggaatgacttcaagccatacagttcacaactattctgcggtggtggtgtctccattacctcaatataagtgggatgtattttgtatgtatacatcatgctatctttgaatacaaattaagtgttcaaacaattctaggagtaatt

SEQ ID NO: 895224 - DNA, 577 bp, Homo sapiens
aaggaaagttatttccatcatgaatattgattttactttatgccgtgcaactgaatatagtttagaaaagcatgtttttcttaaaccttcatcattattgcatttttctaggcaggtaacacactaaggagtgtctacaggagacaagaatgaaaaatcaatggattgagagttctttccacattactgcatagtaaatagcctggtaataagacttcaatagcttggtaataaggatttacacaaataaaaaacaaaatggtttaatttaaatgtgaaacattgtaagccttttaaaaaaacaaaacttcataagcatacttagtagaaaaaggaggggacaagagtataccagacatagaaatgatgatcttyaccagcggttttgactttggcttagaaagttattctcatccttgtttttttccttatggaatgacttcaagccatacagttcacaactattctgcggtggtggtgtctccattacctcaatataagtgggatgtattttgtatgtatacatcatgctatctttgaatacaaattaagtgttcaaacaattctaggagtaatt

SEQ ID NO: 895225 - DNA, 627 bp, Homo sapiens
ttctaaaacatgatttatttatttcaataaagcaagaaaattataccagtaattctagtcatataaatttcatgatctcttcaagagccattgttttccaaggcaaaacttcatgttgcaaccagttttttcctgactcttgcttcaaactcacgtgagccccaggttccctgaacagtccttttgtggctgtagctaggaatcaccagggagtcacgatccagtagcttacagggtgacttcttcctctgggcatgactgacccatcctgtcatctggtcacctagatactgcccagatagaaccaccctgcaggccgggtcactcagagcaccccagccctgmacagctgctccttcggatggctccctccttcctggtgccatgctactttgactggatcatgcaggccctccaggcattaccaccacaccactgatgcagtggagtcctggagctgacaaagttgccaggtattcttttttcttttcttttttttttttcttttaccaattatttgattttgttttatttttgaggcaaggtctggctctgttgcccgagctggatttcaatggtgtgatcatggctcactgcaacctctgcctcctgggttcaagcaatctt

SEQ ID NO: 895226 - DNA, 618 bp, Homo sapiens
agagtgaggacgaggtccaggacccctggctccttctccagtggtctgcctcctcaggccagaatttatatgggctctatgcttcgaggttgcatttgtggccttaggctgccaagccttttccagttccttgaaggaactgacctaacaaacaaacaaaaactattaaatgcagtaagtcatttatctgccaaaacaatgtggtgaaagagagatccaataaaaagaggggctgatgagcagatcagagtatagagatctgagcaccctgtacactctcccaagtgggcaactgaggttcttttgggccctgctggcatctccccattggctttctgttatccttcattgcaggacctttgtgtatgggcagcaagactgatggcttcytgaacagtgtgattggaaaaattctgcctttatctttaacacagttatgtccaaaataatttcctcaatcagactctcaattccaccattcaagacacagtcaggataaacactgcccctcaattatcctgcccatggggcaagaaaaagttttcagactcacttttgaaaggtggcctgcctattggtggctttccttcactgcatgtgccaagtaatcctacaaag

SEQ ID NO: 895227 - DNA, 618 bp, Homo sapiens
aacttcattctttctgcatgttgatatccaattttccaagtaccatgtattgaagagactatactttccccattgcatattcttgtcacccttgttgaagattagttgaccataaatgtgatatttctgggccctctattctgttccattgagctatatgtctgtttcatgtcagtgccatgctgtcttaattactgtagctttgtaatattaaaatcaggaagtgtggtgcttgtagttttcagtgtataaatccttcagtttcttartttggtttatttcattccttctgatgctattgtaaataggattgttttcataattccctttttggttagctttttggtagtgtattgaaatacaaccgatttttgtacgttgattttgtatgctgcaactttactggatttgtttattggttctaacaatttttgtggagtctttaagggttttctatatttaaaatccagtcattggcaaacagggaccattttacttcttatttttcattttagacacttttatttctttttcttgcctaattgttctagctaggacttccagccccatgttcagtagaagtggaaagagcaggcatctatgtgatcacccttctag

SEQ ID NO: 895228 - DNA, 646 bp, Homo sapiens
gaggggtgagggatagcattaggagatatacctaatgctaaatgatgagttaatgggtgcagcacaacagcatggcacatgtatacatatgtaactaacctgaacattgtgcacatgtatcctaaaacttaaagtataataataataatrataataataataaaaataaaataaaagaactagagaagcaagagcaaacaaattcaaaagctagcagaagacaaggaataactaagatcagagcagaactgaaggagataaagacacaaaaaaccctaaaaaatcaatgaacccaggatctggttatttgaaaagatgaacataatagacgtctagctagaccaataaagaagaaaagagagaagaatcaaagagacacaacaaaaaatggtaaagggaatatcaccactgatcccatagaaatacaagctaccatcacagaatactataaacacctatatgcaagtaagttagaaaatctagaagaaatggataaattcctggatacatacacccttccaaaactaaaccaggaagaagttgaatccctgaatagacaaataacaagttctgaaattgaaacagtaattaatagcctatcaaccaaaaaaagcccaggaccaggtggactcacagacgaattcta

SEQ ID NO: 895229 - DNA, 614 bp, Homo sapiens
gtgccacagtcttttgctgcacccatcaacccgtcatctacattaggtattcctcctaatgctatccctcccctagcccccaacccccgacaggccctggtgtgtgatattcccctccctgtgtccatgtgctctcattgttcaactcccacttatcagtgagaacatacggtgtttggttttctgttcttgtgttagtttgctgagaatgatggtttccagcttcatccatgtccctgcaaaggacatgaactcatttatgtctgcatagtattccgtggtrtatatgtgccacatttcctttatccagtctatcactgatggacatgtgggttggttccaagtctttgctattgtgaacagtgctacaataaacatatatgtgcatatgtctttgtagtagaatgatttataatcctttgggtatatacccagtaatgggattactgggtcaaatggtatttctggttctagatccttgaggaatcgccacactgtctcccacaatgactgaactaatttacactcccaccaacagtgtaaaagcattccttggccaggtgcagttgctcacacctgtaatcccagcactttgggaggctgaggcaggtgga

SEQ ID NO: 895230 - DNA, 629 bp, Homo sapiens
tttttattattattataccctaagttttagggtacatgtgcacaacgtgcaggttagttacatatgtattcatgtgccatgttggtgtgctgcacccattaacttgtcatttaacattaggtatatctcctaatgctatccctccccactcctcccaccccgcaacagtccccagtgtgtgatgttccccttcctgcrtccatgtgttctcattgttcagttcccacctatgagtgagaacatgcggtgtttggttttttgtccttgcgatagtctgatgagaatgatggtttccagcttcctccatgtccctacaaaggacatgaactcatcattttttatggctgcatagtattccatggtgtatatgtgccacattttctttttcttggtcaatttcatctccagctcaccccaccccacccccagtaaatcaatgtattaattttaacaatctcttttatgttttctgttgtctttcctatccctttctcactgccaacttgggtgtgcaacatctcttacctaagactactgccgtaacttcctaatggtctcactcactctgagttgccttcctgtgtattcttcagtgtacaggttgagtatccctgttacaaaatgctagg

SEQ ID NO: 895231 - DNA, 648 bp, Homo sapiens
tcttgggcatgaaattttggccagatcttatgtccagaatggtatttcctaggttattgtccagggtttttatagttttaggtgttacatttaaacctttaatccatcttgggttgatttttatatgtggtgtaaggaaggcgtccagtttcaatygtctgcagatggctagccagttatcccaggaacatttattgaataaggagtcctttccccattgctagttttttgttgattttgtctcaggtcagatggttatagatatgcagcattatttctcagctctctattctgttccactggtgtgtgtgtgtgtgtgtgtgtgtgtgtgtgtttaccggtaccatgctgttttggttactgtagccttataatatagtttgaagtcaagtaatgtaatgtctccagctttgttctttttgcttaggattgccttggccattcagggtcttttttggtttcatctgaattttagaatatttttttctaattctgtgaagaatgtcattggtagtttgataggaatagcattgaatctgtaaattgctttgagcggtatggccattttaacaatattgatttttcctatctatgaacatggaatgtttttccatttgtttgtgtaatctctgatttctttgagcagtg

SEQ ID NO: 895232 - DNA, 615 bp, Homo sapiens
catatgtgtaagtttagccataaagagatatacactattagggccaggtgtggtggctcgtgcctgtaatcccagcactttggaagggcgaggagggaggatcacctgaggtcaggagctcgagaccagcctggccaacaaggtgaaaccctgtctctactaaaaatacaaaaattagccaggtttgatggtgggcatctgtaatcccagctacccaggaagctgaggcagagtaatcgcttgaaccaggaggcagaggttgcagtaagccaagatcgcgccactgcactccagcytgagcaagagggacactcggtctcaaaaaaagaaagaaagaaagaaagaaagaaagaaaaagatgtatatactattaggacatgcaaagtgtatcccatagccttaatagaaacatcactttcaaaattacttgtccttgtagtaagttttaactctcaaaatcaggagagagttccattcttcatgtgttctgaagatagtaagaaactgccacaaaaacacagctccaaatagcactatctttcctgaggcaacgttttactcagttgttaaacgttcccaccagaaatcttttggaaagtcttaaaacatatttta

SEQ ID NO: 895233 - DNA, 645 bp, Homo sapiens
cttcctgggctactgtgtgcaggctccaaactcttcctggatgacctgctgattaggagtaaacacctgggtccttccgagggattcctggcagatctaccaagtccccagtctccttacaatgaggaagggaaagagagaacacaaawgagggtgtaacacataggaatggccagatatgaatgtaaaggaggaaagattattagaatttatttcctccaacaaacttcaaattaggcgagggaatttgtcaataaaattgtattcacaagtcttaaacttctaatgtctatgtatgcagttgagaagagtcttttatgatactgtatctgaagtaattttataagattgctggtgagttgcaaaaaaactatagcactgagtaatgcttatcaattcgttacagccccaaacttttaataattttataccacgatcagggacaacaataaaatatatccctccctaccttgtacacaacaatgctttcacaggtaactgctggtgaatttcaactacgacatgtattctgatgatttttactttaatactgaaaagaatttcacttaaaatagataaataattacacattgaaaaaggagaaaaaaaaagagctaattctctcatcaaaagtccatgataagg

SEQ ID NO: 895234 - DNA, 639 bp, Homo sapiens
ctttcttaaaaaggtggaataaaaaatgacttcataataaagaaatataaaataataaagaaaacagggggaaactaaaataatttgtcaaacatttctatttccttttttattctatttcagcctaacttctgttcttctattcctcacctacagcaattttcctaatgaaatttcacacctgtccatttctgacaccatttaacgtttagtaataatgcaagtgttaacaatgtattttgggtatatgtttctgtgtggcctgcattgcaagtagattcataaagaatttcagaaatcccaattctatttttcttttccattttattcagtttggttttggtgtagaaaaagacttaagcagtgtacctaattttaatttccaaaattgattttctactctattttctgctgcttgcttaggaaacaaaatttaccaagtctatctcctaaatgattaacctcagcaacctttggcaagcaaactattytaagagaccctgggactgtgttatgctccctctctttgcccaaatgcatttttaaaaaaagttagaaatcaaaggaaaaatgtggaagtgaaaaagaagccaagtggttaaaaaaaaatagaaagaaagtatcactaaggatcataca

SEQ ID NO: 895235 - DNA, 630 bp, Homo sapiens
tggtgggtgcctgtaatcccagctactcaggaggctgaggcagtagaattgcttgaaccagggagtcggaggttgtagtgagccgagatcgtgccacttcactccagcctggcaacagagggagactccatctcaaaaaaaaaaagaaaaagaaaaaaaaaaaagagaaggaaatgcagcyaataagagtacctcagaaggctgtagtaagaattaaatgagatggtatgtgtaaaatacatgtaataatgctcgagtaaactgcttaatagtcattcctacaactagtcacaattttacagtggttttgtgaccaactatcttgccctccagcctactcctgccttccttcactttggccatttctctgatcctgccctttgtctactttccctgaccttataacagttgtgctttttgctctgccagggtgggcagcagttctgggacctcagaacaggtgctactgtccattttgctgcttgattcaccttccaggtgacagaggggaactgcagcagggctgcgttcagcatggacaaacacctgtcctctctgtcaccacagctaggcagacactggcgctgagtcatgctgctgctcacaactgaggagctttgagagactcac

SEQ ID NO: 895236 - DNA, 504 bp, Homo sapiens
gctttgttataaaatttagatctgtgactcatcctgaattaatttttatgtacggtgtgaggtaggaattaaggtgcatttttttctatgccaatatctaattgcttcagcaccattgattaaaaagaacgtcatttatccacttaattatgggtgtctttgccatagatcaaaggactgtatgtgagggtctgtttctgagctctctattttattccattggyctttttgtctatttttgggctaaaactatgctgtctaaattattgctaagtagtaaatcttgaaatcaggttgtttaaatcctccaactttgtctttaagttttcttgtatttttaaagatcctttgaatttccatatgaattttagaattgacttgtcaatttccccaaaataaactgctaaaattttgaatggaatcatattgaatttatagataaattttgaaaatcaatgccattttaacaaacttgagcttctcagttcatgaacataggatatc

SEQ ID NO: 895237 - DNA, 659 bp, Homo sapiens
caaaattgcatctaaaagagcaactgcaagtggagtcataatatggttaaacttgtgataatccatggttattctccctgatccatctgttttttcacaggctaaataggcaagctgcatgaagatattgtgggaatcactatccctgactctttcaagtccttgatgatggcattaactgcagtcctttcaggaatgtargagtgcttctagtttactagctccaggaatgacttccacttggccttttccttccataataagcctcactccacaggtcaaggagcaaatgcgtggattttgtcagttgacaggttatgtctattccaactgcatactctggaaccagggaaataaacacaaggattctgcaacccattggacccctgtgagatgaaccagaacctaaaattacattgatcactttgatagttaattcagtgtgtcaccttggctaggccatggtacccacatattgggccaaacacttagatgtttctacgaatgcatttttttagagaaaattaacatttaaatcagtagactttgattaaagcaaattatcccgcataatatgggaagtcctcatccaatcagttgaaggcttcaagtgaaaaaatactgagctcttctgaaaaaagggaattcagccagcagac

SEQ ID NO: 895238 - DNA, 591 bp, Homo sapiens
tttatgaattatatcagaataatattcctcaaaatagttgtctgcattttaaggttatgcatagctttatcccatacataagaataacgaacagccacaagaaataagaaaagttcattggatgaaaggaaaaatcctttctgctcaatctaataaatccccaaattcttttagacagggaccttgggttattacattttcttcttcagatagctcctttgtgcagccttgargaagggaaataaatcagttaactgaatgggtatttaatctctttctaagttcaagaaaaagaggagattaggattcatggttacttcactgaaaagctcttggccatataaatttgtaatttcctggggatggtgccatttaggtattattagatgaaaataggtaagtcaactaataaaaggtggctttaaaaacttttaatttcagaagcgaaatactatcttcattaaatttcttatttcagttattaattaagcaaaaattatactacataaaataagtgtattttttctcagtttattagttttcttctaccactaatttaccagcagttcaatcacaccagaggaaaggtgg

SEQ ID NO: 895239 - DNA, 665 bp, Homo sapiens
cattagagaaatgcaactcaaaaccacaatgagataccatctcatgcctgttagaatggtgatcattaaaaagtcaggaaacaacagatgctggagaggatgtggagaaataggaatgcttttccactgttggtgggagtgtaaattaattcaaccgttgtggaagacagtgtggcagtttctcaaggatctagaaccaaaaataccatttgacccagcaatcccattactgggtgtatacccaaaggattataaatcattctactataaagacayatgcacacgtatgtttattgcagcacaatacacaatagaaaagacttggaaccaacccaaaagtccatcaatgatagaatggataaagaaaatgtggcacagatactccatggaatactaagcagccataaaaaaggatgagttcatgtcctttgcagggacatggatgaagctggaaaccatcattctcagcaaactaacacaggaacagaaaaccaaacactgcatgttctcactcttaactgggagttgaacaatgagaacacaggaacagaaaaccaaacactgcatgttctcactcttaagtgggagttgaacaatgggaacacatggacacacagaggggaacatcacgcacgggagcctgtttgggggtgggggtttagggg

SEQ ID NO: 895240 - DNA, 665 bp, Homo sapiens
cattagagaaatgcaactcaaaaccacaatgagataccatctcatgcctgttagaatggtgatcattaaaaagtcaggaaacaacagatgctggagaggatgtggagaaataggaatgcttttccactgttggtgggagtgtaaattaattcaaccgttgtggaagacagtgtggcagtttctcaaggatctagaaccaaaaataccatttgacccagcaatcccattactgggtgtatacccaaaggattataaatcattctactataaagacatatgcacacgtaygtttattgcagcacaatacacaatagaaaagacttggaaccaacccaaaagtccatcaatgatagaatggataaagaaaatgtggcacagatactccatggaatactaagcagccataaaaaaggatgagttcatgtcctttgcagggacatggatgaagctggaaaccatcattctcagcaaactaacacaggaacagaaaaccaaacactgcatgttctcactcttaactgggagttgaacaatgagaacacaggaacagaaaaccaaacactgcatgttctcactcttaagtgggagttgaacaatgggaacacatggacacacagaggggaacatcacgcacgggagcctgtttgggggtgggggtttagggg

SEQ ID NO: 895241 - DNA, 665 bp, Homo sapiens
cattagagaaatgcaactcaaaaccacaatgagataccatctcatgcctgttagaatggtgatcattaaaaagtcaggaaacaacagatgctggagaggatgtggagaaataggaatgcttttccactgttggtgggagtgtaaattaattcaaccgttgtggaagacagtgtggcagtttctcaaggatctagaaccaaaaataccatttgacccagcaatcccattactgggtgtatacccaaaggattataaatcattctactataaagacatatgcacacgtatgtttattgcagcacwatacacaatagaaaagacttggaaccaacccaaaagtccatcaatgatagaatggataaagaaaatgtggcacagatactccatggaatactaagcagccataaaaaaggatgagttcatgtcctttgcagggacatggatgaagctggaaaccatcattctcagcaaactaacacaggaacagaaaaccaaacactgcatgttctcactcttaactgggagttgaacaatgagaacacaggaacagaaaaccaaacactgcatgttctcactcttaagtgggagttgaacaatgggaacacatggacacacagaggggaacatcacgcacgggagcctgtttgggggtgggggtttagggg

SEQ ID NO: 895242 - DNA, 665 bp, Homo sapiens
cattagagaaatgcaactcaaaaccacaatgagataccatctcatgcctgttagaatggtgatcattaaaaagtcaggaaacaacagatgctggagaggatgtggagaaataggaatgcttttccactgttggtgggagtgtaaattaattcaaccgttgtggaagacagtgtggcagtttctcaaggatctagaaccaaaaataccatttgacccagcaatcccattactgggtgtatacccaaaggattataaatcattctactataaagacatatgcacacgtatgtttattgcagcacaatwcacaatagaaaagacttggaaccaacccaaaagtccatcaatgatagaatggataaagaaaatgtggcacagatactccatggaatactaagcagccataaaaaaggatgagttcatgtcctttgcagggacatggatgaagctggaaaccatcattctcagcaaactaacacaggaacagaaaaccaaacactgcatgttctcactcttaactgggagttgaacaatgagaacacaggaacagaaaaccaaacactgcatgttctcactcttaagtgggagttgaacaatgggaacacatggacacacagaggggaacatcacgcacgggagcctgtttgggggtgggggtttagggg

SEQ ID NO: 895243 - DNA, 586 bp, Homo sapiens
gagaagaaggcagtgctattggtaagaaaggattgagaaggtgcaaaaatagtcgttcctagcaacttgtaatttttgtttaaaattgcattttgttttttttttttaaattatgaaagcgttacttaatcattattgraaactatattttttttttttctgagacagggtcttcttgctctgttgcccaggctggagtgcggtgacacatcatagctcactgcagccttgaactcctgggctgaagcaatcctctgtcctcagcctcctgagtagttaggaccacaagcatgtgctaccacatctgactaatttttaaactcactatattacctatactgatcttaaactcctggcttcaaccaatcctcctgccttggcctcctaaagagttgggattacagacatgagctaccacgcccagtcaaaaactcttaaaagacaaaaatattaaaatcaaccataacctttcaatgcagaagtgatggatatcaaaattttaaaataattatattttgaagttttaatatttgggatactaaatacatacactgcactaataattggactcctaccaaagagaccg

SEQ ID NO: 895244 - DNA, 594 bp, Homo sapiens
attcttctttaacttaaaactaatacacttcaattgtttaagatttgggaaatatgaaaaagtcaaaacaagaagattaaattcacccataattccccgcccagaggtagccaatgataacattttaatggatagtttctttgcagtcttttctgtgcagataggtattttttacattatrcaaaataaaataggttatatcatacatgatattttaacctatttttttcttataaggccattaaatgggtcttctgcagtgtatttttatatagctgcctggtattctcacatgtattcctacaattcagaaatttagcacaggacggaggcttcatttcatattaacttttctagtaacgagaagaatcatcagccccagatttaatttctagttttactaactagttgtgtgtttggggacaaggtttcctcatctgagaagtaaaggattgcatggttaatttcttgaatgtccaggaggagtatctgacacataaatcatataatgcacagttgcctacctgctcaactttgcctccatgtctgctccatatgagagggatttcctcttccccttcatcctttgatttg

SEQ ID NO: 895245 - DNA, 629 bp, Homo sapiens
ggtgggtgcctgtaatcccagctactcaggaggctgaggcagtagaattgcttgaaccagggagtcggaggttgtagtgagccgagatcgtgccacttcactccagcctggcaacagagggagactccatctcaaaaaaaaaaaagaaaagaaaaaaaaaaaagagaaggaaatgcagcyaataagagtacctcagaaggctgtagtaagaattaaatgagatggtatgtgtaaaatacatgtaataatgctcgagtaaactgcttaatagtcattcctacactagtcacaattttacagtggttttgtgaccaactatcttgccctccagcatactcctgccttcgttcactttgcccatttctctgatcctgcccttggtctactttccctgaccttataacagttgtgctttttgctctgccagggtgggcagcagttctgggacctcagaacaggtgctactgtccattttgctgcttgattcaccttccaggtgacagaggggaactgcagcagggctgcgttcagcatggacaaacacctgtcctctctgtcaccacagctaggcagacactggcgctgagtcatgctgctgctcacaactgaggagctttgagagactcaca

SEQ ID NO: 895246 - DNA, 643 bp, Homo sapiens
tttgctttcttaaaaaggtggaataaaaaatgacttcataataaagaaatataaaataataaagaaaacagggggaaactaaaataatttgtcaaacatttctatttccttttttattctatttcagcctaacttctgttcttctattcctcacctacagcaattttcctaatgaaatttcacacctgtccatttctgacaccatttaacgtttagtaataatgcaagtgttaacaatgtattttgggtatatgtttctgtgtggcctgcattgcaagtagattcataaagaatttcagaaatcccaattctatttttcttttccattttattcagtttggttttggtgtagaaaaagacttaagcagtgtacctaattttaatttccaaaattgattttctactctattttctgctgcttgcttaggaaacaaaatttaccaagtctatctcctaaatgattaacctcagcaacctttggcaagcaaactattytaagagaccctgggactgtgttatgctccctctctttgcccaaatgcatttttaaaaaaagttagaaatcaaaggaaaaatgtggaagtgaaaaagaagccaagtggttaaaaaaaaatagaaagaaagtatcactaaggatcataca

SEQ ID NO: 895247 - DNA, 669 bp, Homo sapiens
ccttcaccttaagaagctagaataagaagagtaaaaaaaagccaaggtaggtaaacaaaaggacataaatttcagatcagaaaccaataaaatgtaaaacataaaatagagaaaattaaaatggcccaaaattggtccttttataatgaaactgataaactgttaacaagaatgttcaagagaaaacaaagataaattcaaattgccagtatcataaattataaaacaaataatcattccacagagcctttagactttaaaaggttagaaaagtatgattgtgaaatacattatttcartaaagttgacagctaagatgcattaggcaaaatgcagggaaaggacaaccttcctgaaatgtacaaagaaaaactaaaacactcctatatctttcgaattaatgagctaccctttcttgtaggtaacatgatagtgtttcagaaaaccctaaagaatctacagacataactatggttagaataagaaacttagcaagtttacaggacccaactgtcaaataaaaaattcagtttttttatatgtaccagcaacaatgactattggaatttttaacaattaaaaacctgtgatgaaatccaaaaatacaaaaagaaatagatgcggaagatcccttcactaacaaaaactacaaaacttcaaaaataaaca

SEQ ID NO: 895248 - DNA, 565 bp, Homo sapiens
gaggcaatgcctcgccctgcttcggctcccgcacggtgcgcgcacccactgacctgcgcccactgtctggcactcactagtgagatgaacccggtacctcagatggaaatgcagaaatcacccatcttctgtgtcgctcacgctgggagctgtagaccagagctgttcctattcrgcaatcttggctcctccctataacttcttatttaaaacatatttcttggcacagaagtcagctatgatgaataagcaacaggttcttggtctcaggaaacttaccttatggtagtggcaataaactctaaataaataatttgacatagatttagtcctttgtgtttgtatttgtggtatctttatgatatgatctgtgtagcaccaagaataacatcttctgaaatatctcaatctgtacttctactgccttctactgtgagacttcattccttcatgccttgaaggatgttcagtcttcactcgtctttcattagacaggactctgaactgtaaaaattgctgtgatattattaattacattgttccctataggaattacttggtctga

SEQ ID NO: 895249 - DNA, 565 bp, Homo sapiens
gaggcaatgcctcgccctgcttcggctcccgcacggtgcgcgcacccactgacctgcgcccactgtctggcactcactagtgagatgaacccggtacctcagatggaaatgcagaaatcacccatcttctgtgtcgctcacgctgggagctgtagaccagagctgttcctattcggcmatcttggctcctccctataacttcttatttaaaacatatttcttggcacagaagtcagctatgatgaataagcaacaggttcttggtctcaggaaacttaccttatggtagtggcaataaactctaaataaataatttgacatagatttagtcctttgtgtttgtatttgtggtatctttatgatatgatctgtgtagcaccaagaataacatcttctgaaatatctcaatctgtacttctactgccttctactgtgagacttcattccttcatgccttgaaggatgttcagtcttcactcgtctttcattagacaggactctgaactgtaaaaattgctgtgatattattaattacattgttccctataggaattacttggtctga

SEQ ID NO: 895250 - DNA, 670 bp, Homo sapiens
gctctcttttcccacctttggtagactcatgtaagggccttgttatagggtagaagtttagaatccagattcggcagaatcccaccgtgcctagaaattccctgacctgctgcctttaactgtggtgggcaatgcacatacagcctcctagcgtgccctttcaagcctgccctggccttgggataccatgaatcctakatatctaacttcccgaaaacagacttgttttgccttgtccttggacactttgtaaccagcttcacacagcaggtgatgaagcctctttcttccttgaaggcattcctccctcctgagggctgcgaataacaaaatcagcaatgtattgtaatagcacacaattgtcactaggttgcgcaaagcctcaagatctgtagccaaagcctcctcaaaaatggtaggagaattcttaaacccttgtggcagccttgtccaggtatattgtgattgcccccactggaaggcaaatataggctgattttggggagaaagcctcaaacaaaagaaggcattctttaagtccagacatgtgaaccaagtgtcatcagcaggaatctgtcccagcattttgtatgggttggttactatggcatggatagtgacagtggccttgtttaccacccggaggtcctgccttggcctgtattcccca

SEQ ID NO: 895251 - DNA, 638 bp, Homo sapiens
tgctgtgcagagtacatcttctactccaggtcatggatctaattcatggagttatctgaaattgatctcagcgggttcttttgtttgtttttttgctttttaattgagaaacatatttgtcagtgtgctattcataatacatagaaatctccaataagtaataagtggatgtgtctttccatcacaatagtactgaaataattasatattattattacatttttagttcaacaaagaacgttcagttacaaaacactaagcactattagcaatatcaagacaatagcacagaaagcaaaaaaaaaaggcactaaacacctatattgtattagacattgggttttgtacagtggagaataatatgcagagaacacatagctttcctgtattcttattctaggatagaagctaagcatacacaaataattgagtttaagcaattatatatagcagtataagaaaagaataagggagtcttttaaaaagcagcagagagaatttcctttatcacaaggcaatttttgaaggctgcttagatgaagtttcttcacagttgtgttttgaaattttgtaacagttgaagtagatagaagtggaaaggaattccagggaagaagacagataccgattattgatta

SEQ ID NO: 895252 - DNA, 547 bp, Homo sapiens
tggcctctttgctgccacggaggagacgagagcggctgccgagagcctcaagctgagcagctcaggaggagctctgcatcctgccaggcagcgctgtggatggaactcccactcagcctcctgtctggggttgggggagggtgtctcaaggcaccaggagctgagtgtggacctccactccccaaacctggccctttcagcggtcccctggtaggatggaggccgtcagtctcatccgtaacagctgcaggaagcctagggcttgcccttgacctgtctctccctcacactcactttctcaagcacctccaaggccgtctcatcccactcctcccccaagctcagtctgcactgagacagctttcctgccagtgctgcagcrgcctctgccatcccctggcctgcatccccactggtgacagccccggctcatgttatccctacctcagctttctatggcacagagtggcttaacacaacacaaagatgacagttctgtcatcagagctggacgtgggtctcatgggttccagtcaaggtgcccgca

SEQ ID NO: 895253 - DNA, 547 bp, Homo sapiens
tggcctctttgctgccacggaggagacgagagcggctgccgagagcctcaagctgagcagctcaggaggagctctgcatcctgccaggcagcgctgtggatggaactcccactcagcctcctgtctggggttgggggagggtgtctcaaggcaccaggagctgagtgtggacctccactccccaaacctggccctttcagcggtcccctggtaggatggaggccgtcagtctcatccgtaacagctgcaggaagcctagggcttgcccttgacctgtctctccctcacactcactttctcaagcacctccaaggccgtctcatcccactcctcccccaagctcagtctgcactgagacagctttcctgccagtgctgcagcggcctctgccatccsctggcctgcatccccactggtgacagccccggctcatgttatccctacctcagctttctatggcacagagtggcttaacacaacacaaagatgacagttctgtcatcagagctggacgtgggtctcatgggttccagtcaaggtgcccgca

SEQ ID NO: 895254 - DNA, 662 bp, Homo sapiens
cattttgcttctaacctccaagctgtccttgttcattcctaagcatagattgaactatctttgggagaaatttagtttatagtttattgtttaaacaaagatggtaacagacctttcccaaagcagacctccttcttgcctggggactagattgctttggcaggtctaacattagccacaagataaggaattatatgcagctggaggatacaagattctgaccctctctaacctgctctaagatcagtgcttgagatrtttcacaggccctgcacttgatggatcagctggcaccacccagatcaataaactggctcatctgatcttgtggcccccacccaggaactgactcagcgcaagaagacagcttccactccctgtgatttcatctctgaccaatcagcactcctggcacactgtcttccccccacccaccaagttatccttcaaaactctgctccccaatgcctggggagactgatttgagtaataataaaactctggtctcccgcacagccagctctgcatgaattactctttctctattgcaattcccctgtcttgaagaatcggctctgtccaggcagtgggcaaggtgaaccccttggactgttacaatctcagtaaatgtaaactgtcagtttactgagatctctcagtaa

SEQ ID NO: 895255 - DNA, 643 bp, Homo sapiens
cattttgcttctaacctccaagctgtccttgttcattcctaagcatagattgaactatctttgggagaaatttagtttatagtttattgtttaaacaaagatggtaacagacctttcccaaagcagacctccttcttgcctggggactagattgctttggcaggtctaacattagccacaagataaggaattatatgcagctggaggatacaagattctgaccctctctaacctgctctaagatcagtgcttgagatgtttcacaggccctgcacttgatggatcagctggcaccacccagatcaataaactggctcatctgatcttgtggcccccacccaggaactgactcagcgcaagaagacagcttccactccctgtgatttcatctctgaccaatcagcwctcctggcacactgtcttccccccacccaccaagttatccttcaaaactctgctccccaatgcctggggagactgatttgagtaataataaaactctggtctcccgcacagccagctctgcatgaattactctttctctattgcaattcccctgtcttgaagaatcggctctgtccaggcagtgggcaaggtgaaccccttggactgttacaatctcagtaaatgtaaactgtcagtt

SEQ ID NO: 895256 - DNA, 668 bp, Homo sapiens
ccattgccacatcaccaggaaacatgtggagtgttagaggactgagcccccacacactgcagaccctgaaaacagtagaaaactcttctccctgtgcctgctcccctgactgcacggtcctcggagtggacatcagctccttcctcctctctgctctctctccttcctccctctacctccaggtcctctctgtgtcttttaawtttttttttaatttttttatttttaaataattacagattcatagaagtttgcttataagttcaactcaattccaatcaaaatctcacgaaggtttttttctatagattagattattctaaaatttatacagaaaggtaaggaaactaggctaaaactatctagaaaaagaacaataaagtgggaggaatcacctgtttgattgaaagactttggtcatcaaaactgtgtgttactgaaggaaccatagacagaggtcaatgaaaccacagagagaggctgcaaatagactgtcgcaagttatggctatttgattcttttaagacaactctttattttgaaacaatgatagattcacgggaagttgtgaaggtagtatagaaaagtcctgtgtacccgtcacccaatttccaccaacagtgacatcttaaattattatagtgcaatattgaaaccaggatattgac

SEQ ID NO: 895257 - DNA, 623 bp, Homo sapiens
tcttgcatcccaggaataaagcctacttgatcaaggtgaattagctctttgatttgcttctggattcagtttgctagccttctgttgaaaatttctgcatttgtgttcatcaaacatattggcctaaagtttttttttttttttttttygttgtgtgtttttatggtagcaggtaccattcttttgtttccatgtttagcactcaaagaccccttgtaagtctggtctaatgctaattaattcccttagcgtttgcttctctgaaagaaattttattttcccttcacttacggagcttagtttcgagggatatgatgttctcagttggattttttttaaggatgctgaagatagttctccaattgcttctgctttgagaggtcccttgctagcctgatgggtttccctttgtaaatgacctgatccttttctctagttgcctttgagatttttttctttcatgttgaacttagacaatctgatgactgtgtgcctagcagatagtcattttgtatgatatctttcaggggtctctgaattccttgaattttcatgttggtctttctagcaggattggaaaaatcttcatggattatatcctcaaatttattttctaagttgct

SEQ ID NO: 895258 - DNA, 560 bp, Homo sapiens
ttcctaccactatgattcttcctacacagttcaaggagttcatatgagtgctccatcaagtgacaaataactacaatcgcaaatttgcaatgggggaccaagaaaatgatcataggggtagagatgcagaaccactaaccctactcaaactggatgaccatgatgttgtgttggaatttcarttacccacgtcaccttagcctttgtatccaatagctttctaaggatctgagtattctcttttcctcaggatacagacactctggtaaatagttatagtcacttcagggaataattagaggaactgcttttttcaagggtgtccgccttccctttcaactcatgcatcctgcatcttagaaatagcttaaatttggaaacaaggcaaaggatcataattttttattatagtggctggcatcattcttctactcatctctaattatttttggatgtatactccaactaatacccttattgaactcctatttatctcacccttggaaataccgtcatcttctaaccattagcacagaaccctgtgagtcaagaccccatgc

SEQ ID NO: 895259 - DNA, 560 bp, Homo sapiens
ttcctaccactatgattcttcctacacagttcaaggagttcatatgagtgctccatcaagtgacaaataactacaatcgcaaatttgcaatgggggaccaagaaaatgatcataggggtagagatgcagaaccactaaccctactcaaactggatgaccatgatgttgtgttggaatttcagttacccacgtcaccttarcctttgtatccaatagctttctaaggatctgagtattctcttttcctcaggatacagacactctggtaaatagttatagtcacttcagggaataattagaggaactgcttttttcaagggtgtccgccttccctttcaactcatgcatcctgcatcttagaaatagcttaaatttggaaacaaggcaaaggatcataattttttattatagtggctggcatcattcttctactcatctctaattatttttggatgtatactccaactaatacccttattgaactcctatttatctcacccttggaaataccgtcatcttctaaccattagcacagaaccctgtgagtcaagaccccatgc

SEQ ID NO: 895260 - DNA, 560 bp, Homo sapiens
ttcctaccactatgattcttcctacacagttcaaggagttcatatgagtgctccatcaagtgacaaataactacaatcgcaaatttgcaatgggggaccaagaaaatgatcataggggtagagatgcagaaccactaaccctactcaaactggatgaccatgatgttgtgttggaatttcagttacccacgtcaccttagcctttgtatccaatagctttctaargatctgagtattctcttttcctcaggatacagacactctggtaaatagttatagtcacttcagggaataattagaggaactgcttttttcaagggtgtccgccttccctttcaactcatgcatcctgcatcttagaaatagcttaaatttggaaacaaggcaaaggatcataattttttattatagtggctggcatcattcttctactcatctctaattatttttggatgtatactccaactaatacccttattgaactcctatttatctcacccttggaaataccgtcatcttctaaccattagcacagaaccctgtgagtcaagaccccatgc

SEQ ID NO: 895261 - DNA, 560 bp, Homo sapiens
ttcctaccactatgattcttcctacacagttcaaggagttcatatgagtgctccatcaagtgacaaataactacaatcgcaaatttgcaatgggggaccaagaaaatgatcataggggtagagatgcagaaccactaaccctactcaaactggatgaccatgatgttgtgttggaatttcagttacccacgtcaccttagcctttgtatccaatagctttctaaggatctgartattctcttttcctcaggatacagacactctggtaaatagttatagtcacttcagggaataattagaggaactgcttttttcaagggtgtccgccttccctttcaactcatgcatcctgcatcttagaaatagcttaaatttggaaacaaggcaaaggatcataattttttattatagtggctggcatcattcttctactcatctctaattatttttggatgtatactccaactaatacccttattgaactcctatttatctcacccttggaaataccgtcatcttctaaccattagcacagaaccctgtgagtcaagaccccatgc

SEQ ID NO: 895262 - DNA, 624 bp, Homo sapiens
aaagagtattcaattaggaaaagaagaagtcaaattttccctgtttgcagatgacatgattgtatatttagaaaaccccatcgtctcagcccaaaatctccttaagctgataagcaacttcagcaaagtcttaggatacaaaatgaatgtgcaaaaatcacaagcattcttatacaccaataacacacaaacagagtagccaaatcatgagtgcactcccattcacaattgcttcaaagagaataaaatacctaggaatccaacttacaagggatgtgaaggacctcttcaaggagaactacaaaccactgctcaacgaaataaaagaggacacaaacaaatggaagaacattccatgctcatggataggaagaatcaatatcatgaaaatggccatactgcccaaggtaatttatagattcaatgccwtccccatcaagctaccaatgactttcttcacagaattggaaaaaactactttaaagttcatatggaaccaaaaaagagcctccatggccaagtccatcctaagccaaaagaacaaagctggagacatcacgctacctgacttcaaactatcctacaaggctacagtaaccaaaacagcatggtactggtactaaa

SEQ ID NO: 895263 - DNA, 645 bp, Homo sapiens
gcatagtggacaacttgtatttgtttcttcagttagagtcaccctgtcataacctcctttactgatctatgacatttttttcctctttgtagaatgactggatatttttccagtatttggctgcttcagtactgataactttaatttggcttatttctaatgattctctttttgaactttttgctctttcctctgccagtaacagcaatcagggctgctgtataggttttttttttttttcaggtattcccctaaacaagggcccctgaagaaggagcacttgggggctgaaatcctccatgaaacttgtcttgttactgtgtcactctaaggaaagaggtgaccttctgtgattcagccactcagacatggcaccttttgctaatttacacaggatgttttatatgactctgcccccaaatttggctcaggtaataaaattgctaattgatatttcactgtttaatcatacaaaataaattagggttttgtaatttctgcttacaatttgatataattttatygagtaaaatcttataaacataattttaaaaggcaggttttcctttattaagcttttcttctttgtaacgtttacattctatgagcttattttcaagtgaaatattagcccctaatttcata

SEQ ID NO: 895264 - DNA, 636 bp, Homo sapiens
acaacttgtatttgtttcttcagttagagtcaccctgtcataacctcctttactgatctatgacatttttttcctctttgtagaatgactggatatttttccagtatttggctgcttcagtactgataactttaatttggcttatttctaatgattctctttttgaactttttgctctttcctctgccagtaacagcaatcagggctgctgtataggtttttttttttttcaggtagttccctgaacaagggcccctgaagaaggagcacttgggggctgaaatcctccatgaaacttgtcttgttactgtgtcactctaaggaaagaggtgaccttctgtgattcagccactcagacatggcaccttttgctaatttacacaggatgttttatatgactctgcccccaaattkggctcaggtaataaaatggctaattgatatttcactgtataatcatacaaaataaattagggttttgtaatttctgcttacaatttgatataattttatcgagtaaaatcttataaacataattttaaaaggcaggttttcctttattaagcttttcttctttgtaacgtttacattctatgagcttattttcaagtgaaatattagcccctaatttcataa

SEQ ID NO: 895265 - DNA, 618 bp, Homo sapiens
gaccaaaaacctgacaatgatatggacaataaaatccagctgaagtggtctcagatggagatgaactttttgggagctgaagcaaaggtgactcttgttatgttttagcaaagagatggtggcattttgcccctgccctagagatttgtggaattctggtgggaggaatttctaagcagcaaagcattcaagagctgacttgggtgctgtcaaaggcattccattttataagggaagcagagcataaatgttcagaaaatttgcagcatgacaatgtgatagaaaagaaaaatatgttttctgaggagaaattgaagccagctgcaaaaatttgcctaagtaaygaggagcaaaatgttaatccctaagacaatgggaagaatgggtctggggcatgtcagaggtcttcatggaagcccctcccatcacaggcctggaggcttaggagaaaatgttttcatgtttctggcccagaatccctgtgctgtatgcactctagggacttggtaccctgtgtcccagccactccagctgtgattaaaaggagccaaggtacagcttcggctgttgcttcagagggtggaagcccccaggccttggcagcttccatgtggtgtt

SEQ ID NO: 895266 - DNA, 603 bp, Homo sapiens
taaaaattagtcattcagaaacaataaaaacttaagtcttttaatgcatgttcttagagaaaaggaactgaaacactaacctctaaaacagagtaattcaacattttgtgggtattctaatgttatgcaaacatgttgacaacaatcaatttaaattgtagagagtaatggtgaccaaattttcttggataatttaacacaggaacattacactcagatagttttattttaatctacatttttaatcactatttatgaatctttcaaagcatatcctttgacatttggcctaatccttatttcctattagcatgttcttttagttttactgttcaacagacattggcatatgtttttattgatacattgttttcatgcacgmcaatattaaataatcaaatgtgttttgtgaccttgttcagaaattctaatgttaactatgtagattctcagtcatggcatattgctggtgcccagatttcttagcacatataatcctttaattagatattgtgttttgatgttaatatccattacttatcttagtatggcaaaacctttgtaagtgtacaagcaaaggcaaaattaaataggaaaatgcat

SEQ ID NO: 895267 - DNA, 701 bp, Homo sapiens
ttctcattatttaattcctacttataagtgagaacatgttgtatttggttttccgttcttgcattagtttgctaaggataatggcaaccagctccatccatgtacctgcaaaggacatgatctcattctttgttatggctgcatagtatttcatagtgtatgtataccatgttttctttatccagcgtaccattgatgggcatttaagttgattccatgtgtttgctattgtgaatagtgctgcaacgaacattttctgcatatggctagccagttttcccagcaccatttatggaatagggagtcttttccccattggttgtttttgtcagctttgtcaaagattacatggtcataggtatatcatcttatatatcagctctctattctgttccatttatccatgtccctgttttagtacaagtaccatgctgctttggttatkgtagtcttgtaatatagtttgaagtcaagtaacatgatgcctccagttttgttgtttttgcttagtatagtcatggctattcaggctcttttttggttccaaactattttaaaatagtttttatttttctagttttgtgaagaatgttgttggtagtttgaaaggagcagcactggatctatagaatgctttgggcagtatgggcattttcatgatattgattcttcttatccatgtgcatggagtgtttttccat

SEQ ID NO: 895268 - DNA, 694 bp, Homo sapiens
taaaatagtttttatttttctagttttgtgaagaatgttgttggtagtttgaaaggagcagcactggatctatagaatgctttgggcagtatgggcattttcatgatattgattcttcttatccatgtgcatggagtgtttttccatttgtttgtgtcttctctcatttctttgagcagtgttctgtaattctcattgtagatatctttcacctccctggttagctgtatgcctccgtattttattctttctgtggcaattgtgaataggactgccttcttgattttttcttggcttggctgttgttagtgtataagaatgctagtgatttttgtacattgattttgtatcctgaaactgttgattgtttatcagctgaaaaaattttgggcggagactatgargttttctagatagagagtcatgtggtcttcaaacaaggatactttgacttcctctgttcttatttggataccctttatttctttctcttgcctgattgctttggctaggacttccaagagggcatccttgtcttgtgttggttttcaagaggaatgcttccagctttttccctttcagtatgatgttggctgtggttttgtcatagatgactcttattactttgtattacgtccctttaatacttagtttttgagaatttttaacatgaagggatgttgaattgtattga

SEQ ID NO: 895269 - DNA, 539 bp, Homo sapiens
taaatgttagcatttataactatacactttcctcttagaattgcttttgttactacatttcatgacttttattatgttgtgtttttgtttgtctcaagaaatttgctaatatctgatttcttctttgactcattggttgttcatgggttagatgtttaatttacayatacttgtgaatttttcaggtttccttctgctgttgatttctagtttctttccactgtggtcagaaaagatacttgttatgatttcaatctttttatatttgttaatacttgttttggggcttaacagtgatttatattctggaggaagatccacatgcacttaagaagaatgtctattctgctgctattgggtgaaatgttttgtttatgccttttcaatctatggtattgttcaagtctgttgctttcttattgattttctgtctcatatttatttgttactgaaaatggggtattaaaatcttctattatttattattgtctatttctgccttcagttatgtcaatgctggctttatatatttaggtgtt

SEQ ID NO: 895270 - DNA, 637 bp, Homo sapiens
ttttggctctgtcacctcagactcccaagtagcttggactacaggtgcacagcatcacacccagctaattttttaattttttgtagagacagggatcttacaatgttgcccatgctggtctcaaattactgggctcaarcaatcctcctgatataactagagattcaagaatggcccctagaatccaacccatgagccctctagcctaggaatgaggctttggcaggaaatatcaaagatgggttttctttcatttccacaaccctataaggtttgggaattccaaataaacaaatttaccttaataatttgttgacctaatttgttgctgtctctccatgcacggagagatagcatgcaatgagtacaaaagaccaaaagtaagcactatgaccaactcattgtgtgcccttggtcaaggccacctcacctcactcagactcagtttattcagctgtgagatgaagtagaagatccttaaagtccatcctactttaaatgtctcccacaaaccttaactcatataagcaaatgcatcctcaacctgtctactgattttccagtaagcatttctaacttaacatgtctaaaacaaaatccacaattttccccatcaaatcagctcctcttgcaaatg

SEQ ID NO: 895271 - DNA, 652 bp, Homo sapiens
tcttgggcatgaaattttggccagatcttatgtccagaatggtatttcctaggttattgtccagggtttttatagttttaggtgttacatttaaacctttaatccatcttgggttgatttttatatgtggtgtaaggaaggcgtccagtttcaatygtctgcagatggctagccagttatcccaggaacatttattgaataaggagtcctttccccattgctagttttttgttgattttgtctcaggtcagatggttatagatatgcagcattatttctcagctctctattctgttccactggtgtgtgtgtgtgtgtgtgtgtgtgtgtgtgtttaccggtaccatgctgttttggttactgtagccttataatatagtttgaagtcaagtaatgtaatgtctccagctttgttctttttgcttaggattgccttggccattcagggtcttttttggtttcatctgaattttagaatatttttttctaattctgtgaagaatgtcattggtagtttgataggaatagcattgaatctgtaaattgctttgagcggtatggccattttaacaatattgatttttcctatctatgaacatggaatgtttttccatttgtttgtgtaatctctgatttctttgagcagtgtttc

SEQ ID NO: 895272 - DNA, 656 bp, Homo sapiens
ttggatcaatcagatttatgcatttatatttattataattactggtacctttggatttatttctgacagactattttatatttctatttaccacattttctgattatttcccccctctccttttctatattccactggagagactattctgctgctgctctgtttatattcttccagtagttaccactagcttattgatagtacacatctgtttacttttccttaccattttaaagcctatccatagctaaactgtgctttttaaaaaatgatagctgctagctgagagggtaaatttctgttgattagaaaaaggcaacccttcctcaagaaaataatcatttaaaaattgtctagagggttttccagagccctggcaggcaatagccytacctagctaacgtgtccacacttgctagcatctcagcagctcaggcagcacacagcagaccatgcttcaccctcgccccattccacaagtaaggcagtaatgtgaggggcagaaacgaaggccccacttagctctttaagatgtgtctatctcagatgtgacactcttgttcagcatatgcagtagtatgcagtactcaagcataaactcacctctttggtctctcctcccacttgtgtggtcatcacataaaataattcttttt

SEQ ID NO: 895273 - DNA, 633 bp, Homo sapiens
catacttgacagatactgtcaaaatgttgcttaatgctgtctgtctgacagatgcttaagactaacctttcttttatagacacttttgggattcttcagaggggttcctgccaagtgatgtattctagttctccaattgccccacatgacttagtccttggttttccagaagttcactcagtactgaccttcttctattttcaagatagtacccctcttacacaagattttaaattgttccaaaccagaacttacacaccactcggctcacactagaccatgggaatattcgtctaccttttatcccaacaaactctaygactgaaggtcaagctggggtagcaacaactctcctcacttcacctgcaaaagcacttgccagacctcctctgagcctctctacagacaccacccgcagtgtctgtgaggtctgctaatggagcttgccacaaaatacagactgaaacaagttttataaacttcctcagctttttgagagagggaagaatttcccatttgaattcttccaaggagatttccccctgtactcataacttttcatctttatttttctttcctatgacccctaagcaaacatcctgttggtgaccataagcttggcaataaattatc

SEQ ID NO: 895274 - DNA, 647 bp, Homo sapiens
tcgtttccgtgaaggttcatgaaaaaaactccaagcttaggatttcaatttgcattataaaacaatctataattaaactttgagtttcattttcaaaaactcagcaacatagccacaagagatatgcatgcatatacacacaacagacacacacacacacacacacacacacacacacacaccgttttctagccctagtgaagctgttaactgcagtaagccctcagagggccaattttaggtcaaaggaccatagcagtttgtggraaagtgagggagaataccatttattttcgttctaaggactccatgatcaattagtgaagtccaaatgtgtctgaaaatcagactattctggtaactattttggcttctttgtgctttacagtaacaataactcgattgcctctgctgattaaatgccacacttagtccctgccacctagaaccccattgtctcattgaacaagggagttcattctgatggcagcagttactactgtcatttttggcctatagagaatagaccacggagctcttccacggtgatgctgaggggtccttcatgaaaggatttctcacaaccttggtaaagtcagtgtcctctggactgtctgaacataattaggggatgggtaagtatgtct

SEQ ID NO: 895275 - DNA, 655 bp, Homo sapiens
aaaagaattattttatgtgatgaccacacaagtgggaggagagaccaaagaggtgagtttatgcttgagtactgcatactactgcatatgctgaacaagagtgtcacatctgagatagacacatcttaaagagctaagtggggccttcgtttctgcccctcacattactgccttacttgtggaatggggcgagggtgaagcatggtctgctgtgtgctgcctgagctgctgagatgctagcaagtgtggacacgttagctaggtarggctattgcctgccagggctctggaaaaccctctagacaatttttaaatgattattttcttgaggaagggttgcctttttctaatcaacagaaatttaccctctcagctagcagctatcattttttaaaaagcacagtttagctatggataggctttaaaatggtaaggaaaagtaaacagatgtgtactatcaataagctagtggtaactactggaagaatataaacagagcagcagcagaatagtctctccagtggaatatagaaaaggagaggggggaaataatcagaaaatgtggtaaatagaaatataaaatagtctgtcagaaataaatccaaaggtaccagtaattataataaatataaatgcataaatctgattgatccaa

SEQ ID NO: 895276 - DNA, 581 bp, Homo sapiens
tattttcttgttaatggttattttaattagcaaagagagttttggaaatagttttgagctttacctgaaactgaatgactggaaggtaagtgcatttgaattatatttggttacatgcattaaaggataaataatttctcttttctcatgtgaagcttcattttggtagttagctgacttttcaggtaaggagaaggaccaagtaatcaccagctataaaatacaaacatttatcactggaaaacctagtaatgaaagcaaagcctatcaaaactttatgtttacagaatgcgtttaactctttttaatatattcatgtctatgtaatccttttgttacttttttcatgaaaacttatttamcagtatatatagttcatagtattgtgttgtggaatgagcattagactttggatatgtcaaatcctttccagagagagatggcctactcaaataaggataaataataaataggggagagacactttgtaaaactctgagcacagtgtaggtgaaccacagggcagtaacctgaggctagtaacagtggagctgtcaacaacctatgaccaaagggaaaag

SEQ ID NO: 895277 - DNA, 632 bp, Homo sapiens
tggataatttattgccaagcttatggtcaccaacaggatgtttgcttaggggtcataggaaagaaaaataaagatgaaaagttatgagtacagggggaaatctccttggaagaattcaaatgggaaattcttccctctctcaaaaagctgaggaagtttataaaacttgtttcagtctgtattttgtggcaagctccattagcagacctcacagacactgcgggtggtgtctgtagagaggctcagaggaggtctggcaagtgcttttgcaggtgaagtgaggagagttgttgctaccccagcttgaccttcagtcrtagagtttgttgggataaaaggtagacgaatattcccatggtctagtgtgagccgagtggtgtgtaagttctggtttggaacaatttaaaatcttgtgtaagaggggtactatcttgaaaatagaagaaggtcagtactgagtgaacttctggaaaaccaaggactaagtcatgtggggcaattggagaactagaatacatcacttggcaggaacccctctgaagaatcccaaaagtgtctataaaagaaaggttagtcttaagcatctgtcagacagacagcattaagcaacattttgacagtatctgtcaagt

SEQ ID NO: 895278 - DNA, 590 bp, Homo sapiens
ataataaaataaacaaaaggtctgaatagacatttcttaaaataagacataaagattgccaacacgtatataaaaatgtgctcaayattattgatcatcaaaaaaatgcaaatcaaaggtacaatgagatatcatctcacctcaatgagatgtcttttatccaaaggagaggcaatagcaaattctgttgaggatgtagagaaaagggagctcttgttcactgttggtggcaatgtaaattagtacagtcactatagagaacagtgtggagtttccttaaaatactaaaaacagaactaccatgtgatccaacaatcccactgctaggtatatacacaaaagcgaagaagtcaatatatcccagagatatctgcactgccatttttatcacagcactattaatatagccaaggtttggaatcaacctaagtgtctatcaacaggtgaatggataaagaaaatggagtatatatatatatacagtggagtactattcagccataaaaaagaatgaagtcttgtcatttgccacaacataaatgaaactggcagacattatgttcaatgaaataagacaggcccaaaacaga

SEQ ID NO: 895279 - DNA, 616 bp, Homo sapiens
cgggaagttcatgaataatccaccccttgtttagcatataatcaagaaataactaaaagtatactcagttgaacagcccatgtttccattcttttattcctgtactctcttaataaatttgctttcatttaaaaaaaatgaattcactactatataattcatccatgtaaccaaaaacaacttgttccccaaaagctgttgaaataaaaatatatttttaaaaaatagaaattaaacaaataataaaataaacaaaaggtctgaatagacatttcttaaaataagacataaagattgccaacacgtatataaaaatgtgctcaacattattgatcatcaraaaaatgcaaatcaaaggtacaatgagatatcatctcacctcaatgagatgtcttttatccaaaggagaggcaatagcaaattctgttgaggatgtagagaaaagggagctcttgttcactgttggtggcaatgtaaattagtacagtcactatagagaacagtgtggagtttccttaaaatactaaaaacagaactaccatgtgatccaacaatcccactgctaggtatatacacaaaagcgaagaagtcaatatatcccagagatatctgcact

SEQ ID NO: 895280 - DNA, 601 bp, Homo sapiens
ccaatccctggggaataaaaggaacgtgggtatctcagtgtcttcttgggttcagaaggctaagcagagtgcaaaaaggaaaagggacaagaaagggaagagaagggacaacaaaggtcactcactcatccatgaatccagaaacttaggaagcaggaaatcctgaaatatttgtcagatgttagcattttatagataaaaccattccayaatttcagaaacatcttttcccatatcataaactttcttaattggaaatcacccagacatccaacaagtaatccaaagaaatatgtaaaccaaaactttgggtaaagtggtctttggtgggggtttggtttttttaaaaaagagcttttttgcctttttttttcttcagtttcaaatgagtttctaatgttcacattttagccagaattggttgaactctacaagaaaaacaaaatctccaagtaactttgaacaataagctttatctcaatgccagtagcctaataacagcagattcaaaacaggcagaaagaaaagagagaaacagagaacttcagatgtggtaatcagatggcaagcatgaaaagtgaaagtagtgaagcgcttgccc

SEQ ID NO: 895281 - DNA, 640 bp, Homo sapiens
agagcttatttgaaaatgatgttactctggctctcctaggctcctgctgccctaacatgtccaccacttttcagcatttcagcattttcagcactctccagcattattagtccctttcaaggaatgtccagaataggcaaatcaatagaaacagaaaatagattagtggttgccagaagctaaatggaaggaggaattagcacatatggggcctcttttgggtgactgaaatgttctggccgggcatggtggctcctgcctgtaatcctagcactttgggaggccgaggcaggtggatcacctgaggtcaggagttcaaggccagcctggccagcatgatgaaaccctgtctctactaaaaatacaaaaattagccaggtgtggtggcaggtgcctgtagtcccagctactcaggaggctgaagcacgagaatcgcttgaacccaggaggcagaggttgcagtgaaccgagatcacaccactrtactccagcctgggtgacaaagcaagactccatctcaaaaaaaaaagaaatgttctagaactagtagtcgtgatagttgcataacattgtaaatatattttgaaaacagtaagttgtacaccttgaaatggttaaaatggtaaattttatctcaatt

SEQ ID NO: 895282 - DNA, 580 bp, Homo sapiens
aaactaaaaaaaactcatgcattgcattggggaaaacagtttcaatagaacaaggagatggaaatcaaacaagttgagtgaaatgtggttagtgaaaaagtggaaacgagtataaattacgctttctaaaagtttaatagaacaactgaaatatttaagagatggtggaatactaggggactattaaaagaaataatgtagataatgaaaacacactgccagggaaagatagtaaaaatgtcattaaatttcttaaaacacatggaacacagaatacttgcatgcacgtaatatcaagcttcaagatatgtaaagtaaaaaaaagtactctcagaaattaacaaaytcataataatgatgtatttttgtttctttttatttttagttattatttaaaataattttattgttatttattcatttttatttttaattttaatatgtacagaaagaattgtacatatttgtgaagtacctatgatacttcagtacacacatacaacgtgtaatgataattagagtaatcataatgatttctaaacatctctcagtagttaatagaataagcacaacaaaatca

SEQ ID NO: 895283 - DNA, 597 bp, Homo sapiens
tgaaatttttatttaatttatatcctacagataaatttaataatgatgtaagcctcatttctcagacttttaatgaattctctggggatattgttcaaatgcagattttgatttagtggatttgaggcagggctttcatctctaacaaattcccaagtgatgtgaataaatgcttgtccgaggaccacacttcgagttgcagagatgtaaaacacatctattctccagcaattawctgactcaggtaattcagaggtgatttcaaacagttcactcaatagatttttataggccatctaccttattcaaactccataaatctattctctctgttatagagggaaaaacttgagacattatatcaaggtaaactttaatacacctgtttttttttcaagaaataaaaaatgtaatgactataatgtagaatttaacttcttatttttctttaagatcccttgtctttaaaataatatctataagatccagctacaaactctttaactctttgtcatgaaattacagtatcaatatattctaattttttctcatgatctcctctctcctacccccaaccctgtcaaaatctctatctct

SEQ ID NO: 895284 - DNA, 597 bp, Homo sapiens
tgaaatttttatttaatttatatcctacagataaatttaataatgatgtaagcctcatttctcagacttttaatgaattctctggggatattgttcaaatgcagattttgatttagtggatttgaggcagggctttcatctctaacaaattcccaagtgatgtgaataaatgcttgtccgaggaccacacttcgagttgcagagatgtaaaacacatctattctccagcaattatctgactcaggtaattcagaggtgatttcaaacagttcactcaatagatttttataggccatctaccttattcaaactccataaatctattctytctgttatagagggaaaaacttgagacattatatcaaggtaaactttaatacacctgtttttttttcaagaaataaaaaatgtaatgactataatgtagaatttaacttcttatttttctttaagatcccttgtctttaaaataatatctataagatccagctacaaactctttaactctttgtcatgaaattacagtatcaatatattctaattttttctcatgatctcctctctcctacccccaaccctgtcaaaatctctatctct

SEQ ID NO: 895285 - DNA, 586 bp, Homo sapiens
aatttcatatccagccaaaataagtttcataagcaaaagaaaataaaatcctttacagacaagaaaatgctgaggggttttgtcaccaccaggcctgccttacgagaactcctgaagaaagcactaaatatagaaaggaaaaactggtaccagccactgtaaaaacataccaaaatataaagaygaacaaaactgcatgaactaatgtggaaaataaccagctagaatcatgatgacaggatcaaactcacacataataatattaaccttaaatgtaaataggttaaatgctcccagttcaaagacacagactggcaaattggataaagagtgaagacccattggtgtgctgtattcaggagacctatctcatgtgcaaacacagacataggctcaaaacaaagggatggaggacaacttaccaagcaaatggaaagcaaacaaaaaaggcatgggttgccatcctagtctccgataagacagactttaaaacaagaaagatcaaaaaagacaaagaaggccattacataatggtaaacggatcaatgcaacaagaagagctaactatcctaaatatatatgcacc

SEQ ID NO: 895286 - DNA, 675 bp, Homo sapiens
cagcaaattaccatctcacaccagttagaatggcaatcattaaaaagtcagcaaacaacagatgctggtgagaatgtggagaaataggaatgattttatgctgttggtgggagtgtaaattagttcaaacattgcagaagaccgtgtggcaatccctcaaggatctaggaccagaaatatcatttcagccagcaatcccattactgggtatctatccaaaggattayaaaccattctactataaagacacattcacacatatgtttattgcagtactattcacaatagcaaagacttggaaccaacccaaatgcccatcaatgatagacgggataaagaaaatgtggcacatatacaccatggaatactatgcagccataaaaaaatgagttcacgtcctttgcagggacatgtgtgaagctggaaaccatcattctcagcaaactaacacaggaacagaaaaccaaacaccacatgttctcactcataattggtagttgaagaatgagaactacatggacaaagggaggggaacatcacacaccagggcccgttggggagtgaagggcaaggggaagaatagcattaagagaaatacttaatgtagatgacaggttgatgggtgcagcaaaccaccatggaacgtgtatacctatgtaacaaacctgcatgttc

SEQ ID NO: 895287 - DNA, 626 bp, Homo sapiens
aaactggttggagcccactgcagctcaacaaggcccacctgcctctgtagactccatctctgggggaagggcatagctgaacaaaaggcagcagaaacttctgcagatataaacatccctgtctgacacctctgaagagagcagtggttctcccagcactgtgtgtgagctctgagaacagacagactgcctcctcaagtgggtccctgagccccagtagcctaactgggagacacctcccagtaggggccractgacacctcatacagccacatgcccctctgagacgaagcttccagaagaaggaccaggcagcaatatttgctgttctgcaatatttgctgctctgcagtctccactggtgatattcaggcaaacagggtctggagtggacctccagcaaattccaatagacctgcatctgagggacctgactattagaaggaaaactaacaaacagaaaggaatagcatcaacatcaacaaaaaggacatccacaccaaaaccacatctgtaggtcaccatcatcaaagaccaaaggtagataaaaaccacaaagatggggagaaaccagagcagaaaagctgaaaattctaaaaaccagggtgccacttctcctccaaagg

SEQ ID NO: 895288 - DNA, 626 bp, Homo sapiens
aaactggttggagcccactgcagctcaacaaggcccacctgcctctgtagactccatctctgggggaagggcatagctgaacaaaaggcagcagaaacttctgcagatataaacatccctgtctgacacctctgaagagagcagtggttctcccagcactgtgtgtgagctctgagaacagacagactgcctcctcaagtgggtccctgagccccagtagcctaactgggagacacctcccagtaggggccaactgacacctcatacagccacatgcccctctgagacgaagcttccagaagaaggaccaggcagcaatatttgctgttctgcaatatttgctgctctgcagtctccactggtgatattcaggcaaacagggtctggagtggacctccagcaarttccaatagacctgcatctgagggacctgactattagaaggaaaactaacaaacagaaaggaatagcatcaacatcaacaaaaaggacatccacaccaaaaccacatctgtaggtcaccatcatcaaagaccaaaggtagataaaaaccacaaagatggggagaaaccagagcagaaaagctgaaaattctaaaaaccagggtgccacttctcctccaaagg

SEQ ID NO: 895289 - DNA, 585 bp, Homo sapiens
aaaatcccaattacaaaatcaaaatatatattggcccttgactcaaattataaagtcaaattcaaattattcccatttgtaagtcaatttataagttagtcaaattacaaaatcccaattacttcaggatattacaatttctcaaggcccaccaatggaagcccaaatttggcctagaagtggtattactacttctmgtacactagaggtagtatttggcctagagctctcaaccctcaattcagagagcatgtaaatatccctcttgactctcccaatggtagttggaaagatgtggggcaatggggagtttgttgttggtttctatgttttcctttttaataagagagagatgaatatgttaaaaagatgacaaatcgacagcggctggcaagatggctgaataggaacagctctggtctgctactcccagggagatcaacgcagaaggcgggtgatttctgcattttcaactgaggtacactgctcatctcattgggactggttagacagtgggtgcagcacacgggggacaagccaaagcagggtggggcgtcgcctcacctgggaagtgcaagaagtcag

SEQ ID NO: 895290 - DNA, 581 bp, Homo sapiens
atggattaaaagatggcccactgtgagcgagctggaaatgcctgatctcccttggtttgatgtagaggaggggatcaaaaggctcacagaaattgggatggtggagtggattagtcactttagatctactcatcccaactgggagggtgcagaagatatacytgtaaccaatgctttgtgaaatagatttgcgagggtagcacttgcatccttgaagagccctgtgattgctcttcactgtatgttagatctaacagtgggatcgatagtcactcaattacaaaatttaaatacaatgggaataattggatcctgaggtggcaggggccaagtggtggcactcaaacattaaaggcaaggtgtacgtaactactgtaatcgacagcaaaggcaaagcagcaatcagaatagtctgcctcatgtagagctctggcattggctaattaattatggtgttcctagaagcaaaattgataggaaagctactgcattcctacttaacttatataagcagaaaactttcaggtcgaatggacaaaagactaatttgagttacaaaaacagagaatcacagcccctca

SEQ ID NO: 895291 - DNA, 679 bp, Homo sapiens
gacaaggcattcaaattaacacagtcacataaaaatagagaaaaaagaataaaaacaaatgagcaaagtcaggaagaaatataagattgtgcaaaatggtcaaatctaaaaataattggtgttcctgagggagaagagaaagcaaaaagtttggaaaatttatttgagggaataattgagggaaacctccctggccttgctagagaattagacatccaaatacaagaattataaagaactcctgggagattcattgyaaaaacatcatcaccaaggcatatactcatcaggctatctagaatcaatatgaaggaaagaattctatgagcagtgagacaaaagcattaggtaacctataaagaaaaacctgtcagactagcagcagacttctcagcaaaaaccttacaagccagagcgattggggatttatctttagcctccttaaacagaataactgtcagctaagaattctgtatgtagcaaaactgttttataaatgaagaaaaaataaagtcatttttagacaaacaaacgctgagtgaatttgttactatcagaccagccccacaagaaatgctaaaagaagttctaagtcttgaaacaaaagctcaatatgcaccaaaatagaacctcctgaaaattcacaagggctataaaacaacacaatgaaaaaacaaag

SEQ ID NO: 895292 - DNA, 604 bp, Homo sapiens
gaaaacttcccatgtcttcagagagaaatggatatctagatccatgttatctaggatatctagctctcaaagtctccaaatatacttaatccaaaaagctcctctccaaggcctattgggattttactgtcaaaaggcaaagacaaagaaagaattttaaaaatagagaaaagccttaagtcacatataagtaaatctccattagactaacaactgtttctcagcagaaaacttgcacaccaggagaggatgggacaacatattcaaggtgstgaaaaaacctttgctggccaagaatactacccccagaaaagctattctttaaaaatgaaggctaaataaagtatttcctggacaagcaaaaacaggaaatgtatcaccactagacagatcttacaagaaatacttcagggaatcccacatctggaagtgaaaggataagaacacagatgagaatataaaactcactggtagaatggatacactaatgagcagaagaaaggtatctaacttaccactacagaaatacatccaaccaaaaggatatacaatactagaggaagaaagaaaggattcacaaaacaataagaaagcaattaacaaa

SEQ ID NO: 895293 - DNA, 512 bp, Homo sapiens
tattctttaaaaatgaaggctaaataaagtatttcctggacaagcaaaaacaggaaatgtatcaccactagacagatcttacaagaaatacttcagggaatcccacatctggaagtgaaaggataagaacacagatgagaatataaaactcactggtagaatggatacactaatgagcagaagaaaggtatctaacttaccactacagaaatacatccaaccaaaaggatatacaatactagaggaagaaagaaaggattcacaaaacaataagaaagcaattaacaaattgagaggagtaagacctcagctatcaatagtaaccytgaatataaatgggttaaattcccccaattaaaagatataaaatggcttaaaaaaccatttggattaaaaaaaggatggattttttgaaatgaatggattaaaaaaacaacacccaactatatgcttcctataaaaaactcacttcacctttaaaaacacacatagatttaaagttaaggggtgga

SEQ ID NO: 895294 - DNA, 608 bp, Homo sapiens
aatctgttgacttttcaaagtattcagtcctactagtattgggctctagttttgtgccaggtactgtccagtttctgtgataaaatatagtaatgcatttgagcttcactttccttagggcatgtttttgttaataaaacaatagttggcctaaaattgcttacttcttttggccaaatactaatatgtttaaaaaaattggaatttattaagaacatatgcaaaattattaaatcatttttgttaagaatgtggcagaaaaataaaacattccaatttgagaacagaacttgtattatttatgtttactttaacttacagtttttaactaaaaattaacaaagtaatctrttatcactcagttaagaaaaacaagccctttgcttttcctctagaggaaatatgacttgagacacgtttgcatagttgatagaataaaagattcctcataacaataaattaaacaagccaggtaacaaacagatgatgggaaatttccattcatcattaaaaatatcctttatacagaaaacatatattctgcagcctaaatgcatcctccaagttgtagaggcagaaatctcagggcatgtcatggtacataccat

SEQ ID NO: 895295 - DNA, 649 bp, Homo sapiens
tacaaaatcagtagcatttctatacaccaacagcaaacaatctgaaacagaaatcaagaaagtaatcttatttacaaaagcaacaaataaaataaaataaaataccaaggaattaaccaaagaagtgaaagatctctacaatgaaaagtataaaacactgatgcaagaaattgaagatgctacaaaaaaatgaaaagacatttcatgttcatgsattggaagaatcaatattgttaaaatgttcatactacccaaagcagtctacagattcagtgcaatccctatcaaaataccagacattcttcacagaaatggaaaaaacaatcctgaaatttatattgaaccacagaagccccagaatagccaaagctatcctaagctaaagaagtgaaggaatcacattacctgactttaaattatagcacagagctataataagcaaaacagcatggtactgccataaaaacaaacaaaaagaccaatggaacagcatagagaactcagaaacaaattcatacatctagagtgaactaatttttgatgaagccaccaatatcatacattggggaaaggagagtttcttcaataaatagttctgggaaaaatggatatccatatgcaaaagaataaagcttgacccctatctctg

SEQ ID NO: 895296 - DNA, 586 bp, Homo sapiens
tctttcagcttagatttgagccaaatattatagagattagagttggtggtgtgtgtgtgtgcacgtgtgtgtgtgtgtatacactcagacccacgcatgtatattttaaaactggagaaacagtgtgcttggatttctgtttagcagagcttatccatagatgttcttaaaaataaagttcagcatatatttctagtgcttggcagtgtactgtaaaacccatcttcgttgtggtaaagcatgtataattckcagagccctttctagaaagaaccaacataattgcaaatataatttaaaaattcaattgagatttatttttctgccaattcattttcattatttatttgtcaaaattttcaactttgtaggatgttcaacatggtcaatgccaaaataaataccagaatacttagacagaaggtactaatagtaggaagattcttattatgaggtgcttatgatgtgacaggcacattgtgacctgtgctgggtaaattacatgcattatttttatcttaaaatttattcattgattaatttttaatttcaatagtttttggggtgcagatggtttttggttaca

SEQ ID NO: 895297 - DNA, 580 bp, Homo sapiens
tactgttattaccattttatacaaaatggtataatacatacaaaatatgtattttgtatgtcttcgtcagccttaaagccacttttgaattttttagcatattttcccagaacatgtcaattttatttccatttaaattgcttgagatatgagatgatgacatagtccctgaaaattttattcccagctgtgtatctccctggagtctttgacttacttccatgtgggcaggaggtgctttgcatcaggccacacctgccatcctggagcctcctmaccctcatcctggggaatcccttccctcttctcagggtgagagcatcagcttctcagataccacatctttctttgaattaatttatcagttttggggcacttcattagtaatcttctggagaaaaagttacaccaaggggtgaatttattgagatcttttctttctattggatttctactgtgctgtgatgagttttaattctcaagagttttttatgtcaacatattcttttttcatgtatgtaatatctttttacaaatattaataacagcttttaaaaaaattttgaatttttttatttca

SEQ ID NO: 895298 - DNA, 577 bp, Homo sapiens
agcctcccaaatagctgggactacagttgcataccactatgcctggctaatttttgtgtttttctgtagagacaggtgccgagaccagcttggtcagggtgaccctaaccgagcgggcctgagcgttagaggaattaaagacacacacacagaaatatagaggtgtggagtgggaaatcaggggtctcacagcctccagagctgacagcctcaaacagagatttacccatgtatttattaacagcaagccagtgataggcattgttttgatagattatagattaactaaaagtattccttatgggaaacaaggggatgagctgaaataaagagatgggtttggctagttatctgcagcaggagcatgtccttaaggcacagaytgctcatgctattgtttgtggtttaagaaagcctttaagcggtttgctgccctggatgggccaggtgttccttgccctcattccagtaaacccacagccttccagcatgggcatcatggccatcatgaacatgtcacagtgctgcagagattttgtttatggccagttttggggccagtttatggccagatttt

SEQ ID NO: 895299 - DNA, 671 bp, Homo sapiens
aatccaaggaaaagcaacccatcattcagtcaaaaacctgtgatttgtccgatcatgaagactgttcaatggagataattgtagctaactggactgaagaatatcacctttctttgaaaggagttcaactgttagcaaaggcaaaaactgaaagaaaaagagaaatgtaactagtagaagcctacaagcaggagaagccaaaaagaaggaaaagctaatacaacagatgctattatgttgagcaaaagaagagagtacacataytggtgacttattggaaggacaatcagactcagaataattgtctccattatagtgaagcacaaaatggagccattagaagctacccagttaaccagaacaactggacatcaagaaggaattttcagttctcaaatcatgttctgtctccttgagtcctgcaggatagcttcagcatgtctttattcctgtaacctactaaactctagctactcccacatggctgcaatgaattttaccagtttttaaaaaatcaatactgatttaaataagtaggaaaacgtattagtaggcattagtaacaaagtgaaacaagactgacagaaatcaaaatttaagaaaaactaataaatattattttttccttttctttctttattcattgtaaagatgaggttttgctttattgc

SEQ ID NO: 895300 - DNA, 672 bp, Homo sapiens
aaataaagttttgcaatgaggctttggtgttaatgtacatatccaatattccacaattcatggatatttgtcttaactctactcaaagtttccacttattttaaatttatcacaagcactcaagacagaaatcagaatggtgcttattttataccacatctccagacccactttgtaaaaaattacttttagttcatcttgcctctataatcaatcttagaacagttttgtaatacattgtataatamgtcagcagaaatcaattcaagcaacccttcagcagctcatactaacctcaaaggaatagcagatgacaccacttgccattttaatttgttaaatggtatggagggaaaccagatatggaacacatatttccaattaaactttataatgcttggttgatatttatctgagacattgcattttagatggtagaattgtagtagcacaaaattttagtcaactaattttgaggctgaattgtagaatgaaacatgtttttttaatatgaaaagtagaaaggatagtacctgaagtgtgttaggcttgtgagtccagaactctttctcatgctacattttagaaatgctgatgtagaattctccattgttataatctgaactgaaatctagaccttgtaataaattaaaaagaaatagaaaattttgg

SEQ ID NO: 895301 - DNA, 665 bp, Homo sapiens
ggccatttgtatatcttctttttttgagaaatatctattcaaggtccttgtccccaccaacttttttttgagacaggatcttgcttctaggctggagtgcagtggcaccatcatagttcactgtagcatcaaactcctggattgaagcaattctccctcatcctccagagtagctaggactacagatatgaaccactgtgcctgacctttttgtgttttttttttttcctttgagatggagtctcgctctgttgcccaggctggagtgcagtggcgagatctaggctcactgcaagctccacctcccgggttcatgccattctcctgcctcagcctcccgagtagctgggactacaggtgcccrccaccacgcccagctaattttttgtatttttagtagagacagggtttcaccgtgttagccaggatggtctcgatctcctgacctcgtgatccacccgccttggcctcccaaagtgctgggattacaggtgtgagccaccgcgcccggccctttttgtctatttttaaattgaattttttttgttttcttgctattgagtggtttgagttccttatatattttgaatattaactcctttaggatgtagggctttggcttacaaatgttttctccccatctgtaggttgagtcttcacactgt

SEQ ID NO: 895302 - DNA, 665 bp, Homo sapiens
ggccatttgtatatcttctttttttgagaaatatctattcaaggtccttgtccccaccaacttttttttgagacaggatcttgcttctaggctggagtgcagtggcaccatcatagttcactgtagcatcaaactcctggattgaagcaattctccctcatcctccagagtagctaggactacagatatgaaccactgtgcctgacctttttgtgttttttttttttcctttgagatggagtctcgctctgttgcccaggctggagtgcagtggcgagatctaggctcactgcaagctccacctcccgggttcatgccattctcctgcctcagcctcccgagtagctgggactacaggtgcccaccaccaygcccagctaattttttgtatttttagtagagacagggtttcaccgtgttagccaggatggtctcgatctcctgacctcgtgatccacccgccttggcctcccaaagtgctgggattacaggtgtgagccaccgcgcccggccctttttgtctatttttaaattgaattttttttgttttcttgctattgagtggtttgagttccttatatattttgaatattaactcctttaggatgtagggctttggcttacaaatgttttctccccatctgtaggttgagtcttcacactgt

SEQ ID NO: 895303 - DNA, 665 bp, Homo sapiens
ggccatttgtatatcttctttttttgagaaatatctattcaaggtccttgtccccaccaacttttttttgagacaggatcttgcttctaggctggagtgcagtggcaccatcatagttcactgtagcatcaaactcctggattgaagcaattctccctcatcctccagagtagctaggactacagatatgaaccactgtgcctgacctttttgtgttttttttttttcctttgagatggagtctcgctctgttgcccaggctggagtgcagtggcgagatctaggctcactgcaagctccacctcccgggttcatgccattctcctgcctcagcctcccgagtagctgggactacaggtgcccaccaccacgcccrgctaattttttgtatttttagtagagacagggtttcaccgtgttagccaggatggtctcgatctcctgacctcgtgatccacccgccttggcctcccaaagtgctgggattacaggtgtgagccaccgcgcccggccctttttgtctatttttaaattgaattttttttgttttcttgctattgagtggtttgagttccttatatattttgaatattaactcctttaggatgtagggctttggcttacaaatgttttctccccatctgtaggttgagtcttcacactgt

SEQ ID NO: 895304 - DNA, 628 bp, Homo sapiens
tagtacagccagacagggaatgtaaaggcaagaggccctccagtggggctctggcacttgagacccacatcccctcaaactagagcagctgctacccagccctagttacctgttgccaagcaggaactcagaccttgtgttgctagagaaatcagtaatctggaattttttttaaaatgtgaaatrtcctaattttaaaagctggcagttaactcaaattaatgaaacaaagcaaagcaaaatgctatgaagatccaaacaaacaaacaaaggcaaatgcctgtgcgctagattcagccctcaggttaccagcctgccgcctctgcataatctctgtgtggcaaatttaggcaaaatgctgtaaaatcttttcttgtggagactaatattcaagtggagaaggtgaaaatattccagggccctgcagaaagagtgtactagccagactccctggagtctctgtggggaagagctttggctatgctaagggagattcttagcttcttgtatactttacagtctgcagatccatcactgtgagaacctcaaaaaagaagccagacttttccattgacttcaaggctgtgtcagcaaatgccagactcagcaggccctttctattgtatgt

SEQ ID NO: 895305 - DNA, 740 bp, Homo sapiens
ggtttacttttctattgcattgtcaggctgcaaattttctgaacttgccctgtttcccttgtaaaactgaatgcctttaacagcacccaagccacctcttgaatgctttgctgcttagaaatttcttctaccagataccctaaatcatctctctcaagttcagagttccacacatctctagggcaggggcaaaatgccaccagtctctttgctaaaacataacgagtcacttttgctccagtttccaacaagttcctcatctccatctgagaccacctcggcctgaatttcattgtccgtatcattagcattttgggcaaaaccattcaacaagtctgtagggagttacaaactttcccacattttcccatcttcttctgacccctccaaactgtttcagtctctgccagtacccagttccaaagttgcttycacattttcaggtatcttcagcaacaccccactctactggtatcaatttactgtgttagtcggttttcatgctactgataaagacatacccgagaagactgggcaatttacaaaagaataaggtgtattggacttacagttccacatggctggggaggcctcacagtcatggtagaaggcaaggaggagcaagtcacatcttacatggatgacagcatgcaaagagagcttgtgcagggaaactcccattttaaaactatcagatcttgtgagactcattcactatcatgagaacagtgcaggaaaga

SEQ ID NO: 895306 - DNA, 740 bp, Homo sapiens
ggtttacttttctattgcattgtcaggctgcaaattttctgaacttgccctgtttcccttgtaaaactgaatgcctttaacagcacccaagccacctcttgaatgctttgctgcttagaaatttcttctaccagataccctaaatcatctctctcaagttcagagttccacacatctctagggcaggggcaaaatgccaccagtctctttgctaaaacataacgagtcacttttgctccagtttccaacaagttcctcatctccatctgagaccacctcggcctgaatttcattgtccgtatcattagcattttgggcaaaaccattcaacaagtctgtagggagttacaaactttcccacattttcccatcttcttctgacccctccaaactgtttcagtctctgccagtacccagttccaaagttgcttccacattttcaggtatcttcagcaacaccccactctactggtatcaatttactgtgttastcggttttcatgctactgataaagacatacccgagaagactgggcaatttacaaaagaataaggtgtattggacttacagttccacatggctggggaggcctcacagtcatggtagaaggcaaggaggagcaagtcacatcttacatggatgacagcatgcaaagagagcttgtgcagggaaactcccattttaaaactatcagatcttgtgagactcattcactatcatgagaacagtgcaggaaaga

SEQ ID NO: 895307 - DNA, 635 bp, Homo sapiens
gtaaattttgattcaatatttttatcatcttccctaagtctctgctagaattctttaagggatgaagcctttgaccagagggctacttaaagcttttccttgatgttcacattttctgagttcatacacgtaatgtgtttttgaaaagtgcctggcattactaagtgttcaataaataataggcattaatattcttgtttatttctattcttgttatactaatgatttaactattttcctggcatattgctagaacttggtaaatggccaataatggttaattctctctctacctgtgtgggataaatatacttccaagtcacaaaagaacaaagaaaagagagctcatttcaaacagctaataaatggtacagctaggagtattttctccttgcatatcactttaaagatcatatttttctaaaaatatactatatttatttcagtagactagataaagtatgcatacaagtattgtmaaatgttaaataaacatggaatggacaactgagtgggacagaaaagtttacatgaaataaaaggaaaggttaagtaagctaacctaaacagagcacttaatgagagacatttgtgataaacacattctcagacaaaatctcattgaattctcaaca

SEQ ID NO: 895308 - DNA, 586 bp, Homo sapiens
cacatctcacctggatggcagcaggcaaaaagagcgtgtgcagggcaactcctgtttttaaaaccatcagatctcatgagacccattcactatgacaagaacagcatgggaaaaacctgcccacataattcattcatctcccactaggtccctcccataacacatgggaattatgggagctacaagatgagatttcactggggacacagagctaaaccatatcattccacccacggcccctcccaaatctcatatmtttacatttcaaaattaatcatgccttcccaatagtcccccaaagtctcaactcatttcagcatttactcaaaagtccacagtccaaagtgtcatctaagacaaagcaagtcctttctgtctgtgagcctctaatatcaaaagcaagttagttacttcctagatacaatcagggtacaggcattggtaagtacagccattccaaatgggagaaattgactaaaatgaagtggctacaggccccatgcaagtccaaaatccattgggacagtcaaatcttaaagctccaaaatgatctcctttgactccaggtctcatatccaggtcacgc

SEQ ID NO: 895309 - DNA, 654 bp, Homo sapiens
aagaggtagcttcccatagtcttgggcagctccacccctctggctttgcagggtacagtctccctcccagctgccttcacaggctgtcattgagtgtctgtggcttttcctagcacatggtacaagctgtcagtggatctaccattatggggtctggaggatggtggccttcctctcacagctccactgggcagtgccccagtggggactctgtgtgggggctcccacttcacatttctcttctgcactgctctagtagaggttctccatgaggaccctgcccctacagcaaacttctgcctgggcatccaggtgttttcacacatcttctgaaatctaggtggaggttccaacctcaatgcttgatttctgtgcactcacacactcaacaccatgtggaagctgccaaggcttggcaccctctgaagccatggcccragctctatactggcccctttcggaaatggctggagtggctgggaagcaaggcaccaagtccctaggctgcatacagcactgggaccctgggcccggcccacaaaaccactttttcctcctaggcctttgggcctgtgatgggaatggctgctgcaaaggtctctgagatactctggagacattttcctcattgtcttggtggttaacatttggctc

SEQ ID NO: 895310 - DNA, 643 bp, Homo sapiens
actatacataaattatcattgagaagttgttttaaaaactccaaattgcatttttacatgaatgtttaaacattagaaaatcagatatttgaaaataatattgttcctgctaaaatgtgtctgtagattagacaagcctgtaagttgaacatttgtggtctctgttttacataattaatgcatggtgaattgttatactattattgactttgttggggaaggttttttttctttttcctttaatacttgatccatactcagaatatacaggcacaatcagattctatacaacagatatttcaaagaaaagatattcagagtttatacaaattgaagtagggaaccatatttttaaatttatttttcactgaagctctattgatttcttatttggctgaacctatatgatcttttgtgactagcttacctgtatttgagtatgttcaccctacaccattaatcaaaccrtcctctgtggaaaagtgagcttatttcctgaaaaatatttaagaaaagaggagacatttactgtcttttacatactccacccccaacataaaaaattgttcttacattcaaaatgtattgcgtatttggctaattcacagtttgcatcttcgatcctaggcttggcaggttcttg

SEQ ID NO: 895311 - DNA, 630 bp, Homo sapiens
aatgttttacctcagggttgcagagttaatctcctatgtcctttctttagaaatcttttattttttaaataaaaaaaatcttaaaaaagcattttggttattatttattcaaatgaaaatgttagcatagcacttggtctcatcttttggaattcaagactttctattttctggattatgaaaatagaaagttctcaatctggagaacacagggctttaacggaataaagccttttttcctagagtgtgacaacagtttgccacttcgtatagcatcatttctcaagtatgatgactggattcctttgttgccactraaaaatgagccatggtcaaaacgggtaggtgccatgacctttctctttctttatactccagagtatcacagagattcagtattaataagctgtaataaagaatcaggcagatcacgagtattataaataatgcatacatgtatcaagcctagagcctatccaatgtactactaaatgttaggcattttattcttctatacttattttgaatggaatattatttttatttactgcaattgttgatattaatgatcctatctaacaattggatgatggctgactactctttcatgtctgctgctccttacacctg

SEQ ID NO: 895312 - DNA, 637 bp, Homo sapiens
ttttcacactacttttacccctttttctagtttatttgtagtgttactgattactgtttgttttggtgtaaattggggttgctccttggtttccttaagctggctacaattcaaccttttggattgtgctaagctatttaccacctccctctctgttctccagcttccaaagttttattgctattatctcctcttcccattttgtcctcgtgggtttgtcttttgtgaatctttccagcctcctcctcctgccctgcccattttgtgcattttctggaggaggcaagattaatgaatttattcagtcctccatttttgatgcttgttccccagagcctaccagctttcagtcatgtagcttttatctttacagtgtatctattttmtatcctctctgtcctatttcttttggcaccattctaactcagaccttcagaaactcccttgtaaacaagatcttcatcccaagattcttaccatcccaagattaaatccatttgggataacactgccaggctaaccttcccaaagcatagcactgtgtacaccatccccttgtttaaaaacctttacaacttgctactaatcaacatgaaatataaatggttcgctcctgtatttaagttctggcattata

SEQ ID NO: 895313 - DNA, 630 bp, Homo sapiens
attccaaagaggcaaaactttgtttttatattgctgggatggaattggtgggcttccgtttccctcctgctacaatcttcttggaaaaatatttcaaggctttatctatagacatatgagaaataggagataatttcttctctctgcttcccttttttttcaataacaaartaagacagggcactgctgccctaataatatgcagaaagcctgggtatggtggcttatgcctataatcccaacactttgggaggccggggtgggaggatcacttgagaccaggagttcaataccagcttggacaacatggtgagaccctgactccacaaaaaataaaaacattagccaggcatggtggtgtgcacctgtagtcccagctacaggaggctgaggtgggaggatagcttgtgcccaggagttagaggctgcagtgagctatgattgggcaactgcactccagcctgggcaacagaatgagaccctgtctcaaaaagaaaaaaaaaatgaaaaaaagaaaaacaaaagaatgtgcagaaaacttgtctggccactggacagaaagtctgacaggataaaataaccattgaggcccaggttcaaccaggcaaacatccctgaaataccagaacc

SEQ ID NO: 895314 - DNA, 604 bp, Homo sapiens
actcttttcaacatatgggattctggttttctttttttctttttttccttttctctcttgcttcactttctcttaacccctcctactcaatttaggtgctacttctcccaggaagcatttctttatctttcaagtataagtrggaagtaatattcaaatcatacaaagtatcttttccaatcacaatggaataaaactagaaaccaacaattgaaagaaaacggaaagatttacaacatgtggaaattaaacaaccaattctcaaactaccaatgagttcaagaagaaatctcaagggaaattagaaaatagtcacacatgcatgaaaatgaaaacacagcattctaaaactgatgggatatagcaaaagcagtgctaaaatggaaatgtctagctgtagatgcttacattaaaatagaagaaagatcttgaactggggtacatgatgtcagcaagatggcagaataggagatctcccactcatattcccccgtagcaacaataatttgacagccattcacaaatggctttgtgggaacatggtgggagtttgggaatctaggcaggaagttgtgaaactgtagtggagccccagaccaaggat

SEQ ID NO: 895315 - DNA, 430 bp, Homo sapiens
gtgtgtgctttttttcatagtagagtcaccactggcataactgctattgttccatggcccaggaagtctgtgggggaggcccctcctccacatatccaatatatccatatattggcaaaatatgtgcaccatatctcttctctagtttgtgtcctcatcttgcaaatttcatataatatatagataagctagctttagatggcactggttttattagtagacytgaagcatgttctacctcatgctaatctaaaaatattttacctatttatgccaaactgctaagacatactgacaaagcaataaatgagaaatgtggctgacttctgcgggattgtataagcagtcaagcatctccagcagagtcccagactgaccaataaaagtctcttacattgtgtttcattgcactatgcactgagatttgtat

SEQ ID NO: 895316 - DNA, 525 bp, Homo sapiens
acatttagtaacctacccagtgctttcacagtctctcttttgatactcttaacagctctgtgagtcaaggatatttatcttcatttcacagattggaaaactgaaacccagagaaaagggacttgcccaaggccacacaccaaattagtgacagagctagaactagactccagttctccgacttccagctaagtctctttagcttcagcctactgcctctatagcggaaggacttgttccaaggaacaagttaaactgccccagggaaaaggaacctgtgtggcctactttgtattatttacacttcagctggaatgaatttcagatcctcccctgaaasttttaatggggaaaaggaactagagagactaagacaatgagacttgaacatttttaactaaacaggaaacagaagggctaacacagcacccatgtctgaagtgaccatgattagctggtttctagctggtgactagctggccctgactggtccacttactaccttaaagttctcccaggtttggt

SEQ ID NO: 895317 - DNA, 590 bp, Homo sapiens
ttaactgacctgggaactcctgaatcccgctttcccaatctaggatccctgaattgccattacaggtctaacaaactcgctggaaaggctttacctgcattaccctgtacctacatgaaaatgtaccctcttattctatctagagttaatatttacaccagaggtttcctatagcatttttcatctctcagtttctcaatgtgyatattaatggattcaacatgggtgtgataactgtataaaacacagtaatgaatttattaataggaaagtttgaaacaggtctaacatacaggaaaatacagggaacaaaaaacaggacaaccacggtaatgtgggagctgcaggtagacagggctttatgcctcccttcctgactataagttttaagggagattaggatgaccccacaggagattagtagaaggatgaacaagaccatacagattcctccaccattggcaacaacagtgaggcctataaagtaggtgtcagtgtgtgccagttccaataatgggtacatgtcacagaaaaagtggtcaatgatattgggaccacagaaaaggagactgtacgcaactaaaatttga

SEQ ID NO: 895318 - DNA, 665 bp, Homo sapiens
tggtgtgagagatgcaggtagagaactttagcatctttcctccaagctgtgagttttcaaagtacataggatggccacttaagaaaccatcaagaaaatgatgtttaacaggtagttgaacccaccattggcagcaacaaagaaacsaattgtattagtagtacccatgcagaggagtttcaaaaaagtgtttaagtcacacatgaatgagctatgacattggggtcatagaaaggaagtcagactggggagaggatctaaactgtgcctggataaagctttcagtacatgccattccagtgagatggctacacctatattgattcacgatggtcatgtagtacagacggtcacataacagccatggaccatccacatcagtggaataatctcagcagcacaaaaagattctcagcaaagacttccagatactttatccgtattgatacaagcatggtactacatatgctcccatattttttttattaagtcattaggtactcaaaaaaactcaataaacttatatgatgatttcatttacaaaatatgacacagagtactgattagcatttgatatcttacagcaagtgttagaaaaatttatttactggtttagatatttctcataaaatggttgtctatctattatctatcttcttcatcat

SEQ ID NO: 895319 - DNA, 685 bp, Homo sapiens
gtactgtatacagatttttaatgtaatatttctaccttttaaaagaaaaattgaaagccaaatggataatcataaatagcaaaaatggaaactgtacaaaataatataaaatgagaaataaatctcttgtccatgtctgagtgcagtctcctagttctcttcatcagaggaagtcactattatctgtttcttaagatgtttcaggtaataatcttyaaatgtaaatatatgtgtgtgattttatctatgtacagaagcttgctacttcacatagaagggagctagggcctaggatgtgggcttcataactcttcccagtcccctatcctactgtggtcagttagttgcatccaggatgcaagacaaagccctctttactcttcacaattcactctcctctcctcaagcagaaggaaggagtcacttttgttgctgcaagctgcactgcctggggtcaggggaggggtggcacaagcacttccttggcagccctggctggtgtctccataggtcatgtgctcccctattgcactggctctaagtccaacccagcactaggacttgcctaggaattgcaggccttgtgtcctaggctgcctttgaagtttacctaagagcccagagcactttagcccacagtggtgagacttgccaagaaattctagttttgacttctgtgatgagt

SEQ ID NO: 895320 - DNA, 680 bp, Homo sapiens
ttgcctcaattccctttaccattatgtaatgcccttcttggtcttttttgatctttctaggtttaaagtctgttttatcagagactaggattgcaacccctgctttttttgctttccatttgcttggtaaatcttcctccatccctttattttgagcctatgtgtgtctttgcatgtgagatggatctcctgaatacagcacaccaatgggtcttgactctttatccaatttgccagtctttgtcttttaattggggcatttagcccatttacattgaagattaatatggttatgtgtgaatctgatcctatcattatgatgctagcttgttactttgcccattagttgatgcagtttgttcatagtgtcaatggtctctacatttttgtatgtttgtgcagtggctgktaccagcttttcctttccatatttaatgcttcctccaggagctcttgtaagacaggcctgagggtgacaaaatctctcagcatttgcttgtctgtaaaggattttatttctccttcacttatgaagcttagtttggctggatatgaaattctgggttgaaaattgttttctttaagaatgttgaatattgactcccattctcttctggcatgtagggtttctgcagaaagatcctctgttagtccgatgggcttccctttatgggtaacct

SEQ ID NO: 895321 - DNA, 626 bp, Homo sapiens
aatttcctgttaaaagcatgggttttgctgtaagacaaagccccacattgtcatttattaactttgcagtcctggaaagtcatttgacctctctaggcttaaggtccttcacctataaaacagaggtaataggccgggcgtggtggctcacgcctgtaatcccagcactttgggaggctgaggtgggcggatcacttgaggtcaggagttcatgaccagctcggccaacatggtgaaaccccgtctctactaaaaatacaaaaattagccaggcgtggtggtgcrcacctgtaatcccagctactcaggaagctgaggcaggagaattgtttgaacccgggaggcagaggttgcagtgagccgagatcgtgccactgcactccagcctgggcgacagagcaagcctccgtctcaaaaaaaaaaaaaacaaaacaaattaaaatagaggtaatagttactacagcatgatgttatagaaattaactgggataatatatataaaacccttaacccagtgcctgggatctaataagtacttaatgagtggcagttttggtttttcagcagaggataagcacaggctggttgacagcagtggtcaaagactgagggtggtgggcctgtgg

SEQ ID NO: 895322 - DNA, 650 bp, Homo sapiens
aatagccagcaagctccaaacaagatactttctctaggcagattcgtgagcttccctgttaggtggaggggtggggcatcagaaacgaaatctaaagacccctgatcttccagcatggctgtgcttgacgccagagtagaacactcgccccatgccagctgagcgcctatttccccactattgtattgctttctccccagctccccaaaacaagtcaaatttgagaatgggagagccggagctgggtaattggttagaagagaccagaaaaggttcttttcaggagccaaatgagaaggtgacctattggaccttataaaacatgagcactgcctctcttgaaagaagccaaacaggactgttttgaggagggcagctcagcccctaggccgtgaaggtccatcttcttaacctgggcacattgacctccacagactgcatgartttgggtcttcacgaaggcctgagtacccccggaactctagacaaaagtttgtgcatatacgtatttcgccctgaagagagaagagctttcatcacgttctcaaaatggtttgcagccccctcaagagttaggaagtgtaatggtgccttgggggaagctcacccggttgccactgggtcttggggagacgtcctctgcgggcccc

SEQ ID NO: 895323 - DNA, 379 bp, Homo sapiens
ggaagaattcttactggataagagactaaggctctacttcatgagacagagaaagagaaagagagagagagagagaaaaaaaaaactccccatgagacaattattaacatgatttggatatttgtcctttccaaatttcatgttgaaatgtaatcccaggccaagcatggtggcttatgcctgtaatcccaatattttgtgaggctaaggtaggtgtaytgcttgagctcaggagtttgagaccaacctgggcaacatggcaaaaccccatctctaccaaaaacagaacaaattagctgggtgtggtggcacacacctgtggttccagctattcaagaggctgaggtgggaagagcacttgagacttgagcctgggagg

SEQ ID NO: 895324 - DNA, 668 bp, Homo sapiens
tcttctgccttgggatcctgttgatctatgaccttacccccaaccctgtgctctctgaaacatgtgctgtgtccactcagggttaaatggattaaggacggtgcaagatgtgctttgttaaacagatgcttgaaggcagcatgctcgttaagagtcatcaccactccctaatctcaagtacccagggacacaaacactgcggaaggctgcagggtcctctgcctaggaaaaccagagacctttgttcacttgtttatctgctgaccttccctccactattgtcctatgaccttgccaaatccccctctgcgagaaacacccaagaatgatcaataaaaaaaataaaaaaataaaaaaaataaaaattataagtatgtgctaaaaaaaaaaaaaaagatttctaattcaagacatgcccacttcagtcagatagtgaagttccatatatatatatatatatatgaaatacgtatatatttggggaagcagtgaagggagaagaggttgatgtgttttgtaattctttgttttmggtaggatcttaattccccttaagttcttctttcctttcactaacgcatctccaaagggcacctccccctttctacttatctctttcccagaagtgatgcctttccaaaactgccacctttggtctgacacacttt

SEQ ID NO: 895325 - DNA, 651 bp, Homo sapiens
gccatccccaacctttttggcaccagggaccggttacatgaagacaatttttccacagaccaagggtgcgggggatggtttcagggtggaactgttccacctcagatcatcaggcattagtttgactctcataaggagcacacaacctagatccctcatacgtgcagttcataatagggttcttgctcctatgagaatctaatgccaccrttgatctgacaggtggagctcaggtggtaatgctcactggacagccattcatctcctgctgtgccgccatggcccgaggactggggatccctgggtttgagaattacagatgatttctgcttgtatacttgctccattttctattataaatatgtataacttttataattatataaaatgattgtgtaattattttatataggatgtattttatatgtagggggtatgattgtgataaaacaaaagaaataaaagagactggaccaagaaaagggtgaatctgccgatgttattacttgtgcataacattggtggggggaaatgaagacactcatttcaaaggttagtcataaagtttacatgaaatagcaatgtaaagcattttgtccactggcaaatttaaaaatagctggctatcactattatctgctccttcatatt

SEQ ID NO: 895326 - DNA, 606 bp, Homo sapiens
ggacctcttcaaggagaactacaaaccactgctcaaggaaataagagagaacacaaacaaagggaaaaacattccatggataggaagaatcaatattgtgaaaatggccatactgcccaaagtaacttacagatacaatgctattcccattaaactaccattgtcattcttcacagaattagaaaaaactactttaaaattcatgtgaaaccaaaaaagagcctgtatagccaagacaatcctaagcaaaaagaacaaagctggaggcatcacactacctgacttcaaactatactgtaaggctatagtaacaaaagcattatgatactggtataaaaacagacacatagaccgatggaacagaatagaaatctcagaagtaagaccacacayctacactatctgctcttcaacaaacctgatagcaataagctataggaaagggttccctatttaataaatggtggttggaagaaatatctagccatatgcagaaaattgaaactggaccccttccttacaccttatacaaaaattaactcaagatggatccaagacttaaatacaaaaccccaaactataaaaaccccagaagaaaatctaggc

SEQ ID NO: 895327 - DNA, 606 bp, Homo sapiens
ggacctcttcaaggagaactacaaaccactgctcaaggaaataagagagaacacaaacaaagggaaaaacattccatggataggaagaatcaatattgtgaaaatggccatactgcccaaagtaacttacagatacaatgctattcccattaaactaccattgtcattcttcacagaattagaaaaaactactttaaaattcatgtgaaaccaaaaaagagcctgtatagccaagacaatcctaagcaaaaagaacaaagctggaggcatcacactacctgacttcaaactatactgtaaggctatagtaacaaaagcattatgatactggtataaaaacagacacatagaccgatggaacagaatagaaatctcagaagtaagaccacacatctacactatctgctcttcaacaaacctgatagcaataagctataggaaagggttycctatttaataaatggtggttggaagaaatatctagccatatgcagaaaattgaaactggaccccttccttacaccttatacaaaaattaactcaagatggatccaagacttaaatacaaaaccccaaactataaaaaccccagaagaaaatctaggc

SEQ ID NO: 895328 - DNA, 645 bp, Homo sapiens
taaaaaaactaataaaaataacaatatatgtaaaatattaggtataaatgaaaatagaattctaaaacaaagttcaagtaactcaaaagaaatcaagaaaagatgctgagagtaacaaaaaacagaatgaacaaatagaaaacaaataataaaatagaagacttaagcactaacattaaacaaaaacccatattccagacatccatgaagaagtaattagacataggaatgatatgcaaaaaaagacttccaaaacttctaaagttgaaaattagaatgtctgagaagaaaaaatacatggaatgtatctagtggcagaatagacatagcagttgaaaagattagtgaacttgaagacataaagatagcaactatctaaaaggaaaaacacagagaaaaataattttaaaatgataataagaacatcagtaacctctgggacaattccaaggaccctaatacatgtgtaactggagtctttggggaaaggagcacaaaaagagtcsaaggtataacaactgaaacttttccaaacttgatgaaaaactataaacccacagatccaagaagctcaacaaatccaaagcacaagaacatgaggaaaattaacccaaggcacatcacaatcaaatttctcaaaaacca

SEQ ID NO: 895329 - DNA, 597 bp, Homo sapiens
gtgatctgtccggatggcagctatccctccccactagttcttgaagatttctccttttctagcatgatccgtgtgttgtgtgacaattaccacctctctctgtgcacatctgtctccttcaccttcttacgatgtccatacattgctgtgtttacttgatcaagggatctgaattcatggkggcgagtggcaccagacagtgcatctaaataatgcaatgttacccagcactggaaggaggctggggtcagccagaagaacactgaaaataggaagaagcttaggaggccaaggaatgtgttcctaggtgggcaggaggacagcaaagttcctggtaatggcatagaaaccaggaacctgtctttaagaggataggaagtctgttgggtttggaaggctggccaaggaggagcaatctctacccagaacatgtaaagacagtacacaactggacacaggtcaacagatggctttgatatttagagaacagatgtttaaaagagtcatgcaaggaatgttcacagaagaaagcaggtattgttatggaagctgagggggtaggacatttgcgtaaggcagaggactggaagtgggttt

SEQ ID NO: 895330 - DNA, 540 bp, Homo sapiens
aagaagacattgaggagccttaaatgaatattacaaagtgaatgaagccaatctgaaaaggccatatagtatatgattcctgctatgcaacatttttgaaaaggcaaaactgcagagaaagttagaaacttagtggtggccagggatggtggctcactcctgtaaccccagcacattaggaagccaaggaggaggattgcttgaggccatgagttagagaccagcctgagcaacatggtaagactccatctctagaaaaagaaacttaaaataatttttaaaaaatagcctggtgtggtcacatgcttatagtcttagctactcaggaggctgaagtggaagtatcccttgagcccaggagagcacaggagtttktttttgtttttgttttttttaatactttaagttctagggtaaatgtgtacaacgtgcaggtttgatacataggtatacatgtgccatgttggtttgctgcacccatcaactcatcatttacatcaggtatttctcctaatgctaaccctcccccaacccccccac

SEQ ID NO: 895331 - DNA, 619 bp, Homo sapiens
acgtgccatgttgttgtgctgcacccatcaactcgtcatttacattaggcatttctcctaatgctatcccctcttccccccaccccacgacaggccccggtgtgtgatgttccccaccctgggtccaagtgttctcattgttcaattcccacctatgaatgagaacactcagtgtttgattttctgtccttgcgatagtttgctcagaatgatggtttctagcttyatccatgtccctacaaaggacatgaactcatccttttttatggctgcatattattccatggtgtatatgtgccacgttttcttaatccagtctatcattgatcgacatttgggttggttccaagtctttgctattgtgaatagtgccacaataaacatacgtgtgcatgtgtctttatagcagcatgatttatgatcctttaggtatatacccagtaatgggatcgctgggtcaaatggtatttctagttctagatccttgaggaatcgctacactgtcttccacaatgatagaactagtttacagtcccaccaacagtgtaaaagtcttcctatttctccacatcctccccagcacctattgtttcctgacttttaatgatcaccattctaa

SEQ ID NO: 895332 - DNA, 525 bp, Homo sapiens
tttgatctcatccagcaccactctctcccttgttcactgtgatccagctgcagtgacctcattcttgccctcgggccattgtactagctcttctttattccccgaatgctcatcttttagatcttcatatggctaggtccttgtcattactcagtctgcagttcaatttctcctccttagaggtcttcttgagccatccatgtaaagccattctctatctctttgagttattttctatcacattactttgctacattttgttgtcaacattttcaccacgtgattgtcagatgtaattgtttttttttttttttgtccattttttccagttagarttaaaatccatgaaagtagaggtattggctgttttgttcactatggcatttgcagcacaagaaatgcccacacgtttattctacgtcaagcctattctgtgccaagaatgggctgttatgaataaatgcagttttcaaagggacccttgctaaccagaatgcttctgcaattgatggctttccattcttg

SEQ ID NO: 895333 - DNA, 614 bp, Homo sapiens
gttttaggtcttatgtttaagtcttcaatccatcttgaattaatttttgtataaggtgtaaggaagggatccagtgtcagctttctgcatatggctatccagttttcccagcaacatttattaaatggggaatcctttcctcattccttgtttttgtcaggtttgtcaaggtcagatggttgtagatgtgtagcattatttctgagrcctctattttgttccattggtctatatatctgttttggtaccagtaccatgctgttttggttatgtagccttgtagtatagtttgaggtcaggtagcgtgatgccgccaggtttattctttttgcttagaattgtcttgggttgtgtgggctctttcttttgttccatatgaaatttaaagtatttttttgcaattctgtgaagaaagtcagtggtagcttgatggggatagcattgaatctataaatgactttgggcagtatggccattttcacggtattgattcttcctatccatgagcatggaatattctttcatttgtttgtgtcctcttttatttccttgagcagtggtttgtagttctccttgaagaggtccttcacattccttgtaagttggattcctag

SEQ ID NO: 895334 - DNA, 597 bp, Homo sapiens
tttgcaccatggaatttctttaaaatagttctacagtgcaagtcataattttctgaaatacttagaaactctgaagacaatggacagacgtggccatatgatttcaaatatatcatcaaggaatgatacagctttttgtcttctgtgtgcatattggattgaagagagacttccagctccttttgagtgaggtaaagtgtttttcaaatcatagataagcttcccaaaggtaagattttaacaggtgttagtgaaaccaagctttgcagatgtgtgaattttttactacataggaaattatatcatttgattttataagaattgaaatgttgaaaaattttgctggtgcaaagttgctggttaggttttatatgatacttgtcatgagtatatttamaaaatagaaaagttaagtcagcaaccatgatatatcctaaaaagttataactccacctagagaagtaggagactcatggtgaaaacgtgatttctcagacagcatcaagactttggtcctctgataaaatgaccccttgtatagatcctgagatgaattgagtagtagatgctcggtgatgcctgggagcctatcttatt

SEQ ID NO: 895335 - DNA, 605 bp, Homo sapiens
agggcagtgggtgcagcacaccgagcatgagccaaagaagggcaagccatcacctcacccaggaagtgcaaagggtcagggaattccctttcctagtcaaaggagtgacagatggcacctgaaaaatcgggtcactcccaccctaatactgtgcttttccaatggtcttagcaaatggcacaccaggagatcgtatcccacgcctggctcacagggtcctgtgcccactgaggctcaatcattgctagcacagcagtctgagctcaaactstaaggcagcagtgaggctgggggagaggcgcccactattgctgaggcttcagtaggtaaacaaagcggccaggaagctcaaactgggtggagactaccgcagctcaaggaggcctgcctgactctgtagactccacctctgggggcagggcagagccaaacaaaaggcagcagaaacctctgcagacttaactgtccctgtctgacagctttcaagagagtagtggttcttccagcatgcagctgcagatctgacaatggacagactgcctcctcaagtgggtccctgatccctgagtagcctaactgggaggcaccccccagtaggggcagat

SEQ ID NO: 895336 - DNA, 611 bp, Homo sapiens
ggacgcctcacacggccaggtactcctctgagacaaaacttccagtggagcgatcaggcagcaacatttgctgtccaccaatatccgctgttctgcagcctccactgctgatacccaggaaaacagggtctggggtggacctccagcaaactccaacagacctgcagmtgagggtcctgactgttagaaggaaaactaacaaacagaaaggatatccacaccaaaaccccatctgtacgtcaccattgtcaaagaccaaaggtagataaaaccacaaagatggggaaaaaacagagcagaaaaactggaaactctaaaaatcagagcacctatcctcctccaaaggaacacagcttctctccagcaacagaacagaactggatggagaataacattgatgagttgagagaaggcttcaaatgatcaaactactccaagctaaaggaagaatttcgaacccatggcaaagaagtttaaaaccttgaaaaaaaaattagacaaatggctaactagaataacaaatgcagagaagtccttaaaggaccagatggagctgaaagccatggcacaagaactacatgacgaatgcacaaaggctcagtagttgattc

SEQ ID NO: 895337 - DNA, 611 bp, Homo sapiens
ggacgcctcacacggccaggtactcctctgagacaaaacttccagtggagcgatcaggcagcaacatttgctgtccaccaatatccgctgttctgcagcctccactgctgatacccaggaaaacagggtctggggtggacctccagcaaactccaacagacctgcagctgagggtcctgactgttagaaggaaaactaacaaacagaaaggatatccacaccaaaaccccatctgtacgtcaccattgtcaaagaccaaaggtagataaaaccacaaagatggggaaaaaacagagcagaaaaactggaaactctaaaaatcagagcacctatcctcctccaaaggaacacagcttctctccagcaacagaacagaactggatggagaataacwttgatgagttgagagaaggcttcaaatgatcaaactactccaagctaaaggaagaatttcgaacccatggcaaagaagtttaaaaccttgaaaaaaaaattagacaaatggctaactagaataacaaatgcagagaagtccttaaaggaccagatggagctgaaagccatggcacaagaactacatgacgaatgcacaaaggctcagtagttgattc

SEQ ID NO: 895338 - DNA, 636 bp, Homo sapiens
agacatctacagaactctccaccccaaatcaacagaatacacattcttttcagcaacacaccacacctattcccaaattgatcacatagttggaagtaaagcactcctcagcaaatgtaaagaacagaaattataacaaattgtctctcagacmacagtgcaatcaaactagaactcaggattaagaaactcactcaaaaccactcaactacattgaaactgaacaacctgctcctgaatgactactgggtacataactaaatgaaggcagaaataaagatgttctttgaaaccaatgagaacaaagacaaaacataccagaatctctgggacacattcaaagcagtgtgtagagggaaatttatagcactaaatgcccacaacagaaagcaggaaagacctaaaattgacacccgaacatcacaattaaaagaactagagaagcaagagcaaatacattcaaaagctagcagaaggcaagaaataactaagatcagagcagaactgaaggaaatagagacacaaaaaactcttcaaaaaatcaatgaatccaggagctggttttttgaaaagagccacaaaattgataaaccgctggcaagactaatgaagaaaagagagaagaatcaaatagac

SEQ ID NO: 895339 - DNA, 645 bp, Homo sapiens
ttacaagggatgtgaaggacctcttcaaggagtactacaaaccactcctcaatgaaataaaagaggatacaaacaaaatgaagaacattccatggtcatgtgtaggaagaatcaatatcgtgaaaatggccatactgcccaaggtaatttatagattcaatgccatccccatcaagctaacaatgactttcttcacagaattggaagaaactaccttaaagttcatatggaaccaaaaaagagcccgcatcaccacatctatcctaagccaaaagaacaaagctggaggtatcacgctacctgacttcaaactatactacaaagctacagtaamcaaaacagcatggtatcggtaccaaaacagagacatagaccaatggaacagaacggagccctcagaaataatgctgcatatctacaactatctgatctttgacaaacctgagaaaaacaagcaatggggaaatgattccctatttaacaaatggtgctgggaaaactggctagccatatgtagaaagctgaaactggatcccttccttacaccttatacaaaaattaattcaagatgtattaaagacttaaatattagagctaaagccatcaaaaccgtcgaagaaaacctaggcaatattattcaggaca

SEQ ID NO: 895340 - DNA, 659 bp, Homo sapiens
aagattttatgaagactaagtcttctaactgaagaggggaactatattttcatttgtgggtaagggcaatactttgatttcatgattttttgaaaggcatttaaatctggcttagatttcaagggggagcatggtgaggtgtgtctgacccctggtttccygtcacgaccagagttagttttttttttaggtgtctttgacattccctttggccaattaaacattctaggccagatgagaatgaaggtgggcaggtatcattagtcctttaaattatttaaagcaatgtgagagtcaaaatgtaaaagccaaaaataaggttacacatcaagaaaaaccaaaaccatagactcaagatatatcggggaaaatatgtctctcatagacgtctaagacaaaatgctttagcatcaggctacaataatagagttggaggagaaaaactcacaggagctgacaaaaaaaaagagctaaaggatagacacatcatcataatccttcttatagagaaaaatagatgaaagcagcaagacacaacaacagttaaatctctgagatacaaatccaagaagtttcaaaagaaactatttatgacattacaagaaacatttctgataatttaacaaataaataccttccttctcatgtcaggggcagat

SEQ ID NO: 895341 - DNA, 659 bp, Homo sapiens
aagattttatgaagactaagtcttctaactgaagaggggaactatattttcatttgtgggtaagggcaatactttgatttcatgattttttgaaaggcatttaaatctggcttagatttcaagggggagcatggtgaggtgtgtctgacccctggtttcccgtcacgaccagagttagttttttttttaggtgtctttgacattccctttggccaattaaacattctaggccagatgagaatgaaggtgggcaggtatcattagtcctttaaattatttaaagcaatgtgagagtcaaaatgtaaaagccaaaaataaggttacacatcaagaaaaaccaaaaccatagactcaagatatatyggggaaaatatgtctctcatagacgtctaagacaaaatgctttagcatcaggctacaataatagagttggaggagaaaaactcacaggagctgacaaaaaaaaagagctaaaggatagacacatcatcataatccttcttatagagaaaaatagatgaaagcagcaagacacaacaacagttaaatctctgagatacaaatccaagaagtttcaaaagaaactatttatgacattacaagaaacatttctgataatttaacaaataaataccttccttctcatgtcaggggcagat

SEQ ID NO: 895342 - DNA, 675 bp, Homo sapiens
agttccacatgtctcacaatttcgattttgaaatttagatttcatttcaatcattagatatttggttttatgtctttgtcttctgtcagagccctcacttgggtgtgcttctgacccatttaattctttatgcttccatgtcttgcttcatctttggatggtcacaacacttaatatcaggctttgtatagagtaggtgtctattacatgttcgtgaaattgaaaagctgtaaacagtccaccagattgctcttaagtaactagcattggaaatatagtaccaaaaaccmaaaagaacaacaacttgtgcttttaaaatacgttcttcttctctgacttttagccattccaggatctctgttttcactgggactggagtcttatgttctggatcctgaaaacaaactgggatacatattttatctttcccttcatgctcagtccaaaataccctaccaactacttatattcaaaatgctgtaatgtgcaccataattttcctgtgaagcgggcaccaacacagctttcatttgcactgaaatggatgtcacatgcatattcttgaggtcctcctcaacatttggatgtgttcaagggttctgttttcttttgtgagtgcccatcagctatgctaattagttttctgtattaccaaacaggagggaacttcttgaa

SEQ ID NO: 895343 - DNA, 624 bp, Homo sapiens
taaatagccatgtgatcaaattccaagattctacaaccagagaatatgcccatataaagaaaaatatatcttagaacaacaaaagtaagaaggaaaacacaggggtaaatttttgtgaccttggatttggccatgggctgttagacgcaaaagcaaaatcacaagcaatacaaataaaaaaaaaacctagactttattaaaattaaaatgaaaacccattgttcttcaaatgcccctatcaagaaagtaaaagacaagccaaatatttgtaaatmatatatctgacacgggtcttctatctagtacatataaataactattacaactcactaataagaagaaaaatagctcaattttgaagtacttaaacagacatttctccaaagaagacataccaatgacctaagaagaacatgaaatgttcaacatcattggccattaggcaaatgtaaatcgaaatcacaataagataccacttaacatccagtatgatggctaaaaacaaaaagtcagatgagttttaaggagtgtgtggaaaaactgaaatgctcatagactgatagtgggatgtataatggtgcagccactttggaaaccagtagggaggttcctcaaaaaattaaa

SEQ ID NO: 895344 - DNA, 611 bp, Homo sapiens
atagtgaatatatttaaaattcactgaagaattaatgctaattaggctccagcagccaagaagagacaatgtaatttattaggatcacagtaggaagaataacaaggaactggactttccaactgcaacatatggaaacaattaatgtaatgatttaagctctattgtgaaacaaaccccattgtctcttaatactgctagagcaaccaattgctttagtaaagggagttctgggtgtccccagaatatttatattttagtaaatttttggaaagcagatatgatttggtagcctttactgaacactgcagtatacagagcatcttggtaggaaggtaacctgcatggatgattcaggccccatctcaaggagcttatctatcagcttcgagyaatattctgaaaccaggcacagccataattgctaataccacaaggcagcagatgtgggccactggcatgacagaaagtgccaccaggacacagaagtaggttccacgaattctggctcgggcattcaaataggtcttatggaggaggaacattttaattggataccgaaggacatgcacacgtgtgcacacgcatgcgagcacacacacatacacttt

SEQ ID NO: 895345 - DNA, 596 bp, Homo sapiens
aaaattaaattagcactttgcagaatatttttttcaaaaaaaaaaactactcatttcttacaataacattaaatttaattcaggctcccttgtctaaaagaaaatatctttgcatttagtggatctaattagcattacacagacctttcccattaagggaggggactkggaatatggtctttgaatagagaaattcatttacctattaatgaagaagaacaggacgaaagtctagggagctttacaagatagctttctccttctttggtctttccctcctttctgttgggttaaggcagggatttggtggaaagctttgcatcatgttggtctgtggaaaccagatctaatgggagaaaatggatctgtagcctcttaaagtgagatacctatatattatctcagatataagcaacctaagataacattcctgacataatctgtctccaggaaccttagcaaaaccgcaaagtataaatgatgtggttttttggcctccttgtcccccattctgagccttgccccctattctgctgttctctttgccaatagttctcttgatgaattttcatcacgaaagtttcccgctttaccca

SEQ ID NO: 895346 - DNA, 596 bp, Homo sapiens
aaaattaaattagcactttgcagaatatttttttcaaaaaaaaaaactactcatttcttacaataacattaaatttaattcaggctcccttgtctaaaagaaaatatctttgcatttagtggatctaattagcattacacagacctttcccattaagggaggggactgggaatatkgtctttgaatagagaaattcatttacctattaatgaagaagaacaggacgaaagtctagggagctttacaagatagctttctccttctttggtctttccctcctttctgttgggttaaggcagggatttggtggaaagctttgcatcatgttggtctgtggaaaccagatctaatgggagaaaatggatctgtagcctcttaaagtgagatacctatatattatctcagatataagcaacctaagataacattcctgacataatctgtctccaggaaccttagcaaaaccgcaaagtataaatgatgtggttttttggcctccttgtcccccattctgagccttgccccctattctgctgttctctttgccaatagttctcttgatgaattttcatcacgaaagtttcccgctttaccca

SEQ ID NO: 895347 - DNA, 596 bp, Homo sapiens
aaaattaaattagcactttgcagaatatttttttcaaaaaaaaaaactactcatttcttacaataacattaaatttaattcaggctcccttgtctaaaagaaaatatctttgcatttagtggatctaattagcattacacagacctttcccattaagggaggggactgggaatatggtctttgaatagagaaattcatttacctattaatgaagaagaacaggacgaaagtctagggagctttacaagatagctttctccttctttkgtctttccctcctttctgttgggttaaggcagggatttggtggaaagctttgcatcatgttggtctgtggaaaccagatctaatgggagaaaatggatctgtagcctcttaaagtgagatacctatatattatctcagatataagcaacctaagataacattcctgacataatctgtctccaggaaccttagcaaaaccgcaaagtataaatgatgtggttttttggcctccttgtcccccattctgagccttgccccctattctgctgttctctttgccaatagttctcttgatgaattttcatcacgaaagtttcccgctttaccca

SEQ ID NO: 895348 - DNA, 627 bp, Homo sapiens
ctgaagagtatgcacttaatccagtaattaagcacttcttaaagtatgttccttgaaatatcagacctacagccctcagaattctgccatcaaatatgtttcggaaacactggtttaaatggttaagcagtttcttttgcttagactcccttggtctttactccaatcatgtacattgtaaagctccaagaggggtttataatattcttcaaacttctaggatcctggcccctcttttaaggggagcaccttgtggscttggtgttctccatgacaccatttatgaaatctgctgtaagcaataaggagccagtaaagacctttcagcaggagattgacatgcttggaatttcagtcttctagagaatggcattgggtgaggcaatattggagtcagggagacaaagttgaagagagatgcaatggtttaggcaggagataatgagagcttgacaccaagggtagagaagggaccaagaaatataactgacatttaagaagtagcactttagggacattgttatattgtatagcttgtgccctatgcagggacacctggccaaatgggccccagggcactgaatccagcccacattcactgttgccaagctgtgcatccaggcagag

SEQ ID NO: 895349 - DNA, 648 bp, Homo sapiens
ctaaaaaatgaacatctattgtcaaccgaggctctcgatacagctaaattgggctttctgttactcaacctctaaattaaaagctgtttttcaaattaaattgatttagcaccacataattttttttcatttttatgaacaaaaaagtgtttacagataagtgctgtttcatggaccagtgctagtgaagcattgtctgggtaagagacaattgcatctgccatatccatgacagcaagaacyactatactttggttgaggatggaaaagaagttatctgaggcagaaatttcaggatttgatgatagcaaacaggtattatgtcttacatttaattatgtgatagattgcttttgtgtgaccttatctctaaaaactcagtaacatttggaatttaaatcctctctctaaagtttaaacagatcttttggggaggacatctcttccacaaactctgttaaattcatcacctgggctttgaaacaacactgcttgttgtctaggtagcatgtgagtctttagcagaacaacttttacagctttggcttttggggttccttcctataagagtccctggggccaggttggggagcaaatactgtattctcgtttctgaatttttctgtttttccccttagagcccaccta

SEQ ID NO: 895350 - DNA, 644 bp, Homo sapiens
ctattgatagaaagattagagggcctcagaaaaaaaggggagtcttttcccaaagaaatattcacacataaaaatgcataaaatgtgacctgccctaggttcttgtatgccattgaacaggatcgtgttaagcaaaaatgcatgatcrggaacaaactacattgcatacttattcatgacatgtgctcaatatttttgtacaaatgatatatttttatctgcacaaaaaatgtatattcaacatctgacatgtacccatcattgtgctatgaactttagctatagcagtggttttcaagtgggagcaattttgccttctgaggggggacttagcaatgcctggacacagtgttagttgtctcaatttggaggtaaggggggctgctagcatctagtctgtagaagccaaggatgctactaaacatcctacattgcataagacagccccacacagcaaataagtattcagctcaaaatatcaatagtgtcaaggttaggaaaccttgggctagaacaataaagtaggttgtgatggcccctgctctcagatagttcctatcctcagtgaatttgtggttaaagtaacccttaagacaaatagttacaaaggcagcaatgtgactgtaagcacgcttatgtccaat

SEQ ID NO: 895351 - DNA, 596 bp, Homo sapiens
agattattttggagctttaagatttaatgactgcccttctggattttggacttgcatggcatatgtagctcctttattttggccaatttcttccttttggaacagaagcatttatccactgcctgtaactcccttgtatcttagaagtaaataactwgtttttagttttacaggcttacctgtggaccttgtctcagatgagattttggacatttggacatttggacatgaggaattggacatttaagtttgtgctggaatgagttaaaactttggggaactattgggaagacatgattgcgttttgaaatgtgagaagaacatgaaatttgggagggaccgggacagaatgatatggtttgactctgtgttcccacctaagccttatattgaattgtaatcccccagttttggaggtggggcctggtgggaggtgaatggatcatcggggtgttttctaatagtttaataccattcccctagtgctatcttatgatagagttctcatgagatctgtttgtttaaaagtgtgtagcactttcccctttaccctctctcctctgtcgccatgtgaagatgtgcttgcttccccttca

SEQ ID NO: 895352 - DNA, 646 bp, Homo sapiens
tcatcaaggtttgagaatagcttggctttatgacttaagtgttacaaaatgtaaaaaataacattgcattagagctttcacacatttcaataaaccaggtagaacggtgtttttcagaatcacaaagtaaagagtatatgcaggattttataactgtagcaggaattttgttcaccctgaaaagtgtttctgtttgttcttcacatgctaatggaaactggtatgtaaataatttgaatgtttctctctcttttccaaaaaagacttatagtgaacaaaactttaattgttgcaaaagcttgtgtctatatgtcaggacccaattrcatgttacatgaacttgtgatctatggctttcttttacaaagcagctttggacttaaaatggtcaatgattgaaataactcttttggtttgtctttctctttaggtaaatatccagtcattaaaattttaatccctttttccgttctgtaacttgcgaggcctctattggtaaggaagggaggcctagaaatgcatccagttgctgctctccggtctttcttgacctctaatctgcctggtgacagttttgctttgctgtcatccaccatgataaatgtacctcagagtcatttcactctcttggctgaatatagccata

SEQ ID NO: 895353 - DNA, 622 bp, Homo sapiens
aaaaatatacagataacgtcatatttaatggtgagaaattagaagctttctcattaagatcaggaacaaggcaaacacatactctctcaccacagcttttcaacattatgctagaaatcctagctaatgcaatgagataagtaaagaaaatgtatactgactgagaaggaagaaataaaactatcttgttcacaaaagacatgattgtctaawagaaaatctgaaagaatcaggccaggtgtggtagctcacgcctgtaatcccagcactttgggaggccgaggcgggtggatcacaaggtcaggagttcaaggccagccttaccaacatggtgaaaccccatctctactaaaaatacaaaaattagccaggtgtggtggcgtgtgcctgtaatcccagctactcaagaggctgaggcaggagaattgcttgaacccaggaggcggaggttgcagtgagccgagatcacaccactgcactccagcctggacgacagagcgagactccatctcaaaataaaaaaagaaagaaaatctgaaaaatcaagaaaaaaagctcctggaactaataaacaattataacaaggtttcaggatgcaaggttaatatacaaaagtcaatca

SEQ ID NO: 895354 - DNA, 578 bp, Homo sapiens
cccttgccatttatcactgtcctggctgcaagttattatccttgtagaagagaaaaggtgctgagtcaatgtcgctagagaaatgcaagtctgaaaatataaaagaggtgctggtgatttcaggaaatgggagagggcagatgtatttgtggaactgggtactcctgatgtatatttagccttcaccttttgatgcttccagctaggcctctgcaagcacttgcatttgtgagccttagaaaggagctagtcctccaggatgttttctttctcccattctctcttagcctcctctcttaacccacccacctcccagccctctcacacccccgctggctcaagtctcactccatggagggaagggcttctgttcccggtcttttcttgctttctgcagatgcaagtgtctcargcttggaagggtattcatggagagagatctcccttgtacaggaatgggtgactctgagaagggataagctgctgaggttctgagggggcagagtgagtgggtgggccatcatggtcagggtcccaccagccacagctgttctggttccccaagcagcaaatacact

SEQ ID NO: 895355 - DNA, 683 bp, Homo sapiens
ggcaaattctggtggtgttctgagtgttattggatcattgtttcccctttatatgtttaatctctcttgattttttaatatactccagtggaaaatatttcatatgcaaattgttttgataatcatctgtctacatttttctttaatattttactttttcactttataaagaataaaatcccattaattccattatattaaacttttttgtttgtagaaatttgtaatgtaaaattatatatgcagtcagaaatacgggaagaaatagaagcccatgcaacaagaawaaacaaaaatctagtcctttggggttgacagctgtttatggctacctttctagcaactaattgcctttctcagtaaggaaaagttttagtgcagattcagatctcttttatttttaatagaaatgattattgtaactgtcatgagtatatcctttttagtttgttagaaacgcatttatctctgtgtgtgcgtgtatgcgtctgtgttgtatgtgtgtgagaatgtgtgtgtgtatatgtgtgtgtgtctgtgtgtatgttcaatatttttgctttcttttcttttcttttttaattttttgaccaattggtttcaggagtgtgttatttaatttctagatattttttattttttcaaattttctttctgttactaatttccagcttctttccata

SEQ ID NO: 895356 - DNA, 620 bp, Homo sapiens
caaagagacagcacaccagtatctcaaggatgcagctagagcagtgttaagagggaaatttatagccctaaatgcccacatcaaaaagctagaaagatctcaaattagcaacctaacatcacaactaaaagaactagagaaccaaaagcaaacgaaccccaaagctagctgaagacaataaataatcaagatcagaggagatagagacatgagaaacttcaaaaatcaatgaaagcaggagctgtttttttgaaaaacattaataaattagatagaacaccagatagactaataaaaaagaaaaacaaatcaaataaatgcaatcagaaatgataagggaatatcaccactgaccccacagaaatacaaacaagcaccagagaatgctataaacaccactatgcacataacttgaaaamcaaaataaaattggtaagtttctggacatattcacccttccaagactgaaagaagaaaaaactgaatccctgaataaatcaataatgagttctgaaattgaggcagtaatatatagcctacaaaccgaaaaaaaaaaaaaaagcccagtaccacacagattcacagctgaattctaccagaggtacaaagaagggctagta

SEQ ID NO: 895357 - DNA, 566 bp, Homo sapiens; identical to SEQ ID NO: 876387

SEQ ID NO: 895358 - DNA, 574 bp, Homo sapiens
gaaaatgtgactaattttaagcttatttctcattttgttatgttattgaagagacaaaagagaatttttatgcagacattttataatagatgcattgtaaaacatgttggtttaactgaaaatctgattttgtactcataattgaaagatagttctttgttaggctgagaaggtaaactgggcaatggctttttagagtgaagactgtgctcagaataagctggaggagattcagttcaccgtcttaaccccgagttgattttttctacctttctactccatcatccataaatgaatatagtgtgctgttatatgtatgagacactaaataaacttatgctgaatrttgagtgaataaatggtcgtattcaacaataccccaactacataaatatctcagctaaataaaaataccatcattcattttctgaattccaatatttctgatttccactttcctcatggttcaactggcaattaatataatttcttttttattatactttgagttccgggatacatgtgcagaacgtgcaggtttgatatataggtatatgtgtgccatggtggtttg

SEQ ID NO: 895359 - DNA, 574 bp, Homo sapiens
gaaaatgtgactaattttaagcttatttctcattttgttatgttattgaagagacaaaagagaatttttatgcagacattttataatagatgcattgtaaaacatgttggtttaactgaaaatctgattttgtactcataattgaaagatagttctttgttaggctgagaaggtaaactgggcaatggctttttagagtgaagactgtgctcagaataagctggaggagattcagttcaccgtcttaaccccgagttgattttttctacctttctactccatcatccataaatgaatatagtgtgctgttatatgtatgagacactaaataaacttatgctgaatattgagtgaataaatggtcgtattcaacaataccccaactacataaatayctcagctaaataaaaataccatcattcattttctgaattccaatatttctgatttccactttcctcatggttcaactggcaattaatataatttcttttttattatactttgagttccgggatacatgtgcagaacgtgcaggtttgatatataggtatatgtgtgccatggtggtttg

SEQ ID NO: 895360 - DNA, 552 bp, Homo sapiens
ggtcgtttagtttccttgtagttgtgtggttttgcacgagtttcttaatcctgagttctcttttgattgcctgtggtctgagagactgtttgttatgaaatctgttctcttgcatttgctgaggaatattttacttccagttatgtggtyaattttagaataagggcaacatggtgctgaaaagaatgtatattctgttgatttgggatggagagttctgtagatgtctattaggtctgcttggtctagagctgagttcgagtcctgaatatccttgtttattttctgtctcattgatctgtctaatattgaccgtggggtgttaaagtctcccagtattattgtgttagagtctaagtctttttgtaggtctctaagaacttgctttatgaatctgggtgctcctgtatcgggtgcatatatatttaggatagttagctcttgttgttgcattgatccctttatcattatgtaatgcccttctttgtcttttttgttctttgttggtttaaagtctgttttatcagagactacaattgcaatctctgcttt

SEQ ID NO: 895361 - DNA, 610 bp, Homo sapiens
ttctgaacagcaaagaaaacaatcagcggtggggtgtggtggctcacaccagtaatcccagcactttgggaggccaaggtgggtggatcacctgaggtcaggagtttgagaccatccaggccaacatggtgaaacctggtctctactaaaaatacaaaaataagcttggtgtggtgtcaggcacctgtaatcccagttacttgggaggctgaggcaggagaatcacttgaacctgggagggggaagttgctgtgaactgagattgcgccattgcactccagtctgggcatcaagagtgaaactctgtcttcaamcaaaaaaaaaaaaaaaaaaaagaagaagaagaaaacaatcagaatattattaggtaatttctatgttacaaacaaactactactcttttgtgtgttttccttatattaagaaataactctaataaaatattgaatagaagcagagataatgggcactattgtctcattgctgatattaatgaaaaaatttcctctatttcatcagtaagtttatttattatagattttcaaagatactctcaaattaagacagtttctactattttcagttttatgttttctcagttatatttgca

SEQ ID NO: 895362 - DNA, 564 bp, Homo sapiens
ccgatactatcttagtcaaaattcctctgtaaaatgttcagggatcctctgcttcagtgccttccacatatcccaacagtttattccattactgtttatgctatccctttaattaaaaaaaaaactaaatattgaaggtatatacttcatctaaagtcacagaagactagacctgaaacctaaatcttttcacatcaccctaaagatctttcatcttcattttacagcttgaacgtattttgtaggatgagaatttttattttcctggtcttaagtctttctatcagtacagatgacaacacactatggtggtccctaatggcatcttgagcagatgggggctgccttctcagatgcmccatggagctgaatccatagatcataaaaaggcaattatatcgatcacatgattcatttaggctatggatttatattaatactatgtaaaaatccactggactagaatcagctgtcctcatgtgcctgagcaaaaaataatccaaacaattctctttggtatcagttagatacaggtactccttcagaatcagagaattccagctt

SEQ ID NO: 895363 - DNA, 688 bp, Homo sapiens; identical to SEQ ID NO: 860254

SEQ ID NO: 895364 - DNA, 617 bp, Homo sapiens; identical to SEQ ID NO: 860255

SEQ ID NO: 895365 - DNA, 617 bp, Homo sapiens; identical to SEQ ID NO: 860256

SEQ ID NO: 895366 - DNA, 529 bp, Homo sapiens; identical to SEQ ID NO: 860257

SEQ ID NO: 895367 - DNA, 569 bp, Homo sapiens
aggcagggtaagcaaaagagagtggggagctggaaatcctacccagcccagcagtaaggaggattctcttgctgtccctgaagtcgacagaggctgaatggagaatctggacttccagcctaactagtagtaaacgtcagcactcccactttcccctgttgcagcagtgttagaagaagccaggtaaaacagaaggtttaggccgggcgtggtagctcacacctgtaatcccagcactttggcaggctgagacaggcggatyatgaggtcaggagatcgagaccatcctggctaacacggtgaaaccctgtctctactaaaaatacaaaaaaaaaaaaaaattagccaggaatagtggcaggtgcctgtagtcccagctacttgggaagctgaggcaggagatggcgtgaacccgggaggcagaggttgcagtgagctgagatcgtgccactgcactccagcctgggagactgagtgagactgtctccaaaaaatactaaaaacaacaacaacaacaacaacaacaaaaaccagaaggtttaaatgagatccaaagtgtcataacaaga

SEQ ID NO: 895368 - DNA, 619 bp, Homo sapiens
cctgctaattttttgattatttgtagagacagagtttcactatgttgtcaaagctggtctcagatttttggaatcaagcattctcctacctcagcttcccaaattgatggaattacaggtgtgagccaccatgcccwgcctctttccgacttttgagacaatattaaatgatccaacatatgtgtaattgaaatctcagaaaaagacaaaaagaaagaagactttaagatggctgactagaagaatttcatgcctgtatccttcatttagaagaaccaaaatagcatgtagacagtcacactgcacatgcattatccgagagggaacactggaattcaacagagaagcaacaggaaacatcaaaagcagagaaacaaaagggagagtggtagtgtgcctggccaagttcaactgggagccaggagtgacttccatcatgggcaaagggtaagtgagagacttctagcagcccacatttgtacaatggaatcatataaacctggccacaagagaattccttgatcctcccaactcctaaaatgaacatagggagctcctgggagactgtgggatggaactgctccagaaagggaactcatgatgagtcccacaccctgtc

SEQ ID NO: 895369 - DNA, 619 bp, Homo sapiens
cctgctaattttttgattatttgtagagacagagtttcactatgttgtcaaagctggtctcagatttttggaatcaagcattctcctacctcagcttcccaaattgatggaattacaggtgtgagccaccatgcccagcctctttcmgacttttgagacaatattaaatgatccaacatatgtgtaattgaaatctcagaaaaagacaaaaagaaagaagactttaagatggctgactagaagaatttcatgcctgtatccttcatttagaagaaccaaaatagcatgtagacagtcacactgcacatgcattatccgagagggaacactggaattcaacagagaagcaacaggaaacatcaaaagcagagaaacaaaagggagagtggtagtgtgcctggccaagttcaactgggagccaggagtgacttccatcatgggcaaagggtaagtgagagacttctagcagcccacatttgtacaatggaatcatataaacctggccacaagagaattccttgatcctcccaactcctaaaatgaacatagggagctcctgggagactgtgggatggaactgctccagaaagggaactcatgatgagtcccacaccctgtc

SEQ ID NO: 895370 - DNA, 644 bp, Homo sapiens
aatccctcattgcactgaggccatgtgagcaaattcatttcaccagttcattcagtctgcccagcataacattgactaaatgcacagtgacgaatggttagtaaggatgtttcaagtattgctaagtaatacttagaggtctaacttccacatgtagtagtcttaagtatggaagggtataaaatcacttggagggatttttccaaataggtgtttttggaatctatctaatttgtttctaccttgaaacaattgatttgggatagggacaacataatagtcttcaaaatctcgtttggtgattcaaatttcctctcttgattaagtatgtgactacgcgcttagaaagggcaaactcttcttccaggtacacacatttgacccactaaatgactaataatttgatttaggccttgaaaatttttggcagggttagcattgggggaatrgaatcacatccacctttgcttgtgattattttcagcacaaatagttttagactatccatatgtggtaagtgtgatattaaacaatgctaattttcgatggcctatatcttttctaactgtactatttttggtaacttataatcaggcaatttagacatttgtgaacattaattttgaaaatactttctgcttgtt

SEQ ID NO: 895371 - DNA, 641 bp, Homo sapiens
cataggagtcatggcagttgggatgcttccaagtgcaaaaggtttgagcatcaccacgaagtacagtcgaagactacatggacaagattattctatcttatggtcttatccaaaaaggtttttaaaacatgttatttgttgccctgtgcatggtgcttccctctaatttattgattactcataataatcaagcagctttgtagaagagaagcgtgatgaggcaggttaaatgggaagtaggcaaaatagtgtaatgtgctaagattttccaaatcatattttacaacaaaaatggaatgagtaatgaaaccttggtagatactttgtaatattctctattgagtgtccaattcagtgtcatataagatatactggatatagaatgacaaggttctgaycagctgtgtaaccaaaaatggaatgagtaatgaaaccttggtagatactttgtaatattctctattgagtgtccaattcagtgtcatataagatatactggatatagaatgacaaggttctgatcagctgtgtaaatgtccaggtgtctctgtgagtattgcatattattcaatgaactacagagcaaatgcagatggcttcttagttttgttcctgtcatgtatgttaactgctcttcactt

SEQ ID NO: 895372 - DNA, 615 bp, Homo sapiens
tgcattgtctttgaattcatgtaattgagaatttcttgtgtgtgtgacagtgaaagagaggtgagtatgtgttgtaatttaagaattttagatcagttcaaatgtatatattccaaaattgcagttcaaattcaattatattattgggtggacatgtaaggaaaaaactttacgtttaatttggtgtagcctggtacagaagattaaraggaggtttggatattgtaatttggatattgtgctatccaatatttgctttcagatatagaaactgaggtttttagaaatgaagagacttgtctgaggacacacagtcagacaagaatacagctatgatgtaaatctaatttacctaatgtccagtgtaatattatctaaacctcctaatcctgccttttaaagctacatcttaatttctgctaccaatacttttgtctcctttcccaccccatccatgaaatgacatatgtgagggcatggaggacactcaatatatgttaacaaatgagcctgctttaattaagttaatttagacaacaaaaatacagggactatttgggctattgtctttggcctttcctgtagctaattccatactgctgttaccttctgcat

SEQ ID NO: 895373 - DNA, 603 bp, Homo sapiens
tcctctatatgggcctttaggaaagaggggcaaaaccactcagccacagacactgggagcagggaaacactcagagacttgtgcagaaagagacctggataaaaattcttctctcagttactcatgcattagttgctcaacaaacatttaaaagaggaaataggatagatatatggaaatagctaacaagccaagccaaatgcgatcttacataagagaacaatttgtaaaaatgctttgcagttttaaaggatggaataattacaaacaataagatgggaaggaggaagaaagcatggaaaagtgttcatttgaactgagccttatggagcagaaagatttttgayaggtcaatcataagcataacatgttctaagaagagcaaacagcaatagcaaaggcataggagaaacttagcatgaattgtctgccagaaagtgtgagagctataatttttataagttataaggaaatcattggcaccgaaacaataacagtgttttgggactatacagtttgagaatctacagagggctttgaatgccagattaactcagaacattatgtattacctgtcttatataactgaaattgccacctatg

SEQ ID NO: 895374 - DNA, 676 bp, Homo sapiens
gaaggagaactttagttctttcctttagctcctgtttattaaagaccaaacagaggggccaggagaaagctaaggaaactggggtgaaactagcctgccctttgcagcccctacaggtcctggccaaaaaaaataactgtccatctcaacctgctgctcctccttgttctccamctcctgctcctgccccagaaaactcatcaccaaatcctgatggaccagcctctataagtgataagggttctctctgtccctccctgtgggtctagggatgggttagaggacctcattgacttacccagacctctcagttttcaaaaataaacaaaactaggggttgggacaatgtccttctgtacctaggggactagagactctaaaccaaggttaacactcaaaagggaaataaaagaaaattgtacatcttaaactttttagctacccattcacaggtgactgtgagtctcactggcaacaaaatgaggataaaacatataatgctttctgttttgaggtcaccaccactggtacccttgcccaggctcaactatgagtgggttccatcaggcccctataaatcttcactgttataatccctactgttaaatatattatcagtacgaatgtgtagtctatgtatacctctgcaaacctttgcccccatgctctgaaattg

SEQ ID NO: 895375 - DNA, 670 bp, Homo sapiens
tgtgaggcctgggagaggtgtttgagtcatgttcggtcatgggggtgaattcctcatggcttggtgctattctccatagtgtgtttttgtgagatcttgttgcttaaaagtgtgtggcatctcctccccttcttgctctcgctctaccacgtgacatgttggctcctcttttgcctcctgtcatgattgaaakcttcctgaaggctcaccagaagctgagcagattctggcatcatgcatcctatacagcctgcagagctgtgaaccaactaaaccccttttctttaaaaattaatctcaagtcccagtctcaagtatttctttataacaatccaagaaaggccaaatacactgtcacaactactaagctcaggctttgtagcacaaatgtagccatcagcaatatgtaaacaaataaatgtagctgtgatctgataaaattttatttacaaaaacgaactatcttgtttggtccatgggccttagctggatacaggcttgcagtttagcaaaccattacatgtatatactttctctctctctctctctctctctatctctctatctctctctctctctctctctcacacacacacacacacacacacacacacacacacacacacacacacatacacaaatacacacgaacattttattttgaatagta

SEQ ID NO: 895376 - DNA, 634 bp, Homo sapiens
taaagtgtagagtttttactagttttcttgttgcttgtttgtttatgcaaacagtgttaagctgttatcagcttaaaataatgggttatggtaacctcgaaccaggaaacctacaacagatatgcaaaaaataaaaagcaagaaactaaattataacaccagagaaaatcaccatcgctagaggaagataggaaggaaaggaagaaggaagagaagaccacagaacaaccagtgaacaaataacacaatggcaggagtaagtccttattatcaataataacattgtatgtaaatggactaaattctccaatcaaaagacatagagtggctgaatcrataacaaaacaggacccaatgatctgttgcttacaagagacatacttcaactctaaagattaaaattgaaaataaagagatggaaaaagatattccattacaatggaaataaaaacaacagcaggagtcactatacttctatcagaaaaaaaaaacagatttcaataaaaaaataaaaagagacaaaggtctattgatattatagaccttgtataaggtcatataaatgataaaggggtcaattcagcaagaggttataacaatcgtaaatttataagtttccaactttggagcaccc

SEQ ID NO: 895377 - DNA, 513 bp, Homo sapiens
acttactcatcactcataaattatttttctcttcttcacatgttaacacccaaaatcaagcaaaagctattaataaatctaagttccagtgaaatttgctcgtgctgctgaacaaatctaagttaaattgtagatagatattagtaacttaaggtaagaattcccaaaactagatgtatggggtgaagagttaactattgataacagtagagaatctcatttccaatttcagggataaatartattaggggaaatcctgagagacaacagtggaagtacagaagtaaagatgagaaaataaattactaactaggaagattcttcaatgaatgcttcctagagtatggtctattatagataaattgagcaaacagaggatggagataacagaaattaaaggtacagagtacagtgctatcgtttaaatgcttttgtcccctacaaaaccaatgcttaaacttagtacgcaaagcaacagtgttggcaggtgaggcctaatgggaagtgtttaaa

SEQ ID NO: 895378 - DNA, 633 bp, Homo sapiens
ctggcacctttatcttggaaccccagcctccagaactgggggaaatgcctgtcatttaaactacccagtctatgttattttgctatagtattctgagactcaagtcgactaagacaatagtcttctctaaaatggggaaactctgcctcatagggttgatttgaaaatctagtgacataaagcacatacattatattttacagtcttctagtgcatcatgagaaatcaatatgcggtaggaatcattgttcttagcaagataaagacatttaaattattgatactattgagtatcagtagtatcaatagcattgagaactatttcacactattgagtatttaggacatcaaggtcttcaggatgtgattggtctcctttaaagaaaaggcaccagatctctctctctcaaaagtgtgaaataacttttcacrcttctcaagatactcaaaagtgtgaaataacacaaatagttccacacaactgaaactttggtatatgcagaagggtatggaaaatgaggtcagaatggtaaaacagtaagctaccttttttcataaagggaggaatggaagtttcactgtgaaaaaaacaggtacataattgggagattttatgcaataagaggatgaatt

SEQ ID NO: 895379 - DNA, 550 bp, Homo sapiens
aaaaatatagctttaactaacttaaatctatctttaaatattactatattgctttatgtatacaacacataccatataacagaaaatccccattcctccattttttccctggctcatttcttgtatttatatactataatgactgaatacatcattactattattactttaaagaaagttatcttttaaatcaattcagaatcaaaatttttaaaatttaattgacttgcatttatgccttctctgatggttttcttttcttcatgtagatctgatctccttcacttttgaataataawtttgccagatatagaattctagattgccatgttttttctttcaatacatttaagcatttcattttatattcttctttctcttattgcctccaatgtttctgacaaaaactccacagtgattcttggaattgtttctctatatataatacaatattttactttcctgactttgatcaagatttttctttgacttttctgcagttgaaatataaaatgtccagatatgatttgtttttcagcatttgtcacag

SEQ ID NO: 895380 - DNA, 645 bp, Homo sapiens
acatgttgttcctgatgtacattatctcattccttcttcataaccatcaagaggatgctactttctgtcccaattgacatagaagaaaatagacacactcaaacataaaaaaaaagtcttcctcaagttctcaaagacagtgttagagtcaggattcatatccagccctattgaaatgtaaaacttgaacaatttatgattatatggggctttagattaaaagttgagatatactaatgtcagcaatttattttacaaatttcagaattgacagtgtcatttaatgaatatgtttgcrtagcccaggctctgcagggcttctcaaaaataatgaggtacccagaatgaacaaagtgtactgtcatacagaagccactctccagaattagagtcctctcattcttctctataacagagtgctttttatatattacataactgaattctagaagtggtagaactatggaaagtaacctattaatgaatggtaaaaaatatcagtgaaaatagagaaaattatatgattgaggagacctatgtccttgcttttggaaaaaaatgttaaaaaacatttactgcaaatgctcaagtagattgttaagtatttctaaatatgattaacagccctgaggattctggctaact

SEQ ID NO: 895381 - DNA, 507 bp, Homo sapiens
gatgaaagcacctcttctgtgctgtggagctagatacattttgaagttaagaatctggaggcttcagaaaggctatttagtgtatatattctaaatagtgtcttactagaaactccattgggatataaataattactccaaaatcaaaagcactaatattgcaaaacaaaacatgtgagtgttcacatttcagtgaaataaagattatacatagcctactgtcatcccaaatctggttttattttgcaaataaattgtgctgtcacacttgttggaaacaagtgctcagtgccacaaagaaaaaccagcacttaaacaggaaatttctcagcaaagcatatttgcttctayagaagggtgctgcctgcgtcagtcacaatgcacattctaagctgaccggattggctactgctttaaattctataggggtaattaggcgggaaggaagacactgtcctgtaccaattaggcgggaaggcatgtctggggcggcaaaggaaggaaggg

SEQ ID NO: 895382 - DNA, 577 bp, Homo sapiens
aggggaagagatatggtgcagggggaggagatacagtgtgattgaagggagaaatgtaggatcatcagcatctcaactggtctgtctttatctctttctccttcaaggtcatcaagaccaggaaaaacaagaaagacatactcaatcctgattcaagtatggaawcttcaccagactttttcttctaaaatctggatgtcattgacgataatgtttatggagataaggtctaagtgcctaaaaaaatgtacatatacctggttgaaatacaacactatacatacacaccaccatatatactagctgttaatcctatggaatggggtattgggagtgcttttttaatttttcatagtttttttttaataaaatggcatattttgcatctacaacttctataatttgaaaaaataaataaacattatcttttttgtgaaaggaatgcttccccagcagtctctttaatccatccatgagttgcttaaaagcaaatagtctgtggtctgcaaatcagggtggggcacacaggcctcaagcaatatttggatttatactttgggtgtgatctttaccgggt

SEQ ID NO: 895383 - DNA, 607 bp, Homo sapiens
aataaatgtgtagtggtatctcattattcttcatttgcaattccctgtgaatatatgatgttgagcatcttttcatatgcttatttgtcattttattgtagatgtactttatcaggttgatgaagatcccctctattaaggcaacttctttgaagtcaggtaaattgatgcttccagctttattctttttgattaagtttaccttggctatttgggctcttttttggttccatatgaattctaaaatagtttttctagttctgtgaagagtgtcataggtcatttgataggaataatattgaatttgtaacttgctttaggcagtattgcaattttaatgtattgattatttctatccatgagcatgaaatgtttttccatgtgtttgtgtcatctctgatttatttgagtagtgttttgtaattcataattgtagggatctttcacttccctggtycactgtatttctaggtattttattctttttgtgacaattgtgaatgaggttgtgttcttgatttggctctcaccttggttgttgttggtatacaggtatgctactgattttcctacattgagtttgtatactgaaatttttctgaagttg

SEQ ID NO: 895384 - DNA, 583 bp, Homo sapiens
aactccttaaatatacttttactgaatccctcagaaaaagaattatttattcattttctatgccctcataatatttacatttagcatattggtacctttttaacaagtctgtcttccccaaaaattgttaagatctttgagagcaaatgtagtacttcattaattattatatatttccctgctgatgcctggaacagtaggcatagaattgtgaaatcaattaatgttttattytagcctaaatttaagttacattttctcttttgcacctgaacacatcccttttgttgtcttcttagcaatacaaagcttacagtattctaataaacttagcgtctcacatttagtctggcctcaactttccctaatcctgttgaaagacctatcattgttcccactgacccagagaaattaaattcaagaaatagttttgatcatcttttgtgtgcaaggaactgttgttggtaatgtttcccctttatacaagttagcttttctgaagccaactgtatgtgtagaacaagtaaggcctagcaaacataataatttcaggagcaccctaaaggcctctggaccccaaatt

SEQ ID NO: 895385 - DNA, 652 bp, Homo sapiens
aactgagaaatattgaattccatgatacttaaaggataaggcaatctcttcatactatttacaaaaaaaaaataattccaaggcacagagttttattgatatgtccatgtccaaattcaagatgctagttaggataatgcattccatccctttctccactctaaaacattacacatttctatgaactcaactaacattttatatgattgactgctttataaccctacatacatgtcttycaatatagccccttaaatttacctccacattttctcacactctctttaagagatcttgcttataaatgcaattacagaattgatgagtaatagcttaagtgtgtgaaacactacagagtatgaatggagggagttaggtcaatggggacaagatattggaaaagaataagtaatgaggaaggctgagaaagaatgaatgattgtgttatagaagatttttcctttaaaatttctcataatctgaagtaactcaggagtggaaaaccaaatattgtatgttctcacttgtaaggaggagctaagctatgagtacacaaaggcatacagagtgatctaataaactttcaagactcagaagcgggaggctgggagggaggtgagggatacaaaactatatattgggtacaatgtac

SEQ ID NO: 895386 - DNA, 614 bp, Homo sapiens
ctaaagcctcttttatatttcttgcccttactcactaatctactaaaatttcttcagcacatcattctcttgtcttcttaaaggttttcatcttgcttcttctacctgaaaacctcctaatttggtcaaacccatccattttctgggtctcagtgtttgtgttaatgtctccttaggaaatcctgcctttgatcttttctcaggttagtagaaatcttgttggtgtttacttttgtagaagctttttttcttctttttcyatcacttaagacacagtagttaatggatatttgtcttttcaaccaatctgtaagtttcaggagtaggggtacctggctgccttttaaatcactttatcccagttgctagttcattatctgcctcatagtagattctgaataaatacacttaccaaataacataataaatacctgagtgcagtatgccctccatatccatagattcacctaactacccattgaaaatatttgttaaaggaaaaggatttcccttgaactgaacatgtatagaatattttttcttgtcactttttcttgttcgggctgcattccactgttaccgttgttactctcatgtagaacaaccatttacat

SEQ ID NO: 895387 - DNA, 614 bp, Homo sapiens
ctaaagcctcttttatatttcttgcccttactcactaatctactaaaatttcttcagcacatcattctcttgtcttcttaaaggttttcatcttgcttcttctacctgaaaacctcctaatttggtcaaacccatccattttctgggtctcagtgtttgtgttaatgtctccttaggaaatcctgcctttgatcttttctcaggttagtagaaatcttgttggtgtttacttttgtagaagctttttttcttctttttctatcacttaagacacagtagttaatggatatttgtcttttcaaccaatctgtaagtttcaggagtaggggtacctggctgccttttaaakcactttatcccagttgctagttcattatctgcctcatagtagattctgaataaatacacttaccaaataacataataaatacctgagtgcagtatgccctccatatccatagattcacctaactacccattgaaaatatttgttaaaggaaaaggatttcccttgaactgaacatgtatagaatattttttcttgtcactttttcttgttcgggctgcattccactgttaccgttgttactctcatgtagaacaaccatttacat

SEQ ID NO: 895388 - DNA, 371 bp, Homo sapiens; identical to SEQ ID NO: 884766

SEQ ID NO: 895389 - DNA, 630 bp, Homo sapiens
agagaggagacccagagtgagtagttcctatctggaggcacgtcatcctgatgagctgaggagacccgaattgggtagctccttccgcagctagtagtcccgatgtctatgtgagtctagctgaatctgtggtttttatgggctcagaagagagaaagtgtgtagttattggtccatgggtagtcataggtgggcctgaaaaaagcaccgtaagttctcactccaggctgcagactccacccaacactgacagcctggcccccatgcttcsggccatccttggtttgaagatggggcttcactgaggacccacccctttctgcccgggatcctgtcttcctcctgtctccattaatcatgttgtccacaggcacccaggctgttcatggcaaggtcatgacagtgcctgggctcagctacaactttgctccacactggagcagatgccaggtgcagggagaggccagggagtgagagcaggcacttctgagactgcagggggagagggggcttccaaacccccaagagcacagcaacgctgggtccggagctgcagctgggtggctgcagccatgcccagggagtgccggtctcccactccgccaactcagaagcaggcagggctcccac

SEQ ID NO: 895390 - DNA, 619 bp, Homo sapiens
gattttcatttacatcttggacattttggatattatgagactctggatcttatttaaatctcctgatttagggctcctctggtttcacatcaccaaggggaaggggccttgcctgtaactgccaagtgagggtgaaagtccagctcccccacagcctttagtgacacttgtgggggtgctttgttactcctggggtggatggggggcaggctccacatcaggcttctgctggcaccgcctggctggcagggggtaggggcccctcattactggtgtctgcatgccctccactgacactgagggagaggaggggctcactatccctgggaggtggtaaaagtcctggcttctcactcagcctcttctggctccaccctaccakgaagaggtggggcacctgggccattatgggaatagtgtactgccgtaatatgaccggctcttatcattttcaagaaactttttacatatacacaaaagtagagagacaaatataatgaattccatatactcatcatccaacttcaacaatgatattttgccaatctagtttcatctgtctcccccaaacttgtcttgcttatatatgttatagcaaaccccagatattatcttattt

SEQ ID NO: 895391 - DNA, 642 bp, Homo sapiens
gtgctctgtttgggttataagtgtatcttgagcagaagtaaggaactcaggtgtattctatcagatcctgtgtacatgggtattcagttaaaagcaaaacttttctcagggtccagatagcaccattctgcaattaaagacataatatggaaggggcaaacccaactctactgaaaggattaatagcatagagtgcaatttcaggctacacccacccaaagatatcrgctgcctactgtaaactcctttggttaaggcaaactctgggaggtgcctgctgaaatgcaatatgtgacccaaagagaaacagcacatttacccaagagtaatcatattcacagcacagagaacagggtcctaggacacaaaacactggagaagtaaattttcctggggaaagagaagctgaggagcatgggacaatgccgcaggacagcactgcacaggccctgggagctgggagccaggcccgcgggtgccaagggcttgcagggaaccccaaatataagacgtgggagacatcgaaggtatattttatctgcttcaccattttgttcacagcagatgtaaaaagagacaatgtcaagttgaaaacaaaagatcttggaagacagcccagacctccccatttctgctttatat

SEQ ID NO: 895392 - DNA, 690 bp, Homo sapiens
aatctcagaacattttggctacatttaacagggggcaatgaccgcaagaagggagaaaagggtccatgttccaggcttgctcttaatactatgcaaagagcctggggcaaaagaaagggatggaggaatacttaccaggcaaatggaaagcagagaaaatcaggcrttgcaatcctagtctctgataaaacagactttaaaccaacaaagatcaaaagagacaaagaagggcattacataatggtaaagggatcaatgcaacaagaagagctaactatcctaaatatatatgcacccaatacaggagcacccagattcataaagcaagttcttagagacctacaagaaacttagactcccacacaataatagtgggagactttaacaccccaatgtcaatattagacagatcaacaagacagaaaattaacaaggatattcaggacttgaactcggctctggaccaagtgggcttaatagacagctacagaactctccaccccaaatcaacagaatatgcattcttctcagtaccacactgcacttattctaaaatcaaccacataattggaagcaaaacactcctcagcaaatgcaaaagaacggaaataacagtctcttagaccacagtgcaatcaaattagaactcagtattaagaaactcacacaaaaccacacaactacatggaa

SEQ ID NO: 895393 - DNA, 623 bp, Homo sapiens
ttttgagcattttacactttatttcctttttctgtgcacagatgcattaccacagagaaatttgtaatttaaatcctattgacaaaagaccatattatataccatttggcccatgcaataaagagaaacaacatctttttatataatcacattattgtaacttatgttatacattgtcatataacactggtaagatgcttcttattacatatagtgacaaggatgytatgagggaattttagtatttctttcctctccctcttctttacccttaaatatatatactcatcttagtgctgtggccacgtaacaattccattagataaaaacaactgtttaattttgctgatacaaagcaaggagcccagacatcttttgtattttttatgcacatgtatgtatgtgtgtgtgtatatgtacatgagtgtgttttatattttatatataggccatttttgggtaatcgctgaggatgtggtttaacgaattcagttggtatagatggagcacaccaaaagtctgaaacagaaaaacaaaactagttttataccatttggttttagaatggctagtctagtaagcttcttcccaagggtctttatgtggatatggacctttcagga

SEQ ID NO: 895394 - DNA, 659 bp, Homo sapiens
ttaacattatttagcgtcatttcatgagaggacaatgcagttaatgttccccactggaaggaccgtcttgtggttcgcagcgctaggcagtttctctctttctctctattggtttaaatgtgaaagagaaagaaaagggggatttcagaaatggagggaagaaagaaataaaccatctaaggagcacagccaattatataggttggctttaattttcaaactagtgcttaaataccaatggtattattgcctttagctctctggaaactacagtgtaattaggttcactcaacttaacttaaaacatgcccagtcattaaaatttttcttgatccagccaagttatctcgcgcgtgcacacacacacacacacacacacacgcagcacagatctytaagccaaaagtacatcacgtccccaagaaacggcaaaaacatgtcactgctttttggaaatcatgctcatgttttgtgaccttccttaaagataatgttctcacgattaattaatttatgaatagttttccccccaacatgcacaacaggttccatgcaaattcttgagcttttaaattatactgttaatgaaagcaaataaaggcagttaaaaggcaatttgctcaattggtgttaatatttaagcacagcatgtgtaaaaa

SEQ ID NO: 895395 - DNA, 669 bp, Homo sapiens
gactaaggaatgagagctcagtcataaaccccagagacagcacgaggtgacctacaagggagctaatgccctgcagttaaaactacacttgaatcttaaaaataaaatggaagccccaaagacaaagtcatcctcagtagaaatattctcaagttctgtgacgaagagtaaaacctccccccaaaaaaacccaccccttttagtaggcagkgatctgcccgatgatgactttcattcatctcttggtgggggcacactggaaagctcatctctgtagctaccacaactcatctacagccctcaaactgataatagaaggtaagaacctcagaacattccaaatgttgcaatagtagggggaacagctctcagactctcacaaactctctgtaagatcttgcatgaaccacttatgctctctaggcctcagtttccccatctgtaaaataagatgctctttcctactgacagcctgtggacagatctgtgatctatgagctcaagagtccctcccttatgtgcacaacatctggagagactgaagccagactctgtttccacagttgcttttgggtggccccccatagagcaccctcagcccccaaacagtgggggctttaacctttgcaaaatgccgagatagtacttgaaggctcatttttaacactt

SEQ ID NO: 895396 - DNA, 691 bp, Homo sapiens
accaaatccagcagcacatcaagaagcttattcaatatgatcaagtgggcttcatctctgggatgcaaggctggttcaacatacgcaaatcaataaatgtaatccagcatataaacagaaccaatgacaaaaaccatrtgattatctcagtagatgcagaaaaggcctttgacaaaattcaacaacgcttcatcctagaaactctcaataaattatgtattgattggacatatctcaaaataataagagctatctatgacaaatccacagccaatatcatactgaataggcaaaaactggaagcattccctttgaaaactggcacaagacagggatgccgtctctcaccactcctattcaacatagtattggaagttctggccagggcaatcaggcaggagaaggaaataaagggtattcaattaggaaaagaggaagtcaaattgtccctgtttgcagatgacatgattgtatatttagaaaaccccatcgtctcaacccaaaatctccttaagctgataggcaacttcagcaaagtctcaggatacaaaatcaatgtgcaaaaatcacaagcattcttatacaccaataacagacagagagccaaatcatgagtgaactcccattcacaattgcttcaaagagaataaaatacctaggaatccaacttgcaagggacgtgaaggacctt

SEQ ID NO: 895397 - DNA, 691 bp, Homo sapiens
accaaatccagcagcacatcaagaagcttattcaatatgatcaagtgggcttcatctctgggatgcaaggctggttcaacatacgcaaatcaataaatgtaatccagcatataaacagaaccaatgacaaaaaccatatgattatctcagtagatgcagaaaaggcctttgacaaaattcaacaacgcttcatcctagaaactctcaataaattatgtattgattggacatatctcaaaataataagagctatctatgacaaayccacagccaatatcatactgaataggcaaaaactggaagcattccctttgaaaactggcacaagacagggatgccgtctctcaccactcctattcaacatagtattggaagttctggccagggcaatcaggcaggagaaggaaataaagggtattcaattaggaaaagaggaagtcaaattgtccctgtttgcagatgacatgattgtatatttagaaaaccccatcgtctcaacccaaaatctccttaagctgataggcaacttcagcaaagtctcaggatacaaaatcaatgtgcaaaaatcacaagcattcttatacaccaataacagacagagagccaaatcatgagtgaactcccattcacaattgcttcaaagagaataaaatacctaggaatccaacttgcaagggacgtgaaggacctt

SEQ ID NO: 895398 - DNA, 578 bp, Homo sapiens
taattaccagcttctctgttagatgtctgaaagtctacaatggggtgtgtgtgtgtgtgtgtgtgtgtgtttgtgtgtctgtctgtctcatccttccctccttaggaataggggtgggagggggaatgtagcacctagagacatataaaagcacaggagaagaaaagcagcatgatatagggaaaaagagcacaggcttaggaggaagagaccgagattgaatcttctgctgactttgagttattaatctttttggcatctcactttccttatctatgaagtgattagaataacagctgtcttgtagttgcattttgcagatggagataaagtgtcatcctgcacaagccttgaatatggtgcccagtggaggccatgttgtatctggaatgaaggragaacatttgccagcaggagatgggaaggctggagggaatctttttgagaatattttcagatatgtatagtttgtacaattatatctactttgtaatattgaccagggctaaactacttggctaaaatatctggcttctgaaagcccccactaatttctagatcttttagttattataata

SEQ ID NO: 895399 - DNA, 584 bp, Homo sapiens
tatcagcagtgtgaaaacaaactaatacagtaaattggtaccaggagtggggtgttgctgaaaagatacccaaaaaatgtgaaagcaactttggaattgggtaacaggcagagattggaacagttgaagggctcagaagaatacaggaaaatgtgggaaagtttggaacttcctagagacttgttgaatggcattgtccaaaatcctaacagtgatatgggcaataaaatccaggccaaggtggtcttagatggagatgaggaacttgttgsggaactggagcaaaggtgactctctcttcttatgttttagcgaagagagtggtggcattttgcccctaccctagagatttgtggaactttgaacttgagagagatgatttagggtatctggcagaagaaatttctaagcaggaaagcattcaagaggtgacttgggcactattaaatgcattcacttttataagggtggcagagcataaaagtttggaaaatttgccacctgactatgtgataaaaaaagaaaaacccattttctagggggaaattcaagctggctgcagaaattttgcataagtagcaagg

SEQ ID NO: 895400 - DNA, 607 bp, Homo sapiens
aaatccaagtgttttgtaagccagtgaagattcaaattgattatgctgaggaagaagacttaaccatatattaaattcttcatccttcagactcctacatgttactcaatatataactaaagtggcacatctttattgaagatttcctctatccctcaccctcaccactataggagcctctatagaagaataggttgctcagctttctgtgtgtctgtaaatgtttcaactttagcaaaatatagtttgttactgagttatttatttatgtgtctgtttctttttctagattttgagatatttaaaacaaaatgcatgtaacctgggactcaagatatgtattaagtgaaacgagcaaataacaataaggacaatgatgatgatagggttaatttttcttgaacatttctacatattaggaattttctctaagctctctatatgtattagtttaytttatggacacaatgagcctatgagatagacactattattgtcaccattttatatatgagaaaacagaggcacagagttgttattaaacagcttgctaggcactaagactcagtcagggatggaaatcagacactttgttctcagtgaacag

SEQ ID NO: 895401 - DNA, 576 bp, Homo sapiens
acagcaaagtttagagagctggttagtgttaactgtatatgaaaacaaactttccatatcaatataaaataaatactgggccgggcgcagtggctcatgcctgtaatcccagcaatttgggaggctgaggagggcggatcacaaggtcaagaaactgaggtcccccatgttggccaacgtggtgaaaccctgtctctattaaaaattaaaaaattagctgggcctggtggcatgcacctgtaatcccagctactcaggaggctgagggaggagaattgcttgaacctgggaggcggaagttgcagtgagccaagatcatgccactgcaytccagcctggcaacagagtgagactccgcctcaaaaataaataaataaataaataaataaataaataaataaataatactcatcataaaatagcacacaatattagagagtggttataacctaccacaaaagatagtctttgagataacaaagtggaagagcttcgggataaatccagctttaggcttacaagaatctagatggttctctttaagaaaagtaatacaaaattaaaaataaaagtaga

SEQ ID NO: 895402 - DNA, 590 bp, Homo sapiens
atactcagtcttgatctccatgggctgttctaaatcctgggctcctctgcggtttcacatacagggcatgggacgtggaggtcagctcagtgggactctccaggcagtggggagggcggacaggggacaaagattctagtttcatcttttgcagccaaaggtggggctggcctggcccactcctaggtgaccctaactgaccccaacagtgagtggctgggaactgacccagtgctgagctgaggcagctgtcaaagcagccctaaaattagcccccaacagggatagggaggggggatctggcccaggcttcaggctcccatggccccaagrgactgagcccacaccccactcaagatggaagaggtcagccagagttttggcagtgacctacccggaggctgggaggggagattcacaagctaggatgaacatgttcagaagggggatcgatgggcaggaggcaccccctgctagtttcttggatcctatgtggctcccagccccaagcccttcagagccctgagaggaaccaaggagagacttcactatttttgttctcctagaacaggattgagggggccagcctg

SEQ ID NO: 895403 - DNA, 649 bp, Homo sapiens
agccttcagccttggcagcttacacgtggtgttgagcctgtaggtgcacagaagtcaagaattgaggtttgggaacttccgcctagatttcagaggatgtatggaaacacctggatgtccaggcagaagtatgctgtaggggtagaaccctcatggagaacctctcctatggcagtgtggaagagaaatgtaaggttggagcctccacacagagttcccactggggcactgcctggtggagctgtgagaagagggccaccgttctcctgactccagaatggtatatccaccaacagcttgcaccatacccctggaaaaactgcagacactcaacaccagctcatgaaagcatccaggaggggagctataccctgcaaagccacagaggcagagctgcccaagactatgggagcccacctcttgcatcagcatgacctggatgtgagacatggagtcaaaagacatcattttgaaactttaaggtttaatgactgccctattggatttcaaacttgcatgaggcctgtagcccctttgttttggccaatttctcccatttttaatgggtgtatttacccaatgcccatacctctattatatctaggargtaactatcttacttttgattttacaggctcataggcagaag

SEQ ID NO: 895404 - DNA, 634 bp, Homo sapiens
ttacaatgcaattggaattctcatttattgttattaggaatataaatgggtataacaactttgggaaactgggcagtatctactaaaactacacctaagcatgcccagcaattctattcctagatatataggtatatagaaatacatacatatggtcacccaaggacatatacaagaatagttattgcagcaaaatascccaaactggaaacaacccatatgtccaacaatgaaatggattaatacattttgggatatccacaaaataaaatactattccacagtgagaaataacaaattacaaccaattcacagcatgaataaatcttacaaatttaatgttgaacaaaaggatctggacacaaacaggccttatagtctgattcgatttgtacaacatttaaaaacaggaaaactgacctggagtgttggaagccaggagagtggttcctcttggtgtgcttttctatatacatatcatagttttcaaaagtttgttaactttttgtgagttttccagacctgcttttccctctttctgtactcttagaattatttcaaggcttgagagcagccttaaggaagggagagcagaatgtgacatttactaatccaaagttttactgaataatga

SEQ ID NO: 895405 - DNA, 646 bp, Homo sapiens
taacacaggtggcattcaactgctcacatatttaatgctggtataaacaagaaaaaagaagtggttattttgttgcttagaatttttttttttttttttggaaacagagtttttgctctgttgcccaggctggagtgcagtggcataatcttggctcagtgcaacctccacctcctgggttcaagtgattctcttgcctcagcctcccgagtagctgggattacagatgcccatcaccatgcctggctaatttttgtatttttagtagagacagggtttcactatgttggccaggctggtctcaaactcctgacttcaagtgatccgcccgcctcggcctcccaaagtgctgggattatagacgtggccaccacacacagcccattgcttatatttcatgcatttatttaaatgtttaaatgatttcaaacattcttattcatttaaaagtaataaatagttgatgaaactcttaagtaaaartgaaactgaagactatgtgtaatataattcaccattgtttataaacagaaaaggtttggaaacaggcaattatctatcagttaaataggaaaagggagaggattatggataacttgtgttttctgatctattaactttacttctgcttaataatattaaaaac

SEQ ID NO: 895406 - DNA, 585 bp, Homo sapiens
gggacatcaggtctgaggacacagatgtcatagtcatcagatgtatggtctttaaagccatgacacttgatggacacatccagataatcagtgggggttagggaagggaagaggcagggaagatacagccctgagtggccccacagagagaggactggccaggaagggggagccaatacaagaggaggtaaaggaggtggccatggggtagaccagggctaaggaatgcatgatgctgactgytgttaggatgcaatgggacacaaaatgtgatcatttttgataaatcctaaagccctgtttaacagctagtcacagtgtgtccctaggtgtgggccaagaaaactggtggccatagcaatgaagaagagatgataacaagaaactacctaggccaccagttagtgatttctctgggcctggaggaagcacagctagaatgtgcagagaaggggaaggagaggcgtcttctacagacatagccaccaggaccatgattgtcctctctccttacttagtgtggatcttcccccctctctgcttcctccctcaccactgtggggtactcatttacacacttcctca

SEQ ID NO: 895407 - DNA, 585 bp, Homo sapiens
gggacatcaggtctgaggacacagatgtcatagtcatcagatgtatggtctttaaagccatgacacttgatggacacatccagataatcagtgggggttagggaagggaagaggcagggaagatacagccctgagtggccccacagagagaggactggccaggaagggggagccaatacaagaggaggtaaaggaggtggccatggggtagaccagggctaaggaatgcatgatgctgactgctgttaggatgcaatgggacacaaaatgtgatcatttttgataaatcctaaagccctgtttaacagctagtcacagtgtgtccctaggtgtgggccaagaaaactggtggccatagcaatgaagaagagatgataacaagaaactacctaggccaccagttagtgatttctctgggcctggaggaagcacagytagaatgtgcagagaaggggaaggagaggcgtcttctacagacatagccaccaggaccatgattgtcctctctccttacttagtgtggatcttcccccctctctgcttcctccctcaccactgtggggtactcatttacacacttcctca

SEQ ID NO: 895408 - DNA, 550 bp, Homo sapiens
aaacatcattcgttccaaggcttgattccctctgaaagttcacattaaaaaaaatagcagtgcagccaggtcctgatttcaaaatggctagtacttaacatttactgccgtgtgccttttgtgtatttggggctttggaagactgatgttccagccaggtgtttagaacatacttgaatctgcctctccctcmgtaagaggaaggtgacatttattgattttacattgtgggcacggcatagtcctaactacttacgtgtattaccttaattaatttttttttttttgagatggagtttagctcttgtcatccaggccagagtgcaatggcgcaatctcggctcactgcaacctccgcctccagggttcaagcagttctcctgcctcagcctcctgagtagctgggattacaggtgtctgccaccacgcccggctaatttttgtatttttagtagaaggtttagggttttcagtagagggtttacttcagagtttcaccatgttggccaggctggtcttgaacttctgacctcaggtgatccgcccgcct

SEQ ID NO: 895409 - DNA, 654 bp, Homo sapiens
ttataatgttaaaacagacttaccacacagcaatgccacaccagagaaatgaaaacttacgttcacacaaaagtttatacgtgattatttatagaggttttattcacaattgccaaaactggaaaataattcaaatgtccttcgactaattaaacaagctgggatatatccatactgctgaatgctgtaattcagtggcaatgagatacacaagtactataatatgaatctcaaatgcagtatgccaagaaaaagaacacagactaaaaaggcttatataacattctggaaaaggcaaaaccatcatggcagaaaacaaattaagggcttgtaaaggtctgggattagggacaagggctgaacacaaaggtgtataagtaaagttttgggtagtggaattattctctatcttgattgtggtggtagttacattatcgtcgaaacttacaactgtaaacaaaaaaaaatagtgaattttacttyacgtaaattgcacctcaataaattgacttcacgaaaacctggacagagtgtcatttcccacatttgctcactgtcagactgttctgcacacacagaagaaaaggagctccttgaaagtacagattccttaaagttacatatatataattttgtatgcacttaattacacag

SEQ ID NO: 895410 - DNA, 654 bp, Homo sapiens
ttataatgttaaaacagacttaccacacagcaatgccacaccagagaaatgaaaacttacgttcacacaaaagtttatacgtgattatttatagaggttttattcacaattgccaaaactggaaaataattcaaatgtccttcgactaattaaacaagctgggatatatccatactgctgaatgctgtaattcagtggcaatgagatacacaagtactataatatgaatctcaaatgcagtatgccaagaaaaagaacacagactaaaaaggcttatataacattctggaaaaggcaaaaccatcatggcagaaaacaaattaagggcttgtaaaggtctgggattagggacaagggctgaacacaaaggtgtataagtaaagttttgggtagtggaattattctctatcttgattgtggtggtagttacattatcgtcgaaacttacaactgtaaacaaaaaaaaatagtgaattttacttcacgtaaattgcacctcaataaattgacttcacraaaacctggacagagtgtcatttcccacatttgctcactgtcagactgttctgcacacacagaagaaaaggagctccttgaaagtacagattccttaaagttacatatatataattttgtatgcacttaattacacag

SEQ ID NO: 895411 - DNA, 531 bp, Homo sapiens
tcctgaagtaccttgatcacctttccacagaaaagtagttgtccactttcatggaacaaattattatgttccaggttctttttgtctttcttttcaaaattatactttaagttctggggtacatgtgcagaacgtgcaggtttgttacatagatgtacatgtgccatggtggtttactgcacccatcatcctgtcatctaccataggtatttctcctaatgttatcscttccctagccccccaacccgacaggccccagagggtgatgttcccctccctgtgtccatgtgttttccttgttcaactcccacttatgattgagaacatgcagtgtttggatttctgttcctgtgttagtttgctgagaatgatggtttccacagcttcatccatgtccttgcaaaggacatgaacccatccttttttatggctgcatagtattccatggtgtatatgtgccatattttctttatccagtctatcattgatgggcatttgggttggttccaagactttgctattgtgaacagt

SEQ ID NO: 895412 - DNA, 609 bp, Homo sapiens
acagtaaccaaaacagcacagtaccggtcccaaaacagagatatagaccaatggaacacaacagagccctcagaaataataccacacatctataaccatctgatctttgacaaacctgacaaaaacaagaaatggggaaaggattccctatttaatcaatggtgctgggaaaactggctagccataggtagaaagctgaaactggatcccttccttataccttacacaaaaattaattcaagatggattaaagacttaaatgttagacctaaaaccataaaaaccctagaagaaaacctaggcataccattcaggacataggcatgggcaaggacttcatttatgcctaaaacaccaaagcaatggcaacaaaagtcaaaattgagaaattggatctaattaaactaaaagagcttctgcacagcaaaagaaactaccgtcagagtgaacaggtaacctacagaatggkagaaaatttttgcaatctactcatctgacaaagggctagtatcgagaatttacaaagaacttaaacaaatttacaagaaaaaaatcaaaccaccccatcaaaaagtgggcaaagtatatgaacagacacttctcaaaaga

SEQ ID NO: 895413 - DNA, 650 bp, Homo sapiens
taagctttggagggattattggaaagacatgatactgttttgcaatgtgaaaaggacatgagatttgggaggggccaaggatggaatgatatggtttggatctctgtctctaccaaattttatgttgaattataatccccartgttggagctggggcctggtgggaggtgattgaatggtggaagtgtttcttataagtggtttattaccattcccttaatgctgttctcataatgaaatctggttgtttaagagcctgtagcacctcccctttcactgtatttcttgctcctgctccaaccatgtgaagtgtctgctccccctttaccttctgccatgaatgtgagtgtcctgaggcctccccagaaacaaaacagatgccagcaccatgcttcctatatagcctgtggaaccatgagccaatcaaatctcttttctttttaaattacccagtctcaggtatttctttgtagcaatgcaagagtgaacaaatatagaccctaatgatgagtttatatgctttataagaaaaagaagagagagagagagattgctctccttctgtattggatatagcaagaaggcagctatctggcaaaccaggaagaagattatcaccaagaactgaactgattggcatgttgatcttg

SEQ ID NO: 895414 - DNA, 650 bp, Homo sapiens
taagctttggagggattattggaaagacatgatactgttttgcaatgtgaaaaggacatgagatttgggaggggccaaggatggaatgatatggtttggatctctgtctctaccaaattttatgttgaattataatccccagtgttggagctggggcctggtgggaggtgattgaatggtggaagtgtttcttataagtggtttattaccattcccttaatgctgytctcataatgaaatctggttgtttaagagcctgtagcacctcccctttcactgtatttcttgctcctgctccaaccatgtgaagtgtctgctccccctttaccttctgccatgaatgtgagtgtcctgaggcctccccagaaacaaaacagatgccagcaccatgcttcctatatagcctgtggaaccatgagccaatcaaatctcttttctttttaaattacccagtctcaggtatttctttgtagcaatgcaagagtgaacaaatatagaccctaatgatgagtttatatgctttataagaaaaagaagagagagagagagattgctctccttctgtattggatatagcaagaaggcagctatctggcaaaccaggaagaagattatcaccaagaactgaactgattggcatgttgatcttg

SEQ ID NO: 895415 - DNA, 650 bp, Homo sapiens
taagctttggagggattattggaaagacatgatactgttttgcaatgtgaaaaggacatgagatttgggaggggccaaggatggaatgatatggtttggatctctgtctctaccaaattttatgttgaattataatccccagtgttggagctggggcctggtgggaggtgattgaatggtggaagtgtttcttataagtggtttattaccattcccttaatgctgttctcataatgaaatctggttgtttaagagcctgtagcacctcccctttcactgtatttcttgctcctgctccaaccatgtgaagtgtctgctccccctttaccttctgccatgaatgtgagtgtcctgaggcctccccagaaacaaaacagatgccagcaccatgcttcctatatagcctgtggaaccatgagccaatcaaatctcttttctttttaaattacccagtctcaggtatttctttgtagcaatgcaagagtgaacaaatatagaccctaatgrtgagtttatatgctttataagaaaaagaagagagagagagagattgctctccttctgtattggatatagcaagaaggcagctatctggcaaaccaggaagaagattatcaccaagaactgaactgattggcatgttgatcttg

SEQ ID NO: 895416 - DNA, 587 bp, Homo sapiens
taggtttatttggctcacagttctgtaggctgcacaagaggcatggtgccagcatctgcttagcgtctggtaagggactttgggtggttccactcatggcagaaggtgaagaggagctggcttgtgtagagatcacatggcgagaaaagaagccagagagygagggaaggtgctagactctttttaacaactcagctctgtagagaatttccatgggaactaataaagcaagaactgagtccccctcctcccagggagggcattaatctattcatggagaatccacccccattacccaaacaccttccattaggcctcacttccaacagtggagatcaaatttcaataggacatttgaagggaacacacatccaaattatagcagactctatcttacactctgtacaaaaaaaataaaataaaataactagaaatggcttacagacttaaatgtaagatctgaaattataaccctcctagaagaaaacataggggtaagattctttgacattagtgttggcaataattttttggatatgacaccagaagcataggcaagaaaagaaaaaataaaaaagaatgagact

SEQ ID NO: 895417 - DNA, 508 bp, Homo sapiens
cttgccactgggggcagctcctgccagggtggcaagcacgggcgagcacaggggtgggacagcctcctggactgggtcaccttgtctccaacactgctccctgatactggcagagtctggagtggcagtgagcccagagcgtgtccctgtcccccacccaggtcagcaaccctgagatccgggggaacgtggctcccaagatctactctggagcatcaggagaaccaagcggcctcaacagtcccagatggaaggacgctaaggttcccaacacctttgggcaagggcctcaragttgcctttgctctggccgttggacgggtgcctgggttccaagtggccctcaccacctggtcacaaacttgaaatgtccagtttccccagctgtaaaatgaggatgtcaatgagatgctgaatcgccaccgtcacactggccatttacaaagcctgggtggacacggcagaaggagggcttctaatatgccaggctggccatgctgcccgccgt

SEQ ID NO: 895418 - DNA, 454 bp, Homo sapiens
aatgtcttcttttgagaagtgtctgttcatatcctttgcccacttattgatgttgtttttttcttgtaaatttaagttccttgtagattctgggtatcagacctttgtcagatgagcagattgcaaacatgttctcccattctgtaggttgcctgttcactctgatgaaagtttcttttgctgtgcagaagctctttagttggattagatcccattcgtcaatgwttgcttttgttgcaactgcttttggtgttttagtcatgaaatctttgctaatgcatatgtcctgaatggtattacctgggttttcttctagggattttatggtttggggttttacatttaagtcttcaatccatcttaagtttatcttttgtataaggttagggaaggcatctagtttctgttttctgcatgtacctaaccagttttcccagcaccatttattaatagg

SEQ ID NO: 895419 - DNA, 571 bp, Homo sapiens
aaaaatttaaatttttccaggtgtggtagttcacacttgtaatttcagggttttgggaggctgaggctggagggtcagttgatccctagaatttgaggctgaagtgagctataattgtgccactgcactgcagcctgggagacagagcgagatcctatctcaatcaagtaagttaatgacmaggaatacactatacatcaccatacatggtacatctaaatcagaagtagatgaaaattcctgttactaaaaagtttattaataatacagaaagaatgaaaataaaagttaatatatcccctcacaaaagctagacaaagaaaaaaaagtctttgtatcaaatgagaatggaggggatactaatgataaaaaaaaaaataaaaaataaaaaatagaaaaactgtggatataatcacctgggcgcggtggctcacaactgtaattcctgcactttgggaggccgaggtgggcggatcacgaggttaggagttcgagacaagcctggccaatatgatgaaaccccatctttactaaaaatactaaaaatcagctgggcgtggtggcgcatgcc

SEQ ID NO: 895420 - DNA, 588 bp, Homo sapiens
gcataatttattgaaataatttagtgaaataatttattggcaaatcatatgcataaaagaaatttcataaggaattcagcaaatagtaggaaaatgataatagattacaagttagatcaacacataggattaaggaatgctagaaatggtaaatgtgtggaaaatacaaaggtttgtattttcctttgtattatctgtaaatcacacttgaatctttaaaactaataacaataaattatacaattaaarcaagagtaatataggtgagcacaagttatttgtgaagtaaaaataaattatactgttttgtagttcttgcattattgtgtaaatgtcccatgatcctttgggtgttgcttgaccagccaaaaacctctgcggcttgagtttcactcatgcccactggacttgttccatccactgagccctgaaggctgtgctcagctcgcgctgccagccgagatctcatgcctgtcaacggtgagccaggcgcagagcaatgagggttatgtgagcaagtgagtatggggtctggccactgtgcacagccatgtgagccagctgctgcagtgggacaggctgctccag

SEQ ID NO: 895421 - DNA, 588 bp, Homo sapiens
gcataatttattgaaataatttagtgaaataatttattggcaaatcatatgcataaaagaaatttcataaggaattcagcaaatagtaggaaaatgataatagattacaagttagatcaacacataggattaaggaatgctagaaatggtaaatgtgtggaaaatacaaaggtttgtattttcctttgtattatctgtaaatcacacttgaatctttaaaactaataacaataaattatacaattaaaacaagagtaatataggtgagcacaagttatttgtgaagtaaaaataaattatactgttttgtagttcttgcattattgtgtaaatgtcccatgatcctttgggtgttgcttgaccagccaaaaacctctgcggcttgagtttcactcaygcccactggacttgttccatccactgagccctgaaggctgtgctcagctcgcgctgccagccgagatctcatgcctgtcaacggtgagccaggcgcagagcaatgagggttatgtgagcaagtgagtatggggtctggccactgtgcacagccatgtgagccagctgctgcagtgggacaggctgctccag

SEQ ID NO: 895422 - DNA, 602 bp, Homo sapiens
gtttatggattgatgtagggcttattaacttgatctgcttctacagttatttttatttttatttttttctttgatagagcttttatattatattttaagttctagggtacatgtccacaacatgcaggtttgttacatatgtatacatgtgccatgttcatgtgctgcacccattaactcaccatttacattaggtatttctcctaatgctatccctcccccatacccccagctcatgacaggccctggtgtgtgawgtccaccaccctgtgtccatgtgttctcattgttcaattcccacctatgagtgagaacatgtggtgttgggttttctgtccttgtgatagtttgcccagaatgatggtttccagcttcatccatgtccctgcaaaggacatgaactcatccttttttatggctgcatagtactccatggtgtatatgtgccacattttcttaatccagtctatcattgatggacatttgggttggttccaagtctttgctattgtgaatagtgctgcaataaacatacgtgtggatgtgtctttatagcagcatgatttataatcctttgggtatatacccactaatgggatggc

SEQ ID NO: 895423 - DNA, 643 bp, Homo sapiens
tcactatctaaaatatttaatccctgatccccactatcttagcttcctatcattacaacagacacagatgggataatttataaagaacagaagcttattgggctcatggtagtagaggtggggaagcccaagagcatggggactacagctgtcaagggttatccccttgctgagaacaagcactcaggacagagaaaatgggggccaaacgtatgcttttatcaggaatccactcctgggataactaacccactcctgtgataatggcattaatccattaatgagagcagaaccctcatgatctagtatcctcgtaaagactcacctcttaataacatcacaatgataaatttcaatatgagttttggagaggacattcaaaccatagcactcagcaatagaatkcaggatcttatagaatataaactttattactataattctagcatgcagtatagggactcatgttaagtaaaagattaataaatatataataagcgaatgcaaaatgaattctgtggtaggtgtgaaataaagaaatgtgtacaatgcgaagagttattactaagtaggtgaaagagggagataggaaataatgtaacagatcaaaaaaatttctaaggttgatacatttttaagaatg

SEQ ID NO: 895424 - DNA, 614 bp, Homo sapiens
tcactgtcaccggtgctttaagcaacgcttaaagtttgagaagcattgctctaggagagaggcaaataggcaaggcttaagggtagggtcaagattggagaaggtttatgtagttgagacaattgatgtgacagatatcagaggtaaaggcgtattcacaatacatacatattagcatatataggtacaagtatatacatatatatgtgtgtatatatgtatatgtgtgtgtatatatgtatatgtgtgtgtacatatgtatatgtgtgtgtatatatgtgtgtgggtgtatatatgtgtgtgtgtatatatataagcaattatctatgtattatattgtggtttaggatttaatattcatgaccatcagcatctatgtctaacaatgctragaaaatgattgtgacatttatacaaatcctttattatttgtaattaagattaattaaggtaaaaatgcaatatatcttattgaatgaggactaataaatgatatgatcttcattttaatcaatgttcctgcccctgtcgagtgcaccagacaatatattgctgctttggattgtctccatcatattcaaaaaaattataagcctctaaggcaattttaactt

SEQ ID NO: 895425 - DNA, 607 bp, Homo sapiens
aggctggagtgcagtggcgcgatcttggcccaccacaacctctgcctcccaggttgaagtgattctcctgcctcagcctcctgagtagctaggactacaggcatgagacaccatgcccagctaatttttgtatttttagtggacacggggtttcactattttggccaggctggtctcgaactcctgacctcgtaatctacctgccttggcctcccaaagtgctgggattacaggcgtgagcsactgcgcctggcctctctgaagaacttttaacatttcctgaaaaataggtcaactagcaagagattctcaatttttgtttgagaaagtttttatttctctcactttcgaaggataattttgcagggtacagaactcatgattggtggttgatagggttttgctctgtgtccccatccaaatctcctctcaaattgtaatccccatgtgttgagggagggacctagtgggtggtaattggatcacgggtgtggtttcccccatagtattctcatgataatgaaggagctcttaggagatctgagggttttaagactggcaggttttctctgtgggcactctctctctcctgctgccatgtaaaatt

SEQ ID NO: 895426 - DNA, 628 bp, Homo sapiens
aaagaagagactgaactgtgcttggtctctctaggttaactactggcagatttcatatttctaaatttattacattattgggtaacataaagccaatctcacattcaatcttttcctcttttaccatgggatattcagataaacttgagctaaagcaaagtaaaaattgccaccatttttctttctacctgaaataaccatgaataagttaagatgaataaagcactttaagtggttcttccatcacagaattatgtagamttgggagctttgggtcccctattgaaatattcctattgcctcttctatttattggtaatctcaatatgagattaagagcaaagcctggattgtgagtctattcagtctctagactttgttcttgctttgctagttactcaaatatctcaactgctagaatgacaaatatggatgggaaatagagatttcagaattgaaatatagacaacattctagcccaacaggtaactttgcacaagtcctggagtttccctgagccctcatcttaccaactgtgaaacacaaacaataggagcttcctctgtacagtaggtgcagttgctgagaggattggctgcaatcctccatgtaaagctctacaaggcgc

SEQ ID NO: 895427 - DNA, 595 bp, Homo sapiens
aaattaatccaaaatttccagatatgaaagaataggttaaatgtgagttttaacttaattgggaaattacttttaaaaggatctctctgtattaacagtcatccctcttctacctaaaataagatgctatgagaaagcttgctagtcttctgaaagccctgacctgtaacagcatctccggttcttaaggtcatgctatgttasatagaaattaaatattcaaggtgaactgtcccattgccacaactagctacaaaaaatacttgtggtttgcctggcctattgatttatgagtttacaactgataaagaatggctattaaatttgaagatatcttttatgcatttgcctgattttgtgccagccctaggtttatataaggaacaactgcaattctgccaacaatcaggagagttgaaaataaatgtttagttgttgttcttcctacactgtttatacatctgaaataaattccattatttcattccataacaccaggagaagattctcttcttccatctgtttagagcatctttgatttccttgttcctcaggctgtagatcactggatttaacatggggattgtaactgtgt

SEQ ID NO: 895428 - DNA, 600 bp, Homo sapiens
ttggttgagttcgtctgaagacctgggattaatggaaagaaatgttcaggttaaggtaaaggattgtggagaccaagttttattgtgcagaagaagctctcagacagcagacttcagagagagcaggttgtaaattgtttcttatcagacttaaaagggtgcctggctcttagttgattatctcctagatcagggaaggaaggaaggaaaacaaagtggagaggggattctctatagaatgtggatttttcccacaagagactttgcaaggcaatttcaaggtatgtcaaggaaatatatttttgtgtaaaacattttgattttcttccttgttatgctacagtcagattgtaaagtaagtcactgtatayggtgttaaataaaacccatctaatgagaatttatggtttgcagggcatgactccccagaccccttagaaaggaatttgggcaagataaaaaaaatcagagcttagtcctcaggtagctacagatgaggaaaacagagtttctaaataacttggatcaggctatgtacctacaaaatggcagagatgaaattaataatctcagatccaatgacttaaaagtgaatattct

SEQ ID NO: 895429 - DNA, 603 bp, Homo sapiens; identical to SEQ ID NO: 872967

SEQ ID NO: 895430 - DNA, 527 bp, Homo sapiens
gcaactaagaagtgtttttagaaagaacgaggctagttgcctagcttcccagggtcggcttcactagttattataaaaaccatgatggtgttctgtaaatccagaaatattgcattctgggtcttttttttttccaatacagggtctcgcttatttcctaggcatggtcccactatgatcacggtcccatgatcagcatgsgagttttgacctgcactatttccaacctgggcctttttacccctgcttaggcaacctggtggtctgctccaggaaggtcaccatagtgatgctgaacttagggaggacacctgattggcatagcacactacagcccagaactcccggactcaagctatccccttgcctcagcctccagagaagctgggactacaggcatgcactactgtgcccgtccattctgagtgtatttgtgccacggttatcatgcttctgggagctggcaccagctatcaagagagattaatttatgaaccagtgcccagtctatatttggctagagaacc

SEQ ID NO: 895431 - DNA, 584 bp, Homo sapiens
gaagagtgtttttcaacttggttccattctccccatcagttttgggtgcaccaatcaaatgtagctttggtcttttcacatagtcccatatttcttggagtctttatttgtttctttttactcctttttctctaaacttctcttctcactttatttcattaatttaaccttcaatcactttcttccacttgatcgagttggctactgaagcttgtgcattcatcasatagttctcgtgccatggttttcagctccatcaggttatttaaggtcttcttgacactgtttattctagttagccattcgtctaattatttttcaaagtttttagcttccttgtgatgggtttgaacatcctcctttagctccgagaagtttgttattactgaccttctgaagcctacttctgttaatttgtcaaagtcattctttgttcagttttgttccattgctgtcgaggagctgcgattctttggaggagaagaggcactttggtttttataattttcagcttttctgctcttcccatctctccttttctttcttcccatctttgtggttttgcctacctttgatctttgatg

SEQ ID NO: 895432 - DNA, 703 bp, Homo sapiens
gaggagaagaggcactttggtttttataattttcagcttttctgctcttcccatctctccttttctttcttcccatctttgtggttttgcctacctttgatctttgatgttggtgacctacagatgggattttgttgtggatgtcctttttgttgatgttgatgctattcctttctgtttgttaattttccttctaacagtcaggtccctcagttgcaggtctgctggggtttgctagaggcctactccagaccctgtttgcctgggtatcaatggtggaagctgcagaacagcaaatattgcagaacagcaaatattgctgcctcatctgtcctctggaagctttgtcccagaatggcatccgcctgtttgagatgtcagtcrgctcctactgggaggtgtttccaagttaggctacactggggtcagggacccacttggggaggcagtctgtctgttcttagagctcaagcgccatgcttgaagaaccattgctctcttcagagctgtcagatagggacgtttaagtctgcagaagtttctgctgccttttgttcagctatgtcctgcccccagtggtggagtcaactgaggcatctggccttggtgagctgtggtgggctccacccagtttgagcttccccagctgctttgtttacgtactcaagcctcagcaattgtggacacccctccccctgccagg

SEQ ID NO: 895433 - DNA, 637 bp, Homo sapiens
aaaaaattcccaggtatgatcaaaaaggggagactgcatatccaagaagctcagcaaataccatgaaattacaaagcaaattttacctacgaatatcataatcaaatttcagaagagaaaaccattaaaagcaagagaagaaaaaaacaaattatgtaaagtaaaacattaatattgttgaaagctgaatttccatcagtaatgaaagccagaagaaaatggcataacaactttaaagtgttgaaagaattatttccatgtagaattctatatcctgtaaaatttttctccaaaatacatacaaaataaggacatttttgggaaaactgagagctgaaagaatttgtcacaagwagacctgtgctatcaaacacacacacatgcacacacacacttgcacacacgcacacacacacaccccccccagaacaaaaacaaaagaatactctttggccgaaggaaaatgacaccatatggaaagtaaattccacagaaaaaaaggaatagtacttgaaatgttaaatatatggataaatatattagataagttttctatctttaaaaactttaaattacgtaaagcatgagtcataacaaataaatgtgaagtatgtaaggtatgtaggtataaagtacg

SEQ ID NO: 895434 - DNA, 637 bp, Homo sapiens
aaaaaattcccaggtatgatcaaaaaggggagactgcatatccaagaagctcagcaaataccatgaaattacaaagcaaattttacctacgaatatcataatcaaatttcagaagagaaaaccattaaaagcaagagaagaaaaaaacaaattatgtaaagtaaaacattaatattgttgaaagctgaatttccatcagtaatgaaagccagaagaaaatggcataacaactttaaagtgttgaaagaattatttccatgtagaattctatatcctgtaaaatttttctccaaaatacatacaaaataaggacatttttgggaaaactgagagctgaaagaatttgtcacaagtagacctgtgctatcaaacacacacacatgcacacacacacttgcacacacgcacacacacacacmccccccagaacaaaaacaaaagaatactctttggccgaaggaaaatgacaccatatggaaagtaaattccacagaaaaaaaggaatagtacttgaaatgttaaatatatggataaatatattagataagttttctatctttaaaaactttaaattacgtaaagcatgagtcataacaaataaatgtgaagtatgtaaggtatgtaggtataaagtacg

SEQ ID NO: 895435 - DNA, 734 bp, Homo sapiens
gggtatggttgacatttggttcaatattctatttacaacaagtagtgtcatgtctttttttttttccagaacatcacacagtttctggtattcagcagataagtaataaatgtctgtcaaattgaactgaataaaagtattacttctttaactcaaatctgtatttggtatttttggttgcaatagacactatctcaatgttaggaaatgggaaatttgtagaaatttggggaacattttgtttagtaggaaatttgggaggaaagggtaagaaagtaaaggaactgagaaaacactagaatacatgaacagaaaattcacaatctgggcactattgctaaaatgattcagtgtatgtgaatatttgtaaagyacatattctatggaggtgagaatttttatcttttttgaacactaaccctgatctctagatcagtgtgtgacgtggaatagaggataagcaaattaatgaatatatatttaatgaataagcatgtgtacatacttatactaatccactcaagattcaaagttctgggagatagaatctgactgcctagatcaggtcacatggctatcagatgtctactagttcaccctgatttaccaaaccatggatgcttcatacaaggggtagattcctcaaaaggaatttgggatgctgttaccagaaattgtgtgattatactgacctaagtatgtgctctgaattgatattactagactgcataaaa

SEQ ID NO: 895436 - DNA, 641 bp, Homo sapiens
tcagctagcagctcctttagaccctgactgttttcatcgttactcactttcttctttccacattcttagaacgaatgccctttgaattaaccagccggccacttgaaaccgcttctgccacctgactccagttgattcagaaagccattttttctctttttcagtttttgccctttatttttccataatcactttatttataatagaactatgattcttaatcctagcaggccctatgtccttctttaataactttatgatatgaagccctctttagcattctaatggaatttacaaagtatattaaatacttattcatattacttaaaaatcaacataatgtcctaacagtaatctagtaatctataaaagaaatctaaaaataatttgttataatttgtattcaatatgtaaatgctgtggcatggctacyagaaaacttaatggaatgatcatatgcttgcttctgtatataggattattaatgaaccatacatgaattcaaattgaaagttatattgatgactcaaatatccaaaagtgacctttctactcatgtgattttctctaaatggtataaaccactcctgttgaaatttcaaaccatagaaaatataatattcaatctatttacatgatat

SEQ ID NO: 895437 - DNA, 641 bp, Homo sapiens
tcagctagcagctcctttagaccctgactgttttcatcgttactcactttcttctttccacattcttagaacgaatgccctttgaattaaccagccggccacttgaaaccgcttctgccacctgactccagttgattcagaaagccattttttctctttttcagtttttgccctttatttttccataatcactttatttataatagaactatgattcttaatcctagcaggccctatgtccttctttaataactttatgatatgaagccctctttagcattctaatggaatttacaaagtatattaaatacttattcatattacttaaaaatcaacataatgtcctaacagtaatctagtaatctataaaagaaatctaaaaataatttgttataatttgtattcaatatgtaaatgctgtggcatggctactagaaaacwtaatggaatgatcatatgcttgcttctgtatataggattattaatgaaccatacatgaattcaaattgaaagttatattgatgactcaaatatccaaaagtgacctttctactcatgtgattttctctaaatggtataaaccactcctgttgaaatttcaaaccatagaaaatataatattcaatctatttacatgatat

SEQ ID NO: 895438 - DNA, 615 bp, Homo sapiens
ttgtgaagcagtaaattaaactaacatgtttgcacaaagatttttcaagtagttcttctattacatcattctatcattttattgttttcctcccctgtacaaatacacacatactgttctttacatttggtctcatttgaatcaatgctaaagccaaaaatataagatgcaaatgtgggagaagtagaaggacaacatatctttaagaaaatttaaagataacaattggaatttaatttttcattgctattttgacacaatgtaaaaaggagcaaaatatatttctactttcttcttaaaatgtgaatttatggaactgtcagatataaaaacatttcaaaatcgtcattatgaagaccaacgttactggcctttaggactggtgatatgtattagyattaatctaggtttcatgtccccaacaggagactaaactgaaagttacaaaatatgtgttagttaatattcaacagcaaccttttcttctatcaaaactatgcattaaaaaagtgatgaactaaaaatatatgtaggctctataccttgttctatcagaaaataacaaagcaacatagaactagtcagtttccctgattggctgatccaactatacac

SEQ ID NO: 895439 - DNA, 667 bp, Homo sapiens
ttccaaaatacgatgatggtacaggcgtagaatagatattgtaatttcagaagagagaaatagtcaagaaaaaggcgatcagtggtctcaagtccaagtaagtccaaactcaacaaggcaaacaacatgaaatgtgaaagctggagactaatcttctatgacacaatgtctcacatccyggacacactggggcaagggctggatccccaaggcttcaggcaatcccacctctagagctctgtttggctcagtctactcagcgctcccgtgtgttggagtattgtgccagcaataatcccaggctggcattgaatgctagtagctctatagttctggaggcttgatggtagtcttgctctcagtgctcttagttcatttatctcaagttctgtattccataaacacccaacacaaagacaaaatttcacctagtttttggaagtatataataaaaatgccctttacttcagtttccaataacttgttcctcctttctatctgagatctcataagaatggcctttatcatctatatttctatcagcattctgatcatgagcatttaagtaatgtctaaaatgttccagacttttactgtagttcttgtcccattcacagaaacctgaactttttctagtatgctcctccaaattattccagtctttacc

SEQ ID NO: 895440 - DNA, 582 bp, Homo sapiens
gccctccttgggtcagaacaaatttcaaagactgactgcagaaattatttcttcaagcaaatctaattttggttaatatgggaagcaacttatccttccagatattgtcaaaacaataaaaaaagctgaaaattaatggagcttgacagttgggtgtgattagggaatgagagagacaaagggaactctggcaaaaccattgacaacagagtgactatgtatttactgaattctttacccctgagaagcaatctcagagacttcacactgctggtgatggtggggtgagagtcatagccttcrctattataagccagttaataactaaacaagtaaaaaagcaaataaaaataacaagcctggcatgagagggagtaccagtacccagagttgctgcaacatattatttaaagagttcagttaacaacaaaaaattatgagacatacagagaatgagaaatataactcattcaccagaagttacgcaacagaaaatgcctgtgaaagtaatcatatgtcttatatagcagactaaaacttaaaagtagctattataaatatattcaaagacctaaaggaaat

SEQ ID NO: 895441 - DNA, 582 bp, Homo sapiens
gccctccttgggtcagaacaaatttcaaagactgactgcagaaattatttcttcaagcaaatctaattttggttaatatgggaagcaacttatccttccagatattgtcaaaacaataaaaaaagctgaaaattaatggagcttgacagttgggtgtgattagggaatgagagagacaaagggaactctggcaaaaccattgacaacagagtgactatgtatttactgaattctttacccctgagaagcaatctcagagacttcacactgctggtgatggtggggtgagagtcatagccttcgctattataagccagttaataactaaacaagtaaaaaagcaaataaaaataacaagcctggcatgagagggagtaccagtacccagagttgytgcaacatattatttaaagagttcagttaacaacaaaaaattatgagacatacagagaatgagaaatataactcattcaccagaagttacgcaacagaaaatgcctgtgaaagtaatcatatgtcttatatagcagactaaaacttaaaagtagctattataaatatattcaaagacctaaaggaaat

SEQ ID NO: 895442 - DNA, 641 bp, Homo sapiens
atcacatccagggcacagcgatgcaaggggtgggcttgcatagccttgggcagctgtgctcctgtggctttgcagggtatgccccgctggttgcttttatagctggcattgagtgtctgaggcttttccaggaacatggtgcaagttgtcagtgaatataccattctcagttctggaggacaatggctttcttctcacagctccagtaagtaatgccccagtggggacactgtgtgggggctccaaccccacatttttcttccacactgccctagcagaggttctccatgagggctccactcctacagcagacttctgcctagacatccagcatttccatacattctcagaaatctagacagaggttcccaaagctgaactcttctgtgcaccctaaggcccagyattacatggaagccatcaaggcttggacttgtaccctctgaatcaatggcccaagctataccttggccccttttagtcatggctggagtgactggaatgcagggcaccaagtccctaggttgtacacagcaggacgagcttggacctggcccatgaaacaattttttccccctaggcctccatgcttgtgatgggagggactgttgtgaagatttctgatatgccctaaagaaatt

SEQ ID NO: 895443 - DNA, 607 bp, Homo sapiens
tagaatagtcattgagcccttcttagagtaaaggagtttcaaaatactgcctgccactgctcagggtttctggttaaaagatacaaatgtaaagaaacctgcagagttttgtggtccagatgggtgccaaattttgggaataatataaatagaaacagattctttttcttataattaaatgaactgatttttaggtttatttttaaaaaaatcaagtatagccaagggaaaatgtaatgacgataaattattcttacaagatgctgaaattcttagaaatcataacaaataaaacaatatagtactggctcataaataaatacattaatggaactaaaaaaactcaagacaaactcagtatatagggatatttagatttttttaatatttcaaatcagtggggaaaayatggactaatcaacaaatgatattcaaacaatttggtagttatctagaaaaggaaataaggttgaatcaatctctcaaaatttcaattctataaattccagttttcattaaaaaattaaatgcaaaaatacaaatatatgaaagtacaaggtgacataataaaacacatttaatttctttaaatttggagagaacttta

SEQ ID NO: 895444 - DNA, 691 bp, Homo sapiens
aaatatagaactaacagtataagtgatggtggttattccagtagaaaatagatgcaatgtttaaccaaccacatctattagctgagtcatttaatgtatgaagtagagtggtaattgtaaactaacgttatttccaagacatataataaaaatgaattttaagaaaaaaatcatttgattaaaaatatttcaaaccctatttcactaatatgattttatgttaaataagcttctgtgtaccatcgatctccaaagaaatatgcattaaattattattatttacaatgctgtttattctaacattttcagaaatttctctacaagtagtaatgatactgcccacatcaaatttattttatccacatttcaaattttatatttatgcctgaaattcttaactgctctgtttttctcttctagtcacttagcttgaaaagcrtatatagattagtcttgctgagctagtatcttttccacacaaaaggaatgacttatccaaaagaatgaacaatgaaaatagtactttattaaaatccttcagtatattgaagttgggagatttagatttgagttaatgagatgtatgttatttatacctaaataacatacatcactttatttgagaaaatcactacactcaattcccatgtgtcttagttttctaattgctaacctgcaaagtatttacaat

SEQ ID NO: 895445 - DNA, 634 bp, Homo sapiens
aaaatgtggacagtatcctaggagcccttaaactttgatgctatctagatcttcattgcagtagcttaaaagtttgtattgatagagagaatactgttaagcaatgtggtgtgattaaaataatacataaattgaagttaaacttgcatttgaatcttattttggttacttatttgctttttaactatatatraattgtcttttacccttaattttatcatttataaaatacaattatttttaaaattaagtgatattttataattttgcaaaggatcttacatatagtggtacttcactaatacataagcgttatttatggttactgaaaagattaaatttataaaatttgtttggggcatatatttagcatttttattaagatgtctaggatcacatgtcttttaatactcctaccatttatatatcacataatccaaaccttaatttgtaagcaaaggaagaaataatgataccaaaattttgatagctttcatatttttacaaatatatctgacaaagtgaacttgaaaacttagtttgtaccttggcatttctacctctctgaatgaatcttcaaatcctaaattaatatttaaaatgtatcctgttgttctgcttcctgtgagatcac

SEQ ID NO: 895446 - DNA, 641 bp, Homo sapiens
taaaacaaaagtgaaaataattaatcttgttttgaatgtttatgggtcatttgaagatcttactgtgtcttgcattcttcatatgaatgtcactcatctcttacctaagatcttttccaaactgagctaacacagactcaacgatttttcacctatttctccattgtcttaatcagaaagcctcccctcctctatcaatgtaacatggcatatctgctgctctaaattggggttcctaagcattcctgcagaaaataaatatatcatgaagaacagctttcagtatacatttatggcatccaaccaagtatgtaccctcaatcttgccaattattttaattttaataataattattattatttttagaaaggatagtttgtttttctctcttcttctcaacagttactccaaatgtttactatttttcttaagtcctctgcatcttactgccatcatctctcyctaatggtcaaatggccttcatttttgtatagagcagaaagagattatgtgacttgcatacatatcacctcccagacccacttacacatttacctgcatctgccctaattcttatcttcttagctgcctcagagggagaactaaggccccttctatttactcacataaatcattttga

SEQ ID NO: 895447 - DNA, 641 bp, Homo sapiens
taaaacaaaagtgaaaataattaatcttgttttgaatgtttatgggtcatttgaagatcttactgtgtcttgcattcttcatatgaatgtcactcatctcttacctaagatcttttccaaactgagctaacacagactcaacgatttttcacctatttctccattgtcttaatcagaaagcctcccctcctctatcaatgtaacatggcatatctgctgctctaaattggggttcctaagcattcctgcagaaaataaatatatcatgaagaacagctttcagtatacatttatggcatccaaccaagtatgtaccctcaatcttgccaattattttaattttaataataattattattatttttagaaaggatagtttgtttttctctcttcttctcaacagttactccaaatgtttactatttttcttaagtcctctgcatcttactgccatcatctctctctaatggtcaratggccttcatttttgtatagagcagaaagagattatgtgacttgcatacatatcacctcccagacccacttacacatttacctgcatctgccctaattcttatcttcttagctgcctcagagggagaactaaggccccttctatttactcacataaatcattttga

SEQ ID NO: 895448 - DNA, 589 bp, Homo sapiens
gttctgataagcatcagtgtttttcatactcattaatacaaccatgcttttctctaaaacctctgtgaatttactattctgctgatatttcctgtgaatttttgttttctgactttatttttttctgtctgaagttacctttcttccatgttctatttccacawgttcaaattctgcaaagcctcaaatatgtagaaaaaacaaagcctttacttataattccttacatttgcccaaacgccatatacacattgaaaaatttttttcttctgaaaatcactattatcattttggtgatacataatacacaagttacccaatttttaacttaaattttggttttccatttgtctagtgtaggtatatgcatgtgtacatgtatatatagcatatctgaccttaagggcaagatttctctaattctctgttacttccatgtggaagatatagtcagtgacagatagttcaatatcttattttaaatttagttggtactctatgtttgtcacatagacatgttagatgattatactctttcactttattctgaatcaaattggatataaatacaagaattggctgttctcgc

SEQ ID NO: 895449 - DNA, 589 bp, Homo sapiens
gttctgataagcatcagtgtttttcatactcattaatacaaccatgcttttctctaaaacctctgtgaatttactattctgctgatatttcctgtgaatttttgttttctgactttatttttttctgtctgaagttacctttcttccatgttctatttccacatgttcaaattctgcaaagcctcaaatatgtagaaaaaacaaagcctttacttataattccttacatttgcccaaacsccatatacacattgaaaaatttttttcttctgaaaatcactattatcattttggtgatacataatacacaagttacccaatttttaacttaaattttggttttccatttgtctagtgtaggtatatgcatgtgtacatgtatatatagcatatctgaccttaagggcaagatttctctaattctctgttacttccatgtggaagatatagtcagtgacagatagttcaatatcttattttaaatttagttggtactctatgtttgtcacatagacatgttagatgattatactctttcactttattctgaatcaaattggatataaatacaagaattggctgttctcgc

SEQ ID NO: 895450 - DNA, 589 bp, Homo sapiens
gttctgataagcatcagtgtttttcatactcattaatacaaccatgcttttctctaaaacctctgtgaatttactattctgctgatatttcctgtgaatttttgttttctgactttatttttttctgtctgaagttacctttcttccatgttctatttccacatgttcaaattctgcaaagcctcaaatatgtagaaaaaacaaagcctttacttataattccttacatttgcccaaacgccatatacacattgaaaaatttttttcttctgaaaatcactattatmattttggtgatacataatacacaagttacccaatttttaacttaaattttggttttccatttgtctagtgtaggtatatgcatgtgtacatgtatatatagcatatctgaccttaagggcaagatttctctaattctctgttacttccatgtggaagatatagtcagtgacagatagttcaatatcttattttaaatttagttggtactctatgtttgtcacatagacatgttagatgattatactctttcactttattctgaatcaaattggatataaatacaagaattggctgttctcgc

SEQ ID NO: 895451 - DNA, 619 bp, Homo sapiens
ttaagcaatgtaataagtaagtaggttgacctattttccattttaagggcagaaataaaattaccattcatatgtagggaaaggcttctttctgcagtaactataagccatattaacactgagttctttttttttttcagaaatacctctaagttgagctaagtaagtatgaaagaaactcagaaaatacaaaaatactttcataaaaaataatcatagtatcatgtccttgattaacaaattcagtcccttttatgctgtccctggtaggttggggcacattgtggacaaaacaaaagctctgaagacagaatratccagatttcactcctttctcttccaattataagccttgtaacctggacaagttacttaacctgtctcacttataaaatgaagatattaatagtggatatgcagatttattataagtgctcagtaagataattttttaaaaaaaacacctagtattccagccaaggtatgacaggtggttgccgaaagtaatatattgttcttaccataaaatgtgtagtttctaaaacacatggcaatgggttaaattttagcacatgaataatgacatattaaaagttaattaagactcagtaacctccta

SEQ ID NO: 895452 - DNA, 542 bp, Homo sapiens
ttcagccatagtttacatctcggctgatgtgagcaactgaagagaaggcagttgaggtgtctaatgtatagtgaatggctaaaaataaccttgtgatgatctggagaataaggcagccaccaagaagtgagccaaagtytcatcatgtagaaatgttagatagtatgggaagatcaatgaatgagtagttaatattttttattagtgggtgtgttttgcgggtgttggttattagtgttcttatagttgaagtacaatgataatttttcatgtcattagtcatggttatagtccatgtgggaataatggcatatgctttatttttattaagtgttcttttgattatgggatttgtagatttttctttgaaaccttctcctatttatgggggtttagggctaattattagtggtgctgtgttgtggtattgtgttgaattttggtggggcttttgtggggttaatggtctttttaatttatttgggtggtatgatggttgtctttggttataccgcggtgatggctattgaggagtaccttga

SEQ ID NO: 895453 - DNA, 542 bp, Homo sapiens
ttcagccatagtttacatctcggctgatgtgagcaactgaagagaaggcagttgaggtgtctaatgtatagtgaatggctaaaaataaccttgtgatgatctggagaataaggcagccaccaagaagtgagccaaagtctcatcatgtagaaatgttagatagtatgggaagatcaatgaatgagtagttaatattttttattagtgggtgtgttttgcgggtgttggttattagtgttcttatagttgaagtacaatgataatttttcatgtcattagtcatggttatagtccatgtgggaataatggcatatgctttatttttattaagtgttcttktgattatgggatttgtagatttttctttgaaaccttctcctatttatgggggtttagggctaattattagtggtgctgtgttgtggtattgtgttgaattttggtggggcttttgtggggttaatggtctttttaatttatttgggtggtatgatggttgtctttggttataccgcggtgatggctattgaggagtaccttga

SEQ ID NO: 895454 - DNA, 649 bp, Homo sapiens
attctaaggccacttttcactgatgcacaatcctgccaacctttactctttgcagtgaaagttataatgttatttttttcttctccatgagtttaacatagacaaagtatttttaatattcttttacccagttttggtttaaaaatcattgatcttatctcatcgctgatcagttttattctcaaggtaattaatgcacctgggatattgtcattaaaaataaattgttaacatggagatgagtgaaacaagaaaatagattcaccaaaatcatttttaagtaatttttaaaaaatatcagtgttaataaaaatttgaaattgatgaagtgcttctatacaataacaactcccacagaagagtatagaacatgtacataaattgttgttatacaatagaaaccatctattcaggtagtagaatcaattatttcacatagatacaaagttcwtcttaacaggaactataatattactaaaaataataaatcagggtttttttttaattatttatttatttttgagatagatcgtgctctgttgcccaggctagagtgcagtggcatgattttggctcactgcaatttctgcctcctgggttcaagtgattctcctgcttcagcctcccgagtagctgggattacaggcac

SEQ ID NO: 895455 - DNA, 589 bp, Homo sapiens; identical to SEQ ID NO: 893518

SEQ ID NO: 895456 - DNA, 441 bp, Homo sapiens
gttctgaccaccatgatttctaagagaaatcttcattcatttgaattgttgtttttctctagctacttcaagattttttttccaaatatttggttttcagcaatttcattattatatgcccaggctttttttttctttgaatatattctctctgaatttcagtgaacttctttaacctgaatgttgatgctttttaccaaatttgagaagttttcaggtatattttttcttcaaatattttttctgtcatgttctctttcttctgtactttttagactccmatgagatgtatattagacctttcgatgttgtcctgtaagttcctacatctctatttttttgtcaaggtttttctttttgttcttctaatttttttaaaaatctatttttaagtttactaacttgtactccgtcataaacattctatttagcctaccccat

SEQ ID NO: 895457 - DNA, 563 bp, Homo sapiens
cacaatagggagcaagcgaggcaagaagggcaagagagcacctgacagccacagcctttgtaacctcatctcagaagtgacaatgcctcacttttgctgtatctatttgttgaaagggagtcgctaggttcagcacacaatccaggagagggaattccacaagagtgtgagtgccaggaatcagggatcattgtacaggctgcctgccacaaggtgtaatttacgtatcataaaatgcacagatcttaagtattcagatcaataagttttgacaactgtatgtgtcatgtacccatcactcaataagatctagaacatttctgaccctctggaaagcttcctgatgatcttttccagtcaattcaacacattcctttctcactcyccaccacccctcccctccatcacagagccaaccactttcttatttccaccagcatagacctgttgtgcctgtttgtggactttatataaatggaatcctccaatctgattttttttgtgtgggtacatacattttgtgtgggtatatatatttataggatacatggcatattttgata

SEQ ID NO: 895458 - DNA, 611 bp, Homo sapiens
gttttgacaactgtatgtgtcatgtacccatcactcaataagatctagaacatttctgaccctctggaaagcttcctgatgatcttttccagtcaattcaacacattcctttctcactctccaccacccctcccctccatcacagagccaaccactttcttatttccaccagcatagacctgttgtgcctgtttgtggactttatataaatggaatcctccaatctgattttttttgtgtgggtacatacattttgtgtgggtatatatatttataggatacatggcatattttgatataggcatacaakgggtaataattatatcaggtaaatgggatatccatcacctcaagcatttatcctttcttttatgtgacaaacaatccaattatactcttttagttatttttaaatatacaataaattattgtggactgtaatcaccctgttgtgctatcaaatagatcttattcattctttctaactaactacatttttacactcattaaccatccccacttctcacccccctgactacccttcccagcctctggtatccatcattctactctctatctccatgagttcaattgttttaattttttagctc

SEQ ID NO: 895459 - DNA, 614 bp, Homo sapiens
cagtcttgaattcattttggaatcttctgggcagctctgaaaaatcccaatgccaagacccaaccccattaaatcaggcacactaaatcagaatcttgggggatgaggctcaggcattcatattttttttaaaaagcaggaaagatctaaaattgacaccctaacatcacaattaaaagaactagagaagcaasagcaaacacattcaaaagctagcagaaggcaagaaataactaagatcagagaagaactgaaggaaatagagacacaaaaaacccttcaaaaaatcaatgaatccaggagctggttttttgaaaagatcacaaaactgattgatagaccgctagcaagactaacaaagaagaaaagagagaagaatcaaatagatgcaaaaaaaatgataaaggggatatcacaactgaaccacagaaatacaaactaccatcagagaatactataaacacctctatgcaaataaactagaaaatctagaagaaatggataagttcctggacacatacaccctcccaagactaaaccaggaagctgaatctctgaatagaccaatgataggctctgaaattgaggcaataattaatagcttaccaaccaaa

SEQ ID NO: 895460 - DNA, 614 bp, Homo sapiens
cagtcttgaattcattttggaatcttctgggcagctctgaaaaatcccaatgccaagacccaaccccattaaatcaggcacactaaatcagaatcttgggggatgaggctcaggcattcatattttttttaaaaagcaggaaagatctaaaattgacaccctaacatcacaattaaaagaactagagaagcaagagcaaacacattcaaaagctagcagaaggcaagaaataactaagatcagagmagaactgaaggaaatagagacacaaaaaacccttcaaaaaatcaatgaatccaggagctggttttttgaaaagatcacaaaactgattgatagaccgctagcaagactaacaaagaagaaaagagagaagaatcaaatagatgcaaaaaaaatgataaaggggatatcacaactgaaccacagaaatacaaactaccatcagagaatactataaacacctctatgcaaataaactagaaaatctagaagaaatggataagttcctggacacatacaccctcccaagactaaaccaggaagctgaatctctgaatagaccaatgataggctctgaaattgaggcaataattaatagcttaccaaccaaa

SEQ ID NO: 895461 - DNA, 614 bp, Homo sapiens
cagtcttgaattcattttggaatcttctgggcagctctgaaaaatcccaatgccaagacccaaccccattaaatcaggcacactaaatcagaatcttgggggatgaggctcaggcattcatattttttttaaaaagcaggaaagatctaaaattgacaccctaacatcacaattaaaagaactagagaagcaagagcaaacacattcaaaagctagcagaaggcaagaaataactaagatcagagaagaactgaaggaaatagagacacaaaaaaccmttcaaaaaatcaatgaatccaggagctggttttttgaaaagatcacaaaactgattgatagaccgctagcaagactaacaaagaagaaaagagagaagaatcaaatagatgcaaaaaaaatgataaaggggatatcacaactgaaccacagaaatacaaactaccatcagagaatactataaacacctctatgcaaataaactagaaaatctagaagaaatggataagttcctggacacatacaccctcccaagactaaaccaggaagctgaatctctgaatagaccaatgataggctctgaaattgaggcaataattaatagcttaccaaccaaa

SEQ ID NO: 895462 - DNA, 669 bp, Homo sapiens
tcatgattaggaagagccaaaccttcaccataacaggacgtgtcagcactgtgtctccggggatttttctctgcctcaggcattgtctgggcctctagctggagtggtctaaggattgaaggatcactgttctgttsgatggaatccttttatctggtggataagacttcctctgtgatgtggtggagtgacatttactaccctctgacaaagggggacagtgagggcagtcctgctgcagccaaaatgtgcagggaacagttctctgaagcaactaaacatcttgaataaatttaagctggctctaatactgcttctacgtaaaagactggagggcaacaggacctttgagagtttggagaggtatactcccaggggtaggacaaagggcatatggggctcctgcatgggaaagaactcagcatttaagtccatcatatactagcagtgggatctctctgagcctgcaaggaaaatgaaacaatataaaaccctgactccagggttgctgcaagggcattgggaggtaatgcaaggacaaatgtccaaatggtatgtggaaaatgtttgtggaatttcaaaatcatgaaaaatctatactacacgtcagaccctaactgttgcaggaagtcagggaccttgaacagaaggaccggctgaagccatggc

SEQ ID NO: 895463 - DNA, 625 bp, Homo sapiens
catcagagaaatgcaaatcaagaccgcaatgagataacatctcacaccattcagaatgattattattttaaaaataaaaaatagcagattctgtcaaggctgcagagaaaagggaatgcctatacgttgttggtgggaatgtaaattagttcagccactgtggatagcaggttggmgatttctcaaagaacttaaaacagaactaccatttgaccctgcaatcccatactgggtatatactcaaagaaaaacaaaacattctaccaaaaagatacatgcaaatgtatacgcattgcagcactatgcccaatagcaaagacatggaataaatcctggtgcccatcaatggtggattggataaagaaaacatgctacatatacaccaaggaatactacgcagccataaaagagaatgaaataatgtattttgcaacatggatgcagatggaggccattatcctaagtgaattaacgcaggaacagaaaaccaaataccacatgttctcacttataagtgggagctaaatattaggtactcatagacaaaaagatgaaaacaacagacactggggacaattagagggggaagggaaaggggagggaaccattgaaaaactaactattg

SEQ ID NO: 895464 - DNA, 587 bp, Homo sapiens
cctttttattcaggtagattcaattaaaatcacacacatttattttctttatatacctaacaccaaacagtattcaggataccaaagggaatatagagatatgaaattctaggttctgccattaagcagttttctgtttgtatgtttgtttttgagatggagtctcactctgtcacccaggctggaatgcagtggtgcaatctcagctcactgcaacctctacctcccaggttccagtgaatctcctgcctcagactcccaagtacctgggattacaggcacatgtcacaacgccctgctaatttttgtatttttagtagagatggggtttcaccatgttggccaggctggtctcraactcctgacctcaggtgatctgcctgccttgacctcccaaagtgctgggattacaagcatgagccactgtgcctggcctcattaagcagtttttaaaagttagttggagaataagcagatgcgtaaatgagctactctaggtgctatagtcaaggggaggaggagaaggagagaggtcagaggaaggagggtttatacctccttcagagagtcaatgttggcttcatgac

SEQ ID NO: 895465 - DNA, 600 bp, Homo sapiens
ggcagaagaaatttctaagcagcaaagcattccagaagtgatttgggtgctgttaaaagcattcatttttatgtatttgcaaagatatggtttggaattggaacttatgtttaaaagggaagcagagcataaaagtttgaaacattcgcagccagatgatgtgctgggaaagcaaaacccactttctaaggagaaattcaagccaactgtagaaatttgcagaagtaacgaggagccaaatgttaatctctaagacattaatctccaagacaatggggaatatgtctccagagtatgtcagagaccttccaggcagcccctcctatcacaggactggagacctaagagggaaaaaaatgttttcatgaggtaagccgagggcccttctgctgtatgcagcctaaaggcttagtgcccttcttccygggccactgaagccatggctaaaaggggccaagaaatagcttgggctgtgacttcaaagggtgcaagccccaagccttggcagcttccatgtggtgtggagcctgtaggggcacagaagtcaagaattgaggtttgggaacctctgtctagatttcagaggatgtatggaaatgc

SEQ ID NO: 895466 - DNA, 630 bp, Homo sapiens
cctctagttttgttccttttgctcaggatagctttggctattctgggtcttttgcagttcaatataaattttagactcatttcacctatttctgtaaagaatgttgttgggcattctttttattggacagagatggcatttggacagagatggcattcagtctgtaggttgctttgggtagtttgtacattttaacaatattagatctttccattcatgagcatggaatatcattttatttttgmgtcctcttcaatttctttcaacagtgtattatagttttcattgtagaggtctttcccttgtttggtgaagttaaatcctaggcatttatttaaggctgctataaatgggattactttttaaatttcttttttgaattgtttagtgttggcatgtagaaatgctacagatttttgtatattgattttatctcctgtaactttatcaaatttgtttatctgttctaatagttttctggtggagtctttacgatttccaaataagaagaaaatatgatctgcaaacaaagataatttgacttctttctttttaatttaaatgtcttttattttattactcctgccattttgttatttgttgtctgcttgttttatgatcttatcttcc

SEQ ID NO: 895467 - DNA, 630 bp, Homo sapiens
cctctagttttgttccttttgctcaggatagctttggctattctgggtcttttgcagttcaatataaattttagactcatttcacctatttctgtaaagaatgttgttgggcattctttttattggacagagatggcatttggacagagatggcattcagtctgtaggttgctttgggtagtttgtacattttaacaatattagatctttccattcatgagcatggaatatcattttatttttgagtcctcttcaatttctttcawcagtgtattatagttttcattgtagaggtctttcccttgtttggtgaagttaaatcctaggcatttatttaaggctgctataaatgggattactttttaaatttcttttttgaattgtttagtgttggcatgtagaaatgctacagatttttgtatattgattttatctcctgtaactttatcaaatttgtttatctgttctaatagttttctggtggagtctttacgatttccaaataagaagaaaatatgatctgcaaacaaagataatttgacttctttctttttaatttaaatgtcttttattttattactcctgccattttgttatttgttgtctgcttgttttatgatcttatcttcc

SEQ ID NO: 895468 - DNA, 611 bp, Homo sapiens
tttatgctctattcacatgtcttcattttttttctttctgttcctcaaactagataatttcaatgagctcatcaagtttactgattctttcttctgcctgcataaatctgctgttgaagctctagtaaaattttcatttcagttattgtatttttcagctccagaattcctatttgcttcctttatataattcaatttctttattgatatttttgtggcattatttgtctggtttcttttaatttttttgtcaatgattgcctttatctatttgaggatatttaaggcagttgatttaaagctttgcctagtaagacaatgtctgtgcttcctcagggatactttctgttcatttggctttttttcctgcaaattggccatactttcttgtatctttgtgcaccacgtgattttttggttagaaactgggcatgttatatatttaaatgtggtaastggatataagattcttcaccttcctcaaggtttgttgttattgtttgctgtggatggcctcttaattctgttgtttctttagcttttggtcagctagtggtttcacagagattttcttaaaagaaaaaaaaataatagtctcctggtctttgcag

SEQ ID NO: 895469 - DNA, 597 bp, Homo sapiens
accatatcattccaccccggcccctaccaaatctcatgtcctcatatttcaaaacaaatcatgccttcccaacagtcccccaaagtcttagctcatttcagcattaactcaaaagtccacagtccaaagtcttatctgtgacaaggcaagtcccttctacctgcgagcctgtaaaatcaaaacaaattagttacttcatagatacaatgggggtaaaaacattgggtaaatatagccattccaaatgggagcaattggccaaaataaaggggctacmggccccatgcaagtctgaaatgcagcaaggcagtcaaatcttaaagctccaaaatgatctcctttgactccatgtttgatatccaggtcatgctgatccaagagatgggttcccatggtcttgtgcagttctgtccctgtgacattgcagggtacatcctccctcctggctgctttcacttcctgggattgagtgtcagcagcttttccagtggatctaccattctgggttctggaggatgatggcccttttctcacagttccactagttgatgccccagtagggactctgtgtgggggctccaaccccacatttccctt

SEQ ID NO: 895470 - DNA, 635 bp, Homo sapiens
atagagtttattgcacccccctgccacctccactggaacaggtgctggcatccacagctgagagacccatagatggttcacgtcataggaccctgtgcagacaacccccaataccagctcagagctgggtagacctgctgggtgggtagacccagaaragaaatagcaattactccagttcatctcatagaaagccacatccataggaaaaggaggagagtactacatcaagggaatgttgatatgagttctaaatttcttttcaaaggatcaatatgtcagtatgttcaattttttgccttctacttttaaacttaactcccttataaagcaacctttttcgattacctgctccagcctgactcattttgattacctgctccaccctgactcattctgattgcctgctctaccctgactcattccaattacctgctctatcataacaatttttcctgccaaaccactcaccccattactctctttaaatttagccaatcagaattcatttagcctgtgtggtctaaccctagccaataggggaatgacacagcaggaggggccacatgtgttagggataagaaccccttcccctcccttgtctaagtgtgcactcaccattgctccatctgtaa

SEQ ID NO: 895471 - DNA, 635 bp, Homo sapiens
atagagtttattgcacccccctgccacctccactggaacaggtgctggcatccacagctgagagacccatagatggttcacgtcataggaccctgtgcagacaacccccaataccagctcagagctgggtagacctgctgggtgggtagacccagaagagaaatagcaattactccagttcatctcayagaaagccacatccataggaaaaggaggagagtactacatcaagggaatgttgatatgagttctaaatttcttttcaaaggatcaatatgtcagtatgttcaattttttgccttctacttttaaacttaactcccttataaagcaacctttttcgattacctgctccagcctgactcattttgattacctgctccaccctgactcattctgattgcctgctctaccctgactcattccaattacctgctctatcataacaatttttcctgccaaaccactcaccccattactctctttaaatttagccaatcagaattcatttagcctgtgtggtctaaccctagccaataggggaatgacacagcaggaggggccacatgtgttagggataagaaccccttcccctcccttgtctaagtgtgcactcaccattgctccatctgtaa

SEQ ID NO: 895472 - DNA, 635 bp, Homo sapiens
atagagtttattgcacccccctgccacctccactggaacaggtgctggcatccacagctgagagacccatagatggttcacgtcataggaccctgtgcagacaacccccaataccagctcagagctgggtagacctgctgggtgggtagacccagaagagaaatagcaattactccagttcatctcatagaaagccacatccataggaaaaggaggagagtactacatcaagggaatgttgatatgagttctaaatttcttttcaaaggatcaatatgtcagtatgttcaattttttgccttctacttttaaacttaactccctyataaagcaacctttttcgattacctgctccagcctgactcattttgattacctgctccaccctgactcattctgattgcctgctctaccctgactcattccaattacctgctctatcataacaatttttcctgccaaaccactcaccccattactctctttaaatttagccaatcagaattcatttagcctgtgtggtctaaccctagccaataggggaatgacacagcaggaggggccacatgtgttagggataagaaccccttcccctcccttgtctaagtgtgcactcaccattgctccatctgtaa

SEQ ID NO: 895473 - DNA, 622 bp, Homo sapiens
aggaagaggacagagaaaaggcctggggtatttctgccagggcctggccctctgtggagaaggcctcctttcctgaaaaaacggccacttttctctgtaccagtcccatcttctgcatgccacccacatgccaggccaacctgccttccaaggctgtggacaatcccagggctgggggcwcgtctccattctttgcaagaaccgtggaagattaaaggcctctgagaaggggacctggctggggcctcagcgtcctctcacaggccaaggtgctaactaggtgttatctggaggggcaccgagatccagtgtgcccaggtgctcacagagaggtgagtgtacccacacagaggcccagctgcctgtatggagcccaggtagccaaacagaactcatgaggcctgcacagcaggctgaatgttcacagactcgggcactcacatgcattcccacacaggtgcattctgtaccacaggctggaggcctgggtgcccataccaaaagaagctggcagttcttgctgagggctgggcattgaccttcctgatccccacggtaagctccaaagctggacagtggtttctgagttatgagcagacatttgggtgtttctctgcagcct

SEQ ID NO: 895474 - DNA, 596 bp, Homo sapiens
ctgacatgtggggattaccattcaagatgagatttgggtgggaatacagaaccaaaccatatcattctgcccctggcccctcccaaatctcatgtccttttcacatttcaaaatcaatcatgccttcctaactgttctgtaaagtcttaactcagtccagcattaactcaaaaatctaagtccaaagtatcatctgagataaggcaagtcccttctccctatgagcctgtaaaataaaaaacaaattagttactcccaacatacagtaggggtgcaggcattgggtaaatgttcccattccaaatgggagamattggccaaaacacaggggccacaggcctcctccaagtccagaatcctaaagggccctcagtaaatcttaaagctccagagtaatctcctttgacttcatgactcacattcagggcatgctgatacaacaggtgggttcccagggccttgggcagctgcacccgtgaagctctggagggtacagcccccagagctgctttcataggttggtgttgagtgcctgtggcttttccaagcacacagtggtaacctgttgctggatctatcattctggcatctagaga

SEQ ID NO: 895475 - DNA, 596 bp, Homo sapiens
ctgacatgtggggattaccattcaagatgagatttgggtgggaatacagaaccaaaccatatcattctgcccctggcccctcccaaatctcatgtccttttcacatttcaaaatcaatcatgccttcctaactgttctgtaaagtcttaactcagtccagcattaactcaaaaatctaagtccaaagtatcatctgagataaggcaagtcccttctccctatgagcctgtaaaataaaaaacaaattagttactcccaacatacagtaggggtgcaggcattgggtaaatgttcccattccaaatgggagacaytggccaaaacacaggggccacaggcctcctccaagtccagaatcctaaagggccctcagtaaatcttaaagctccagagtaatctcctttgacttcatgactcacattcagggcatgctgatacaacaggtgggttcccagggccttgggcagctgcacccgtgaagctctggagggtacagcccccagagctgctttcataggttggtgttgagtgcctgtggcttttccaagcacacagtggtaacctgttgctggatctatcattctggcatctagaga

SEQ ID NO: 895476 - DNA, 611 bp, Homo sapiens
acccacatgcccaacaccacatggaaactgccagggcttggggcttgcaccctctgaggccacagctcaagctgtaccttggtcccttttagccactgctggagctggagcagctggaaggcagggtgccatgtcctgaggctgcaccgagaagctggaaggcagtgtgccatgtcctgaggctgcacagagcagctgggccctgggcctggcctatgaagccatttttccctcctaggccttgggcctgtgatggaaggggttgccttgaagatctctgcaatgcygtggagacatgtttcccattatcttggcagttaacattcagctccttgttacttatgcaaatttctgcagccagcttgaacttctccccagaaaatgggtttttcttttctaccacatggtcaggctgcaaattttccaaacttatatagtctgcttcccttttaagcctaagttccaatttcagaccatctcttcgtgagcatatataactgaatgctttcagaataagacaggtcacctcttaaatgcttcgctggttagaaatttcttccaccaggtaccctaaatcatctcactcaagctgaaagtcccatagattccta

SEQ ID NO: 895477 - DNA, 588 bp, Homo sapiens
gggtcttgccgtcttgcccaggctggtctcaaactcctgcactcaagtgatcctcccacctcagcctcccaaggtgctgggattacaggcatgagccattgtgcctggcccaaggataggctaactatcctagcagatgctaatgcagctggtgactttaagttgaagccagtgctcatttaccattccaaatgtcccaggacccttaagaattatgcacagtctactctgtctatactccctagatggaataataatgtctggacaacagtacatctgtttgcagcatggtttactgaatattttaagtccagggctgagacttactgctaagaaaaaaaaattctttcaaaatattactgctcattaacaacgcacctagtgacccaagagctctgayggaaatgtataatgaaatgaatgttgttttcatgtctgctaacacaacatccattccgtatgtcatagatcaaggagtaactgaatttcaatcttattacttgagaaatacctttcttgaggctataggtgccatagatagtgattcctctgatgaatctgggcaaagtaaattgaaaaccttctgga

SEQ ID NO: 895478 - DNA, 597 bp, Homo sapiens
accatggcacttgtatacatatgtaacacaactgcacgttctgcacatgtaccccagaacttaaagtataataaaaaaaaaggaaaaaataaaaataaaattaaaaatgttagttatgttaacatttaatgggttttatgttaacattattcttcttttaaaatgaattaataagtattttttaaacttctcaattttaacttctaatgtggtaaatatcaatagctgtatrtaaactaaagttctttggggtctccagtaatttttaagtgtataaagaggtcctgagttcaaaagtttgagaatttctaatttaataaaccaagcaagggtaaattatattacttgaatttttccaacaagcatatagtcatgtataagttgtgtaattaaaaaagaaaaaagtgaatgggcaccatttattcattagaaaaaattgtaaagtggggccttgagatgtgactacttcatatcgcatcaaggattggtctgacttgaattgttccaccaccaaagactggcatgagtaacactagcactggggttatcaaagagtgacattgaggctcatgttacctaaattagtatctcagttcc

SEQ ID NO: 895479 - DNA, 597 bp, Homo sapiens
accatggcacttgtatacatatgtaacacaactgcacgttctgcacatgtaccccagaacttaaagtataataaaaaaaaaggaaaaaataaaaataaaattaaaaatgttagttatgttaacatttaatgggttttatgttaacattattcttcttttaaaatgaattaataagtattttttaaacttctcaattttaacttctaatgtggtaaatatcaatagctgtatataaactaaagttctttggggtctccagtaatttttaagtgtataaagaggtcctgagttcaaaagtttgagaatttctaatttaataaaccaagcaagggtaaattatattacttgaatttttccaacaagcatatagtcatgtataagttgtgtaattaaaaaagaaaaaagtgartgggcaccatttattcattagaaaaaattgtaaagtggggccttgagatgtgactacttcatatcgcatcaaggattggtctgacttgaattgttccaccaccaaagactggcatgagtaacactagcactggggttatcaaagagtgacattgaggctcatgttacctaaattagtatctcagttcc

SEQ ID NO: 895480 - DNA, 597 bp, Homo sapiens
accatggcacttgtatacatatgtaacacaactgcacgttctgcacatgtaccccagaacttaaagtataataaaaaaaaaggaaaaaataaaaataaaattaaaaatgttagttatgttaacatttaatgggttttatgttaacattattcttcttttaaaatgaattaataagtattttttaaacttctcaattttaacttctaatgtggtaaatatcaatagctgtatataaactaaagttctttggggtctccagtaatttttaagtgtataaagaggtcctgagttcaaaagtttgagaatttctaatttaataaaccaagcaagggtaaattatattacttgaatttttccaacaagcatatagtcatgtataagttgtgtaattaaaaaagaaaaaagtgaatgggcaccatttattcrttagaaaaaattgtaaagtggggccttgagatgtgactacttcatatcgcatcaaggattggtctgacttgaattgttccaccaccaaagactggcatgagtaacactagcactggggttatcaaagagtgacattgaggctcatgttacctaaattagtatctcagttcc

SEQ ID NO: 895481 - DNA, 579 bp, Homo sapiens
gtatttgattatgctaatttgtgtatttcaagcttatttttgacagattgtttttaaacagttcattccttgactcatcatgaatctattctagtgtacagctcaaagttcattcttttccctagtgatatccaatttcytcaaaatgctgattgaatagtcattcttttccctattgtgatgctgtttctggaacgttataaagttcttacacaatttggaatttccatcatttctgttctagtgcactgatgaatcttttaaatttcaagccatatgatttttgaccacagttactttttatcatgctttgcagtctgtttacagtgaaaagggcattattactaatctaaaatggttttagtttcaatgtttatttcccccatttcatccttcgagggtgaagaagtgagaaccgagagctggagaagttagggaaccttaacgttccttcccatcctaagaattaggaagcctgtgatggtacggagcagacatcagaagctggctgcctgatctggcttacagtcttgttctgtttgtcctacacagctgctattattttggtttgctttgact

SEQ ID NO: 895482 - DNA, 579 bp, Homo sapiens
gtatttgattatgctaatttgtgtatttcaagcttatttttgacagattgtttttaaacagttcattccttgactcatcatgaatctattctagtgtacagctcaaagttcattcttttccctagtgatatccaatttcctcaaaatgctgattgaatagtcattcttttccctattgtgatgctgtttctggaacgttataaagttcttacacaatttggaatttccatcatttctgttctagtgcactgatgaatcttttaaatttcaagccatatgatttttgaccacagttactttttatcatgctttgcagtctgtttacagtgaaaagggcattaytactaatctaaaatggttttagtttcaatgtttatttcccccatttcatccttcgagggtgaagaagtgagaaccgagagctggagaagttagggaaccttaacgttccttcccatcctaagaattaggaagcctgtgatggtacggagcagacatcagaagctggctgcctgatctggcttacagtcttgttctgtttgtcctacacagctgctattattttggtttgctttgact

SEQ ID NO: 895483 - DNA, 672 bp, Homo sapiens
tctcagggtttttcctttcttgtttgtcaaatgtgggatacgtttgtagaatttgtagtgacatttccacaggtttcctctagcagtaccaggtaggagaaagagcagtagcatgatagggccatgggctggaaatgagaaataaatacatcatggacgaacctttttttttttttctctttttattctttgkgggccattgagagggaccatctgtgaaagtttttgactgtacaatctccaatgttccttcttgctggaataccagttttatgatgtgttatctcactggttactgaggaaataagaaagccaagggaggagaaggttctagacatctccacagacaacagaagcacaaacaaacaacaatacctcagcaggctggcctcccagcactgataagtgtttgggtccactgcaatgactctcttcaaagcctccttccaggctcatttttcctggtgccttgtggagcacaacccatttctgttggctagagtcctgcatacactcctgtgctttaaaaggaaggaattacaagtactaggagatggtcaatagtctacccttcaaaagagggaaagcccacagcctaggaaataaagccttttggggtagatcttgggagtggttaaaaattctatagaccccactgtacttagcgcacat

SEQ ID NO: 895484 - DNA, 657 bp, Homo sapiens
tcatgggccctgtaaaccctttgttttggccaatttctcccatttggaaaggctgtttttacccaatacctgtatcacccattgtttctaggaagtaactggcttgctttttattttacaggctcataggcggaagggactttccttgtctcagatgagactttggactatggacttttgsgttaatgctgaaatgagttaagatttcgggagactgctgggaagccatgattggttttgaaacgtgaggacatgagatttggaggggccaggaggggaatgatatggtttggcagtgtccccacccaaatctcatctcaaattgtactcctataattcccacacgttgtgggagggacctggtgggagataatttgaatcatgagggcagtttcccccatactggtctcatggtagtgaataagtctcgtaagatctgatggatctttattaggagtttccacttttgcatcttcctcattttctcttgctgccaccatgtaagaagtgcctttcacctgagtgcctgaggcctccccagccatgtggaactataagtccaattaaacctctttttttcccccagtcttgcatatgtctttatcagcagcacaaaaatggactaatacagatggtaagtgtgtatgtctatgatgg

SEQ ID NO: 895485 - DNA, 657 bp, Homo sapiens
tcatgggccctgtaaaccctttgttttggccaatttctcccatttggaaaggctgtttttacccaatacctgtatcacccattgtttctaggaagtaactggcttgctttttattttacaggctcataggcggaagggactttccttgtctcagatgagactttggactatggacttttgcgttaatgctgaaatgagttaagatttcgggagactgctgggaagccatgattggttttgaaacgtgaggacatgagatttggaggggccaggaggggaatgatatggtttggcagtgtccccacccaaatctcatctcaaattgtactcctataattcccacacgttgtgggagggacctggtgggagataatttgaatcatgagggcagtttcccccatactggtctcatggtagtgaataagtctygtaagatctgatggatctttattaggagtttccacttttgcatcttcctcattttctcttgctgccaccatgtaagaagtgcctttcacctgagtgcctgaggcctccccagccatgtggaactataagtccaattaaacctctttttttcccccagtcttgcatatgtctttatcagcagcacaaaaatggactaatacagatggtaagtgtgtatgtctatgatgg

SEQ ID NO: 895486 - DNA, 591 bp, Homo sapiens
attgtagattctggatattagccttttgtcagatgagtagattgcaaaatttttctcccattctgtaggttgcctgttcactctgatggtagtttctttcgctgtgcagaagctctttagtttaatgagatcccatttgtcaattttgacttttgttgccaytgcttttggtggtttagacatgaagtccttgcccatgcctatgtcctgaatggtattgcctaggttttcttctaggtttgtatggttttaggtctaacatttaagtctttaatccatcttgaattaatttttgtgtaaggtgtaaggaagggatccagtttcagctttctacatatggctagccagttttcccagcaccatttattaaatagggaatagtttccccatttcttgtttttgtcaggtttgtcaaagatcagatggttgtagatatgtggcattatttctgagggctctgttctgttgcattggtctacatctctgttttggtaccagtaccatgctgttttggttactgtagccttgtaatatagtttgaagccaggtagcaagatgcctccagctttgttcttttggcttaggattgag

SEQ ID NO: 895487 - DNA, 643 bp, Homo sapiens
caggcacaagacaaggatgccctctctcagcacttctattcaacatggtattagaagttctgccagggaaatcaggcaagagaaagaaataaaaggtattcaagtagaaagagaggaagtcaaaccatcttgtttgcaaaaaaagtgaacctatatttagaaaaccctattgtctcagtcttaaagcttcttaagctgataagcaacttcagcaaagtctcaggataccgaatcaatgtgcaaaattcrctagcattcctttaaaccgacaacaggcaagcagaaagccaaatcatgaatgaactcccattcagaattgctacaaaaagaataaaatacctaggaatacagctagcaagggaagtgaaggacctcttcaaggagaactacaaaccactgctcaaagaaatcagagagtacacaaacaaatggaaaaaacattccatgctcatggataggaagaatcaatatcgtgaaaatggccatactgcccaaagcaatttataaaattaaacatctttcaatgaaattgggaagcattatcaaaagtcttggatatttacatagtgaaacttagtctctgctaaaaagtcttggatatttacatagtgaaacctagtctctactaaaaatacaaaaatta

SEQ ID NO: 895488 - DNA, 643 bp, Homo sapiens
caggcacaagacaaggatgccctctctcagcacttctattcaacatggtattagaagttctgccagggaaatcaggcaagagaaagaaataaaaggtattcaagtagaaagagaggaagtcaaaccatcttgtttgcaaaaaaagtgaacctatatttagaaaaccctattgtctcagtcttaaagcttcttaagctgataagcaacttcagcaaagtctcaggataccgaatcaatgtgcaaaattcactagcattcctttaaaccgacaacaggcaagcagaaagccaaatcatgaatgaactcccattcagaattgctacaaaaagaataaaatacctaggaatacagctagcaagggaagtgaaggacctcttcaaggagaactacmaaccactgctcaaagaaatcagagagtacacaaacaaatggaaaaaacattccatgctcatggataggaagaatcaatatcgtgaaaatggccatactgcccaaagcaatttataaaattaaacatctttcaatgaaattgggaagcattatcaaaagtcttggatatttacatagtgaaacttagtctctgctaaaaagtcttggatatttacatagtgaaacctagtctctactaaaaatacaaaaatta

SEQ ID NO: 895489 - DNA, 643 bp, Homo sapiens
tttcctaacgaagacaccaaaagcaattgaaacaaaagcaaaaattgacaaataggatataattaaactaaagaccttctgcacagcaaaagaaactatcatcaaagtgaacagacaacatataaaatgggagaatatttttgcaatctattcatatgacaaaagtgtaacatccagcatctacaaggaactcaaacattacacacacacacacacacaaattaaaaagtgggcaaagtacaagaacagacacttctcaaaagaagacatcacgtggccaacaaacatatgaaaagaaagctcaacatcgccaattattagagaagtgcaaatcaaaaccacaatgagataccatctcacgccagtcagaatggctattatttaaaagtcaaamaacaacagtttctcacaaggttatggagaaaaaggaaagcttttacactgttggtgggagtgtaaattagttcaactgttgtggaagacactgtggtgaatcctcaaagacctagaggcaaaaataccatttgaccgaacaatcccattactaggtatataccaaaagaaatataaaaaattctatgataaaatcacatgcacatgtatgttcagtgcagcactgttcacaatagcaaaggcatggaac

SEQ ID NO: 895490 - DNA, 596 bp, Homo sapiens
cgcctggaaaactcctagacttgctttaagatctagctcaaatgtctaaaagcagattagtaactcctctattgtcccatagtattttcacacacaaactctatcacagcccttagcatactatattctgacctatttatgtatccatgtgctctttcaataatgaattccatgacaaaagagaccttgataagaagaccaatcaattcataccataaggtcttcaatagaggtatctttaacttgtcttgcctttaattagattatgagtggcctgggggwtagaaaaggacttaatatttctatttccttgcacacatccttttcttgagaatgagtaaaccaagctcccattccagcatggaaggggagtgagtaacaagacagcccattaaacagactggacacacatgatggagagaccataatagtactcatagggacattcatgggttcagtttacttctagggaccctgagcagtggaaatgaggactgcagactaatttcagaccattcaatctggacagctaattagaattttaataggtagggactagtaccttcaacaatatcttaaggataaaatcccagtcc

SEQ ID NO: 895491 - DNA, 596 bp, Homo sapiens
cgcctggaaaactcctagacttgctttaagatctagctcaaatgtctaaaagcagattagtaactcctctattgtcccatagtattttcacacacaaactctatcacagcccttagcatactatattctgacctatttatgtatccatgtgctctttcaataatgaattccatgacaaaagagaccttgataagaagaccaatcaattcataccataaggtcttcaatagaggtatctttaacttgtcttgcctttaattagattatgagtggcctgggggatagaaaaggacttaatatttctatttccttgcacasatccttttcttgagaatgagtaaaccaagctcccattccagcatggaaggggagtgagtaacaagacagcccattaaacagactggacacacatgatggagagaccataatagtactcatagggacattcatgggttcagtttacttctagggaccctgagcagtggaaatgaggactgcagactaatttcagaccattcaatctggacagctaattagaattttaataggtagggactagtaccttcaacaatatcttaaggataaaatcccagtcc

SEQ ID NO: 895492 - DNA, 596 bp, Homo sapiens
cgcctggaaaactcctagacttgctttaagatctagctcaaatgtctaaaagcagattagtaactcctctattgtcccatagtattttcacacacaaactctatcacagcccttagcatactatattctgacctatttatgtatccatgtgctctttcaataatgaattccatgacaaaagagaccttgataagaagaccaatcaattcataccataaggtcttcaatagaggtatctttaacttgtcttgcctttaattagattatgagtggcctgggggatagaaaaggacttaatatttctatttccttgcacacatccttttcttgagawtgagtaaaccaagctcccattccagcatggaaggggagtgagtaacaagacagcccattaaacagactggacacacatgatggagagaccataatagtactcatagggacattcatgggttcagtttacttctagggaccctgagcagtggaaatgaggactgcagactaatttcagaccattcaatctggacagctaattagaattttaataggtagggactagtaccttcaacaatatcttaaggataaaatcccagtcc

SEQ ID NO: 895493 - DNA, 634 bp, Homo sapiens
aattttactctgcaccaaataaagcagtaactctctctttccctctctacctctttcacttcccatctctccttccttttctctccctctgtccctctctccctctgcccctctcctcgtctcttcccctttctcctcctcttccccttactctctcctttccagtcaatcccatcaatccagtcaggctcttagtcctgtgaggaagctctttatcttggcaaaggtgggcctcccagaacctctgaccacctccattcagcagaaccacatctcttacaccactccctgatgctacacagtaaagtcccttttcatcaccaggtctgtcagtcacactaaattggtaaatcatttctcttgtcagatgtttcagcctggccycccctgcccttccagacactgataattgagaacaaatagtgtgttaaccgcttgtttattaataaaacatttgcctcccctaacgcaagcagtaagtaatttgaagtgacatggctgttatgttcacagttatttctcagtaccgctgagaaatgcatatatttatctctgttttgggaagcccaaatttacaccttcagtttttcattaaaggcacacatctcccctttgtagtttgtctgcctttctc

SEQ ID NO: 895494 - DNA, 639 bp, Homo sapiens
tgcaagaatagttgaatagataaataaaacagaatgagtaattcagtgtctaatttatataacaacttcatgtgtgataaaggaggcatcatacattaacaaagaaagaatagagtgtgtattacactgtattgggaaatttgctatttggatgagaaaatcaacatatgctcttttttcaaagcctgtaaaaaatacaatccctgtrgtttaagatccaaatattaaacatatatataagtacatacacaagataacacatttgatcaaatatctgatctttgattggagagatgacttcccattgcctttcagcaaaagtctaacatttttattatagctcaagagattttctggtctcttcctatttctcattctcatccagaatcattttcccactgctgcctgccctgccctggtatgggcagacctctctcatctcccagaatatgctatgctctgtcctgcttgctggcttgcctttgctattactttgtgtcaaaggcctatttcttctctccaactcacccccattctccaatctctaaacccaatttattgagccagcttaatcatcatttcttatatagtagttctctcttatttgcagttttgctttccacactttcaggtacccgc

SEQ ID NO: 895495 - DNA, 537 bp, Homo sapiens
ctgtagaactcaaaaacatgatagattactcaaattataatttcatctctcttttaaaaatatttagaaaatactattaccataatgcttagtatgtattgagtatttactgtgtcaggcatctgggtaatcactttgcaaagtactcttaggtatttagaatgtcaaaatgttaagggcatgaggacccagacacaaatcatgtctggttttacattaagcacacaggcactggaaccagactgcttggatttgtatcccagatctgccccttaaaagcytagagcctttgaacaagttatgtaacctctgtgatacgaattcctcacatatcaattgaaaattataaatgcctctctcatagtattgctgaaagcatttaataaattaatgcataaaaagtgttaagaacatgtaccctaaatcttaaagtatcataaaaaataaaataaaataaaatttaaaaaaagaatattgcctaacacatatgcagtattcaacagttctggctattagagtcattagctatgttatttt

SEQ ID NO: 895496 - DNA, 615 bp, Homo sapiens
gcaccttcggtgcaacaaaatctagaaagtttaactttgctgtttgtcatatgactttacagttaataagcccttccatacacatgctgtgtttccgcatacacagggctttcttacgcattaccttatttgaagtatcaaactgaaagaacaatttaaatgtaaggagaatggctgataacaatttcactttccaggtaggtaaactggaactcagcaacattaaatggtctgcttaaggcaacattgctagtaattagtggaacctttattctagaatattctttcacatgaaatacacttttctcatgactcccaactttagatatgcatatatagagagattatctatctctccatatataaaaatatgtaatacatagaacccaaaaaatgcataccatccagtcttatagtattttatttcattgtttaattctgtctcagttyaggttaaggcctctttcaatgaaaaaataagtagctgacatgtctgtgtttattactcatgtttgtaggcagaggtgaagcttttcagtatggctatttttcatactggagtgaggcaaccagatgattcactgtatcataactttatggaaatgtatgtggggt

SEQ ID NO: 895497 - DNA, 629 bp, Homo sapiens
aagagcagtcattgctaaagttaccagcaagccttggcatttttttcagcttattatgacctaaaaagttcacttatgtgtgcacacgttctctctctctctctcacacacacacacgcgcgtacacgcacatacatacacacacacacacatatacacactagaacatatcatttgaaagtacaaaaagagagtgatgatgtatggtttttgaggaaggcggaacctgawagagcagcgaggaaaaccttctgaagtgcaatgataatgacagtgattatacagtgtaaatgttgctattaggtgagcaacagggagtgttttcttggcaaatgggctttgagcgtaaatgtttccagaaatcatacatcatttcagcaaagaaaattaggatacagatgcagaatggaagtaataagccactcaatcacagatttgaaaaagtggatgtgaaggaagttaatttttaaaaacaataatagcagtatcttatgtttataaatataccaggcagattagtaagcacccaaaataatcatcttgagacctgattctagttctccccccattgtgtgttactttcaataaagcattttacttctttgtacctctgtccacctataaaatgc

SEQ ID NO: 895498 - DNA, 666 bp, Homo sapiens
attatgggaactacaattcaagatgagatttgagtgggaacatagccgaaccatatcattcacacctggcccctctcaaatttcatgtcttcacatttcaaaactaatcatgccttcccaaaagtctcccaaagtcttacctcatttcagcattaactcaaaagtacacagtccaaastttcatctgagacaaggcaagtccctttggcctatgagcctgtaaaataaaaagcaagtgagttgcttcctagatacaataggggtacaggcattgggtaaatacttgttccaaatgggagaaattggcccaaagaaaggggctgaaggccccatgcaagtctgaaagccagcagtgcagtcaaatcttaaagctccagattgatattctttgacttcatgtctcacatctaggtcatgctatgcaagagctgggtccccatggttttgggcagctcagcccctctggctatgcaaggtagcctccctcctggctgctttcctgtgctggcattgagtgtctgtggcttttctgggtgcacggtgcaagctgtgggtggatctaccattctggggtctggaggacagtggcattcttctcacagctccactagacagcaccccagtggggactctgtgtgggggcacccaccccacatttcccttctg

SEQ ID NO: 895499 - DNA, 666 bp, Homo sapiens
attatgggaactacaattcaagatgagatttgagtgggaacatagccgaaccatatcattcacacctggcccctctcaaatttcatgtcttcacatttcaaaactaatcatgccttcccaaaagtctcccaaagtcttacctcatttcagcattaactcaaaagtacacagtccaaagtttcatcygagacaaggcaagtccctttggcctatgagcctgtaaaataaaaagcaagtgagttgcttcctagatacaataggggtacaggcattgggtaaatacttgttccaaatgggagaaattggcccaaagaaaggggctgaaggccccatgcaagtctgaaagccagcagtgcagtcaaatcttaaagctccagattgatattctttgacttcatgtctcacatctaggtcatgctatgcaagagctgggtccccatggttttgggcagctcagcccctctggctatgcaaggtagcctccctcctggctgctttcctgtgctggcattgagtgtctgtggcttttctgggtgcacggtgcaagctgtgggtggatctaccattctggggtctggaggacagtggcattcttctcacagctccactagacagcaccccagtggggactctgtgtgggggcacccaccccacatttcccttctg

SEQ ID NO: 895500 - DNA, 666 bp, Homo sapiens
attatgggaactacaattcaagatgagatttgagtgggaacatagccgaaccatatcattcacacctggcccctctcaaatttcatgtcttcacatttcaaaactaatcatgccttcccaaaagtctcccaaagtcttacctcatttcagcattaactcaaaagtacacagtccaaagtttcatctgagacaaggcaagtccctttggcctatgagcctgtaaaataaaaagcaagtgagttgcttcctagatacaataggggtacaggcattgggtaaatacttgttccaaatgggagaaattggcccaaagaaaggggctgaaggccccatgcaagtctgaaagccagcagtgcagtcaaatcttaaagctccagattgatmttctttgacttcatgtctcacatctaggtcatgctatgcaagagctgggtccccatggttttgggcagctcagcccctctggctatgcaaggtagcctccctcctggctgctttcctgtgctggcattgagtgtctgtggcttttctgggtgcacggtgcaagctgtgggtggatctaccattctggggtctggaggacagtggcattcttctcacagctccactagacagcaccccagtggggactctgtgtgggggcacccaccccacatttcccttctg

SEQ ID NO: 895501 - DNA, 526 bp, Homo sapiens
tcaccttcactccagttcccaacaagttccttatctccatttgagaccacctcagcctggatttcgttgttcatatcatcttgagcattttggtcaaatgcattcaacaagtctctagggagttccaaactttcccacattttcctctcttcttctgagccctccaaactgttccaacctctgcctgttacccagttccaaagtcacttcctcattttcaggtatcttttcagcagcaccccactgtcagtaccaaattactgtattagcttgttttcatgctgctgataaagatgtaccagasactgggcaattgacaaaagaaagaggtttaatggactcacagttccatgtggctggggaggcatcacaatcatggtggaaagtagaaggcatgtctcacatggcggcagacaagagaagacaacttatgcagggaaactccccttcataaaaccatcagatctcatgagacttattcactatcatgagaatagcatgggaaagacttgcccccataattcaa

SEQ ID NO: 895502 - DNA, 383 bp, Homo sapiens
cctctgctaggcactggggatcccaccatgagtaaaatatgggctgtgcttgagactgttaaggtcttgagaggcaggcctgggtataaaggaactgaaagaacacaatgcaataacttaaatagagtatcttgggagcacagagaggaacacakccaacattttctaggaggacagtcagaaaaggcctcagagcacaaccaaattcagcatcttcctgagaaacaaagagttaaccgaggtagattcagagctgaaaataacatttattctaccaaaaaaaaaaaaaaaaaaataggacagtaaatgggtgacaaattgctccatgtttatttctttaaaaatggaaatattataagccaccatgaacagtttttcctgtt

SEQ ID NO: 895503 - DNA, 752 bp, Homo sapiens
ggtttgtttgtttgtttgtttgtttgttttgtttttgaggcagggcctttctctgtcacccaggctggagtgcagtggtgtaatcttggcttactgcaacctctgcctcccaggctcaagcgatcctcctacctcagcctcccaagtagctgggaccacaggtgcatgccacaacacctggctaattttttgtatttttgatagagacagggtttcaccaggttgcccaggctggtcttgaactcttgacctcaagcaatccacctcagcmtcccaaagtgctgggattataggtgtgagccaccatgcctggcaaaaatttagtttttttaaatgacaattatttaatagcaaataattattgaatgttcactcgaagcagggaattatcttgagtgcattacacgcaatcacttagcctttgtaacaaccccataaggtaagtcctgtgatgactcccatcttaagggtaatgaaggaaggtagagaaagagtaaataacttttccaagattattcagctaattagtgatggagtcaggttatgaatgaaaacagcttgcctcctggtctcttgctctgttactctgatacacagccttctagaaataaacagagttataacatgtatctaagggattatacaacctacagcctggcctctcaagttcacagatccctttccaggaagagtccatgacaggtggggagtaattcctccctttttgctcctagactcgtcccttgttctgg

SEQ ID NO: 895504 - DNA, 705 bp, Homo sapiens; identical to SEQ ID NO: 878962

SEQ ID NO: 895505 - DNA, 650 bp, Homo sapiens
ttttcatatgtttgttggccacataaatgtattttttttgagaagtgtctgtatatatcctttgcccactttttgattgggttgtttgtttttattctgataaattttttaaagttccttgtagattctggatattagatctttgtcagatgggtagattgcaaaaattttttaccattctgtatattgcctgttcactctgaagatagtttcttttgctctgcagaagctctttagtttaattagatcccatttgtcaattttggcttttgttgcaattgcttttggtgttttagtcatgaagtttttgcccatgcctgtgtcctgaatgatattgcctatcttttcttctaggatttttatggttttaggttttacattaaagtctttawtccatcttgtgttaatttttgtataaagtgtaaacaagaggtccagtttcagttttctgcatatagctagccagtttttccagcaccatttattaaatagaaaatcctttccccatttcttatttttgtcaggtttgtcaaagatcagatggttgtagatgtgtgatgttatttctgaggcctctgttctgtttcattggtctatatatctgttttggtaccaataccaaggtgttttggttactgtatccttgtagt

SEQ ID NO: 895506 - DNA, 566 bp, Homo sapiens
actggcctcgtagaatgaatttgaaaccattccctcatcctcacttcttaaaataatttgagtaggattagtgttatttcttcatgtaatgtttggtaaaattctgcaatgaagccatagggtcctgggctttgctttgattgaaaatgctttattatagctttgatcttgttacttgttattggtctatttaggttttggattttttggcaggttgtatgtatctagaaatttattcacgtgtcttggtgtgctaatttattggtatatatttgctcatggtagtctctaataatcatttaatttctataatatcaattgtgatacttcctttttcatttctgattttaactatttaacagtctttattttttttctttgtctaaaactttgttaattktgcttatctttaattttgttatttctgctctgatctttatcatctcctttcttctactaattcagggtttggtttgctctggcttttctagtactggtattttgatagggattgcattgaacctgtagattgctttaagtagtgtggacattttaacaatattgat

SEQ ID NO: 895507 - DNA, 570 bp, Homo sapiens
attccatggtgtgtgtgttgggggtatgtgtgtatatatgagaaaatgtgatatatccaatcatctgtccaatggacatttaggttgattctatatctttgctattatgaatagtggtgtgataaacatgtaagtgcagatatcttttcgatataatgatttttttcccctttgggtatatacccagtagtgggattgctgggtcaaattatagttcaattttaagtttttggagaaatcttcatagtgtttttcatgaagttgtactaatttacattactacccacagtatataatccttcccttttcycttcaacctcaccaactcttattttctgacttttaagataatagttcttctgacttatgtgagacagtttatctttgtagtcttaatttgcatttcttcaataattagtgatgttgagtattttttcatgttggccacttttatgtctgaagtggtggacagtgcctactttttactggggttatttgtttttttgcttgttgagttccttgtagaatctagttattagaccttttatggatatataatttgcaaatatt

SEQ ID NO: 895508 - DNA, 664 bp, Homo sapiens
atttcttaatgtatcagtggggtaccatggtaggaaggatctctggaattgtcacctgccatgccttaactgtcatcttagccatattgaaaccaaaggcaataatgcatccctgggggaatttcagagaatattcttccaccagcagtgtcaawactgcatgggtagtgagattctggcaactattgtcattgtttcagttatttattttatttcattttgcttctttttattacttctcttttgctccttttttgtttttaataatttcaacttttattttagatatgggggtacatgtgcaaatttgttacatgggtatattgaatgatgctgaggtttggggtacagatcacatcacccaggtaatgagtacagtatctaacaggtagtttagaacccatgtccacctctttccttcagccctctagtagtccatagtgcattgccccagtgaaacttacaatatctattgttcccttctggggcttgtgagaaagtcaaataactcttggaaaatgactaggtaattttaaattcattcaatcaattatactagtcacagctactattccatactgatatcaacaaaatactgttatgtagctattgatctaagaaatgatttatactctgtgcaatcagtaaagacatcagaaacagt

SEQ ID NO: 895509 - DNA, 616 bp, Homo sapiens
tccccttttacttggctctcactcctctctcatctatggccatgtaagatgtggctttcaccttctgccatgattgtgaggcctccccagccacttggaactgtgaatccattaaatctcgttttctttataaattacccagtctcaagtatgtctttatcagcagtgtgagaatagactaatacaggctgatagacccatcctttcaaccttaaatctcttaagacgcatctcttgattaacatgattagcagatccccctttccccaaatgccaagaaatttacagaaaattctcagtagagctcccttaaaacacctctaacctagattgaggtgacaggaaagcccattctgcaaaggaaaggtaaatttacaacacttttaaaaaatagtctgtctcaaattcctcaaactyaactcatttatactcatttatattatactttagaataagggtctaaaagcaaaatttaagacacttaaagaatctcataaatcttccatttgcaacttgagaggacatgtcacaaattagtttcttcatggcattttgcatcttcaatcaaatctgagtcccatattaacctcccaatacatattacaaataaaagggc

SEQ ID NO: 895510 - DNA, 558 bp, Homo sapiens
tgaattttgagctatgaggctgaataaagaggttgtcggaagtttctagaattgggcaaatttggctttcccatacagtaaccactagccacatgtaacttgtcagcacttaagaatgtggctactctaggccgggcgtgctggctcacacctgtaatcccagcacttttggaggctgaggtgggtggatcaccttgggcgtggtggtacgcatctgtaatcccagttacttgggtggctgaggcaggagaattgcttgaacctgggaggcagaggctgcagtgagctgagattgcaccactgtactccaacctaggtgacagagttagacttcctttccaaaaaaaaaaaaaaagtggctactttaaactgagatgtrctataaactagatttttcaaaatttagtacaaagataaaatcatatgaaatgttttaataacttataataaatgctgatatggttgtatttttcatttaatggaatagataaaatacattaaaatttatatttcttaactttttaaaatgtgttataagaaaattccaaattttatata

SEQ ID NO: 895511 - DNA, 550 bp, Homo sapiens
tatttattggttaggcatctgttcaagtcttttgcccatttttcaattggattgttcatttttttgagttttaagtgttattcatatatttttgataacagtttatcaaatttgtcttttgcaattattttctcccagtctgtggtttgtcttcttctcttgatggtatctttcacagataaactaattttaaatatcatttggaagggttacttttttcagctttccaagtatttagtaatctctttgaatattataaattgcaaaaagttttttgaaaatcaattgttggatacttttgtaatatctcctaggycaatgggagaaattttgcttaagaatggtatgaactgagataagtcatggaaaaaaaatggaaagtcttctacttgctgtttctaccacattttccctctttcatttgaagctctctatatgtctaagcctctacatgttggctttcccatgggggtacttaggccaattttcaagaaaccttccaacagcctagctccctgagttaagaggtatattgcattgacttccccta

SEQ ID NO: 895512 - DNA, 611 bp, Homo sapiens
taataggaagccagaaaatccttccaaacatcagttgacatacgggtcttcagtatggttcaaaaaagaaaattaaatctgctaatatcctgaaatacttattattttgattatcacccttgcgatttaagtgacatactactcaattatattaataccctaccctaaactgatgaaactattttcttttagagttgttcattaataaattcagaatactgctcttctgaaatgctgtttcatctgctatttacaggattctttaatacactaaagagagttacaaacttaatagaaataaaatgagctttcagggcagatttgaagatagttaaggccactgatttaagaagacagttgagtattaaaatggtcttgaggacataagaaatgggggcctttgtatrcacatgtcaagaaggcaagcacccaaaagataaatgataatatggaggaaaatacagatcaatacaattggaattttaaaaaaatcaagaaggcaatttaaaaatggatctcagggtaaacaggaatcaagtgatttatataaaccaagataatgtgtatttgttcttagttacggtgaaaaggcaagtaagtaacactatagg

SEQ ID NO: 895513 - DNA, 645 bp, Homo sapiens
ttggagaaggggacttcttccccttgaccaccactgcagaaaaagctggggcttcttccatgggagcttcgcataggtgcacctgtagacagcctttctggaacacttcagggtgactacattcccacagaaggagtgccctcaaagttctggcttgcatgaagggtagagtcacaatccctctataatgaaataatagcattcctccagatgaaaaaaggtttctgtctgatctaaatagctagaacactaagtcaggagtgtgactgggaggcaaattgctttcctgctgatctggcggggtgagctgaggtggctccctctcttccactgatattcctccagctgcctctgtcaagrctgggacatctacccaccaatggctattacatttaccaacctgctttagctacagctggcttttacccgtggacactcctactggactgaagtctaaactgttaaacctagtgaataaaatactgaaggaaaaataaagaaaaaagtgcacatcattggaaaaagagataacctcaatgagacctttgccattccaaccccacaggacacacagttgaaactgcatacacaccaagcacattgcaactataaacagcatctaagaaagccattataaggagactc

SEQ ID NO: 895514 - DNA, 645 bp, Homo sapiens
atgcaccagagtagaaccacttggaagtataaaactcaccagttctataaaacagtaacatagtgagttaaacaaaatagttagcaatcaacataatgactgaaacagtacctcacgtctcaatattaattttaaatgtaattggtctaaatgctccacctataagacacagattgacagaatgaatttttttaaatcacaaatcaaatatctgcatcttcaagagacacacctaacatataagggtcyttatagactcaaagttaagaagtagaaaataatgaaaaccaaaacaagcagaagtagctattcttctatcagataaaacagactttaaagcaacaacagtaaagacaaataaggtcattataaaatgataaaatgatcaatccagcaagaagacattacaatcctaaatatatatgcaaggaactctggattcgttaaacaattactactagacctaagaaaagagatagacagcaaaaccataatagtggaggacttcaaaactccacttactgcactagacagattaagacaaagtcaacaaagagaaaatgaaattatactctaaaagaaatggacctaacaaatatttacagaacattcttagagaactgcagaatacacattcttctcatc

SEQ ID NO: 895515 - DNA, 494 bp, Homo sapiens
actattctaagtgaagtaacacaggattggaaaagcaaataccatctgttctcacttataattgggagctaagttatgggtatgcaaaggcatacagaatggtataacaaacattgtagactctgaaaagggtgggtgggaggtgggtgagatataaaaaattacatatcgggtacaatgtatactactctggagatgagtgcactaaaatctcagatttcccttctatacaattcatccaggtaaccaacaatcacttgtacwcctaaagctttcaaaattgaaaaaagaactgataattaattattctatttaattctctatataaagacaacctaaaataaaatggaattacataaatcctattatagaattaacataaaaaatccatatcttacagatttcatagacagaatctcaaatctgttttgctttttaaaaatctaaccaaggaagtatgagattaaattaatacattcaaaatcgaattctgg

SEQ ID NO: 895516 - DNA, 545 bp, Homo sapiens
ttctttcttttaattttttccttataccaatctctatttctggtatcaaccagacagcagctagtttattttctcaagactcctgtggttttcttccatatcatcaccatggattaattttagtaaagtggttttaaatctagtatctgttatttcttcargctttatgtgctagcaggatcatattgactataaagaatgggcattgccttttagggataagccttgaatctttattactgcaaatggatgccttgatacagaatgtaaaacttatggggttatctcaaaagaaatacaacagtctccttaaattgtagtttatttgttcaaatctctactaaacaaaagtattcttttgaggattttgatcattgcatgtcactcgagacattatttgttatttgtatgtaattttggcaatacatttatttacaaataaaaacatggacttatatctgtttcattcttttttttcaactattcactcagaggttaatgaaatcctctgaaaatatttacttaagtacatgcttagttgatag

SEQ ID NO: 895517 - DNA, 518 bp, Homo sapiens
caaaaattcttttctttaagaatgttcaatattggtccccactttcttctggcttgtagagtttctgctgagaggtcagctgttagtctgatgggcttccctttgtgggtaacctgacctttctctctggctgcccttaacatttcttccttcacttcaactttggtgaatctgataattatgtgtcttgaagttgctcttcttgactatctttgtggcattctctgtatttcctgaatgtgaatgttggcttgccttgctagattggggaagttctcctggataatatmctgcagagtgttttccaacttggttccattctccttattactttcaggtacaccaatcagaagtagatttggtcttttcacatagtctcatatttcttggaggctgtgttcatttctttttattcttttttctctaaacttctcttcttgcttcatttcattcatttcatcttccatcactgataccctttcttccagttgatcgcattggctactgaggcttgtgca

SEQ ID NO: 895518 - DNA, 626 bp, Homo sapiens
gaaactttaaagacctaattgagataccacaatgggatctgttttcgatgaaatcatatctgtcatccacttattctgactattcagtctttttcttccataattttgaaacttatgtccctgctacaatggaccaccgtattagttcattctcacacagctataaaaaactacctgagaatgggtattaagaaaagaggttgaattgactcacagttccacaggctatatgggaagcatggttggaaggactcaggaaacttacagtcatggcagaagggtgaaggggaagcaagcaccttctccacgtgtcggagtaggaggaagacagaccrcgaagggggaggtgctacatactttttaacaaccagatctcatgagaacttactcactatcatgagaccagcaagggggaaatttgccccatgatccaatcacctcccatcaggtccctcccccaacactggggattaaagttcaacatgagatttgggtgggcacacagtgccaaaccacattaaccactaacaacagtaatcatagctaccgctcattaagttctttttgccaagtgctattctaagtactttttacttatctaagcctcataagaaccccataagata

SEQ ID NO: 895519 - DNA, 647 bp, Homo sapiens
aaaacagagaagaaacaaaacaactttacccgaattaatgagatacccacaagaaacaaaacattagtagtaaacccaagtgcttataaaatttaaagcatgttacacatttccaatgccttaaaaaacttagttataataaacctctcaaatagaacaaagtttagccatgctgtctagtgatggatgcagattctgggacaaagtaacttctatgaattygatgaatgtggtaatggcatgatggatacttggaaggcttgcttcttccaagtctgtaaattgaagtcaatgactctaacttttaaaatcgtaaccactttttgactaggttatgttaatggtttcccacattgtgtagcgtactgaaaagtctcaagctgtacaaaggatttgaggaagattttaggccccacagctctatttccactgggttgattttgctaccctgtttaactttattaagttaatagacatagtcttgtctagaaagagaatataccctaccttactgttaaaaaaggaaatcttactcttccccatccttaatatagccacctattagagtactggagtttccatccatagatttggtattttttaaattaaacttataaacctgggtttctaggctcaatatttgatat

SEQ ID NO: 895520 - DNA, 647 bp, Homo sapiens
aaaacagagaagaaacaaaacaactttacccgaattaatgagatacccacaagaaacaaaacattagtagtaaacccaagtgcttataaaatttaaagcatgttacacatttccaatgccttaaaaaacttagttataataaacctctcaaatagaacaaagtttagccatgctgtctagtgatggatgcagattctgggacaaagtaacttctatgaattcgatgaatgtggtaatggcatgatggatacttggaaggcttgcttcttccaagtctgtaaattgaagtcaatgactctaacttttaaaatcgtaaccactttttgactrggttatgttaatggtttcccacattgtgtagcgtactgaaaagtctcaagctgtacaaaggatttgaggaagattttaggccccacagctctatttccactgggttgattttgctaccctgtttaactttattaagttaatagacatagtcttgtctagaaagagaatataccctaccttactgttaaaaaaggaaatcttactcttccccatccttaatatagccacctattagagtactggagtttccatccatagatttggtattttttaaattaaacttataaacctgggtttctaggctcaatatttgatat

SEQ ID NO: 895521 - DNA, 642 bp, Homo sapiens
cagaactgcagacatcaaaaataatatttaggaacaatttcctgttgaggttttgaatctatggaggttaaaaaaaaacttgtcaaaatcactgacatagattaccaataattttcaggagatgaagtaaaaggagttctgaggcttgctaagctatgartcttatgttcaagattctttctagaatatatattactaaaaaatattttcttaaattatttttattgtatacaacagttagtattattggtagtattaagccaaacactcaatagtctacttcaatattatgtataacagacaaatagataaataatataatatacagcccaaagtccttttaaagtgtgataacatataaattaacaataaaaccaatcactactttccttgcttgtgaagagatttccagttgcaaatagctaacaacaaagtaaagctgatagataatatagaatggaaaatcagcaaataaagcatactgcaattattgacagtggaacaaatgtggtgaaggctatgaatgatttaggaatcacaagtacacaatgttttgttcacaaccttccattgtatcttcagaaataataaaaaattttgatagctgggatttattgacaacagcagaaaaactgtcaatca

SEQ ID NO: 895522 - DNA, 662 bp, Homo sapiens
atcaatagctgatggatcatgtggaagaaaagatatcagagattgaaaatcaactcaatgaaataaagcaagaagacaacgttagagaaaaaagagtgaaaagaaatgaacaaagcctccgagaaatatgggactacatgtaaagaccaaatctacttttcattggtgtacctgaaagtgatggggagaatggaccaagttggaaaacactcttcaggatattatccaggaggacttccccaacctagcaagacaggccaacattcaaattcagaaaatacggagaccaccacaaagatactccttgagaagagcaacccaaagacacataataatcagattcaccaggggtgaaatgaaagaaaaaatgttaagggcagccagagagaaaggtcaggttacccacaaagggaagcccatcagastaacagcagatctcttggcagaaaccctacaagccagaagacagtgggggccaatattccacattcttaaagaattttcaacccagaatttcatatccagccaaactgagcttcataagtgaaggagaaataaaatcctttacagacaagcaaatgctgagagattttatcaccaccaggcctgccttataagagctcctaagggaagcactaaacatggaaaggaacaactggaac

SEQ ID NO: 895523 - DNA, 688 bp, Homo sapiens
agaactagaaataccatttgacccagtgatcccattactgggtatatactcaaaggattataaatcatgctactataaagacacatgcacaagtatgtttattgtggcactattcacaatagcaaagacttggaaccaacccaaatgtccatcaatgatagactggattaagaaattgtggcacatatacaccctgggatactatgcagccataaaaaaggatgagttcatgtcctttgcagggacatggatgaagctggraatcatcattctgagccaactatctcaaggacagaaaaccagacactgcatgttctcactcataggtgggaactgaacgatgagaacacttggacacagggtggggaacatcactccccggagcctgtcatggggtggggggatgggggaaggatggcattgggagaaatacctaatgtaaatgacgagttaacgtgtgcagcaaaccaacatggcacatgtatacctatgtaggaaacctgcacgttgtgcacatgttccctagaacttaaagtacaataataaaaaaaaaaaagaaacttctgattctagtgtgctttagtatctaggggatactagaatctaaactatgtttagattagactgtaaactaatctaatttcatagtttagataggaatgataacataatattttaagtacctgga

SEQ ID NO: 895524 - DNA, 652 bp, Homo sapiens
gggagggcagtgttctcagacatgtaagtattaaagttcttttctttctatatttgttatcttctgctcctttagctgactagatggagctcaagtggttgggcttctcaagtgtcactgagttaatatgagtaatgttcccatctgcattcatttctgattcctgacktcttgactgtttctttcctctttctcttcctgccaacatgatataagaagatagacatttatttctaaaccaaagtaccgagaaatgacccatgaaactgtcttaggagaggtcacgtttcaaaaaagtagtctagaatcctgcctgtctcatttttgtctgtcctgatttccttgcagcctgggcatgcgctaatttgttctgcattatcctgtgacaactcggttgcaaggacagaaagttaattctctattagtcaggtctccagagctacgtagtcaggtaaaaagtccaatgggtcttcagataggatatttaaggcccaaattgtatcacttgcactcacccactgcccagacccacagccagcaccagctttcttgagtggcctgggagggacagtaccaagatgacgctgactgtgatcagacagtttagcactggacctcttctgggctacttggccaaattaaggccattatc

SEQ ID NO: 895525 - DNA, 614 bp, Homo sapiens
tttgcttgtctgtgaaggatgttatttctccttcacttatgaagcttagtttggctggatatgaaattctgggttgaaatttattttctttaagaatgttgaatgttggcccccactttcttctggcttgtagagtttctggagagagatctgctgttagtctgatgggcttccctttgtgggtwacctgacctttctctctggctgcccttaacattttttcctttgtttcagccttggtgaatctgatgattatgtgtctttgggttgctcttcttgaggagtatctttgtggtgttctctgtatttcctgaatttgaatgttggcctgtctttctaggttggggaagttctcctggataatatcctgaagtgtgttttctaacttggttccattctccccatcacttttaggtacaccaatcaaacgtaggtttggtccttttgcatagacccatatttcttggaggatttcttcactcctttttattcttttcctctaatcttgtgtttgtgctttatttcattaagttgatcttcggtctctgatatcctttcttccacttgatcgattgggctattgctaacttgtgtatgcttcactaagttctcat

SEQ ID NO: 895526 - DNA, 614 bp, Homo sapiens
tttgcttgtctgtgaaggatgttatttctccttcacttatgaagcttagtttggctggatatgaaattctgggttgaaatttattttctttaagaatgttgaatgttggcccccactttcttctggcttgtagagtttctggagagagatctgctgttagtctgatgggcttccctttgtgggtaacctgacstttctctctggctgcccttaacattttttcctttgtttcagccttggtgaatctgatgattatgtgtctttgggttgctcttcttgaggagtatctttgtggtgttctctgtatttcctgaatttgaatgttggcctgtctttctaggttggggaagttctcctggataatatcctgaagtgtgttttctaacttggttccattctccccatcacttttaggtacaccaatcaaacgtaggtttggtccttttgcatagacccatatttcttggaggatttcttcactcctttttattcttttcctctaatcttgtgtttgtgctttatttcattaagttgatcttcggtctctgatatcctttcttccacttgatcgattgggctattgctaacttgtgtatgcttcactaagttctcat

SEQ ID NO: 895527 - DNA, 613 bp, Homo sapiens
aaatcttcggcaaagaaaagccaggcttctgtgacttcggaagtgaattctaccaaatatttaaaaacaaaacatgtcaatacttcacaaactcttccaaaatatagaaaaagtcaaacaatttctcaacttatttcatgagtytagggtcatccaatattaaagcccaaaaacataaggaataaaaatacagattactatatctcataaacatagatgcaaaactctttaataaaacattagtaagctgaatccaacaatatttaaagcagatcatacacccatgctaagtgggacttattgcaaaaatgatagcttgacttagtatctaaaaatcaattaatgaaatatagtatataataaattttttaaagccacatgatcatctcaaaagacaaagaaaaacatttttaaaaatttagcacacattcatgatttaaaatgaacaataaaaatttctcaaccaagaggattaggttcaatcctacaaaaggtaccttagaaaaatccacaagtaacatcatacaacaatgatgaaagactaaatgttttcccccatgatcaagaaagaggcatgaatgtctaattttgacacttcttttcaacactgtat

SEQ ID NO: 895528 - DNA, 623 bp, Homo sapiens
ttttcaaaagctggaatccacttcctactgcaacctcacaccaagcccttggaatgcctcaccagtaccaccgtttcctcccttgacccctcccttaaccacagataattcattctgagctacactccaggcaggaagggtgtctgatcattttccatgtcctccatctcaattccatcatctaagggaattatgtgcctagatttgctataaactagatggatacttgggttagcttttggaatgccaccagtactccctcaagagattcactttttcaattcaagattgataatgcttataaatctcaagttcataagttagtayatcccctgctgcccctcctttctctttctttgggtctagattgactgtattctatatttagaatatggaatacactctattctaccagctaccagtatagtcaagaagatgctgacattcctttaactcattgagagctaactctgcctccatccatctgcctctccctaacatgggaatttgctctgggctcttcagaagaaggatttcacattaaagtgtattcacaatgatttggctattttcactgaataggactacgaatcagaatccactgtgcccatccagtagtaagc

SEQ ID NO: 895529 - DNA, 643 bp, Homo sapiens
gtcttgttttaatcctcttcaaaaggtggcttataaaaaaagatggcttataatcaatataggaccttaacaggtgctcttaaatgcaagtttctgataactttggagattgtgacactagaatggaggaacaaactttcaggactcatggagagctgaaatgttcatgaacatcaagcagaataggagttaactgcatggactaaactaatagtaaactaatagaagtctgaagtaatcttttttaactttttgtttaaaacattgctaatcctttgctttgtttttcagagttaagaaaactcttctgttgagctatttacagcttgaagcaattgagtaaagtacactcctgtaaacagaatttggaacayatttgtttccctctacctgattgcttcagaatttggaagttactcgtgttcttaacttatggcaatatagttatttacataagtgtaataagaatctattttcttttgtaacaggacacaattggagaaactggttattttaccatgtctctgactgaaatggtgtgctttctttaaggaatcaaacttatagagccaataaaagccccttgggaaactggcctcataccttctctacacagtccctgtacagggttcctgacctgtgg

SEQ ID NO: 895530 - DNA, 643 bp, Homo sapiens
gtcttgttttaatcctcttcaaaaggtggcttataaaaaaagatggcttataatcaatataggaccttaacaggtgctcttaaatgcaagtttctgataactttggagattgtgacactagaatggaggaacaaactttcaggactcatggagagctgaaatgttcatgaacatcaagcagaataggagttaactgcatggactaaactaatagtaaactaatagaagtctgaagtaatcttttttaactttttgtttaaaacattgctaatcctttgctttgtttttcagagttaagaaaactcttctgttgagctatttacagcttgaagcaattgagtaaagtacactcctgtaaacagaatttggaacacatttgtttccctctacctgattgcttcagaatttggaagttactcgtgttcttaacttatggcaatatagttatttrcataagtgtaataagaatctattttcttttgtaacaggacacaattggagaaactggttattttaccatgtctctgactgaaatggtgtgctttctttaaggaatcaaacttatagagccaataaaagccccttgggaaactggcctcataccttctctacacagtccctgtacagggttcctgacctgtgg

SEQ ID NO: 895531 - DNA, 561 bp, Homo sapiens
gaaagggacgatgttaggaaaagaggaagaaatttttaaaaggtgtgggtaaatcagagacaaatggttgcattattttgagtctttgatcagcctttcactgaatacacaattatatgtgagagagggtagaagaataaccatttatgccttggtctrgctcagtaaatctgcatttttacctgagaggaagcaatcagatatgcatttgtctcaggtgagcagaaggatgacttagagttctgtcttttgtcccgcacctgtgaagacaagctattgatttacactgtcggaggtaaaattcaacagaaccattttagggtaaagatcttgaggcccacaaggaatttcctctcctagtggacaaattgtgagggacgtatgtagcctttttaatctttgtagttatcttatttaggaataaaatgggagacaatttgactgatgcagttcccagtttgaattttccctttggcttagtgatttgggggtcctgagatttattttcctttcatagtgatttccaatgataaatatgggctcctgacccagtctagggta

SEQ ID NO: 895532 - DNA, 683 bp, Homo sapiens
tatgtagagaactagtatcctttttatgaaaacatcaatataatcccaaagtattgaaatatacttaagataatggcctctagttccatccatgttgctgcaaatgagatgatttcattctttcttgtgcctgtgtagtatttcatggtgcatatgtgctgcattttcttgatctaatccaccattgatgggcacctargttgattccatatctttgctgttatgaatagtgctgcaatgaacatacaactgcatgtgtctttttggtagaatagtttctttattattgttattttgtaattgtactttaagttctgggatacatgtgcaaaacatgcaggtttgttacataagtatacatgtgccatggtggtttgctgcacccatcaacccatcatctacattaggtatttctcctcatgctatccctcccctagccccccacaccgcaacaggccccaatgtgtgatgttcccctttctctgtccgtgtcttctcattgttcaactcccacttatgagcgagaacatgcagtgtttggttttctgttcctgtgttagtttgctgagaatgacggtttccaccttcatccatgtccctgcaaaggacatgaactcatccttttttatggctgcatagtattccatggtgtatatgtgccacattttctttatccagtctgt

SEQ ID NO: 895533 - DNA, 683 bp, Homo sapiens
tatgtagagaactagtatcctttttatgaaaacatcaatataatcccaaagtattgaaatatacttaagataatggcctctagttccatccatgttgctgcaaatgagatgatttcattctttcttgtgcctgtgtagtatttcatggtgcatatgtgctgcattttcttgatctaatccaccattgatgggcacctaggttgattmcatatctttgctgttatgaatagtgctgcaatgaacatacaactgcatgtgtctttttggtagaatagtttctttattattgttattttgtaattgtactttaagttctgggatacatgtgcaaaacatgcaggtttgttacataagtatacatgtgccatggtggtttgctgcacccatcaacccatcatctacattaggtatttctcctcatgctatccctcccctagccccccacaccgcaacaggccccaatgtgtgatgttcccctttctctgtccgtgtcttctcattgttcaactcccacttatgagcgagaacatgcagtgtttggttttctgttcctgtgttagtttgctgagaatgacggtttccaccttcatccatgtccctgcaaaggacatgaactcatccttttttatggctgcatagtattccatggtgtatatgtgccacattttctttatccagtctgt

SEQ ID NO: 895534 - DNA, 670 bp, Homo sapiens
aaacttttacaggcacagtaatgtagactacttgtagtttagattacttatatttagatctcaaatttcagcagtacaatcctagcttgcagtctatacacaatatattttacttcatcagggaaccatggtggaatcacagaactttagcaaaatctggcttcagggctcagagtgcaagctttcagcagggttcttcaaaaagatacatgtgcttagtgggtgaggagcgcacaactttctcagctgtcagattatatcatactctccctgtctgatcaggcagtaatgaacaatggcaccaaggagtctggtttctgctttttatcaggaaacagcttttcctgctttggcatcaaaaccatatcaacaaaagcccaaaccagaacacacagctcagtggaagatggatacgcccatgttttcaaggtaataccagcattttacctggctgaaccacctctggcacaattcacatattaaatataagcctttcactatggaagacgttcactstatagtagcatggaaatctatcctccaaggattgcatgccatttgtttcagacaatattcttttgtggtacttaatacacaaggtaaaagtgagggaagacacacaggaaagaggacatgaacaaatttagtaagtttaaaatattagcaaagc

SEQ ID NO: 895535 - DNA, 609 bp, Homo sapiens
aatgccaaatatttaattctggcccttagagaatccaaatagaaacacttaagtaaccttacatgtactcaaataaaaagtgcaattaatacagctctgagaaggatgggttcctgatgtataaaacattgactttacaaggttgtgaggattaaatacaataatgtatatggaaggcctctgcaatcttgaaagcagagaacagcacaggtaacatggatgaattcagctatccaggtgaggacagggagtgccgatgagtacctgatccttttaaagaacccaaagctactcagttctaacacacctttgcgtgagactcagaaagaaggttcttggtgtgggtaacatttctgaattccaaaaaaaagtcttcctatttttaaatagtgacaatttttaaaatcactatgtgggtcaaacaaaactttgggaatcatgcagaaggatttggccatgarggtgacagtttgcaacctctgcctggttaagggcttcagggatgttggcattgtcaagagagctgagtggaacctcgcagagcaaactaccaaaagaaagggaatttggaatcagactgggtgtcctcccaagatgctctaattttag

SEQ ID NO: 895536 - DNA, 658 bp, Homo sapiens
aaggaagataatggccttaatttggccaagtagcccagaagaggtccagtgctaaactgtctgatcacagtcagcgtcatcttggtactgtccctcccaggccactcaagaaagctggtgctggctgtgggtctgggcagtgggtgagtgcaagtgatacaatttgggccttaaatatcctatctgaagacccattggactttttacctgactacgtagctctggagacctgactcatagagaattaactttctgtccttgcaaccgagttgtcacaggataatgcagaacaaattagcgcatgcccaggctgcaaggaaatcaggacagacaaaaatgagacaggcaggattctagactacttttttgaaacgtgacctctcctaagacagtttcatgggtcatttctcggtactttggtttagaaataaatgtctatcttcttatatcatgttggcaggaagagaaagaggaaagaaacagtcaagamgtcaggaatcagaaatgaatgcagatgggaacattactcatattaactcagtgacacttgagaagcccaaccacttgagctccatctagtcagctaaaggagcagaagataacaaatatagaaagaaaagaactttaatacttacatgtctgagaacactgccctccc

SEQ ID NO: 895537 - DNA, 606 bp, Homo sapiens
gaagtccacagtcctggcagtggaggtgctgaatcctaaaggacaggcctctctattggagagaaatggagccaaaggtgactccaagggcctttgaactgatcaagtggaagaacagagttggcatttgctaagatgattcgtgattaaaaatcactttccaagmcctgctagttctatctcttagggatttctagactctttttctttcatccctaagacaatttccctaatttatccacccattgtttctcaccaggattagtgcagcagatctctaactgattccccgtctgctaattgttccctaatgcggcctcatcacagagtgagctatgtcaaataaaaatctggcgaaattactcccagactaaaatcaccatccaccaccatcatccactctgcctacagggaaagttcaagatccttcacatggctcataagacctcccttatctggcgtctacctatctgttcactcttgtctatcaatacaaccttcttaggaatttgcgcttaaacaacttgaggtcaaccaccctaccccaacacaaacacacatatagctgcctgggccatgtctcatctctgtcgttgcttctctgtg

SEQ ID NO: 895538 - DNA, 718 bp, Homo sapiens
ctagtcattgaaactgtcaatagccacaagtggtgagtgattaccgcatttagacagcccagatgtggagcatagaaggttctattggatagtgctgctatggactattgacttggtcattagatatgataatgtattgaggttctactgtagttaaatactttgccatattaacatgcattaactcatttactcttactaacaactgtgaaaggaaaataaatctcaggaccccgaaatcactaagccaaagggaaaagtcaagctgggaactgcttagggcaaacctgccttccattacatttttggaaagggtaactactaagataaggaagctacatacctccctcacaatttgwccataaggaaattccttgtggacaaaggacagacaggactcaaagtcatccctctgctcacatgagacaaatgcctatctgattgcttcctttgccctatcgtttcactaagccagattaaggcataagtgactattcctgtaaattgtgtattcagtgaaaggctaatcagaaactgaaaagaatgcaacgatttgtgttttatctagctatgacctggaagccccctcccaacttcgagctgtcccacctttctggaccgaaccaatgtacatctgacatatattgattgatgtctcatgtctccctaaaatgtagaaaacagagctgtgcctcaaccaccttgggcacatgttgtc

SEQ ID NO: 895539 - DNA, 681 bp, Homo sapiens
tctgtgattaaaggaagagagagaagaaaacttttattctaaaatatttattgacgtttatgaagtagcaccaagcacagaattaaatgcttttatatgtttgagcttttctaattctatttcttccaaggccagtcctattgggtaggacccccatttaatagatgaagacattgaagtttaaaaaggttgggtgacttstctgaagccccatagccatgaagtgactggggctgggattcatgtcattatggtctgatttcaagcccatttctattagtccattttcatacaactgtgaagaaataccccagactgggtaatttataaagaagtttaatgcactcacagttccacataggtagggaggcctcacaatcatggcggaagatgaaggaggaacaaaggcatgttttacacagctacaggcaagagagggtgtgcagggaaactgccctttattaaaccatcagatcccatgagacttattcactatcagaagaaccacatgggaaaaacctgcccctcgtgattcaattacctcccaccaggtccctcccacaacacatgaggattataggagctacaattcaagatgagatttgggtggggacacagccaagccatgtcaccatgccttccagaatgacactgttcctcctcaggtgaggaacgtgctgt

SEQ ID NO: 895540 - DNA, 646 bp, Homo sapiens
ctgaatgtgctggtgcaacacctggggtcttgtcgcctgaagtttccagggcaggaggcctgggaggagcctgaggttctgatcccagcacaggctcccaggtgaagcatttcactagcatccctgtgaagagaccaccaaacaggctttgtgtgagcaacaaggctgtttatttcacctgggtgcaggcaggctgagtctgaaaagagagtcagcaaagggagataggggtggggccrttttataagatttgggtaggttaaggaaaattacagtcaaagaggggttgttctctggcaggcaggagtgggggtcacaaggtgctcagtaggggagcttttgagccaggagaaggaatttcacaagataatgtcatcagttaaaacaggaacaggccattttcatttcttttgtggtggaatgtcatcagttaaggcaggaactggccatctggatatgtacgtgcaggtcacaggggatatgatggcttagcttgggctcagaggcctgacattcctgtcttcttatattaataagaaaaataaaatgaaatactagtaaagtgttgggacggcaaaaattttggggatggtatggagagataatgggcggtgtttctcagggctgcttcgagcgggattagggg

SEQ ID NO: 895541 - DNA, 640 bp, Homo sapiens
cctggtgatgacaaaatgcctcagcatttgcttgtctgtgaaggatgttatttctccttcacttatgaagcttagtttggctggatatgaaattctgggttgaaatttattttctttaagaatgttgaatgttggcccccactttcttctggcttgtagagtttctggagagagatctgctgttagtctgatgggcttccctttgtgggtwacctgacctttctctctggctgcccttaacattttttcctttgtttcagccttggtgaatctgatgattatgtgtctttgggttgctcttcttgaggagtatctttgtggtgttctctgtatttcctgaatttgaatgttggcctgtctttctaggttggggaagttctcctggataatatcctgaagtgtgttttctaacttggttccattctccccatcacttttaggtacaccaatcaaacgtaggtttggtccttttgcatagacccatatttcttggaggatttcttcactcctttttattcttttcctctaatcttgtgtttgtgctttatttcattaagttgatcttcggtctctgatatcctttcttccacttgatcgattgggctattgctaacttgtgtatgcttcactaagttctcat

SEQ ID NO: 895542 - DNA, 583 bp, Homo sapiens
attttctttaagaatgttgaatgttggcccccactttcttctggcttgtagagtttctggagagagatctgctgttagtctgatgggcttccctttgtgggtaacctgacstttctctctggctgcccttaacattttttcctttgtttcagccttggtgaatctgatgattatgtgtctttgggttgctcttcttgaggagtatctttgtggtgttctctgtatttcctgaatttgaatgttggcctgtctttctaggttggggaagttctcctggataatatcctgaagtgtgttttctaacttggttccattctccccatcacttttaggtacaccaatcaaacgtaggtttggtccttttgcatagacccatatttcttggaggatttcttcactcctttttattcttttcctctaatcttgtgtttgtgctttatttcattaagttgatcttcggtctctgatatcctttcttccacttgatcgattgggctattgctaacttgtgtatgcttcactaagttctcatgctgtgtttttcagctccatcatgtcattcttctctaaactggttattcta

SEQ ID NO: 895543 - DNA, 750 bp, Homo sapiens
cagaacaagggacgagtctaggagcaaaaagggaggaattactccccacctgtcatggactcttcctggaaagggatctgtgaacttgagaggccaggctgtaggttgtataatcccttagatacatgttataactctgtttatttctagaaggctgtgtatcagagtaacagagcaagagaccaggaggcaagctgttttcattcataacctgactccatcactaattagctgaataatcttggaaaagttatttactctttctctaccttccttcattacccttaagatgggagtcatcacaggacttaccttatggggttgttacaaaggctaagtgattgcgtgtaatgcactcaagataattccctgcttcgagtgaacattcaataattatttgctattaaataattgtcatttaaaaaaactaaatttttgccaggcatggtggctcacacctataatcccagcactttgggakgctgaggtggattgcttgaggtcaagagttcaagaccagcctgggcaacctggtgaaaccctgtctctatcaaaaatacaaaaaattagccaggtgttgtggcatgcacctgtggtcccagctacttgggaggctgaggtaggaggatcgcttgagcctgggaggcagaggttgcagtaagccaagattacaccactgcactccagcctgggtgacagagaaaggccctgcctcaaaaacaaaacaaacaaacaaacaaacaaacaaac

SEQ ID NO: 895544 - DNA, 516 bp, Homo sapiens
ggccacttccgtgtattttactattggatcaatttgtatacagccttcaaggaatataccagttctataaaacaacaagacacctgtatcaaaaatacccactttttgatgggtcactagctctttcgaatattagcatgttggttatcagagaagggagtamaaggagcttggagggacaatgtaatcttgatatgccggccctctaccaattctgaattagctgagttagaagcacctacatccaaagtcaaattgacttattgttatttcatgttcttttcaggcatagtcacagtttgttttgttttttcctgtggtaggtaaggctgataggtagctctgagtttgctaaagcacctctataaatctaaatggtgccaagtatttggatgaaagctatttgagattatgtaagtaaaatatctgcataaatagcacaggagttttcttttcacttgtattttgggtgctttgcagatgaattgaaaacatgtggtttcctggttggaagat

SEQ ID NO: 895545 - DNA, 627 bp, Homo sapiens
caaatgaaaaagagagagagaatatattttggagaggggaggatcaaggatctgaaaaatgaaattctcccaaggcttttcttctcactaatcctgaagaggagctgcaacacttggattttaattcagtccattaataaatgaattatgcaattagttgatatacaattaactggattcacaaggcatgtagagctaaccgggtcagtctgcatctgtatgactgtaatgtgcctaaatgaatttgccatmaaaggacaggcagtagaatggggaatcaaatttgtctccggcagagaatcatgcctgccagctgccgaaagttctgcagataaagccttggtctgagttggcaggagaaacaaaagcagcacaatgaaggaccccaagtggcactctctccattatagaagcattgttctccccagatgagcttggacagagatcaatacatcccgaatccttctgggcagaaagcatgagcaattagatttggattgggatctatcaatcaatcactcgccaaaagtggttctggcggcacaaaatgaaaatctcttagtgcaacatagcccttccctgggacccgcaattttgactgacccagatgcaaagtcaatcaaaata

SEQ ID NO: 895546 - DNA, 627 bp, Homo sapiens
caaatgaaaaagagagagagaatatattttggagaggggaggatcaaggatctgaaaaatgaaattctcccaaggcttttcttctcactaatcctgaagaggagctgcaacacttggattttaattcagtccattaataaatgaattatgcaattagttgatatacaattaactggattcacaaggcatgtagagctaaccgggtcagtctgcatctgtatgactgtaatgtgcctaaatgaatttgccataaaaggacaggcagtrgaatggggaatcaaatttgtctccggcagagaatcatgcctgccagctgccgaaagttctgcagataaagccttggtctgagttggcaggagaaacaaaagcagcacaatgaaggaccccaagtggcactctctccattatagaagcattgttctccccagatgagcttggacagagatcaatacatcccgaatccttctgggcagaaagcatgagcaattagatttggattgggatctatcaatcaatcactcgccaaaagtggttctggcggcacaaaatgaaaatctcttagtgcaacatagcccttccctgggacccgcaattttgactgacccagatgcaaagtcaatcaaaata

SEQ ID NO: 895547 - DNA, 603 bp, Homo sapiens
cagggctaatgacgtattgggtgcagagaggggttggaaagaatgtggtatttcagactatgcttactatgcttaaaaatcacaattccgtggtgactagagtttatcttaaactttcctccctggcattccattgcatccagttgagagagcactctagctccctacatcccagaacatgtagatctgtccgtggttctgaaagatacactggcaggtcccgccaactacatgaatggcattcatattgtggaaaactgcccactagtaaaaatgtacagttgaacttgtacattcrttacttacaaggttggagaacgtgaagtactggacaatccaacaatagcttggaaagataccataaaaagacccgcagaatattcttttatatgcattatactgaaatgtacaaaacaaaaccagaatgggacacattatgagtgagaagtttatcttgaaattttaatcagaatatgaagaaaagaaatccaacattagacctggaaaaagataaaataatttgtatttcatttaacaatatttatagattctcaatatatacactatccttttaaacctcaatttatatttaaccatccattt

SEQ ID NO: 895548 - DNA, 591 bp, Homo sapiens
gtccctgtcctcatggaccagacaccatctggtggaagagatgagacaattgagtaataatatcaatacaataagatgtcatcacttagtgaggagaggagaggagagctcagtaatggtggtagaggagccatcagagggttggacaaggaagacagaggatctgagctaagtttgtgaagaaaagtccagatgcctcagacaagatggacaaggaggtgggaagcatgatggctgtgggtccaactagggtcactgggggagactgtttatacccagcatatgtttgtggggaggagggactgaagcctgggtgaggggagagggctcaaggctggccttaggacatggacaggatggtattgagtcacgctgcagaaggagccttcatgggcaagggggctgggggaggccctgagctcattaytccaatggaaatatcaaactgcctgttagcctttgtcaaaggtatcaaagagactttttcattcaagatggcaagagaggaatctccctcttagacttctttgagatattctttcttcatgaccgtttcttgcccctggatgaatgctcacatgggagcaaatt

SEQ ID NO: 895549 - DNA, 467 bp, Homo sapiens
gagttatactatgtcatggattgtataaatcagtattgtaaagatggcagtgtcctaggattaatccatcaaattaatataagtgtaattaaaatttcagtaatattttaggaaactgcttaacttattttaaaactcaaattgaaaattgagataaaaattacctaagattatttaccaaaaatttgtaatggaagtgataccagatattgagttatttgacyaagcaatattagctaaaatcatgcatgattgagatcttgacatttacataattctcttaaaaattagagtagataggactgatgattttttatgtgaccttggaaatatggctaactctgttcataaaattaagtagagtacctaattcatacttttattaaaaaatccaaacagatttaaaatataatttagaaaagaaaaagtttaaaaactttagtttggaaaaatagaaatattatttt

SEQ ID NO: 895550 - DNA, 592 bp, Homo sapiens
tgaatgtttgaattcaaattttctgtttatgtgtctctctattttctttccaaaatacacaactttttctttcttgtcttcatggatggtttttctggtccctgtgaaattactttatgaagaatatttagtttaaaacatrgtttctgaacattgtcattttaacattgtgcactgggtcattcattgtgtgaggggggctgttctgttcatggttggacatttataagattattgggactcacacatcagatgcctatagcaccctaattcccaaattctaacaaacaagcaaaaaatgtagacattgcaaaatatcctagggagacagcactgcagaatcacccttgtctgagaaccactggattaaaaggacatggtttcacgtattgggcagccttttgtgttgaaccctccttatcccattccactgaatataaggctacatgcattatatctcgatggttccaaatttcctcttaaacaaatgtgtgggatacaactccaaaggttatgttgacagatgaataatcctctgaacaccattagttcagaaaacctgctacccaatgtacagcatctcttgctgacc

SEQ ID NO: 895551 - DNA, 592 bp, Homo sapiens
tgaatgtttgaattcaaattttctgtttatgtgtctctctattttctttccaaaatacacaactttttctttcttgtcttcatggatggtttttctggtccctgtgaaattactttatgaagaatatttagtttaaaacatagyttctgaacattgtcattttaacattgtgcactgggtcattcattgtgtgaggggggctgttctgttcatggttggacatttataagattattgggactcacacatcagatgcctatagcaccctaattcccaaattctaacaaacaagcaaaaaatgtagacattgcaaaatatcctagggagacagcactgcagaatcacccttgtctgagaaccactggattaaaaggacatggtttcacgtattgggcagccttttgtgttgaaccctccttatcccattccactgaatataaggctacatgcattatatctcgatggttccaaatttcctcttaaacaaatgtgtgggatacaactccaaaggttatgttgacagatgaataatcctctgaacaccattagttcagaaaacctgctacccaatgtacagcatctcttgctgacc

SEQ ID NO: 895552 - DNA, 357 bp, Homo sapiens
atgtctgatagaattcaaatgtgaatctgtctggtcctggacttttttcgggggttgactttttaaaattattatttcaatctcactgcttgttattggtctgttcagagtttctacatcttcctggtttaatctaggagggttgtatatattcagatatttatcartcttctctaggtttttcagattatgtgcatattatcttttatatagtttttttgttttaattttatttagttctggtctaatctttgttatttcttttcttctgctgagtttgggtttgcattgttcttgatcctccagtttcatgaggtgtgaccttagaaggtctgtttgtgctctttcaggcttttt

SEQ ID NO: 895553 - DNA, 625 bp, Homo sapiens
ttaatctaggagggttgtatatattcagatatttatcaatcttctctaggtttttcagattatgtgcatattatcttttatatagtttttttgttttaattttatttagttctggtctaatctttgttatttcttttcttctgctgagtttgggtttgcattgttcttgatcctccagtttcatgaggtgtgaccttagaaggtctgtttgtgctctttcaggctttttgatgtatgtatttaatgctaaacttttcccttagcactgcctttgctgtatcctggaggttttgataggttgtatcaagatttagaactactgcaaccttactattgaccaacargtttttaattcctaagagtgtgacctcactgaatcctgacaacagctttatgattgcttttcatgcagtaggccctggttagagaggggagtgcttgtggcctggaggtaggattctgcaatttatcaaataaaaacactggaggtcagttaaatttgaattcagtaaaacaatgacaaagaattagtatgtgttagtatctcccacacaatatttttcagttgaaatacaacttatctgggtgccctgtcgtttatctgccaactcctcacaggattcaa

SEQ ID NO: 895554 - DNA, 618 bp, Homo sapiens
cacacttgtggataattaacatggttaagagagtagttctacgaatgattaaagctcaggtaccctggtctaaagtaaataccattacggggcaatatccctggttgacctcccaccgagagggccatctggctcaaaggttagttaatggagatagggtaaacaggcttaactgggaaagcctccattgtccctagcatttaccctatgacctaatgctctaaggtaagaaccagctgccttcagcctgtacaattattacaagctatgtaacattttagccttccaaaatgtttgtgattattccctataactttccctaatatttccctttgatatttctgccaccatcctgagtgaatcccaacagaggtccaatataatcaacctgccaccaggtagctggctgataacccyaaggaatggtgccacatcaagggctcagtgttggtctctgctgctggcaaattgggcactcagcagtggctgtagctaggtcagccttggtgagtggaagtccatgttgatgagcccgtgtgtaacctccattcctgccagcatggccacttccctcatgggcccattgggcgatgacaggggtgtctggggaaagaggat

SEQ ID NO: 895555 - DNA, 618 bp, Homo sapiens
cacacttgtggataattaacatggttaagagagtagttctacgaatgattaaagctcaggtaccctggtctaaagtaaataccattacggggcaatatccctggttgacctcccaccgagagggccatctggctcaaaggttagttaatggagatagggtaaacaggcttaactgggaaagcctccattgtccctagcatttaccctatgacctaatgctctaaggtaagaaccagctgccttcagcctgtacaattattacaagctatgtaacattttagccttccaaaatgtttgtgattattccctataactttccctaatatttccctttgatatttctgccaccatcctgagtgaatcccaacagaggtccaatataatcaacctgccaccaggtagctggctgataaccccaaggaatggtgccacatcragggctcagtgttggtctctgctgctggcaaattgggcactcagcagtggctgtagctaggtcagccttggtgagtggaagtccatgttgatgagcccgtgtgtaacctccattcctgccagcatggccacttccctcatgggcccattgggcgatgacaggggtgtctggggaaagaggat

SEQ ID NO: 895556 - DNA, 623 bp, Homo sapiens
caggtgagtccaggggtaggggctgtgtggagacctgagaccaggtgtggcctggcatggacactgcccagctccattcttttagggaggacaaagtggacagaggaagagacaggagacatgggtgtgtctgagctttgggcagcaggggatgctgtggcctagccctgagggctgtgctgtggatcccagctgggagccaccccctggtcctggcctggagccctctgtcccctgctcactgggactagcagctgtgtcctcacaggtccctgagtacccacagaatagccacacccaggtccacactctcccggggttagctttccaggcagaggtcaagagtcagaacccaaggtggggtttagacagcccaggagaggaggctggtttgcaagtccctcctaacccccttcgccctgaactgctggaaggataggagrgacttgaagaatccaggcccacctgagggtcctcaggacacagctgtgtggcgggtccccaccatggcctgggctcgtggcctctttccttttctccttcactgctcagctggctggggccaggcgtcagggctgaggatgaagggaccaggattgctgtgtgtgtccctgtccactaac

SEQ ID NO: 895557 - DNA, 684 bp, Homo sapiens
agctcccccatagagagggagaagggctccgaacggaaaaccctacatgtggtggacagcagctggttatattgggaggctggaggaggcagtgtctgatttgcacagggcccagggaatgagtttgaccaggtgtgtcattcacgcagcctgtaaaaaaactggccctcccaccctagccttttaatatgaaaattcaggttgccatgatgtcctgcacatgtggcttttatgtggaagctgccgtgacacctggcacatgtggtgacaaggagaagagggcgaaagccaccatattgggtggacctggcttctagccaccagcatttgygtatcaatgcttgccagtctggtttttcaagccgctttctgttagcaaagaaatggtttgggggtcgctttttattaaaagaaaattccaccaagaactttcaccctttcttgctgcctaaaaattatttattaataactcctgtagtagctggagacaaggaggcagggatggcactgggaggaccagggctcttccttgctcccctggcttactgagccacctccctcaccctgtgtctctctcctgactctcagggtcctgggcagtcagaactcacttggtaacctgcacagtctgtctgtggctaaaccagtcaccatctcctgcactggaagcagcagcaataaggg

SEQ ID NO: 895558 - DNA, 601 bp, Homo sapiens
cctacaggtattttattgatgttattcttcctctgatgacacgctgatttcaaaacatgcctaaaaccaaagacacaggatctttgaagtcccttccctcaaatatctgaggcttttccccaattgagcagcagttcacatgcttgtaagttttaaatgtgttargcattttactggaaatgctttatatgcttcacactccacaggacttcttattcccagctcattgattgaggaaagtgaaatctgccatttgctgatgggccaatgtcaaggccaatgtcccagatcccctgtcaggacaaaagtgtgatgcagccagaagtcagccctcacctgcaaatgctctcctgaacttgcctaccctggagggatctgctcaccaggcagattccaggcgatgcccaaagcactccctaataaaactctgtgtgctcatctccgccttaacttctgtttccaggagacccagcttgtgaccattgtttccaggaagattaccaattgtctctgtttgccctggaccgaaggttttcccaggacatagatctttcagtgctaaaacaggacagtcctgagttatcttaggaccaggaatgtc

SEQ ID NO: 895559 - DNA, 694 bp, Homo sapiens
gaattgggtatccatcccctcaagcatttatcctttgtgttacaaactactcaattacagtattttaggtattttaaattgtacaattaagttgttatcgatgtgctatcaaatagtattgacataactctgatgygctatcaaatagtaggtcttattcattctttctattttatttacccattaagcatccacaaataagagcagatttcttcttagaagtcatgcgagcaggaagctcgcatgtggagctatatttataaaatattaaaagaaaaaacttactacccaaacccatctccagaccatgaatttctctctggatatcttattaaaatattgtctcctatcaaatctctatcaaaataccaatgacattcacagaagcagaaaaaaaattctgtaactggtatggaaccacaaaagcccctgaatagccaagcaataccaaacaaaaaaccccaagatgaatatatcacattatctgaatcaaaatatactacaaattatggtaaccaaaacaggatcaatggtattggcataaaatcagacattgagactaataaaattgtatagaacacaccaaaataaattcatgtatttacatccaactgattttcagcataaattccaagaacatacattgagaaaaggacgcacttttcaataaatggtgctgagaaagtggataccc

SEQ ID NO: 895560 - DNA, 694 bp, Homo sapiens
gaattgggtatccatcccctcaagcatttatcctttgtgttacaaactactcaattacagtattttaggtattttaaattgtacaattaagttgttatcgatgtgctatcaaatagtattgacataactctgatgcgctatcaaatagtaggtcttattcattctttctattttatttacccattaagcatccacaaataagagcagatttcttcttagaagtcatgcgagcaggaagctcgcatgtggagctatatttataaaatattaaaagaaaaaacttactacccaaacccatctccagaccatgaatttctctctggatatcttattaaaatattgtctcctatcaaatctctatcaaaataccaatgacattcacagaagcagaaaaaaaattctgtaactggtatggaaccacaaaagcccctgaatagccaagcaataccaaacaaaaaaccccaagmtgaatatatcacattatctgaatcaaaatatactacaaattatggtaaccaaaacaggatcaatggtattggcataaaatcagacattgagactaataaaattgtatagaacacaccaaaataaattcatgtatttacatccaactgattttcagcataaattccaagaacatacattgagaaaaggacgcacttttcaataaatggtgctgagaaagtggataccc

SEQ ID NO: 895561 - DNA, 613 bp, Homo sapiens
aacccaggggctcagcacaatgagctctccctctggccatacattccctgtgaggccccatctactctcatcccaacacaattgctccccaggcatctggggactgctgctgagattctccactcatggggtcctgggcacagcggtgttatcccagtccccctcttcctctgtgtcctgggagctggaatcagagtcagcctgatctgrcccaaagcctacaattaagagccctgagtggcctctcctgctttccccccacattggactcttcctttcagtgtccttcctggggtactgtgtcactactcaataatatcttatgtcctcagtgctaggcgtttttcacataatatactcttgttagtttctcctcacctttccaagctcagttatcaactctaggctgatgatcctaactattcatttacagcacattgtcatataaaggccagcgatatctagaaaaaaaagtgccaataaatgtgtgtactgcatcttacgaatcactacaaggataccacaaacaatatccctgtatttaaatagagttcactcttcagacacaagagtttaagtggagttcaatataatagtttatatagataatagt

SEQ ID NO: 895562 - DNA, 611 bp, Homo sapiens
ttgtatatattcagatatttatcaatcttctctaggtttttcagattatgtgcatattatcttttatatagtttttttgttttaattttatttagttctggtctaatctttgttatttcttttcttctgctgagtttgggtttgcattgttcttgatcctccagtttcatgaggtgtgaccttagaaggtctgtttgtgctctttcaggctttttgatgtatgtatttaatgctaaacttttcccttagcactgcctttgctgtatcctggaggttttgataggttgtatcaagatttagaactactgcaaccttactattgaccaacargtttttaattcctaagagtgtgacctcactgaatcctgacaacagctttatgattgcttttcatgcagtaggccctggttagagaggggagtgcttgtggcctggaggtaggattctgcaatttatcaaataaaaacactggaggtcagttaaatttgaattcagtaaaacaatgacaaagaattagtatgtgttagtatctcccacacaatatttttcagttgaaatacaacttatctgggtgccctgtcgtttatctgccaactcctcacaggattcaa

SEQ ID NO: 895563 - DNA, 606 bp, Homo sapiens
cagctttatgattgcttttcatgcagtaggccctggttagagaggggagtgcttgtggcctggaggtaggattctgcaatttatcaaataaaaacactggaggtcagttaaatttgaattcagtaaaacaatgacaaagaattagtatgtgttagtatctcccacacaatatttttcagttgaaatacaacttatctgggtgccctgtcgtttatctgccaactcctcacaggattcaaggcttggaagagggagtgttggggctggcctcgtcttactgatgccagttctatgagatgaacctcaaaggcagagcttctctaacacagctaccctcaagaaagcaygtcagttagcactaaatacatggtataagttcctcaatcaatagtgcctactcacttccctaattcttctttgtattattcttcaagtctgcagactcaggacctctgctggggttgctgcagccagagttctggatgagggacctcataagcctttcaaaaccagacgcagggggactactcagtccccacgcagcggggcttaagccaggggtaaataagtaagaaatggaagagctcagcatggctctccctttgt

SEQ ID NO: 895564 - DNA, 516 bp, Homo sapiens
acttaggaaactgagacctatgtcctgtccaagggcactctgtgggtcaggggacagcaaagcacagacattcaacccagcatggaggcccctccccacccaggagcaggagcctgccttggaatgccagacctgagataggattactgccacctgggaacagcatacactggtgagaggcaggggcagggagaacaccaccacaggggcagggagaacaccaggatggggaaagggaaccacagggcctactcttttaatyaagcagtagaattgtaagaaaattgcaactttcttttaaaacctgtctttcaaggttgttaaaatggggttttaataacaaaactgtgggagaaagaggtggctgatgtcaaaaacatctcaacccactcccctgggggacctgcagttctctagttcgtgagtttctgctaacaaaaagcacactaaaagaggggccaaaacaaatggaaatcaagcttatcaaacacagatgacatggagttgaccaaagca

SEQ ID NO: 895565 - DNA, 604 bp, Homo sapiens
aaatatggctagtacgctatattagacttgtccaccaaaaattaataggatatgtatggatatgaatatatatgtataatgtatctatatggtgagagagacagacagaaacttattttaagaagctggttcatacaatagtggtggctgatggacaaaatctgttgggcaggctataggctggaaatttaggtaagagttgatattgccgtcctgagttcaaattctgcaagaagctaatgtttccccaagacagcatcagctgttattatgcacactggctccaaatcgaggaaagtgtccmccctgaccattagcagagctcatgccaagaacaaggctgatcattaacatcaatcactgggaaacttcagtatttattctaaaaaccttgaactcattaatgagactcacacacattgtggaaagtagtattgatacaggagacagaaattatttaggcagatagtgagggtgacagggtcctcagcagagcttctcatctaacaaaaagcagccctaaaaatcatttcttttataacaaagagcagcctgaaaaaatcgtgctgcaaacatagataagcaagctggaagcttgcatggg

SEQ ID NO: 895566 - DNA, 621 bp, Homo sapiens
tgaacacatacataaggagacagagaaataataatgcccccaagttcccatcacccagcccccccaataagcaattcacagacattactgacccacccatagcagaataacccctccattacacaataccagacatcacatcttttcagctgtaaatatcccatttctatgctggaaagatatgggcttaaaagtaactgcaatattattaccaaacctaaatagaaattatcactaattccctaatatcaagaaataatcaygggctcctcaaatccctcacaaatgccagaagcgtattgacttagttaagtgttggtgctgtggttattttggggttttgggtggtttatttcagaattcaatatggcatcaaatggtgatgggcgcatgtgctgtcaggccagttgtcactggtgaatatttcctcaattgctctagtgctgcctggcaaggcaggagctgcaggagttgagagctgtccggggaccttcccacggttggaatacagccacacctcccaaaacaagaacccagggctatcatctacttctttttttttccccctgcaaaatggttctagcatggagggacttaactggattcagactagacattgca

SEQ ID NO: 895567 - DNA, 653 bp, Homo sapiens
ctctcaccacatacaaaagtgaattcaaactggattaaagacttaaatgtaaaacttgacactactaaactactagaagaaaacacagggaaaatagggaaaatgcttccggacttatgtgtagacaaagattttatacctaagctttcaaaagcacaggcgacaaaaacaaacatagaccaatggagctacattaaactaaaagtttctgcwcagcaaagaaaacaataagcaaagtaaagagacaacttgtagaacaggagaaaatatttacaaactgttcatctggcaatggattcacatacagaataagacaataagacaagaaagcaaaacaattcaacagcaaaaaaaaaaaatgccaaataataccattaaaaagaggtcaaagaatttgaatagacatccctcaaaagaaacatacaaatggccaaagggtgtattttttaaaatgctcaacatcactaatcatcagggcaatgcgaatcaaaatcacagtgagacatcatctcaccccagctagagtgactaatatcaaaaagacaaaacataacacattctggcaagaacgcagtgtaaaggaactcttatacactgttatatactgttggtgagaaggtaaattttaaattaatacggccattatgaaaaac

SEQ ID NO: 895568 - DNA, 653 bp, Homo sapiens
ctctcaccacatacaaaagtgaattcaaactggattaaagacttaaatgtaaaacttgacactactaaactactagaagaaaacacagggaaaatagggaaaatgcttccggacttatgtgtagacaaagattttatacctaagctttcaaaagcacaggcgacaaaaacaaacatagaccaatggagctacattaaactaaaagtttctgctcagcaaagaaaacaataagcaaagtaaagagacaacttgtagaacaggagaaaatatttacaaactgttcatctggcaatggattcacatacwgaataagacaataagacaagaaagcaaaacaattcaacagcaaaaaaaaaaaatgccaaataataccattaaaaagaggtcaaagaatttgaatagacatccctcaaaagaaacatacaaatggccaaagggtgtattttttaaaatgctcaacatcactaatcatcagggcaatgcgaatcaaaatcacagtgagacatcatctcaccccagctagagtgactaatatcaaaaagacaaaacataacacattctggcaagaacgcagtgtaaaggaactcttatacactgttatatactgttggtgagaaggtaaattttaaattaatacggccattatgaaaaac

SEQ ID NO: 895569 - DNA, 653 bp, Homo sapiens
ctctcaccacatacaaaagtgaattcaaactggattaaagacttaaatgtaaaacttgacactactaaactactagaagaaaacacagggaaaatagggaaaatgcttccggacttatgtgtagacaaagattttatacctaagctttcaaaagcacaggcgacaaaaacaaacatagaccaatggagctacattaaactaaaagtttctgctcagcaaagaaaacaataagcaaagtaaagagacaacttgtagaacaggagaaaatatttacaaactgttcatctggcaatggattcacatacagaataagacaataagacaagaaagcaaaacaattcaacagcaaaaaaaaaaaawgccaaataataccattaaaaagaggtcaaagaatttgaatagacatccctcaaaagaaacatacaaatggccaaagggtgtattttttaaaatgctcaacatcactaatcatcagggcaatgcgaatcaaaatcacagtgagacatcatctcaccccagctagagtgactaatatcaaaaagacaaaacataacacattctggcaagaacgcagtgtaaaggaactcttatacactgttatatactgttggtgagaaggtaaattttaaattaatacggccattatgaaaaac

SEQ ID NO: 895570 - DNA, 653 bp, Homo sapiens
ctctcaccacatacaaaagtgaattcaaactggattaaagacttaaatgtaaaacttgacactactaaactactagaagaaaacacagggaaaatagggaaaatgcttccggacttatgtgtagacaaagattttatacctaagctttcaaaagcacaggcgacaaaaacaaacatagaccaatggagctacattaaactaaaagtttctgctcagcaaagaaaacaataagcaaagtaaagagacaacttgtagaacaggagaaaatatttacaaactgttcatctggcaatggattcacatacagaataagacaataagacaagaaagcaaaacaattcaacagcaaaaaaaaaaaatgccaaataataccattaaaaagaggtcaaagaatttgaatagacatccctyaaaagaaacatacaaatggccaaagggtgtattttttaaaatgctcaacatcactaatcatcagggcaatgcgaatcaaaatcacagtgagacatcatctcaccccagctagagtgactaatatcaaaaagacaaaacataacacattctggcaagaacgcagtgtaaaggaactcttatacactgttatatactgttggtgagaaggtaaattttaaattaatacggccattatgaaaaac

SEQ ID NO: 895571 - DNA, 645 bp, Homo sapiens
ctacctgtgaaaacgctttgtgatgtggtttcatatcacagaattgaacctgtgttttgacaaagcaactttcaaacactgtagaatctaagaagtgacattactgagcctattgagcttttataggaacatacaaatatccagttccaaaaactagaaacaagctsttggtgaaaacgctttgtgacatgctgttttatgtcataaaaatggaacctgccttttgatgaaacagcttccaaacaggtttttttttagaatctaatagttgacatttctggccctattgagcccttatagaaacatatgaatatccagttctaaaaactagaagcaagccatctgtgaaaatgctttgtgatgtgctgctttttgtcacggaataatacatatgttttgattcaacaagttcaagacactctgtagaatctaaaaagtgaagtttttgaacctattgagacttgattaaaaaatacgaatattcagccctaaaagctagaagcaagcaatctgtgaaaacactttgtggtatgctgttgtatgttatggaatggaacctgcattttgatgaaacagcttccaaaacacttttttgtagaatctaagaagtgacattttggagcctattgaacccttacaggaaaa

SEQ ID NO: 895572 - DNA, 645 bp, Homo sapiens
ctacctgtgaaaacgctttgtgatgtggtttcatatcacagaattgaacctgtgttttgacaaagcaactttcaaacactgtagaatctaagaagtgacattactgagcctattgagcttttataggaacatacaaatatccagttccaaaaactagaaacaagctcttggtgaaaacgctttgtgacatgctgttttatgtcataaaaatggaacctgccttttgatgaaacagcttccaaacaggtttttttttagaatctaatagttgacatttctggccctattgagcccttatagaaacatatgaawatccagttctaaaaactagaagcaagccatctgtgaaaatgctttgtgatgtgctgctttttgtcacggaataatacatatgttttgattcaacaagttcaagacactctgtagaatctaaaaagtgaagtttttgaacctattgagacttgattaaaaaatacgaatattcagccctaaaagctagaagcaagcaatctgtgaaaacactttgtggtatgctgttgtatgttatggaatggaacctgcattttgatgaaacagcttccaaaacacttttttgtagaatctaagaagtgacattttggagcctattgaacccttacaggaaaa

SEQ ID NO: 895573 - DNA, 645 bp, Homo sapiens
ctacctgtgaaaacgctttgtgatgtggtttcatatcacagaattgaacctgtgttttgacaaagcaactttcaaacactgtagaatctaagaagtgacattactgagcctattgagcttttataggaacatacaaatatccagttccaaaaactagaaacaagctcttggtgaaaacgctttgtgacatgctgttttatgtcataaaaatggaacctgccttttgatgaaacagcttccaaacaggtttttttttagaatctaatagttgacatttctggccctattgagcccttatagaaacatatgaatatccagttctaaaaactagaagcaagccatctgtgaaaatgctttgtgatgtgctgctttttgtcacggaataatacatatgttttgattcaacaagttcargacactctgtagaatctaaaaagtgaagtttttgaacctattgagacttgattaaaaaatacgaatattcagccctaaaagctagaagcaagcaatctgtgaaaacactttgtggtatgctgttgtatgttatggaatggaacctgcattttgatgaaacagcttccaaaacacttttttgtagaatctaagaagtgacattttggagcctattgaacccttacaggaaaa

SEQ ID NO: 895574 - DNA, 645 bp, Homo sapiens
ctacctgtgaaaacgctttgtgatgtggtttcatatcacagaattgaacctgtgttttgacaaagcaactttcaaacactgtagaatctaagaagtgacattactgagcctattgagcttttataggaacatacaaatatccagttccaaaaactagaaacaagctcttggtgaaaacgctttgtgacatgctgttttatgtcataaaaatggaacctgccttttgatgaaacagcttccaaacaggtttttttttagaatctaatagttgacatttctggccctattgagcccttatagaaacatatgaatatccagttctaaaaactagaagcaagccatctgtgaaaatgctttgtgatgtgctgctttttgtcacggaataatacatatgttttgattcaacaagttcaaracactctgtagaatctaaaaagtgaagtttttgaacctattgagacttgattaaaaaatacgaatattcagccctaaaagctagaagcaagcaatctgtgaaaacactttgtggtatgctgttgtatgttatggaatggaacctgcattttgatgaaacagcttccaaaacacttttttgtagaatctaagaagtgacattttggagcctattgaacccttacaggaaaa

SEQ ID NO: 895575 - DNA, 601 bp, Homo sapiens
tattcctttacctgtttgttttctcttgcaacatgtggattcagcaacgtgaccatactctccctcttttccccgcagcctgcttttctcttctaaacactgaaaccctaaaatatttttggagaaaggcacagacctctgtcgcccagscatgtctttaaccttggaagaagaaacttctaaattgataagagatctgtctcagacactttttcgtttacatcccgttatctcagaaagcaaaacaggctttgttccaacccaaagtaatttgtgaatattcaagcggtatcattctgatgtaaaatttacataaattcttgggtttaccaaaatgcaaatgggcaagcagatcactatttacagataatggcctaaaaaatggtaagagtaaatgctgtggagctaaatgtttctgagtctgccatttcctagttttgtagtttctctcgggcaagttacccaaagttgctgtatgttattatcttgacatttaaaatagaagtaataactttattataaataatagttaataccatagggtcattaggaaagtgtctggcatatatagtcacaacccagtgaatgccattattgtttt

SEQ ID NO: 895576 - DNA, 601 bp, Homo sapiens
tattcctttacctgtttgttttctcttgcaacatgtggattcagcaacgtgaccatactctccctcttttccccgcagcctgcttttctcttctaaacactgaaaccctaaaatatttttggagaaaggcacagacctctgtcgcccagccatgtctttaaccttggaagaagaaacttctaaattgataagagatctgtctcagacactttttcgtttacatcccgttatctcagaaagcaaaacaggctttgttccaacccaaagtaatttgtgaatattcaagcggtatcattctgatgtaaaatttacataaattcttgggtttaccaaaatgcaaatgggcaagcagatcactatttacagataatggcctaaaaaatggtaagagtaaatgctgtggagctaaatgtttctgagtctgccatttcctagttttgtagtttctctygggcaagttacccaaagttgctgtatgttattatcttgacatttaaaatagaagtaataactttattataaataatagttaataccatagggtcattaggaaagtgtctggcatatatagtcacaacccagtgaatgccattattgtttt

SEQ ID NO: 895577 - DNA, 630 bp, Homo sapiens
ttctggaatcaaaccaatcaacaaattatatgattgcctagtttttgcaggtttgctattttgatgtttgctgtattttaaattcttaaactcaaatgggatcacagatgcctactacatctcttgctgaaatattccaagactgttgattttagtcttttgctgggcactaaagtctaaagaataaagaacacccttagaaggtttggttatgttyctccatatacgttaaataacatctgtcatattttagagcataaaaataattttataaaatgaaatgcaaggaactgatacttcctcaaataacactttcccttccagtgaaatgattttgccactgtcatctaataatccattcccaaaattactttccaggcatcagtggtaattctgatcaatgataggttagtctccaacaatcagagtttatctcagtagagttctttgtatccatatagagacttacctagccaagtagggaagacctagtgcctttcaacctcctaacgttgttgggtttctttgcagaactttgctgcccagatggctggaggatttgatgaaaaggctggtggcgcccagttgggagtaatgcaaggaccaatggtaagaaaagacactagttct

SEQ ID NO: 895578 - DNA, 630 bp, Homo sapiens
ttctggaatcaaaccaatcaacaaattatatgattgcctagtttttgcaggtttgctattttgatgtttgctgtattttaaattcttaaactcaaatgggatcacagatgcctactacatctcttgctgaaatattccaagactgttgattttagtcttttgctgggcactaaagtctaaagaataaagaacacccttagaaggtttggttatgtttctccatatacgttaaataacatctgtcatattttagagcataaaaataattttataaaatgaaatgcaaggaactgatacttcctcaaataacactttcccttccagtgaaatgattttgccactgtcatctaatawtccattcccaaaattactttccaggcatcagtggtaattctgatcaatgataggttagtctccaacaatcagagtttatctcagtagagttctttgtatccatatagagacttacctagccaagtagggaagacctagtgcctttcaacctcctaacgttgttgggtttctttgcagaactttgctgcccagatggctggaggatttgatgaaaaggctggtggcgcccagttgggagtaatgcaaggaccaatggtaagaaaagacactagttct

SEQ ID NO: 895579 - DNA, 640 bp, Homo sapiens
atgcacaatggtattggatagtgcaaatacagatcatcattttcattattgcgtaaagttccattaagcggcacttcaaccattatactagtagacgctactactgtttttattatactttttataatttgatgcccatctcaattttttttaccatttttcattttcataatcctttaaaactatttaaatttgaataattgctttagctgaaggtcagtctccaagatcttgtcaatctctgtagtaatagatacattgtgttgccttgtctttttccattaaaaatgcatgtctgtgttaatagatgcttttctataaggatttataatggctaaataggactctgttgcctatatccatgtcatgtattacatctatctatctagacacaccayatttttattttactaatcctctattgtatttaggttgtgttggtttttttaaaatattttaggcaatcgttgcacttaatagccttatagttgttgtcgttttatctacaattattttctgagtataaattcttaaaaatagaattgtacatttttaagacttttagtacatattgacaaactgcctttccaaatattgtaccaattttctttctgagagtcttcatactgactttcataaa

SEQ ID NO: 895580 - DNA, 565 bp, Homo sapiens
attgcatcttggcaagaatccgctcccctaaccaaggtttcaagattttgtataccttctgcatgatctagtagcctacaaatgaaatacttcataagttatataacattcttttttcattatcagattgatgctgaattgaagaatatcctgtagtcctgaagcatgtttattaactttggtaagtatattttataaatgcaggaccaacggatccagcattgtaggatgtattttaaatatcaaagaatgggaaggagactttaataaatttattcttatctgttcaaactcattttacagatgagaatattaagcaccgagaaaagttaaagagcttacacttatayaagagcagccaatttctgatatatgtaagactagaatctaggtttactggtcccctgccttgtgcttcatccatcataattctcacatgtaacataatgataccataaagaacatttaaaggattctgatgcacttcaataggaagaactctgagtttaaagacagggctcatcaagtcttaaaaataacacagcaaggaccttaggaggaaagg

SEQ ID NO: 895581 - DNA, 589 bp, Homo sapiens
tataatatctcactttttaaaaactaacagccaaaaaccaacaacagtaacaaaaatactcctgaaactaccttcttgcttccagccacaagttgcttggaattaattaagtagtatctgtcttgcaaaaagaaaatctttgtagcttggacaagtttacttttacaaaaaattcctgagagaaatttatagagacaaagttctaaaaacatgatttttctgcttaattcaatataccacatataaaaacatatacaacattctatgtgctctctttgcccagggaaaatgaaagtgttctctctattctgctttaaaggaaagttcatatgttcggagtaaatacctctctgaaactactaaaaasgatgcaaccttctatatgtagagttaattgcatcagggaatttgaactcacctcatgttagatgtagagttatacaatagatgaaacaattttatggcatatataatttgagtcaaattaactaacatacctgtcactcctcaaaattctaagtcccatgaaggaggatttcattaagtgagccaaggtcaagtgaccatgcctttagctgccaggaactgg

SEQ ID NO: 895582 - DNA, 589 bp, Homo sapiens
tataatatctcactttttaaaaactaacagccaaaaaccaacaacagtaacaaaaatactcctgaaactaccttcttgcttccagccacaagttgcttggaattaattaagtagtatctgtcttgcaaaaagaaaatctttgtagcttggacaagtttacttttacaaaaaattcctgagagaaatttatagagacaaagttctaaaaacatgatttttctgcttaattcaatataccacatataaaaacatatacaacattctatgtgctctctttgcccagggaaaatgaaagtgttctctctattctgctttaaaggaaagttcatatgttcggagtaaatacctctctgaaactactaaaaagsatgcaaccttctatatgtagagttaattgcatcagggaatttgaactcacctcatgttagatgtagagttatacaatagatgaaacaattttatggcatatataatttgagtcaaattaactaacatacctgtcactcctcaaaattctaagtcccatgaaggaggatttcattaagtgagccaaggtcaagtgaccatgcctttagctgccaggaactgg

SEQ ID NO: 895583 - DNA, 585 bp, Homo sapiens
agatttaagctatcttgagtgaaacatgccctgcaaccaaacctgccaatcactgctttagaagcttggtgccttcacccaaattagaaagggaaaagcactttagattaaccaattaaagaggttggccacataactaatgaaactgtagcaagtgtaaatttccaaacattgtattatctcagtctgcactgcattttgagtatttttgtccttaattataaaataaactcttattcccactaaacagatctcagtcattgataatcaggtcaaaagattctctttcccagaggctattttatccttgtccattttttccaggacctsaaatattcttttctctctattaggccaagaaaacatctaattgtttcttccatgacaaccaccaccacaaggctactagtttcatagctaaagcattctggaaaattctagtttgcaattaacaatagtagtaccttattgcccatccatggataaggcacttgggattcatacaatgcttctactcaagtaaaaaagtttctaacaatggattgactgtctatgtctattcttttcaatatcaaaagtatatga

SEQ ID NO: 895584 - DNA, 607 bp, Homo sapiens
ttgtctaaaaaaaaacaaaaaggaaagaatatagcctacatatacaaccaattcaaaatatagtgaatcttggccaggatctgtggttcacacctataatcccaacactttgggaggctgagatgagaggatcacttgagaccaggatttcaagaccagcctaggcaacatagtgacaccctgtttccaaaaattagccaagtgtggtggtgggcacctgtagtcctggttactagggaggctgaggtgggtggatcacttgggcccgggagattgaggctgcattgagstatgattgtaccattttactccatcctgagtgacagagagaggcctgttctcaaataaataagtaaataaataaaaagaatgaaatatagtgaatttcattatgtaatgcatcggtttttaaaatttaatgacatctgattctgattctttgaatactttcactgcttaagctgctgggttgggtttttgtttttgtttttgtttttgtgtttttgagacggagtcttgctctgtcatccaggctggagtgcagtggcgcgatctcggctcactgcaacctccgcaggttgggttttttcactctcaggtataatag

SEQ ID NO: 895585 - DNA, 614 bp, Homo sapiens
cagacagtcatgggatgcatgttcatgataaaacagctcccagaacagcttttaggtaatttaacttaggctttttaaaagtagagagtcatacttggaataagcattacaaataattagaactttggaaatgtgctaatttaactgtaaacactaagctgaaatgtcacaagaacatttagaactagaaaagaccagaactgttcctgtgttagtttcctaargataatggcctccagctccatccatgttcctgcaaaggacatgatcttattcatttttatggtcgcatagtattccatggtgtatattcatcacattttctttaccacattttctaataccacatgttctaccttgtaagtgggagataaataatgagaaccaatgagcacaaagagggggaacaacagacgctggggcctacttgatgggggagtgtaacaggagggagtggagcaggaaaaataactattgggtactatgcttagtacctgggtgatgaaataatctgtataccaaacacccatgacatgacaaacctacacatgtacccctgaaccttaaataaaagttaagcaataaaaaagaccagaactcatctactctaatca

SEQ ID NO: 895586 - DNA, 601 bp, Homo sapiens
agaaggtatgttttttttttcctgtccttgcccaaccacctattgttcagatgtctccatcctaaggaaaatcccccccgcccccgcactccccaactcagaaataacagcatatttatatgttggtggaaatgatccagtagagagtaaaacattagtgatataggagaaagagtgtaaaaatgttggagtcatgtacttcaataggtgagagaggaaggatcaaatacataggtgacattagataggagcaagtagagcytcacatatggtgataagcaagatggcagagagcataggcacaaaggcggtggcaataggagtctgaagtttcttattgcttcagttttctcagttaagtaggaatcaaagtcattagctgagagtgagaatggaggagttttgacaagcttggcaactcattctgtgggcaatactctatgaaaatagtcactcaaacattgctagtgggagtgtgaaattatagcgactcctttggagagagattttgcagtatttttatcttttgacacagcaatctcacttctggtattttaaccagaagatccccctccacaaacaagaaacaacgtatgtaccg

SEQ ID NO: 895587 - DNA, 615 bp, Homo sapiens
ctggaacaattttcttagttttcagtaattctacctaaaatgtacgtccagctttgcactcactaccacattgtaatttccagtatacttgtctatttttcgagatgttgaaatctgtggagaattttttctcatgtttagtgttttagctatgtttatctctagggtatagcacatacaaggtggcaatatagatgtgcttaatgaataaaatgatcttcaaaaactgaccttcatttgaagttctattttattcataaacacataaaacgtttggtatcactgtaaaatttaactaaaaacaaaaactatctttaagctcacaagttaatttaacgttttttcttacacaggcatttgtaaaggatgttcatgaagattcaataacagttgcatttgaaaacaagtaagtgtctcgttatataattttaatgatgaggttctttaatattttatgctaattctaytcttcattttttaaaaattcaagtccagtttgagtgcttttcaggaatggatcttcatgttactgactgagaagtttctgaacaactcagtattaaactaatggaatgactgtttctgctaatgtcctggaggtcccttattgtatgg

SEQ ID NO: 895588 - DNA, 621 bp, Homo sapiens
ccacacatggcagcctgtctggagagctccaaggagattggtatgactgggggtacgtgacattatggaacgcaaaacctggctgctgagagggtggatgtgcttgcacttgcatctctagtcttggtgcgagccattggaggatttttcaggggaagggaaactgggctgacctggttccagcaaactctctgacaatcatgagaagcccagggtccagggggatgagtaagtgtgacctccaggaaacggggcaccactatcagactctatctgtcccatggcttacttctgtgagattcgaaatagtgtagaccttgtcagtccatgagctagtaattatgcccaccaattactgatttatttgcctttctgagatgtgcagtgatcccaaggacaaagatggatttaccttatgtttagaaacttctagaagttgaaatgttcctaacaacctttcctgtggaggttgtacctcacacktagagtgtgtgataagcatttcttttcctaattaaataaaatggagaaaagacacaagcatcagctataaagctcccagtcagtcacagtcaagagactgaatctcatctcttttatttattttttgtgttaactggg

SEQ ID NO: 895589 - DNA, 588 bp, Homo sapiens
aatagagggtcttttgataagtgggcatcttggaactggggcactctgggaacaaaagtggtgatgggactctgtgggtgagtgttaacccccattctcctattgggatagggttacatgctcccaggagtggggtttgggtctctgcatgcagattgggaccctgcttgagtagtgcccacttctagttgggtaaagaggcatgtggaagctgagcttccatctggggctgagctggacttcatgacacccagactctccagcccgggccttggctagttcccagggggctctgaggccatgtccaaggggacaatgatggccctcagtgtgacagggtggctgggaagtgggaagaatccatggaagggggggttggcatctggcttgcccgaggggtctcccacatcgagcagggcaaattccccacgcaaagcagcmagctgcacctgtcagagctctcagtgctgtggctcatccgctctaccctgggcagctggtggtacgaagctggttagtgccatctgagaccaccactggggctgcactcatgggggtgtgggaaggctggagatggcaggcctcagc

SEQ ID NO: 895590 - DNA, 609 bp, Homo sapiens
aacagaaaaaaaaattcaaatcacacatatcccacacattttattattactactactattattttgtagagactgggtctcactctgttgcttatgctggtcttgaactcctggcctcaagcagtcctgctccagcctcccaaagtgctgggattataggcatgagctaccgctcccagccccagacattttagtgtgtaaattcctgggcattttttccaggcatcatacatgttagctgactgatgatggtcaatttattttgtccatggtgtcaagtttctcttcaggaggaaaagcacagaactggccaayaattgcttgactgttctttaccatactgtttagcaggaaaccagtctcagtgtccaactctctaaccttggaactgtgagaactctgaggacaaagcagcggatacaacctcaaaagacgtctgtctacattgaattgggtaagggtctcaggttttttaagtatttaataataattgctggattccttatcttatagttttgccaaaaatcttggtcataatttgtatttgtggtaggcagctttgggaagtgaattttatgagccctatggtgagttataaaaaatgtaaaa

SEQ ID NO: 895591 - DNA, 658 bp, Homo sapiens
acaagtgtcttcagattctttccagcctggtactttcactggcattcttttgcatacacagccaggcgctgctttaaccaacaacagagatccagtgagcatctactgaggggctgttatgggccctgactgtgccaggccctgtgactcacaggtacttgggactctttggctctgtactgttaacttagagaagagtttatttcttctaaaaagttacagcctgacgagaatcgcttgaacctggatagcagagrttgcagtgagccgagatcgcgtcactacactccagcctgggcgacagagtgagactgtctcaaaataaaaatagttaacagcctgcaagatggccatccctcagactggaaagcacagcctctggccaagaccagagatgggcacttcagaggaggaggaggaggggttggggcaggaggtttatgctgaatcggttggctaaacatgcatattcagcaggtgacaggaggagctatgaatattcatgaaggcagtcctgacgcatgcatcctgaacaaacatacaatccacattcactttggggtggagacttaacatttaaaatgtattataatgaggttctacacaggccagaagtggtccatcactgtggtctcttatctggaccaagttactgaaa

SEQ ID NO: 895592 - DNA, 658 bp, Homo sapiens
acaagtgtcttcagattctttccagcctggtactttcactggcattcttttgcatacacagccaggcgctgctttaaccaacaacagagatccagtgagcatctactgaggggctgttatgggccctgactgtgccaggccctgtgactcacaggtacttgggactctttggctctgtactgttaacttagagaagagtttatttcttctaaaaagttacagcctgacgagaatcgcttgaacctggatagcagaggttgcagtgagccgagatcgcgtcactacactccagcctgggcgacagagtgagactgtctcaaaataaaaatagttaacagcctgcaagatggccatccctcagactggaaagcacagcctctggccaagaccagagatgggcacttcagaggaggaggaggaggggttggggcaggaggtttatgctgaatsggttggctaaacatgcatattcagcaggtgacaggaggagctatgaatattcatgaaggcagtcctgacgcatgcatcctgaacaaacatacaatccacattcactttggggtggagacttaacatttaaaatgtattataatgaggttctacacaggccagaagtggtccatcactgtggtctcttatctggaccaagttactgaaa

SEQ ID NO: 895593 - DNA, 621 bp, Homo sapiens
gggtggcacattttctttctgtgacacacgaagaacagacgatcttccggtaacttctggtggcgaaaacaggaagtcgcaattttctgtatttttttcattgctgacatttttgtcgtttaagacctgcagactcattctggaaaagcagaacatgtttgtgtcagtgtgagggcaacactaccacattgtccagacacagacgtgacagctgcygcaaggggcacgaccacttcccacacaggtgtgctcattgctctggaactcacacctcccacatgtgtctcttggcagagaaagcctcagactgagtccccatcttgcttcagagactcactctccagcctggcagggggagccatgggcagcactgctgcttcctgggaccaagagctaaagggccttcaggctgagatggtgagaaagaaaacccaagcctgcataatctctactgctgtattactatatcaagcagaagtcaagagacagaaaagcccgggccaataagaaacccggatgagccagaggaagccctggtctccccacaggcctctgcgtgtgacgtgaggcaggaccgggcagtagagggcagaaaagcaggacagcggctctggtctgctc

SEQ ID NO: 895594 - DNA, 621 bp, Homo sapiens
gggtggcacattttctttctgtgacacacgaagaacagacgatcttccggtaacttctggtggcgaaaacaggaagtcgcaattttctgtatttttttcattgctgacatttttgtcgtttaagacctgcagactcattctggaaaagcagaacatgtttgtgtcagtgtgagggcaacactaccacattgtccagacacagacgtgacagctgccgcaaggggcacgaccacttcccacacaggtgtgctcattgctctggaactcacacctcccacaygtgtctcttggcagagaaagcctcagactgagtccccatcttgcttcagagactcactctccagcctggcagggggagccatgggcagcactgctgcttcctgggaccaagagctaaagggccttcaggctgagatggtgagaaagaaaacccaagcctgcataatctctactgctgtattactatatcaagcagaagtcaagagacagaaaagcccgggccaataagaaacccggatgagccagaggaagccctggtctccccacaggcctctgcgtgtgacgtgaggcaggaccgggcagtagagggcagaaaagcaggacagcggctctggtctgctc

SEQ ID NO: 895595 - DNA, 617 bp, Homo sapiens
tttagaacaaataagataattattttacaagctttgaaacgtgtaagaaagatacgaataaaagtataatcacatttgactaaaacatgaataccttaaaactgaaaagcactgagattatcattatataattttgaatattttaaaccacaatgctttgggagtgcactgtaatattttagaattggaattttaacttactggcttaaaaagtaatgtactttgttttaaattcaaagattatcttgtaaattcagttcgatctattgaaaaaattataaaattcggcaagaagccaaagaagaacaattatrtagctcaagataattaaattttcatgtttggctttagaaatatattcgtcgtgacatagtacatggtaatctagtgagcccagacaagtagttttctctttttgtcaaagggaacaatttgatgcgtgttcaagttgcttaaataaaattttgtatgtgctttctcatcacaagagaacaatatgatttttgaaattatttttactttataaaagaaaaaaaaaagccctcacagagaaaaaagaaaaaaatgatgatgtctttgaaaaacaaagttaatacagctttacatatatttgacct

SEQ ID NO: 895596 - DNA, 563 bp, Homo sapiens
aagatgatatgctaccttcataaccttggtgaggagaaattagcatttctctcagtcctagaaggaggatgaccatgaaggtcttcattctcttgagaagataatcaaatgcttcactgccctgttaacggtttactcaatattcaccaagaaaagtagatgggattatttttgcagacacttatacgggtaatttattctgataagcagagacatacctttagtgcataaattgttccctttgtgctctttgtaataaacatcaccatagagaacaaacacgaagtaatgacattgaattaaaagacaccatagaggcaacagcgactggaatttrtgaaagtaaaaggatagtgcaaacagttgtgcgttgcattctgctctgaagattaacaagctgggtcaggctttgaccatcatgatgagcaggagatttttctaatggaaatccccaatcaagttcctgctgcacccagaaaggaacggcttacagaaatcttacatttctttgcacataccaaattgcttggcatattctatcacaaggtttactttccagggaa

SEQ ID NO: 895597 - DNA, 736 bp, Homo sapiens
cttgtttccgaatttgttggggattttaaactcccgctgagaactcttgcagcactcacattctacatttacaaaaattagacaattgcttaaagaaaaacagggagagagggaacccaataatactggtaaaatggggaagggggtgagggtgtaggtaggtagaatgttgaatgtagggctcatagaataaaattgaacctaagctcatctgaattttttgggtgggcacaaaccttggaacagtttgaggtcagggttgtctaggaatgtaggtataaagccgtttttgtttgtttgtttgttttttcatcaagttgttttcggaaacttctactcaacatgcctgtgtgttattttgtcttttgcctaacagctcctgggtaacgtgatggtgattattctggctactcactttggcaaggagttcacccctgaagtgcaggctgcctggcagaagctggtgtctgctgtcgccattgccctggcccataagtaccactgagttctcttccagtttgcaggtsttcctgtgaccctgacaccctccttctgcacatggggactgggcttggccttgagagaaagccttctgtttaataaagtacattttcttcagtaatcaaaaattgcaattttatcttctccatcttttactcttgtgttaaaaggaaaaagtgttcatgggctgagggatggagagaaacataggaagaaccaagagcttccttaagaa

SEQ ID NO: 895598 - DNA, 680 bp, Homo sapiens
gttgttttaatttcatttagttctcctcttatcttagttattccctttcttttgctgggttttggttctgtttgtttttgtttctctagtttcttgtggtgtgaccttatattgtctgtcctctttcagactctttgacatcgacatttagggctgtgaactttccttttagcaccatctttgctgtatcctagaggttttgataggtgtgtcactattgtcggtcagttcaagtaattttgttgttcttattatactttaagttctgggatacatgtgcagaatgtgcaggtttgttacataggtatagatgtgccatggtggtttgctgcwcccatcaacctgtcatctacattaggtatttcttttaatgttatccctctcctaaccccctcaccccccgacaggccctggtgtgtgatgttcccctccctgtgtccatgtgttctcattgttcaactcccacttatgagtgagaacgtgtggtgtttggtttctctgttcctgtgttagtttgctcagaatgatgtttccaccttcaccatgtccctgcaaagacatgaactcatcattttatggctgcatatattccatggtgtatatgtgccacattttctttatccattatatcgctgatggccatttgggttggttccaagtctttggtattgtgaatagtg

SEQ ID NO: 895599 - DNA, 613 bp, Homo sapiens
tgattgctgctgtcttcagttagatggttaactttgtgaagttgaaaactgtggctctctggttgactgttagagttctggcacttgtcactatgcctattatttaacaaatgcatgaatgcttcagaatatgggaatattatcttctggaatagggaatcaagttatattatgtaacccaggattagaagattcttctgtgtgtaagaatttcataaacattaagctgtctagcaaaagcaagggcttggaaaatctgtgagctcctcaccatatagaaagcttttaacccatcattgaataaatccctataggggatttctaccctragcaaaaggctggtcttgattaattcccaaactcatatagctctgagaaagtctatgctgttaacgttttcttgtctgctaccccatcatatgcacaacaataaatgcaggcctaggcatgactgaaggctctctcataattcttggttgcatgaatcagattatcaacagaaatgttgagacaaactatggggaagcagggtatgaaagagctctgaatgaaatggaaaccgcaatgcttcctgcccattcagggctccagcatgtagaaatctggggctttg

SEQ ID NO: 895600 - DNA, 632 bp, Homo sapiens
gtacttaatctgctcattgtatattcctaccactaaattttaacctcttttatggtagagacattgtcttgtaaactcttatttccctagtatttggagatgaaaaaaaagattaaattatccaaaattagatctctcttttctacattatgagtattacactatccatagrgaagtttgtttgagacctaaactgaggaacctttggttctaaaatgactatgtgatatcttagtatttataggtcatgaggttccttcctctgcctctgctatagtttgattagtcagcaagcatgtgtcatgcatttattcacatcagaatttcatacactaataagacatagtatcagaagtcagtttattagttatatcagttagggtccatcaaggaaaggacaaaccattatcagttactcaacctagaattaaatacagctcttaatagttaattatccttgtattggaagagctaaaatatcaaataaaggacagtgcagaaatctagatgttagtaacatcagaaaacctcttccgccattaggcctagaagggcagaaggagaaaatgtttataccaccagagtccagaaccagagcccataaccagaggtccactggattcagtgagcta

SEQ ID NO: 895601 - DNA, 632 bp, Homo sapiens
gtacttaatctgctcattgtatattcctaccactaaattttaacctcttttatggtagagacattgtcttgtaaactcttatttccctagtatttggagatgaaaaaaaagattaaattatccaaaattagatctctcttttctacattatgagtattacactatccatagggaagtttgtttgagacctaaactgaggaacctttggttctaaaatgactatgtgatatcttagtatttataggtcatgaggttccttcctctgcctctgctatagtttgattagtcarcaagcatgtgtcatgcatttattcacatcagaatttcatacactaataagacatagtatcagaagtcagtttattagttatatcagttagggtccatcaaggaaaggacaaaccattatcagttactcaacctagaattaaatacagctcttaatagttaattatccttgtattggaagagctaaaatatcaaataaaggacagtgcagaaatctagatgttagtaacatcagaaaacctcttccgccattaggcctagaagggcagaaggagaaaatgtttataccaccagagtccagaaccagagcccataaccagaggtccactggattcagtgagcta

SEQ ID NO: 895602 - DNA, 631 bp, Homo sapiens
atgtgaaaagaccaaatctacatctaattggtgtagctgaaagtgatggggagaatggaaccaagttggaaaacactctgcaggatattatccaggagaacttccccaatctagcaaggcagcccaaattcacattcaggaaatacagagaacgccacaaagatactcctagagaaaagcaactccaagacacataactgwcagattcaccaaagttgaaatgaaggaaaaaatgttaagggcagccagagagaaaggtcgggttacccacaaagggaagcccatcagactaacagctgatctatcggcagaaactctacaagccagaagaaagtgggggccaatattcaacattgttaaagaaaagaattttcggcccagaatttcatatccagccaaactaagcttcataagcattggagaaataaaatcctttacagacaagcaaatgctgagagattttgtcaccaccaggcctgccctacaagagctcctgaaggaagcactaaacatggaaaggaacaactagtatcagccactgcaaaaacatgccaaattgtaaacgaccatcaaggctaggaagaaactgcatcaaggagcaaaataaccagctaacatcataatgacagga

SEQ ID NO: 895603 - DNA, 653 bp, Homo sapiens
tactgaatatatactgtgtccctagttctttacacaataaactaatctcatcctcataattctattagctaatacatattatcatcctatatttcagagacttcaagaagttaagcaacttgctcaagatcatctaagaagtaggtggtatttctgggctcatttggcccctcctaatctctcatggcaacatggctgcctaaagtgttgattgcyttaattcatcagggatgggctcatactcactgcagaccttaactggcatcctcttttcttatgtgatctgcctgaccctagtagaacttatgaaatttctgatgagaaaggagagaggagaaaggcagagctgactgtgatgagtgatgaaggtgccttctcatctgggtaccagtggggcctctaagactaagtcactctgtctcactgtgtcttagccagttccttacagcttgccctgatgggagatagagaatgggtatcctccaacaaaaaaataaattttcatttctcaaggtccaacttatgttttcttaatttttaaaaaaatcttgaccattctccactctctaaaataatccacagtgagagaaacattcttttcccccatcccataaatacctctattaaatatggaaaatctgggcatggtgtct

SEQ ID NO: 895604 - DNA, 653 bp, Homo sapiens
tactgaatatatactgtgtccctagttctttacacaataaactaatctcatcctcataattctattagctaatacatattatcatcctatatttcagagacttcaagaagttaagcaacttgctcaagatcatctaagaagtaggtggtatttctgggctcatttggcccctcctaatctctcatggcaacatggctgcctaaagtgttgattgccttaattcatcagggatgggctcatactcaytgcagaccttaactggcatcctcttttcttatgtgatctgcctgaccctagtagaacttatgaaatttctgatgagaaaggagagaggagaaaggcagagctgactgtgatgagtgatgaaggtgccttctcatctgggtaccagtggggcctctaagactaagtcactctgtctcactgtgtcttagccagttccttacagcttgccctgatgggagatagagaatgggtatcctccaacaaaaaaataaattttcatttctcaaggtccaacttatgttttcttaatttttaaaaaaatcttgaccattctccactctctaaaataatccacagtgagagaaacattcttttcccccatcccataaatacctctattaaatatggaaaatctgggcatggtgtct

SEQ ID NO: 895605 - DNA, 653 bp, Homo sapiens
tactgaatatatactgtgtccctagttctttacacaataaactaatctcatcctcataattctattagctaatacatattatcatcctatatttcagagacttcaagaagttaagcaacttgctcaagatcatctaagaagtaggtggtatttctgggctcatttggcccctcctaatctctcatggcaacatggctgcctaaagtgttgattgccttaattcatcagggatgggctcatactcactgcagaccttaactggcatcctcttttcttatgtgatctgcctgaccctagtagaacttatgaaatttctgatgagaaaggagagaggagaaaggcagagctgactgtratgagtgatgaaggtgccttctcatctgggtaccagtggggcctctaagactaagtcactctgtctcactgtgtcttagccagttccttacagcttgccctgatgggagatagagaatgggtatcctccaacaaaaaaataaattttcatttctcaaggtccaacttatgttttcttaatttttaaaaaaatcttgaccattctccactctctaaaataatccacagtgagagaaacattcttttcccccatcccataaatacctctattaaatatggaaaatctgggcatggtgtct

SEQ ID NO: 895606 - DNA, 653 bp, Homo sapiens
tactgaatatatactgtgtccctagttctttacacaataaactaatctcatcctcataattctattagctaatacatattatcatcctatatttcagagacttcaagaagttaagcaacttgctcaagatcatctaagaagtaggtggtatttctgggctcatttggcccctcctaatctctcatggcaacatggctgcctaaagtgttgattgccttaattcatcagggatgggctcatactcactgcagaccttaactggcatcctcttttcttatgtgatctgcctgaccctagtagaacttatgaaatttctgatgagaaaggagagaggagaaaggcagagctgactgtgatgagtgatgaaggtgccttctcatctgggtaccagtggggcctctaagactaagwcactctgtctcactgtgtcttagccagttccttacagcttgccctgatgggagatagagaatgggtatcctccaacaaaaaaataaattttcatttctcaaggtccaacttatgttttcttaatttttaaaaaaatcttgaccattctccactctctaaaataatccacagtgagagaaacattcttttcccccatcccataaatacctctattaaatatggaaaatctgggcatggtgtct

SEQ ID NO: 895607 - DNA, 605 bp, Homo sapiens
ggcatggtgatatagccacgccgcccctgtttgtgagttgaatctctgcagaactcacttttcccaggaggtgctttcagaatgcagcataccacagtcctcatcaggatctgctcatttggctgggctggcaggtggctgagttggctcccggagcgggtgtctagcagctgtgctcatggaggcaggctgggcgtgtgaatctcacstcctcccacggccccctggggaagcaggataggagctgggcctggttcccgagcctggccgattgggagtaacaggtgggatctggaccaggttgtcacacccacaatgacagctgggattatcaccgtgggtggtaattcccacatgacagtttcgagtttcaggtcaagagctgggtcctctctctcctcttgcatctggacagagagatccttgccggctggttttctggctcgttcctcagctgttttctgtggcctgcagagtttgcagccccaggggagtaaggaaagctctgctctggcctgatttttgctggagaagagaaatgtggaagtcagggtggtggcctttgcagtgggtcagctttgggctgctgagacgggcggcgtgaa

SEQ ID NO: 895608 - DNA, 658 bp, Homo sapiens
tctcaggacatttcccaaacaaaaatagttttactcaatcctcattttagaaattagtattagaatgcctagggaatggatgatagggcaggtgcatgacaaactcagcctgaagtccaaactacaaaggggtttcttttctggatgaggctaggctcaaagctttttttgtttatgatctacactgagacattggaccagcaccttttgttcaaggtgacagtaacataagcctgctcaaataagtaacatttccctttgccactggctcatttgagtggaatgacaaagtttgcttgcgtttgtgtggacagacccacacaaccctggcactgataaatattcagtatgtctttatgttttcacactaagcagcactgaaaagtggtcaactttttgtttgttttttgttttagagagacayctgtaatcctgctgatgctcatgtgctgaaaactatgaccgtactcaataaagaaggagacacagtgttacagctcttttggaattagtctagcagatttctcagttttcactggaaacccttaaaaaggtagaggagagagaggtgcgtggaagagtgagcacaagaaaggaggcatcttacagtttataaacatctgaacactggagctctatcaagattctgtttcaatct

SEQ ID NO: 895609 - DNA, 695 bp, Homo sapiens
tacagctcttttggaattagtctagcagatttctcagttttcactggaaacccttaaaaaggtagaggagagagaggtgcgtggaagagtgagcacaagaaaggaggcatcttacagtttataaacatctgaacactggagctctatcaagattctgtttcaatctctatttgaccacatacgtrctctttcaaagttctgtgtttgaagttatgttagtaacaactgatgcccatcctgcaatgacaaatccaattctcagtgcagctctctgaaatagttttgctttctctctctaggtctgttctatactcctaactctccaggagtttacaaggaataaaatctcttccaaaagctttctgttgcaacaactggaccatactgaaagctgaggcccacaattgcaatctaggttagcaggtaatcattgttggtgaggtcctccctttccccaggctcgtgtttgtattggggagcaggaaatttttgctagagcagcactgccatctctctacactccacctgattggtgggatggaccagagaaatggacattcccaacacagtccctcctttcacatctgctcacctgcccacaggatactttccaccatgcatactgggctctgcaccaacgattcagcagtgatgaagaggaaacttgaacccttctctccaggagctgacaccat

SEQ ID NO: 895610 - DNA, 726 bp, Homo sapiens
cttttcccttgtgtcccttaatagttagaaaatcatatatatataactgtatacagttattgcagtgatactattttaataatgtagtataatgagattcatttgaaattatactgaaactttaaaattggggaagagagatagacgacattatcagagctatatatggattccagattaaataaaagcagaaatatatatcttttatcttcagattcatctgtcttataataattgttactttagttccaatgtgcttgttaagtccagcacctcagcctagtctccttttacaaccattaacatcctcttggcatgaagtcctgacatttccatcttttactttaaaactgatttagtgctgtcagtaatctcccgaaaggattgagatctgtgagctacccagaatgagtgactgtaggtcaggccactgatcccatcaagaggcatctgtgarctaaacattagggggttttgagcacagaactaggggatcgaggcagtagttcagggtctgccaaaccacgggccaaatctaggccattgcctggttttataaataaagttttattgaaacacagctatgcccatttattacctatttcccatgattgctttcacactgcaatggcagtgttgagtagttgcaaaagagaccatgtggcctacaaagcctaaaatatttgttttctactcccctaataggaaaatttggccaacccatgc

SEQ ID NO: 895611 - DNA, 726 bp, Homo sapiens
cttttcccttgtgtcccttaatagttagaaaatcatatatatataactgtatacagttattgcagtgatactattttaataatgtagtataatgagattcatttgaaattatactgaaactttaaaattggggaagagagatagacgacattatcagagctatatatggattccagattaaataaaagcagaaatatatatcttttatcttcagattcatctgtcttataataattgttactttagttccaatgtgcttgttaagtccagcacctcagcctagtctccttttacaaccattaacatcctcttggcatgaagtcctgacatttccatcttttactttaaaactgatttagtgctgtcagtaatctcccgaaaggattgagatctgtgagctacccagaatgagtgactgtaggtcaggccactgatcccatcaagaggcatctgtgaactaaacattagggggttttgagcacagaactaggggatcgaggcrgtagttcagggtctgccaaaccacgggccaaatctaggccattgcctggttttataaataaagttttattgaaacacagctatgcccatttattacctatttcccatgattgctttcacactgcaatggcagtgttgagtagttgcaaaagagaccatgtggcctacaaagcctaaaatatttgttttctactcccctaataggaaaatttggccaacccatgc

SEQ ID NO: 895612 - DNA, 565 bp, Homo sapiens
tgtgctcagttctgaaaatgtgacctctagatccagccaaacctgaaaagttaattcgacttgaatctatgactgcagtttcagattcctctggttttcttggtgtctctcacatttcacaagggactgcatttggggtctttccaaggagttccctatgaatctttcaaaagatgcagacttacacctctgggctttatagcttttttttttttttttttttttgctttatcatatcgtgttttacatttttgtagttcttgttcaraagttgtttagtgcctcctgttgacagtggaaacagaactaggctattgtttcaaaacacagacactaaatgaaaggaattattacagattataaatatatatttcctgggattttatttggtggtggtggtattttaaatttggattacatcatgtcgccattcaacctggactatcagattgttgcttaaaataatagctttaaattatgagaacccccaattcaggatttttggtaagcacttcagcttcacttgtagggggctggtaatatgcataccagtgagttagtttgg

SEQ ID NO: 895613 - DNA, 638 bp, Homo sapiens
ctttctagagatctttcacctccctagttagctgtattcctaggtattttattctttttgtgacaattgtgaatgggagttcatttctgatttggctctcggtatggttgttggtggtgtatagggatgctagtgatttttgcatatatattttgtatcctgagactttgctgaagttgcttattagtttaagaggcttttgggctaggacagggctttctagatataggatcatgtcatctgcaaacaggcatagttggacttcctgtcttcctatttgaatgccctttctttctttctcttgcctgattgccctrgccagaacttccaatactatgtgaaataggagtgatgagggcatccttgtcttgcgccagttttcagggaaaatgcttccagcctttgcccattcactatgatattggctgtcagtttgacacatatggttcttatggttctggagtatgttcctttaataccatgtttattgagagtttttaacaaaaaggaatgttgaattttattgaaggcctttctgtgtctattgatataatcatgtggtttttgtctttagttctatttatgtgatgaatcacattttttgatttgcatatattgaaccaaccttgcatcctggg

SEQ ID NO: 895614 - DNA, 601 bp, Homo sapiens
cccattttgctgaaaatgtctagaacagagatcatctaactagtgggatacagtggtggccctatattcattccttcagttctcatattggttgggtgagacctgggacagctggagcccccggatctgtagcttccaatcatgaacagactcatgtggttattcaaggagttcrgataggcattcttgttgctgcatggtatgaaaaagtttgagattcactgctctggcatggtgttgctacagagctctaaattagcagaatattaagcttggtaaaatccacctgttcttttataattgattttgtaaggataggctgtaattatatataacctgctgcagcatttgatttgtggttattggtagaaatctgtactctgtcatttactctctgtcttggttttctttgttggtaattagcagcagtaagagtgtgtggaaactatttttcctctatacaaagccaagtggaccgtatgataacattacccaagacactggcctcattgctagtgagttcttaccaaacacattaatttgtcccaaaaagcagacttgtggatccagattgtctgcagtgggctgggaatggtgccac

SEQ ID NO: 895615 - DNA, 612 bp, Homo sapiens
gacaggccaaagaaatcttccactttatttaagaagagcctgtgtggttcgaggccagggccgtggacataggattaaccacaataataatacaatgaagtacacatgcaaaatgaaaacttaataatgaagaactactgattttttccagggagtatcaagcacttccttgtaaattcttacaaggcatgaattatttcctagaaatgatttaggctcttttggaaaagtgcattgattcttttaacatcataattccagttacggtaaaacctccattatctgattttctgtgaattgcaaagctattattaactggtacattttatattttaccagtacagtgacagctgatatttataatggtgaccccaaagttctgtaaaatgccgaattacccactcaggaatcaaagaaagattaaattgtgttaaatagagtttttcatgttaagtgtcttattttwttcagatcttgttttagaaagtccaagtgtacatccaccataattttcgagggcagtaccaacttaaaatgttttatcttttcttggctttgtaaacaaaaccttgtaaaaaaaatttttttttttcaatactttgggttcaaact

SEQ ID NO: 895616 - DNA, 642 bp, Homo sapiens
gtctttacttactggcaggcagcaacatgtcctatttacagagggaggctttacctaagtggttatatgtaaatgaaccaccttttcaatgaaacaggatgcacctgtctagaggtgtctgttactagagcaatggatgtttgattggactgacaaattttatttcctttttggaaaaaagaatgtaggtggtatcaaatcaccctttctcctggtaacaataggaattacttcttgaacttgagaaaccagtagttgcttgacytatgttttttgcatttagcatagtcttctaaagtagtaggagcatacgtttttgtctttaattccctgcagaccccttccccaatgatcatcagcaatacatccacccataaatcaatgaaatcataaaaaagaaacataaaattcacttgaaaaagaatacctacaaggcattcctagaattctcaatgtaagtcattttttgccagcaaagctaattgttctcaaatatttgataacaaggatggcatacgtagttcattccaaaacctcaactgtgtgacagacgcaagggcagtagaattgagccccataagctgttgttgtcatgtgagtaactccagccttcatgtgaatttcatatttttctttacaatt

SEQ ID NO: 895617 - DNA, 642 bp, Homo sapiens
gtctttacttactggcaggcagcaacatgtcctatttacagagggaggctttacctaagtggttatatgtaaatgaaccaccttttcaatgaaacaggatgcacctgtctagaggtgtctgttactagagcaatggatgtttgattggactgacaaattttatttcctttttggaaaaaagaatgtaggtggtatcaaatcaccctttctcctggtaacaataggaattacttcttgaacttgagaaaccagtagttgcttgacttatgttttttgcatttagcatagtcttctraagtagtaggagcatacgtttttgtctttaattccctgcagaccccttccccaatgatcatcagcaatacatccacccataaatcaatgaaatcataaaaaagaaacataaaattcacttgaaaaagaatacctacaaggcattcctagaattctcaatgtaagtcattttttgccagcaaagctaattgttctcaaatatttgataacaaggatggcatacgtagttcattccaaaacctcaactgtgtgacagacgcaagggcagtagaattgagccccataagctgttgttgtcatgtgagtaactccagccttcatgtgaatttcatatttttctttacaatt

SEQ ID NO: 895618 - DNA, 630 bp, Homo sapiens
cactccagtctgggcgacagagtgagactctgtctcaaaaacaaagaataagaagaatttctgagtatatccaattttctcctatactcagattcaataactaaagggccctggaaacagcagttcaccttttacacagaactctcctgacayggagaagcattgtcttagaatttggtcgccagctcactgagggcagaggcagtgaggccagctaaattgtagtttttttttgatgcttattttactataaattttgaacctgtgcaaataagtttatgtctcctgcacagccctggttatgctgctggcagtgtactctgagtgtgatctttcttagtcatgttacgggtaggggagagtgactgaacattcgttagggtggtgacataattaaacctgtagtttaattccctgcagtgtctaccagtgaatcctacctataataaatacagttagctaaagttaatttatggcttatttacattcagatgttttcattataatgtttctgttaaaaagtttttattttagttgttttctgtttcttttctcccttttgatccttgaaggtagattaagtaagagattaagaaagaaatctgataagtaaaacgagatagttgagga

SEQ ID NO: 895619 - DNA, 541 bp, Homo sapiens
accagcctttggtatgtcattgccactgtcttttcctttcctgacctttatggttgtaattgctaagaaaaatcctctcttcctcacaggctcatacatagaaagagatgtgactcccgccatcatggaggatgacgagttggccctagacttagaagacttgctgagcttttcttaccaggtggcaaagggcatggctttcctcgcctccaagaatgtaagtgggagtgattctctaaagagttttgtgttttgtttttttgattttttttttttttttttttttttttgagaacagagcattttaragccatagttaaaatgcagaatgtcattttgaagtgtggtaaccaaaagcagaggaaatttagtttcttcatgttccaactgctgtctctttggaattcctgttctaatttataagctgtaaagtacaagcctgtctaaatgagtttttctatgaatattcttttatatgcagtgaaattcttttaaaacttttggcttttaggatataggatatgttcctagagaacagaat

SEQ ID NO: 895620 - DNA, 619 bp, Homo sapiens
ataaatacataggaataccaaggaaaacagttaaatcgaaatagctatgaagatactaagtaaatttgtgatatgtcagtacatgtgtttactatagagtgtaacaggctctgttaggttggtgtaaaagtaattgtgggttttgctattttttctaaaaaaccactgtaattttagagtggtgattaatgtaaatatgattttgagatacctataaagacttaataggatatgaagatatttatgattactgttcatgacaaagtcacaggtacagctgatactactgcgttttatcacctttgttagtaatktaaagaaatgctaaatttcatctagaaattagcgaaaataaggatgtcatttttcctttccaagttcacaggcccctgaatttgacacccatagatctcaggttaggagcccttataggaactttagcacaacatctaggaagggaagggatattggaagttttttgttttgtttttgtaagctgactaaaataactttaacaccaaaaaaaaaaaagaaaaaaaaaaaaagctttcccagttttcaatcctaaatggattaagagaaggattgatttagctttttatggcagattaagattggg

SEQ ID NO: 895621 - DNA, 597 bp, Homo sapiens
ttgactatgggcttgttttctccagatttactccaacttagcaaactgcagccccaaccgacagaagcccgtggtagaccattctgtgcggatcaattctgtcggcagcaccgcttcctcctcccagcctctgcttgtgcacgacgatgtctgagcagaatcagtgtttgggtcacccctccaggaatgatctcttctttggcttccatgatggttattttcttttctttcaacttgcatccaactccaggatagtgggcaccccactgcaatcctgtctttctgagcacactttagtggcygatgatttttgtcatcagccaccatcctattgcaaaggttccaactgtatatattcccaatagcaacgtagcttctaccatgaacagaaaacattctgatttggaaaaagagagggaggtatggactgggggccagagtcctttccaaggcttctccaattctgcccaaaaatatggttgatagtttacctgaataaatggtagtaatcacagttggccttcagaaccatccatagtagtatgatgatacaagattagaagctgaaaacctaagtcctttatgtggaaaacagaa

SEQ ID NO: 895622 - DNA, 619 bp, Homo sapiens
ttttccttttaaaacacttccataatctggactcctctgtccaggcactgctgcccagcctccaagctccatctccactccagattttttacagctgcctgcagtactttacctcctatcagaagtttctcagctcccaaggctctgagcaaatgtggctcctgggggttctttcttcctctgctgaaggaataaattgctccttgacattgtagagcttctggcacttggagacttgtatgaaagatggctgtgcctctgcctgtctcccccaccrggctgggagctctgcagagcaggaaacatgactcgtatatgtctcaggtccctgcagggccaagcacctagcctcgctcttggcaggtactcagcgaatgaatgctgtatatgttgggtgcaaagttccctacttcctgtgacttcagctctgttttacaataaaatcttgaaaatgcctatattgttgactatgtccttggccttgacaggctttgggtatagagtgctgaggaaactgaaagaccaatgtgtctttcttaccccagaggctggcgcctggcctcttctctgagagttcttttcttccttcagcctcactctccctggataacatgagagc

SEQ ID NO: 895623 - DNA, 684 bp, Homo sapiens
attgataaagtcctcatttgtgctcccagggtcctttgtttatgcctgagataaaacaaacaccaacaaccatactaatactacccatctattgagtgctaacagcaaccccgtgggagacactgagtggttaatacacttgtccaaagtcacacagctgttaagaggcagaggtggggctgggcacagtggctcatgcctgtaatcctagcactttgggaggccaaggtggatggatcacctgaggtcaggagttcaagaccagcctggccaatgtggtaaaatcccatatctactaaaaatacaaaaaattagccgggtgtggtgttgggtgcctgttatcccagctattcgggaggctgaggcaggagaattgcttgaaccatggaggtggaggttgcagtgagccaagatcatgccactgcactccagcctgggtgaaaagagcagagctccgtctcaacaaaaaagaggcagargtggtactcacacttgggtcttttttctcaggtcttttggagtctggggccccctggctgggtgtcctgctgtttgatggttctggggcacctagcgtgctaggagataacttaattctaacctgtcttccccactggagtggtagttccttgtgggcagggcctgttccccaacaaacacacaccctcataatttatatatata

SEQ ID NO: 895624 - DNA, 635 bp, Homo sapiens
gtgttgggaagcatttgtgcgcgcacgtgtgtgtgcatgtgtgtgtgtgtgcatgtgtgtgtgtgtgtgtgcagccggggaggggcaggccagtgcccagtgggagaatgggctgggagaggcagccccaaaccccgcacagcccctgtcccccgactgcccatatcagccctggacctggcccaggtccgtggcccatgggtgcgtgtgaggacgcttggtggcagccaggaatgttaatggggctaggctctgcatgagctaaatttaraaacccaaactgagaaggtgaatggtgctcaccttcccggcagcaggcccagttgccgctgtggccacggcccttcctttagctggaggacctggggtacccacccgctgccctgctccctccctccccctgctagtgtgagggactctggggggcaggggcccaggctgcctccccgcaactgcctctgagtcagcgggcagtctctcttcctaagactgccttcctaaaacagccttgctcctgccttacagccccagggcacaaggaccccccagagaacccccagacagtggtggacacagccccgagcaggactggggacatggccttctccccgcccccactgctcacatcactggcc

SEQ ID NO: 895625 - DNA, 577 bp, Homo sapiens
gagcggatcatgaggtcaggagtttgagaccagcctggccaacatggtgaaaccccgtctctactaaaaatacaaaaatcagctgggtgtggtggcatatgcctgtaatcccagctactcaggaggcaggagaatcacttgaactcgggaggtggaggttgcggtgagccgagaccgtgacattgcactccarcctgggcgacagagtgagattctgtctcaaaaaaaaaaaaaattcctgaaataaagcaagcatgctgtaaggattgtgtagcttaaaattttataagaaccctctaaacaatcacctgtgtcaccacagaggcacaccctgcactgggtcagacactgtcctgtgaggagctgtgttctcctgacacttcatgtccagtggtttccatgactcttctttggggccaagggttccctttcatcataggttgttgtcatgcagagtcaagcaacactgagcactgggaaatcagagaaggaacttccaggcaagggtcccagtgcagaagccagctagagaggacagtagtagactcaccctttgggaaatatgtttgagaaatat

SEQ ID NO: 895626 - DNA, 588 bp, Homo sapiens
tgggaataaaaaatatacattgagttacaaactaattaccaaaagatatttaaaaaatggtagacttgcatcgattcagacaaaggcattcttcccatccaaactgttcactggtgcattgatcttgaatttgaccatctggggaaggggcgtggcctctcctgacagcaaggctctggggcccaggcagggagaatgaggtctcagaatgacgcccttgaaagacgtgttcccttttcaccaatgcacagacccagaggacccctccatcctgcagttcctgccatgagcctcgggctcctgtgctgtggggccttttctctcctgtgggcaggtgggtcctgggcggggccccttgtgtggatttcaaggcccatcccctttccactggagcwgtagcatcagctttgtccttctctgcaggtccagtgaatgctggtgtcactcagaccccaaaattccgggtcctgaagacaggacagagcatgacactgctgtgtgcccaggatatgaaccatgaatacatgtactggtatcgacaagacccaggcatggggctgaggctgattcattactcagttggtgagg

SEQ ID NO: 895627 - DNA, 610 bp, Homo sapiens
agccaagtaatttgtatcatcatgggaataaaaaatatacattgagttacaaactaattaccaaaagatatttaaaaaatggtagacttgcatcgattcagacaaaggcattcttcccatccaaactgttcactggtgcattgatcttgaatttgaccatctggggaaggggcgtggcctctcctgacagcaaggctctggggcccaggcagggagaatgaggtctcagaatgacgcccttgaaagacgtgttcccttttcaccaatgcacagacccagaggacccctccatcctgcagttcctgccatgagcctcgggctcctgtgctgtggggycttttctctcctgtgggcaggtgggtcctgggcggggccccttgtgtggatttcaaggcccatcccctttccactggagctgtagcatcagctttgtccttctctgcaggtccagtgaatgctggtgtcactcagaccccaaaattccgggtcctgaagacaggacagagcatgacactgctgtgtgcccaggatatgaaccatgaatacatgtactggtatcgacaagacccaggcatggggctgaggctgattcattactcagttggtgagg

SEQ ID NO: 895628 - DNA, 609 bp, Homo sapiens
cagctctatcagatcaattttgttctttcataaaatagctatttcatttttcagctaatgtgtcattttattggattcatcagattccttagattgactttcagctttcttccgaatcttgatagtgtttgtttctaacctgtttctgaattctatgtctatcatttcagccgcttcagcctggttaagaatcattgttgggaagctagtgtgttcatttggtgctaagaaggcactctgactttttaagttgccagagttctttcactggttctttctcatctctgtggtctgaggtttctttaatcttttaagctgatgtcttttggaagggttttttgcttttatattctatgcccttgagggtttcactgttacataagctgggttcaggagactggcttcatttatggaatatttcagggggctaagattcagctcagtatktctgggctgcgtgttgtaggcctgtggtgctggaattaagcccagagctttggtttttgaccccttaaggttaaagcacctgctacaccagaggggctgaggcgttcccaattccactggcaacaacactgcaatggggaatgccagccaaagtactttttc

SEQ ID NO: 895629 - DNA, 581 bp, Homo sapiens
gtggtgtattttcaaatagcctgtcttcaagctcactgattcttctgcctcatcaattgtgaggttgaaaccctgatgcattcgtcagaatgtcaattgyattttcagctccaaaatttctgcttgattgtttttaattatttagctctcttccggattctgaatttcttggctgtgttgtcttgaattttgttgagtttcttcaaaacagatattttgagttctgtgtctgaaatgtcacacatctctctctctctctctgggattggcctctggtgctttatttggttcatttggtgaggtcatgttttcctgaatggtcttgagacttgtggatgtttgcctgtgtctgggcattgaagacttaagtatttattgtagtctttgcagtctgggcttgtttgtactcgcccttggaaagcttttcaggtatttgaatgtacttgggtgttgtaatctaagttttctatctctgaaaccttatctgcattagggagcaccccaagtccagtaattctgtggtccttgtggactcacagatatactgccttggtggtcttggataagatctgaaagaattc

SEQ ID NO: 895630 - DNA, 581 bp, Homo sapiens
gtggtgtattttcaaatagcctgtcttcaagctcactgattcttctgcctcatcaattgtgaggttgaaaccctgatgcattcgtcagaatgtcaattgtattttcagctccaaaatttctgcttgattgtttttaattatttagctctcttccggattctgaatttcttggctgtgttgtcttgaattttgttgagtttcttcaaaacagatattttgagttctgtgtctgaaatgtcacacatctctctctctctctctgggattggcctctggtgctttatttggttcatttggtgaggtcatgttttcctgaatggtcttgagacttgtggatgtttgcctgtgtctgggcattgaagasttaagtatttattgtagtctttgcagtctgggcttgtttgtactcgcccttggaaagcttttcaggtatttgaatgtacttgggtgttgtaatctaagttttctatctctgaaaccttatctgcattagggagcaccccaagtccagtaattctgtggtccttgtggactcacagatatactgccttggtggtcttggataagatctgaaagaattc

SEQ ID NO: 895631 - DNA, 609 bp, Homo sapiens
tctctctgggggccacgttgcttcctctctccagggtttcctccagtacccactctcatgtggtctcacctgtggcccgcctttcccatctgagcagtcacccccgaaggccttgctgggcctctgcacaccacctcccctcgcctttctactgcagccatgaggctgcctcttctgtgcctccttcctttccaacacagagacctcaaaggccatttcctccrccctgggctagtgccttcctttctgcagtggtcagcttctacctgcacttctgatctcagcatgatcagcctctcctgctggaagcactccctcaactctcagctgaggtcaaatttcagtttccctctcataagctcacagaatcatgtgcctcttagtaaagttcagcaccgttgcaatttttccaacacttgttttattccttttgtgctccacttaattttaaactcatgaagctgaaggctgagcttgttacattcaccaccagcagtgcctggcaggcagggagtcctcattcatttcacagagaatggatgagtgagtgacaggtgagtgagtgatgagtgggtgaatgaaccagtaacaggaacacactagattcat

SEQ ID NO: 895632 - DNA, 578 bp, Homo sapiens
ttgggaaacaccagtgcaaaaaacagacaaagcttcaagttgaggtagacaattttaacacataattgttataatttattatacttaataataaattaatttaaaagtagaaggatatattcctggtagatgcttatctycccggagaagttagagtgtcattgagaatatcaacattcttggtaaatcatacctgatttagggaatgatccttggagctctggaattctacatgccttaccttgcaaaatgaaggtcctgatctgaaaagttttttttttttttttttttttttttatgccctggcccaaccatgaggattggcttctttgctgtgtggctcttggtctcccaggatcaggtgagttctgggcatagatgagaaagtccttcctgggcttgtcgggccccaaccacggcctcctatgggggtgctcatgggcctcctccctgtctccacttctgattctgtgtcctctctcactggagcatgattgtgggaattacccatccaggttgcatcaagatgtgcaatagatagcctattgtatctgaaataactattgcagtgttatgga

SEQ ID NO: 895633 - DNA, 578 bp, Homo sapiens
ttgggaaacaccagtgcaaaaaacagacaaagcttcaagttgaggtagacaattttaacacataattgttataatttattatacttaataataaattaatttaaaagtagaaggatatattcctggtagatgcttatctccccggagaagttagagtgtcattgagaatatcaacattcttggtaaatcatacctgatttagggaatgatccttggagctctggaattctacrtgccttaccttgcaaaatgaaggtcctgatctgaaaagttttttttttttttttttttttttttatgccctggcccaaccatgaggattggcttctttgctgtgtggctcttggtctcccaggatcaggtgagttctgggcatagatgagaaagtccttcctgggcttgtcgggccccaaccacggcctcctatgggggtgctcatgggcctcctccctgtctccacttctgattctgtgtcctctctcactggagcatgattgtgggaattacccatccaggttgcatcaagatgtgcaatagatagcctattgtatctgaaataactattgcagtgttatgga

SEQ ID NO: 895634 - DNA, 603 bp, Homo sapiens
atgaaggtcagctgattgacaacctgactttgtgtggaactttaatttttcttttacaagtaacttaacacattcctaggttccagagattagacctggacgtggttggagggcctttgttctgcctaccaaacctaggaacttggtaagagggaggaaaacaaaatgatcacctggaaaccagaatactgaccaccgttttacatcccaggcctaacagacacaaaaagggatggagcccacaargaaatagacacctcaggtctcacaagctcgtctgtaaactatttgctccttaggatcggaaagtactctggggtgcaggggactcagcagtatgcctctgtgccagcagcaaaaatgtggccctaaactgctccttcttggttagcaattaacccagttgaccaacccacagagcagaggcttctctcagctctgtacactctacaccctgagaggaagtcggcttctgagatgcaagactcttttataaggaaaagtccagttgtaaagattaagaaactttgagctttgctagaggtaaaaataggatgtaagtcaactctggagcatttaatttccaaatgtttatgaaaaaga

SEQ ID NO: 895635 - DNA, 665 bp, Homo sapiens
aataaggaaactgacacatgactttgctgagatggaattatattaaagttctgtgacactcacaaactcatctcatgctgattagaaactgtgattggcaatgctgtgtgttacaaaaaaattaaaaaatgattcctttaaaaacattatttctttaaatcagcattttccaaaaatgggggaaatattaaatactatccaattttggtggtgcaaraaataaaaaagcttaggggcttccagtacccctgacccagctgaccttcctttcccaggcccatgtcttttaatgtgcatttactcagggaaagggaagtgtggctgtgcaggaaaagtggcaatttagaaaacacaggctcaagggcttgatggagggtcccagaagagggcagggcactggtgatcagaggggattagagggcaagctgctagggtaagctgtgcatcagaagtggttccttttgtttccttcagcagtaaatttttattatcattattactttagctgtcctccatatctacttctttagtatggctggctacttctctttccaactctttatgcactaccgtggatctcaccctaggcagaaacaaatccccaaactctcaccagctgcgctcatgaaacaacccttcctggcaggctgtgatctcgccaagag

SEQ ID NO: 895636 - DNA, 665 bp, Homo sapiens
aataaggaaactgacacatgactttgctgagatggaattatattaaagttctgtgacactcacaaactcatctcatgctgattagaaactgtgattggcaatgctgtgtgttacaaaaaaattaaaaaatgattcctttaaaaacattatttctttaaatcagcattttccaaaaatgggggaaatattaaatactatccaattttggtggtgcaaaaaataaaaaagcttargggcttccagtacccctgacccagctgaccttcctttcccaggcccatgtcttttaatgtgcatttactcagggaaagggaagtgtggctgtgcaggaaaagtggcaatttagaaaacacaggctcaagggcttgatggagggtcccagaagagggcagggcactggtgatcagaggggattagagggcaagctgctagggtaagctgtgcatcagaagtggttccttttgtttccttcagcagtaaatttttattatcattattactttagctgtcctccatatctacttctttagtatggctggctacttctctttccaactctttatgcactaccgtggatctcaccctaggcagaaacaaatccccaaactctcaccagctgcgctcatgaaacaacccttcctggcaggctgtgatctcgccaagag

SEQ ID NO: 895637 - DNA, 626 bp, Homo sapiens
cataatgatgagatttcaggactctgctgccagtgtgaatgtgtgcatggacactggctacccacacctccccttcactttgccatggccaccagtgtgatcatgcacacagagggcagcaggccctgccacaggtgcaartgcaagcacagacctcggcaaccctgtccccacctatgactcactgctggcatgagcatgtgcaggaatgtcacagccccgcttctgccagtatccccctgccccagccaacatgcatgcatcctgctgtgctgtgccacggctgccagcacaacccgtcggagtgttgtggccagtggaccaggaatacctcggccccctcagcacagtaggttcctagccttgaggggccagagaagaaagctggggtcctggaaccagctccccagggttagagcacacagctcaggagtgctaagctgagtcttgggacccaaaaatcttccagaaacaaccccagggaactgaacccaccttataccacagtcaaacccccaagggcatcaaagaaaataaaagcaagtaaacaaacaaaaaatcatccaaagtatagtgccttcaaagattgaagaaacatcagcccacacagtgagaaagaaccagtg

SEQ ID NO: 895638 - DNA, 626 bp, Homo sapiens
cataatgatgagatttcaggactctgctgccagtgtgaatgtgtgcatggacactggctacccacacctccccttcactttgccatggccaccagtgtgatcatgcacacagagggcagcaggccctgccacaggtgcaaatgcaagcacagacctcggcaaccctgtccccacctatgactcactgctggcatgagcatgtgcaggaatgtcacagccccgcttctgccagtatccccctgccccagccaacatgcatgcatcctgctgtgctgtgccacggctgccagcacaacccgtcggagtgttgtggccagtggaccaggaatacctcggccccctcagcacagtaggttcctagccttgaggggccagagaagaaagctggggtcctggaaccagctccccagggttaragcacacagctcaggagtgctaagctgagtcttgggacccaaaaatcttccagaaacaaccccagggaactgaacccaccttataccacagtcaaacccccaagggcatcaaagaaaataaaagcaagtaaacaaacaaaaaatcatccaaagtatagtgccttcaaagattgaagaaacatcagcccacacagtgagaaagaaccagtg

SEQ ID NO: 895639 - DNA, 683 bp, Homo sapiens
aagccctatacaaaaatacttacaaactgaatccagaagcgtatcataaagctaatccaccatgatcaaataggcttcatccttgggatgcaaggttggttcaacatacaaaaatcaataaatgtgactcatctcataaacagaactaaggataaaaatcacatgattatctcaataaatgcagaaaaggcttttgataatattcaacattacttcatgttaaaacgcttaataaaccaggtattgaaggaacacacctcaaaataataagagccatctatgacaaaaccacaaccaacattatactaaatgggcaaaagctggaagcattccccttgaaaactggcacaaaacaaagatgccctgtctcaccacttctattcaacrtagtattagaagtcctagccagagcaatcaagcaagagaaagaaataaaagacaaccaaatgggaagagaggaagtcaaactatctctctttgcagatgacatgattctatgtcaagaaaaccccatagtgttggcccccaagctccttcagctgataaacagcttcatcaaaactgcaggatacaaaatcaatgtacaaaaatcactagcattcctatacaccaacaacaaactgagagccaattggaaagttagtcccattcacaattgccatgcacaaacaaaaaaaccccca

SEQ ID NO: 895640 - DNA, 614 bp, Homo sapiens
agtacatagagggatgaaagcccagctagcccccagcccccatagaaggaagatcaagatttgacaactaggagaggcatgattacaccatgcagcttgatcaaggactgagaaagctttctagacaaatgacaggtaatgacccacactgtgaatcggtattgaacgtgagatgtcaatatatattcatatatccacttatatatctaaaataagaagtccttacaaaccctgaaaacataaaccctcactattacaggatgtgcaggtgatttggatcctgtgaagaccctcaaacaggattaaaatccagtaggcagaggtctctgattctttgttagctacagaggaagatgtgctatgatggacacctagggggtctgggggtcttcccatycccttcccagatccacacctagaggaatgtcaggcagcacaattcagagaaccaccagaaaagctgtgagaataggactccaatctgaatccagcttctctcagctctgcaccccttgctgtgtaggagtcagtgcaggagaaagctgactgggtgagaagagaagggatcctgaaccatgccagaggagacctgtgaactgggaaatgagcagcaa

SEQ ID NO: 895641 - DNA, 642 bp, Homo sapiens
gaatcggtattgaacgtgagatgtcaatatatattcatatatccacttatatatctaaaataagaagtccttacaaaccctgaaaacataaaccctcactattacaggatgtgcaggtgatttggatcctgtgaagaccctcaaacaggattaaaatccagtaggcagaggtctctgattctttgttagctacagaggaagatgtgctatgatggacacctagggggtctgggggtcttcccatccccttcccagatccacacctagaggaatgtcaggcagyacaattcagagaaccaccagaaaagctgtgagaataggactccaatctgaatccagcttctctcagctctgcaccccttgctgtgtaggagtcagtgcaggagaaagctgactgggtgagaagagaagggatcctgaaccatgccagaggagacctgtgaactgggaaatgagcagcaacagcaccaccacagacacacactcgccaggcacagggagaggacagatcctggcctcttgtagcaccagagctctgaacgccctctacctgctcagtctcccatgggatctaggctcttctcctgggcgctggacatgccttggtttctcaaaaccaggtgtgtcctggatgcacctggg

SEQ ID NO: 895642 - DNA, 603 bp, Homo sapiens
acatgaaagtatatttcaggtacatttactcttaactataaacagaaaaacttaaatttcactaaaagaaattaaggaaaatatttttatcctttgagtgaagacttttttagtggaaacacaaaagaacacatgccataaaaaaataatactggatgggcatggtggctcacacctttaattccagcactttgggaggcctaggcgggtggatcacttgagcccaggagttcaagaccagcctgggcaacatggcaaaacctcgtctctactaaaaacacataaattagcygggggtagtggcgtttgcctgtaatctcagctactctggaagctgaggcacgagaatcacttgaacttgggaggcggagggtgcagtgagccgagatggcaccactgcacttcagcctgggtgacagagcaaaactccatctcaaaaaataaaacaacaacaacaaactgacattagttgtattaatcatgtatcgaaacacatgataaaaaatgaaaagtcaagccacagcctggaaaaggcataaggaatgcatgcaaatgaggaagaatcagcatgacaccatttatgttcacaaaagtcccttggct

SEQ ID NO: 895643 - DNA, 652 bp, Homo sapiens
tcccaacctagcaagacacaccaacattcaaattcaggaaatgcagagaaccccagtaagatactccatgagaagataaaccccaagacacataatcatcggattctccaaagttgaaatgaaaaaaaaatgttaagggcagccagagagaatggccaggccacctacaaacggaagcccatcagactaacagcagacctgtccrtggaaaccttataaagtacagtggttggaagctattctttaacattcttaaagaaaagaatctccaacccagaatttcatatctgaccaaactagcttcgtaagtgaagaagaaatacgatccttttcagacagcaaacacttaggaatttgtaccacaggactgccttgcaagagctcctctaggaagcactaaatatggaaagaagaaaaccattaccagccctacaaagcacactgaaatacacagaccagcaacactatgaagcaaccacataaacaagtctgtgaaataaccaggtagcatagtaatgacaggatccaacttacccataacaatactaacttttaagtgtaaacagggtaaatgccacaattaaaagatatagaattgcaagctgagtaaagaaccaagactcactgatatgctgtctttaggagacacatc

SEQ ID NO: 895644 - DNA, 669 bp, Homo sapiens
ggagaagcagacaagcaaaagcctagattgctgaaatagatcattaagggtaattctggtgaaggctcagggggaaatgaggaacaagatatcggaaatcaaagtaaatgctatccttgttgtaggtagcaaaaaccttggaaaaattgtgtcctgttctaggactttctggaataaaaatattatgagctattagctaggatatctactgaaggaaatatctaagcagctaagcattcaggctattgtggactactttcaggcaccaggaaatttaacccakcaagaaaggagccaagggaatagattttgcaaaccagcacagatggtgacactacctccctctgctgtcctgtctccaataagacaaactcgctctggagttagagaaaagaggagccagttaacataatacactggggtcagcttctgaaggcagggtggatctgaagggaataacataaactgtccagagcactacgtataggatgaccttgagggtgctgagtcccaagctggctaggtctgtgctatgagctgagaaggccctagaattatttctggggaatctgaactcttgataatttacagacaacacaggtctgctttgattctgatcagatggactaaatcttggggactctgcaccgctggccactcaggaaatgg

SEQ ID NO: 895645 - DNA, 577 bp, Homo sapiens
ccgcctcagcctcccaaatttttgggattacaggcatgagccaccgcgcctggccaaaacttttcttatttttatcaccactgactagcttggtctattcttgaactccatataaatggaatcatataacattttattgagttattttcctccaaaattagtatttctgaagtttattcatattgttgtatcagtaggtcattttttcttatgactaatattccattgcataactataccacaacttgtttatccatgctcccgttgatggatatccacrttactcctgtcttcaactattatgaatacagttgttgtgaacattcttgtggaactctttcttgtggacatatacattctttttttttattttattttaggtataaacttaagagtggaaatactgacttacagtgtagatgtgtgtgctatgcttgcgtgtcctcacaaaagctcatgttgaaatttgtcattgtaatggtattgggaggtgggacagctatgactaggtcatgagggatctgccctcagaaagagatcaatgccgttattgtgggagtgaattagttgtcttggg

SEQ ID NO: 895646 - DNA, 703 bp, Homo sapiens
ccacatgggtgaaggtttatgacttgactgtaggttgaaggtggcagcaggtagagggaggactagcaggcagagggcagagtcactggctggcaggggcagtggcatcatcagttgactctactgacatccaggaattatgttcccaatgcgcaagttgaaaaactccccacaatttgcytattattccttgaccctgccatgaccaccagactcctcaatggtttggccgtctgccccctgagggcaggtgagtcccctaaagccttttccttggctcaccacatcccagcctaagcctttacctcaagtctacattattggggtccctctttgggcactcaacttccttctatcatagacttcacagaagctgggacaaccagatcccaagataccagagaacaaaggcaggacgtgaagtgacatggagatgcctgagactgccatccatgactacatgtgtaggtgttaataggagccaaggctggtgcacagctgatccgtcccagcacacactatacagaatccctgagggtctgtgactttttctcaaagccaaatatgtggccttggtgtcagacagcctctcccagacctctgtgcccccttgcaccagctttcaccccacagccaccttcctctgcacacaaagctcagtggtagatatagttggccttgtcttcatgagattttgatccag

SEQ ID NO: 895647 - DNA, 591 bp, Homo sapiens
ctgctcactacagtctctgcctcccaggtcaagggattcagcctcccaagtacttgggattacaggtgcatgccaccatacccagctaatttttttttttttgtatttttattagagacagggattcaccgttttggccagactggttttgaacacctgacctcaagtgatccaaagtactgggattacaggcgtgaaccacctcttctgtccgaggccacattttttaaaaaataatttcaaattttattttasattcagggaggacatgtgcaggtttgttacactggtatattgtgtgatgctgaggtttggggcacaaatgatctcatcactcaagcagtgaccatagtacccaataggtagtttttcagcactttccacactccttctctcttccctctaacacttgcagtgtctactgttcccatctttatatccatgtgtacccaatgctcagctgccagtatacatgagaatgtgatatttggttttctgttcctatgttaattcgcttaggattgtggtctccaactccatccatgttgctgtaaaggacatgatttcattcttttcatggctacatagtat

SEQ ID NO: 895648 - DNA, 659 bp, Homo sapiens
ctgtcaaggtaaattctgcatacaggctgaatgcattgtggtaaaacactacatggaggaagaggaggaatgggattaaagaaaaggaggcctagaacagtgagaggggctgagagaggccatgtcgaagttagttgaggaagactgtcaggggagagaagagaagtctgaaagcagagaaaggttgggaaagaggagggagccctttgttgagagcctgcttgcttcaggcctcaggctggacgctgctacctgtgctgtctgcatctgcacaatgatcccaggaacaggtattattttccccatgttatagatgtggaaactgaagattacagttcaaattacttatgagttgtgaaacygtggcatgttctgctgaagatggcaattctggaaactttttccaagtagttaccaggatggtgggattgctcctggtatctgggtgatcctagagcagcttctcccaaactccaggcagggcccatggtaacacactgaagacaccttaatgccttggtgtctttgtttcccacggctgccgtaacaaagtaccactggtgggtttaaaacaataaaaacttattctctcacagttctggaggctaaagatacaacaccaagatgtcagcgggtcatcctgtatgacagctctaggg

SEQ ID NO: 895649 - DNA, 659 bp, Homo sapiens
ctgtcaaggtaaattctgcatacaggctgaatgcattgtggtaaaacactacatggaggaagaggaggaatgggattaaagaaaaggaggcctagaacagtgagaggggctgagagaggccatgtcgaagttagttgaggaagactgtcaggggagagaagagaagtctgaaagcagagaaaggttgggaaagaggagggagccctttgttgagagcctgcttgcttcaggcctcaggctggacgctgctacctgtgctgtctgcatctgcacaatgatcccaggaacaggtattattttccccatgttatagatgtggaaactgaagattacagttcaaattacttatgagttgtgaaaccgtggcatgttctgctgaagatggcaattctggaaactttttccaagtagttrccaggatggtgggattgctcctggtatctgggtgatcctagagcagcttctcccaaactccaggcagggcccatggtaacacactgaagacaccttaatgccttggtgtctttgtttcccacggctgccgtaacaaagtaccactggtgggtttaaaacaataaaaacttattctctcacagttctggaggctaaagatacaacaccaagatgtcagcgggtcatcctgtatgacagctctaggg

SEQ ID NO: 895650 - DNA, 582 bp, Homo sapiens
tattttttttattgtggcagaacttatgaatcatctccctccaacagacatgatattttctattcgccatccccctctcctatagactcaactacatgcctttctctcccatctctatccatagtctttatctctgctgctggtggactcctgagagggcttcttggggaatatggggccccaaaaatgagtgaatggcttctgtaggtcagcaaaaaggatctgaaaatgagcctacacctgtgactatttccaaaggatttttatcagcttgctctgcaactgatctcaactgccctctgtgaatatgagcatttaatccacacaacatgtaaagctaattctcagctcctttttgccaacctacagttgctattcacttatctctgggaccctatagtcccyccaaaagccctctcaggtgtctacatgcaacagagtgcccatattctggcaagaacccataaatctatgcgagacagaatcattagaaactttaaaacttgagtttttggaatggaaaaaaagcatgtagtggatggatgaaaacattatcatagcaaagaagatgttgtaatgcag

SEQ ID NO: 895651 - DNA, 679 bp, Homo sapiens
agacaatcaggaatagactcaagagtgtcaaaccaacagctcagactctgcattcacgggattggggtgagggtgaggatgagaaaagaggcttgccagagaggagggcacccaccaaagaaagtgcccaggagaagggcaaggagagagcagagcatcatccaagccagcctttccttcagctagtctgggggacagacgcctcctcttctgggccagtgatgtggtcaggctgctccctctgggagatctgctgccagagcagaggaatcctaccccatgagctggggaggaaatgaggctagtcttcttttaagagtgtggtgaatcacccccagcctccctgggaaccagctatctctgcacttgttatcktctttgcattcctgctgacatcctggtatgtaaatatatttaatgactcattatttacctgtaaactaaaggtaactctccagctcccccgggagacatcagaagcctgggaaagcttcagagaaactgtgatactgatagaaggatgaaaaaagattttagtttatctgaaattggaaactagagctagacatgttacctgggagatgaaaggatagggctcaagagattcaggtattttggggtaatcaaagcagaaatgctcagttctgagggcaggaagcttctatgacagccaaaggga

SEQ ID NO: 895652 - DNA, 572 bp, Homo sapiens
ctgaagccacctagactctaagacacctgattgcagagacaggaaaggagttctcaagataagtgccaagatttcatactggttttcacaagaatcagggttggaattagagccgactcattattcagttaacattgacattgttgattagagacatatccctattgaaaatatttcctggcaaaaaatagaagttctctttggctctgaaatctgcaactccctttcagrtgtccctgtgtccttgtaccgtcactccacagcactgcacaggcatgtgctcacctcacaaaatggcagtctcaaagggaggagtgcccacccacaagaggctccaccctattctgagaaagaacttctttcagaggaggagagaatagaactttccagaaccttttacatgagatttttttttttgggtaggaagtctgacctgagcagcaaccttgcatcagacttcaaaaggcaatatttcctatacctccttgtgctctactagtgagtacagaagtcgagaaaatgttcctaagtctatggccagttcaaatagtctcattttctatttctgagat

SEQ ID NO: 895653 - DNA, 662 bp, Homo sapiens
actttcctaaaatatcttacctaaaaccacctctgtgaagccctctttcttttcccagacagatatggaggtttctttctttatgtgtttataataaattaaacaaacttcaacttctatcactatgttatgatatttatggtcatgtctgactcttcctagactagtatggtttttgagggattggactatatattcgcttacctttgtaaatccagtatgtaggacttggtacaatatattggatacagaattataagcccgatgggagcagacacctttatttgttgttcatgcttatatcccagaatctagtactatgtctggtgcatgtagtaagagtgaggcaagaggatgcaagtcagaaaaaggctatgtgacaatggaagtagagatcggaatgacagacacactttgaagatggaggaagggccctgagcccagtagtgcagatggcacctagaagctggaaaaggcaaagaaatggattctcccataaagcctacaaaaggaacacyacctgccaacaccttgatttttagccccataagactcatttcagacatttatcctgaacaggacagaagcaaaaaaatggaatcgatcaacataaaagcagaagtgaataaggtagaaaatgttttaatgatagaactaagaaa

SEQ ID NO: 895654 - DNA, 588 bp, Homo sapiens
attggaggtcattcttggaattctgcctatcatatcaatggaggtcaaatgccaggaaagtcaagaatagaaattcagagagcatacaatcaaatacattaaattagaattcaaaactattcaagagatggttcagagttttggccatgcagtgcatcaaattttcttactactgcttaatcaaggacatagtgcagaagtagaatgaattggtctttattaaaatggaacaaagaccaggtcgaggaaggaaaggcaaaaaggtagaatagatttggctcttactggaagaacactggagattmaagacgagaaacaggattgttttagtccctgagttaacaaaagagaagaaagatgaaaccagaacagttgccaatgaaggagcagtgaagtggaaaggcagaatggagtgagtgtggagagcacttttctgaagagaataaacttagttatcagatgaaaagagatatataattagctttgtccttataaattttgaggtaacttactatggaaatactttttcttatcagttaattaatttggggggaggtagcacaatcctttgaaattccaataagtaga

SEQ ID NO: 895655 - DNA, 602 bp, Homo sapiens
gagtttgaatcagacgatgccacttttaagggtggatttgtcagagacatgtgaaccacagcaactccatcttaaataggagctgggtaaaataaggttgacacctactgggctgcattcccagatggtgaaggcattctaagtcacaggatgagataggaggtcagcacaagatacgggtcgtaaagaccctgctgatgaaacaggctgtagtaaagacgctggccaaaacccaccgaaaccaaaatagtcccaagagtgacctctggtcgtcctccctgctacactcccaccagtgctatgacacaaaygccatgacatcaggaagttaccctgtatgttctaaaaaggggaagcatgaataatccatcccttgtttagcatataaaaggatataaccataaaaataggccacaagcagccctcagggctactctatctatagagaagctattcttttattcctttattttcctaataaacttgctttcactttatgctatggactccccctgaattctttcttgcttgagattcaagaatcctctcttggggtctggataaggagcctttcctgtaacagctttctggtgatgatgaag

SEQ ID NO: 895656 - DNA, 607 bp, Homo sapiens
ttggggttgcagatggccatcttcttgctgtgtgttctcacacagaagaaagagagtgagctagctctctggcctgttcttataagggtacttatctcatttaggatggtcccaccctcatgatctaatcaccttccaaaggacccatttcctaataccatcaccttaggggtcaggatttcaacatataaattttgcggggacacattcaatccataacagattctttcctgttattattttagaatgacatggactctttcccagtccatttgggttaggattcttattcagcctggaggcagagccgtaccctgtatggcctatcacattccttttagcctgggtctctgkttacttgtagaacccttatttataattattgtctaatgctgggattctccagagtgctgcttggagaaatttagcctcttagagacagttgcaataaaagaattctatcaaaaagaattcactgaattgtgatcacaaacaaaataactttgtggggataaaatgtactccaacaagggaggcttatgtttgtttttcagcctctcctcccagtgctgcacttctaatctctctgcagaaagaaacatttcaa

SEQ ID NO: 895657 - DNA, 609 bp, Homo sapiens
aaggcaaggaagtcctatttctttttataacatacatgcaaccatgccacgggaggatatgaaatgtagctcatgaattatgtttatccttaagttctcttggggctataataattagaaagagacaaagtgctgattctcaaccagtatccctaggaggcactaggaaatggaggaggtgaggacatttctttgatgtctcagcaattggagggcaaaactgacatttggagagttctcaaaatgttgctaamagttctgtagtgtgttagcaccacagagcgaagacttttcctgcccagaatgccaatagatcccccttgggaaacactgacctcaaatgggaggttgtcaatgctgcactaaggcaaaatgagctccttgtcctgggtcctttgatttctcattttgcaaacttaggtgtctggcagatagtcaatgactaaaggaatcatctagtggtgaaatgatggtaagtcacttatccattcaataaatatgtattatgtaccatctgtgtacagtgaaagtactgctattgaccaagagtctctccttgaccaaacgttaatcaggctcctctgattctctccctaatcaggccttaac

SEQ ID NO: 895658 - DNA, 579 bp, Homo sapiens
tccttcaatcctgtttattagcatatggaaaacacatttgaagataaccagatataaattcaaggccttgaatccaaagccgtcccaaactactgattccctgtgttcttccaggccctcagaagatgtcggttaaaggaaatcataaaaagtcaaactatagcctctgtgttatgtccccactaaagccagtatggccagactttactgtagctgagaggttcttgctcatggagtcttgaaatagagcttcccaacttcagcagagatgcctattatacaacattaaataaaagaygaatttaaatgaatcaagtcttgactcttcttccaccatcatgggttttacagaacagcattatccagggctccattcaaggtaattttgctttttcattgcttgacaaatgctttcccatttccctgcaccctagacaaattggtatttctcagcagctcttagaatgacaatggcagttttctcttcatcgttttttcatttcttcatcctctcgccatgagaggcactcatcaggggatctctaatcctacccatctcattacctcttcactctattt

SEQ ID NO: 895659 - DNA, 634 bp, Homo sapiens
agaagaaaaactggataaaggcagaataaaaacttggaataaataatattactgaaattacttagcaatgttaataatgttaaatgtgtctgtggtaggcctgaccttctggctgtccattattccatatgtggtcttttctgactggcttctttcacttactgtaatgtttataaggttcatccatgttgtaacatgtatcagtacttcattccttttttttacaagatgatattgaattgacaggatatgccatgtttgtccattcagaaattgataagatatttggcttgtttctagtttttttgtttgtttgtttgtttgtttgtttttgagacagtcttgccctgttgctcaggctggagtacaatggcacaatctcagcwcactgcaatctccgcctctcaggctcaagcaatcctcccacttcagcctcccaagtatctgggactacaggcacatgccaccatgcctggcaaatttttgtattttttgtagaggtgaggtttcaccatgttgcccagactggtcttgaacttctgagctcaagtgatccactcgcctcagcctcccaaaatgttgggattacaggcatgaacgaccacgcctggccttgtttctagtttttagcaag

SEQ ID NO: 895660 - DNA, 629 bp, Homo sapiens
taaagctcaatgaatgaattttacatgggcacagtttattatatacacactataccccaataagctttttttttcctaaaagacagttgaaattccccaaagacagatcaaaaagataagttgctgtattattctattgaagtttaaaaacagataaaatcaatccatgattattaaaatggtgtatatcttgcagagcaggtgttcacttagtgaacaggaaatttctgggtactagtgctagtgagtggtattttctacatctttgagaaatagttacatgggatgttctattttgaawatatttattgagctaaacacttaaaatgtgtgcacttttgctgtttttgtcatacttcaataagaaaatttaaaggtggaggattgagagaaattaaagaaaatccaagagacaaagcaaccaaaggcaatgcatggatgtcatatggcttatgattttaaaaactcaactgaaaaaaatgtgaggaaatgaatgaaaatcaaacatggactatttatcatatattaaagaatgcttgctcattttattgcatgctactgtgattacatttaaagtccttatctgctaaataaacatactaaagtatttataggtgaaataattgagt

SEQ ID NO: 895661 - DNA, 576 bp, Homo sapiens
catcaggaaaggaaggtcttagcatgatagtcagtttaactcttgaagaagaattcgtttttcctgtgtcacatggcttaaaagttagttaaaccaggacaagcctcgatgtgtctggattgagctaatgagtagctgaatagtttacccataagtgcagagtaatcctcatgaccatatgatataatatggaaagtaatcaacagtttcaaaaactgacatcacccagcctattgttttcatttgacttaactgataattcctacgtgccttaaagggaaaactagacyaattagtagaggaggaagaaacaacctggcaaagaggcacaactctaattacatatgcaagcccagccacaattttcagctgcagtgtgtgagatgggtgagaaaataggacagtaagaagctagtgctgtgcaaagattagaggtagagccctccgccaaaggacttaatgacaagttctaacaatgtcacgaatgctttgcgaaaggaacaaccaaattgtaatagagcaactcataaatgaagtgaataattatgtcttcctcttctaaataacctcttaaaa

SEQ ID NO: 895662 - DNA, 660 bp, Homo sapiens
agaacaatattgagaaacagaggaggagaagcagttgtgtttaacctgagaataaatcagcacactcctgccaccactgtccagcagccctgctggtgtccaggagaggtgctgggaatatttcagatgcactgcctaatgtggtgaaattgtatctccaactcataaatgctgaattagctacckcatctctctttctggtatttcacagaggagaaaagtgaaaacaaggtgtccttagatcagacctgggaaaaaaagaggaggacttgttcaccaacttaagaatctgaaaaaaggtatatttctttttattgaatagggagttataaatatatctataaataaacatttttatgtgattgaaatattaactatcaccagactacaatgtggtatctttttagcagacagtaacacatatttgaaacaaggttctcaaatgccattgtgattttcacaattctaataatgaagttctgttctatcttgtatgtttccccaaatgatagccccaaaagataatttgtaacaacatatagagcttacagtatgcaaattaaagtggaataatattcaagcacctttcccatgtaagtccaaatccatccctccatattttcttgtgtatgattgaaatgatcttattagatcttaaga

SEQ ID NO: 895663 - DNA, 660 bp, Homo sapiens
agaacaatattgagaaacagaggaggagaagcagttgtgtttaacctgagaataaatcagcacactcctgccaccactgtccagcagccctgctggtgtccaggagaggtgctgggaatatttcagatgcactgcctaatgtggtgaaattgtatctccaactcataaatgctgaattagctacctcatctctctttctggtatttcacagakgagaaaagtgaaaacaaggtgtccttagatcagacctgggaaaaaaagaggaggacttgttcaccaacttaagaatctgaaaaaaggtatatttctttttattgaatagggagttataaatatatctataaataaacatttttatgtgattgaaatattaactatcaccagactacaatgtggtatctttttagcagacagtaacacatatttgaaacaaggttctcaaatgccattgtgattttcacaattctaataatgaagttctgttctatcttgtatgtttccccaaatgatagccccaaaagataatttgtaacaacatatagagcttacagtatgcaaattaaagtggaataatattcaagcacctttcccatgtaagtccaaatccatccctccatattttcttgtgtatgattgaaatgatcttattagatcttaaga

SEQ ID NO: 895664 - DNA, 660 bp, Homo sapiens
agaacaatattgagaaacagaggaggagaagcagttgtgtttaacctgagaataaatcagcacactcctgccaccactgtccagcagccctgctggtgtccaggagaggtgctgggaatatttcagatgcactgcctaatgtggtgaaattgtatctccaactcataaatgctgaattagctacctcatctctctttctggtatttcacagaggagaaaagkgaaaacaaggtgtccttagatcagacctgggaaaaaaagaggaggacttgttcaccaacttaagaatctgaaaaaaggtatatttctttttattgaatagggagttataaatatatctataaataaacatttttatgtgattgaaatattaactatcaccagactacaatgtggtatctttttagcagacagtaacacatatttgaaacaaggttctcaaatgccattgtgattttcacaattctaataatgaagttctgttctatcttgtatgtttccccaaatgatagccccaaaagataatttgtaacaacatatagagcttacagtatgcaaattaaagtggaataatattcaagcacctttcccatgtaagtccaaatccatccctccatattttcttgtgtatgattgaaatgatcttattagatcttaaga

SEQ ID NO: 895665 - DNA, 660 bp, Homo sapiens
agaacaatattgagaaacagaggaggagaagcagttgtgtttaacctgagaataaatcagcacactcctgccaccactgtccagcagccctgctggtgtccaggagaggtgctgggaatatttcagatgcactgcctaatgtggtgaaattgtatctccaactcataaatgctgaattagctacctcatctctctttctggtatttcacagaggagaaaagtgaaaacaagktgtccttagatcagacctgggaaaaaaagaggaggacttgttcaccaacttaagaatctgaaaaaaggtatatttctttttattgaatagggagttataaatatatctataaataaacatttttatgtgattgaaatattaactatcaccagactacaatgtggtatctttttagcagacagtaacacatatttgaaacaaggttctcaaatgccattgtgattttcacaattctaataatgaagttctgttctatcttgtatgtttccccaaatgatagccccaaaagataatttgtaacaacatatagagcttacagtatgcaaattaaagtggaataatattcaagcacctttcccatgtaagtccaaatccatccctccatattttcttgtgtatgattgaaatgatcttattagatcttaaga

SEQ ID NO: 895666 - DNA, 552 bp, Homo sapiens
taataaattcctgacttccaattctgtattgtacccagtcctcttaagaaaagttagtaattaagcatcagctgtaaacattttaagatcattactgatgcaaaggcaaatcgggtataacatcatttatgtattcagtgtatattgagtaatccaccttatataagacactgagaaacctttccctcagggagctcaaagttgagtcagaaaaacagwccatacccacattattacagtacaagtttaaatttaagtaatgacaggcaatactgggaaatgataacagtcttgactgagaagatgaaggcaggtttcacagcatcagcccttgaactggccgtcaacagtgagtttacttttaggacgtcaagatggacatggacctcagcaccatagaatagaaggtggtcaaggaactgccagtaattcagtttaggaagagaatcatatgagataaggtagtttaaaagtgagaaggaattagtctgcactcaagagggaataggtaaggagaaaaatgaggaggaggtaaaaatccatgggacttgg

SEQ ID NO: 895667 - DNA, 615 bp, Homo sapiens
catttcataaatgagtgaatttatccaagcactttaatccttcccactcaaatccaattcatgctgtcaacttgcattatgaagaagaaggttaatttggccaaggtaaattccaactagcccatgtacaaaatgatcaggcaatgaaaacagtctgaatagatggatgattgaacactcagaatttaataaacctgttggggtagttttcaggaattaattgctgcctctgaaactaaaatgcagccrtgattcttatcatctgtatccaaaattgggggatcaggtaagagctaggcagtaaaatatgtattacttgttaaggattctattacatcggtgacaggtggaaggaagtgccactatcttctagggtggaaggaagtgccactgtccttcctatagaaggcatccaatgactttctggcaataggacacgcttgctttcggctgtttatccagcagtccagatgaattgttctgagcaacctttgtgccacctgcctggacaaaagagactccaatctgtcgactgcttaatagaaatttccctcagtgagaagccaattgactgaccctgcctcggattaaaccagccacccccttgccatctgc

SEQ ID NO: 895668 - DNA, 613 bp, Homo sapiens
cttactcttaaggtgactttaatcagtgtagactatcagcttcttcactgaaatgctgacactgtttctaaaggttgagttctttaaaagggaggcacgcagcatccataaaacggtaattgcctctcaagtagccttggtgcttatgattatccttgagatggtccacacccactcctccagccttactctctgtgccartggtgggaacagtaagtaaagacagcattgcagagtgcttccaaacatgggcttggggatcagactgaataattgattttagggcttgactatcctacttacaaattgtataatcctgggggagttacttcacttttccaaacctaacattaggatccatggaaatcccactgcactgggccaggtatatggtaaaccttgaataaactgaaactattattgtcatcctgataataaaccttacaagatattctcaagaagttcacagacttacaagctggacagagacttagaagtcatttaactgaagcccctccctttgaagatcacaaggaccaggggggtgaatttacgtcgtagagctaagactggggcacaggactcttttttggtcagccatgaagttctcaga

SEQ ID NO: 895669 - DNA, 580 bp, Homo sapiens
caagttcaacctgcctgtagacaacctccaagccagctggacacacatacacactcaggctcaggatacccaggacagagtcctggatgcttgaagtcatgataagtatccagaatgacacagaatcccagccaggcttggtggctcacacctgtaatcccagcactttgggaggccgaggtggatcacctgaggtcaggagttcgagaccagcctggccaacatggtgaaactccctctctactaaaaatataaaaaaattagccgggtatggttgtgggtgcctgtagtcccagctactcaggaggctgacgcaggagaatcgcttgaacccgggaggcagagactgcagtgaactgagattgcaccattgcactccagcctgggcaacaaaagtgaaactctgtctcaaaaaagaaagaaaamacaaaagaatgacacagaatttgctaaagggggagaaagggctttcttccaaagctgggcctgatctctacagagagtcttccagatgaaaattaagcagatctttgcaagcacctcagaggagaacccctaaccctgatgcatcagacacaca

SEQ ID NO: 895670 - DNA, 580 bp, Homo sapiens
caagttcaacctgcctgtagacaacctccaagccagctggacacacatacacactcaggctcaggatacccaggacagagtcctggatgcttgaagtcatgataagtatccagaatgacacagaatcccagccaggcttggtggctcacacctgtaatcccagcactttgggaggccgaggtggatcacctgaggtcaggagttcgagaccagcctggccaacatggtgaaactccctctctactaaaaatataaaaaaattagccgggtatggttgtgggtgcctgtagtcccagctactcaggaggctgacgcaggagaatcgcttgaacccgggaggcagagactgcagtgaactgagattgcaccattgcactccagcctgggcaacaaaagtgaaactctgtctcaaaaaagaaagaaaacamaaaagaatgacacagaatttgctaaagggggagaaagggctttcttccaaagctgggcctgatctctacagagagtcttccagatgaaaattaagcagatctttgcaagcacctcagaggagaacccctaaccctgatgcatcagacacaca

SEQ ID NO: 895671 - DNA, 616 bp, Homo sapiens
aggtgtggagacgtataccccaacccttcccagtgttacctctgagaagcaaggtcaagaaaatcaaatcaagaggaagttttatgttttgttttctatataaattttttatttatttttttattttttttggaaacatagtctcgctctattgcacaggctggagtccagggacacattctcggctcactgcaaccwcctcctcactgcaacctcctcctcactgcaaccacctcttcactgcaacctcctcctcactgcaacctgctccttctgggttcaagttattctcttgcctcatcctcccaaataactaggattacaggcacgcaccaccaagcctggctaactttcatattttttgtagagacaaggtttcactattttggccacctggtctcgaactcctggcctgcccgccttggcctccaaaagtgctgggattacaggtgtgagccaccacgcctggcctgcattgcttgaattctcagaccacatggaccctctcatctggcccaattgcaagagtccaaggcaggaaaggcagaaggcaggggcttacccctccatcaggacaacatagaacagagtcaaaaaagaaaaacatgaatggatc

SEQ ID NO: 895672 - DNA, 616 bp, Homo sapiens
aggtgtggagacgtataccccaacccttcccagtgttacctctgagaagcaaggtcaagaaaatcaaatcaagaggaagttttatgttttgttttctatataaattttttatttatttttttattttttttggaaacatagtctcgctctattgcacaggctggagtccagggacacattctcggctcactgcaacctcctcctcactgcaacctcctcctcactgcaaccacctcttcactgcaacctcctcctcactgcaacctgctccttctgggttcaagttattctcttgcctcatcctcccaaataactaggattacaggcacgcaccaccaagcctggctaactttcatattttttgtagagacarggtttcactattttggccacctggtctcgaactcctggcctgcccgccttggcctccaaaagtgctgggattacaggtgtgagccaccacgcctggcctgcattgcttgaattctcagaccacatggaccctctcatctggcccaattgcaagagtccaaggcaggaaaggcagaaggcaggggcttacccctccatcaggacaacatagaacagagtcaaaaaagaaaaacatgaatggatc

SEQ ID NO: 895673 - DNA, 581 bp, Homo sapiens
tggtgatgactgcataactctgtgaatataccaaaaaccactaaagtatctattttaaaaaggttaattttgtggtatgcaaatgataaatcaataaagctattataaaacaaaacaaacaaaaacaaataaatattcctttgagaacaggagaaaccagttcataaaatattcagtcctggggtcagcatagggggggaaataacctgtggcagctagaagctgccaggtggggggacctgggaggccccatggccagcctcacagggsgcaggccctggtcacctcatccccctgctgggatgaaagggatgaaagggctccagagcacccccttacctccttccccagacccccacatccagaaatctgactccatccacttttccagccctgctccccaggaaactcaaaccttactggatccatcactctccttggcccatctgcttccacaactgcattctcattttgtcttcccaggtctctctttgttgaaatttctgcatccttcaaggactatgccctacctgcaaactgagcatgcccatggcaggggggtccctctttcaggaccttga

SEQ ID NO: 895674 - DNA, 577 bp, Homo sapiens
tttgataccagtaccatgctgttttggttactgtagttttatagtatagtttatgttatttaacataacaaaatgaaatattttttttctagaaaagtaccatatttctgacttgcactctaatgatacctgaacctaaatgttaacctggacgcaaagagggactgctctgagaaagggcatgagacctttattgaggtggctttctgcaacttctaaagatacctaaggggacatcatctgaatgctgtctactaacagcacacccaacagctggaaaaataaatccttctttcctaaatgaagggcagggcagaggctcctcatatataccataatatatcccttatgccatgtgaatttacatattcttatayatgatcagaacagctcatttaggattctcttacttgaggggaattagaagagaaaagctgaaggccaaactatgtatcttgccactgaagctgatctgagttgcaactactgtttacaatcttcctccttatcaatttttttccacttacctctgctagcatctctactgatctcataacttatttaacgggataggaca

SEQ ID NO: 895675 - DNA, 577 bp, Homo sapiens
tttgataccagtaccatgctgttttggttactgtagttttatagtatagtttatgttatttaacataacaaaatgaaatattttttttctagaaaagtaccatatttctgacttgcactctaatgatacctgaacctaaatgttaacctggacgcaaagagggactgctctgagaaagggcatgagacctttattgaggtggctttctgcaacttctaaagatacctaaggggacatcatctgaatgctgtctactaacagcacacccaacagctggaaaaataaatccttctttcctaaatgaagggcagggcagaggctcctcatatataccataatatatcccttatgccatgtgaatttacatattcttatacatgatcagaacagctcatttargattctcttacttgaggggaattagaagagaaaagctgaaggccaaactatgtatcttgccactgaagctgatctgagttgcaactactgtttacaatcttcctccttatcaatttttttccacttacctctgctagcatctctactgatctcataacttatttaacgggataggaca

SEQ ID NO: 895676 - DNA, 613 bp, Homo sapiens
gaatgcttagccacttagaaatttgttcccctagataccctaaatcatctctcctaagttcaaaattccacacacctgtagggcaagggcaaaatgccaccagtctctttgcatagcaagagtgacctggccaggtgcagtggctcatgcctgtaatcccagcactttgggaggccaaggygggcagatcatgaggtcagattgagaccatcttggctaacaaggtgaaaccctgtctctactaaaaatacaaaaaattagctaggcacggtggcaggtgcctgtagtcccagctacttgggaggctgaggcaggagaatggcgtgaacccaggaggtggagcttgcagtgagccaagattgcgccactgcagtccagcctgggtgacagagctagactccttctcagaaaaataaataaaagagtggcctccagttcccaacaggatcctcatctctatctgagacaacctcagcatcgacctttttgtccaaatcactgacagcattttggtcaaagccattcaacaagtctctaggaagttccaaatttcccacaccttcctgtcttctaagccctctgagtctctaggaagtttcaaacttttccacat

SEQ ID NO: 895677 - DNA, 613 bp, Homo sapiens
gaatgcttagccacttagaaatttgttcccctagataccctaaatcatctctcctaagttcaaaattccacacacctgtagggcaagggcaaaatgccaccagtctctttgcatagcaagagtgacctggccaggtgcagtggctcatgcctgtaatcccagcactttgggaggccaaggcgggcagatcatgaggtcagattgagaccatcttggctaacaaggtgaaaccctgtctctactaaaaatacaaaaaattagctaggcacggtggcaggtgcctgtagtcccagctacttgggaggctgaggcaggagaatggcgtgaacccaggaggtggagcttgcagtgagccragattgcgccactgcagtccagcctgggtgacagagctagactccttctcagaaaaataaataaaagagtggcctccagttcccaacaggatcctcatctctatctgagacaacctcagcatcgacctttttgtccaaatcactgacagcattttggtcaaagccattcaacaagtctctaggaagttccaaatttcccacaccttcctgtcttctaagccctctgagtctctaggaagtttcaaacttttccacat

SEQ ID NO: 895678 - DNA, 664 bp, Homo sapiens
tcacttgcaacaacatggatggaactggagatcattttgtttaacaaaatgaatcagatacagaaagacaaacatcgcatgttctcacctatttgtgggatctgagaatcaaaacaattaaactcatggacatagagagcagaagaattgttaccagaggctgggaagggtagtgggggctggggagtatattgggatacttattgggtacaaaaacagtaagaaataatacacctactatttgatagcactatagggtaactatagtctataataacttaattgtacattttaaactaacttaaagagtataatttgcattgtttgtaactcaaaggataaatgcttgaggggatggataccacattctccatgatgtgcttatctcatatggcattcctgtaccaaaacatctcatgtatcccataaatatataygtctactatgcacccacgaaaataaaaaaaggaaaatgccagagactccatccaaaaactgttccaactaataaataaatcctgtaaagtggaagaatataaaaatcaacatacaaaaatcagtagtgtttcatgcacatgtatgtttactgcagcactgttcccaatagcaaagacttggaatcaacccaaatgcccatcaacgatagactggataaagaaaatgt

SEQ ID NO: 895679 - DNA, 604 bp, Homo sapiens
gcagaatgtgcaggtttgttacctacaaatacacatgccatggtggtttgctgtacccatcaacccatcatctatattaggtatttctcctaatgctatctctcccctagccccccagcctccaacaggccctcgtgtgtgatgtttccctccctgtgtccatgttttctcattgttcaactcccacttgtgagtgagaacatgtggtgtttggttttctgttcctgtgttagttttctgagaatgatggtttccagcttcatccatgcccctgcaaaggacgtgaactcattcttttttatggctgcatagtattccatggtgtatatgtgccacgttttctttgtccagtctatcattgatgggcatttgggttgattccamgtctttgctattgtgaacagtgctgtaataaacatacgtgtatgtgtgtctttatagtagaatgatttataatccctggggtatatactcagtaatgggatggctgggtcaaatggtatttctgattctatatccttcagcaattgccacactgtcttcaacaatagttgaactaatttacactcccaccaacagtgtaaaagcattcctatttctccac

SEQ ID NO: 895680 - DNA, 601 bp, Homo sapiens
ctttgcatttatctgttcttcttgtcccacttacactctggcaaatatctccattatcagcattgctaatcctgttttattgaagaacatcttgcaggaaggcaaatgatcctgcatggctaggaaaaaaaataaacaatataagaataaacactctggagagctgtttgccccaatgccatattgtatacaattcaaaacagagaccttagtagtagtctattattttaagggcaatccaaacactagaacaaagtaaatgagtagttaatattgaattcaataatacatacaacagaatgccagctctccctaaagggagattatgaatcaccaagaccaaattctttattttacagatgaggaaatgaaagcccagggagatgaattcattttctcataattctatagccagatgctttagtttgttgagctgaataratattttgcttcaaagtatttatgatagttaaagcaagttcacttgatgtctttgttttggttactgattactttttaaaaaatgcttcagtttggaatttccagttttttcctgtttttggctcaagtcacaggtattaagtttcgatttccaatatta

SEQ ID NO: 895681 - DNA, 592 bp, Homo sapiens
ttcttttgcacatcagtccctatcgggggacctgccctgataatcacgtaggttcttttctatttccctaagcattgactggcttgagaaataaaaggacagagtacaaaagagataaattttaaagctgggcatctgggggagacatcacacatcggtaggatctgtgatgccccacaagccacaaaaaccagcaagtttttattagggattttcagaaggggagggagtgtgcgaataggtgtgggtgacagacatcaagtacttaacagggtaatagaatatcacaaggcaagtggaggcagggtgagatcacaggaccacaggaccaaggtgaaattaaaattgctaacgaagtttagggcaccactgtcattgataatatcttatcaggagacagggttttgagatcaaccrgtctgaccaaaatttattaggtgggaatttcctttttctaataagcctgggagtgctatgggagactggagtttatttcacccctgcagtctcaaccataagagacaggtacgccccaggggggccagttcagagacctacccctaggtgcgcattctctttctcagggatatcc

SEQ ID NO: 895682 - DNA, 677 bp, Homo sapiens
aaagcagtgtcagagagatggagtgaaagagaaacattcaagtgattaagcagattgattgggcaaggtgagtggcagatcagatgaggagcaagggatgggaagcagaaaagacaagtctccgtggagcccattatctagagtggcaagacgagaaggaagagcctataagagggctccccagagagacaggagggaaatcacagagatcaaggaaggagaatttcaggaaggaaagaatgatcctgcccaatcagatgctgcatagaattcaggtaagatgaggactgaaggtgtctttggcttttccaagtagggaagtcatcagtgacccagtaagcacaatttctgtggcggggagaggcaggtggaaacctgattgctgtgggttgaaatgyggaagaaagtgattatagatgactctcttactggattggaatcgagagaaaagataggatctggaaggcaacagcgggtgaagggaggtttttgcttttgttttgtttatttaatggacggtatttagccatgtagaattgttggtaagaatcagagagttgaaaataaaggagaaatatggggtgatttatggaacagagtccttgtagaagtgagaaaaaataagaggcaaagtaaaaatggaggtattatttcattttcaatggaaagatggacac

SEQ ID NO: 895683 - DNA, 615 bp, Homo sapiens
tccctctggagatggtatccactgggttttaggctttacagagccagctgatctgcgtggatgggccacactatcctcccttagccggctccgtagcacatgcacaattaatactgcattaattaattatgggagaaaaaaagcacagttggcaagggaatgaaggctttcagcttctaaagtgaaggctttgatgctgagcttgaaagtacatttccatccgcctcagccagcagagagaatctgtgacacttataccatcccctgggcatgaaaactcacacccaaggaaagtatttctaratagaggccctcaactagttgctggaatcatctactcattgccatgggctgtgaaaagggggtgtaagattagggagaaaagactcgcccaaagcagcagtgattcgtgaccaaagctgatgaggggttttattttttctccttaagtagctcttaagtcaccaacatcaggaactctttgtagagaaacaaatatgagtaagtgatttggtgccagccctcttgaggacataaaatgactctttctccttcctcctcctcctcgcatgccttgcttcaggaaggaaccctaaggtggtgcaggttcccaaa

SEQ ID NO: 895684 - DNA, 614 bp, Homo sapiens
ctaaaaatcacacgtctgatcatctgtgatctcagagtcttggacaagccttgcttgccaatcagcagggatgggagttggagccatctccaagtgtccccccacaaatctatgtccacctggaagtttcaaatgcaactttatttgggaaargcaattttgcaaatgttattaagtgaaggatctagggatgagatcatcctggagtagggtgggtcctaggtcaaatgacaggaaatctgcccacctcggcctcccaaagtgctgggattacaggcatgagccaccaaacctggcctatcattgatttaatgattaatacggttaggctctgtgtccccacccaaatctcatctcaaattgtaattcccatgtgtccagggagggagcttgtggaaggtgattggatcacaggggcagtttttgtcatgctgttctcatgataaatgagtcaattctcagaagagatgatggttttaaagtgtggcacttctttgctctcttgctctctctctctcctgagtagactggctcattctttctactggttacaagcaatagaagtgataacaaaattgatggtttctcatttcctaaatggtaccagtggattc

SEQ ID NO: 895685 - DNA, 687 bp, Homo sapiens
cgtaactgaccgcgtccaacacccgtttttccacttacaaagctggtggtgcgacgggcttggtgtctcccgtacgggaaggaggcctttgggccgctccaaagacgccctgtcgtaggaatggcctctccatcccgccaaagtccagccagrcccccgaaatggtcccatttccttggaagcctgagtttctgttctggtcttgctgctgtccttggccacgtcagcacgtgggagcatctgtggataccgcagagtctggggacagctgggcgtttaaccgaaatgaagccgagacgggtttcaggttttggtgccaagctctggtcaggatgaaagggaaataccagagtcctctgtcctcgcctctgggtttcatgctgacctttctaacatttgttttcccctaagaacaagcagaagcctccagctccctttagctccacagttttcccggggacatagcgaggatggcacacggcagccactcccacgacacacatttcggaggcactttgctggaagccgcttgtctcctccagctttgggaggtctggggaggagagaggctttcggtggacacgtttgacattaaaaaaaaaaaaaaaaaaaaaaaaaaaactggtgcctaatttattaaagagaattagcttagcgagtatatgctgatattcttcgacacacgtg

SEQ ID NO: 895686 - DNA, 631 bp, Homo sapiens
tgatcttattctagtcatcatatagcaaatgagaaacaacttatgtgtctttcagaaagaaagagtttaattaattatggtgtatgcctactttagaattatagaatgtaatttgaaaagtgagatagatctatatatgtattgtttagaaagatcccgcatccattttataaactgacaaaggttagttgcagttcaatatgtacatcactcttcttgcatgttaaataaaaacgacatattgctgtactttatctgtccatgaaaagcctgtagtcagctgtaaaataatacacaagactgatcattgtggtgacctctgaggagcgggttaaactgtggaggaactttgtaaaggggaaatttgtgtattatctatatttctatattttttgccctaagaatatacacagtacaaccttttaagtaaaartatttatacctaacaacagaaagagtagctctgtcagtttaagtaactactagttaatgcaacagacaagtcctgaaatgtgaatagcctgacacaactcaagtgtattatatgcgcacctaagttctgatgcggtttggcaggggctcctcactctcacatgacccagggatccgggctgcttccaccttatgattc

SEQ ID NO: 895687 - DNA, 650 bp, Homo sapiens
tgatattgtgtctttctccttctttttcccttctataattttccagggttgatttgtgaagcagagaacagcagcccaaatttgattgtcacgttggcagccacaggtaagacataatttgtacataattgtacataattgaagcacatttgacatttttacagtgttctctttctcatcaatgaatatgctatgctcctctataatatgtgtgtgtgagtgtgtgtatatatatatatatatatakagagagagagagagagagagagagagaaagatggcatctccctctgtctaccaggctggagtgcagtggcactatctcggctcactgtaatctccacctcccaagttcaagtgattctcctaccttagcctactgagtagctgggattacaggtgcatggcaccatacccagctaatttttgtatttttagtagagatggggtttcaacatattggccaggtgtgtctggaactcctgacctcaggtgatctgcccgcctcagcctcccaaaatactgggattacaggcatgagccatcgcacccagcctcatgtattaatttcaaactccttttacttgaatctgtcagtatactgtgattgttgcctctataaagaccttctgcatttttactaggcttct

SEQ ID NO: 895688 - DNA, 608 bp, Homo sapiens
accgtcagtggttattttccagtgttcaggagggagctgtattactataaaaatattttataaatgcagtttaccgtctataacaaccaattaataagacagctcgcacatcaagcacattttcaccacaaaatacaacaaagctttcaacatgtatctgctcacatatatgatccaaatagaggagataaaacttgagaatgacacggttaagagtttgtccttttacatagttaatttaactgatagctgaggtatccatttaaaacttagatgcttgatagctgaggtayccatttaaaacttagatgtttttggttgtgatcacacgtctctcacatgccagcaaagttgtctgagttctccactacagaggttattaatgtaaacataacaataagaggctattttagaggcctcagtttgcactgcccaccccaagaaagaaatgggaaagtcttataaaataactagaataagaaaacagcaatggatatgaaaaacagatatatcacttactatctgacacaatgtggaatatatattattagtaaattattttctaatattccacagtgaataaagtaaaagcattactctgcctaacc

SEQ ID NO: 895689 - DNA, 575 bp, Homo sapiens
gaagacaaggccagatcctcagctcctccctcagggactgggaatgggataacatggctttgggacttgagaatcatccctaggctgcataggggtgggagcaggagttcggtcctcttggtggcctgtggctggccctctgcctggtgaccactgcctcagagaagtcaggggcaggagcaggccccagtttcctggcccttctaaatgccaacggctcagccgtggagccagcagcccaactgcagaaggacatcccatccctccggctccgggatgcacatcccgatgggagccaacaggaggagacaacatgactctytccactgccccagtctccctggcttctggcaggggcccatgctcatcacagctgtcgattctcctaccccaggtgcagctctgggtgggtggagcgataccaccccccttgacggttgcttcctacttagcaaggcagccacctcccggtgcgtccacccccagccaatgcctgccccggcctggcccagcccttgccgcttgcaagtcacttagttgctggaaaagcatcattatgtgcttgttactgagaa

SEQ ID NO: 895690 - DNA, 639 bp, Homo sapiens
tgtgttaaggccattcttgcattgctataaagaaatacctgagactaggtatttataaagaaatgagctttaatgggctcagtgttctgcaggttgtacaggaagcatagtgctggcatttgctcagcttctggggaggcctcagggagcttttactcatgatggaaggcaaagcaggagcaggcacatcatatggcaaaagcaggagcaagagagagatggaggagagagggtgccacacaattttaaacaaccagatcttgtgagaactcactatcatgaggacagcaccaagccatgagagatccacccccatgatccaaacctttcccatcaggcccaaccttcaacattggggattgtatctcaacatgagatttggagggcatgtccaaactatrtcattctcccctgcccccacaaatctcatgtccttctcatactgtgaaatacaataatctcatcccaatagtcctccaaagtcttaacacattccagcattaatgaaactgcctttgcaaaattataactgaagaaattatgacagtgaaagaaatcagacctaaccaaccccatattgcttctaacctttgtccttgttcattactgggcataggccaaactaactttgggaaggaa

SEQ ID NO: 895691 - DNA, 594 bp, Homo sapiens
gtggaagttgaagaaatgcagagtagtaccacagagcacagtggagggctgaggtgggtcttgctgaggtttgagggagatgattaactgcaccctctcccttctcttggaaattcagagtaattaacacaaaagacattggagtcagagagatatagaaatgtggttacttcmcccacatcccctatagttctcaccttcgtaaagcccttcccccaatgtacaaccctgcctcctttgtgtattctcattctttgtaggagggtaacacttccagctcctccctcctctctcacaggcgctgttctgggtgttgaggatgcagtgacagggcagattaagtctttgccttcatgaagtttacatgtttatgcagggaaacgggcaatcagcagacaaggaaataaatctgataatttccagtatgaaatgccatgaagaatgactacaggataatgactgggggggactctcagtctgcccagggtgcagggaacatcttggtctcctcttgggctctctgggaagcttggaaccacagggtaatcagctctgaaggcccttttgccatttctaattccaatgtggaataaa

SEQ ID NO: 895692 - DNA, 562 bp, Homo sapiens
cacagaaagacaaatatttcatgtttccacttaatatgtgagaactgaaaagcttaatggcatggaggtagagagtggaaaggtagaaaacagagactgggaagggtgggtaggggaaggatgaagagtagtgggtttaaagggtagaaagataaagatagaaggaaaaaattcaatgttagatagcaaagtagggtgactatgcttaacaaaaatgtattgtattggctaatggaaaccctaaataccctgatttatcattatgcattatatacatgtaataatatttcacatgtaccccataagtttgtataaataaaaaattaaagtaaatttatactttatatattatatgtaatatagattttgtattttttatttgaaatgcttgggactagaaktgttttggattttgactttttaaaaaaaatgttgaaatatttgcattattcttctcagttgagcatccctaataggaaaatcctaaatctgaattttgagcatcatgttggcgctgaaagtgttttggattttggagcattttggattttggattttttga

SEQ ID NO: 895693 - DNA, 601 bp, Homo sapiens
tcttacaaattctgatggctttaccctgcaatctgctaatttctcaaggcatgatatacacttcatgcaaggttcatcattaacaatagtgatgaaatgttacgtttcatattatcttgaaaatttcaacgttttacaaatttttgtcacatctgattaccttgtcatgtataaaaggtttgttcctaggttggttgaagggtctgccrtgtcattttcttgtcattcatttatgctagcattgttggtgttatcttcaatctgctgtttctttgcaagaaacttttaaaggtacttatctactttgtgagggtgaattgagttaaaagtgggcaagttttttattttagccattctaatgagtgtgacttggtatctcattgtgattttgattgacatttccctataaaagaatattgagcatctttttacagttttctgcccacttgtatattgtctttggagaaatatctactcagatccctcaatcattttttagcaaggtaatttatcttttttgaattctaagagtttattttatattctaatacacgtccttatcagatatataatttgcaaatattttctctcattctgtatg

SEQ ID NO: 895694 - DNA, 548 bp, Homo sapiens
ctatctaaataaaattggtctccttattaaatcctatgatagatttccataattttatgtttgatttggtatccatctttaatctccctctgtcactactagacatttttaactctgtgccttatggtataaattttgctatttgattttcacctgagttgtttgctttaatatgcatttttcggttttgttttttgagacacagtcttgctctgtcgcccaagctagagtgcrgtggcacaatcttggctcactgcaacctccgcctcccagttaaagcaattctcctgcctcaaactcctgagtagctgggattacaggcacccaccaccacacccagctaatttttgcattttcagtagagacagggtttcaccatcttggccaggctggtctcaaactcctgacctcgtgatccacccacctcagcctcccaaagtactgggattacaggtgtgagccaccacccccggcctaatatgcaaatttaagactatttagctcacaactgcctagggttctgaagtaggttatccagaatctgaaag

SEQ ID NO: 895695 - DNA, 580 bp, Homo sapiens
ttgtatgtgacattgattggacacagtaggtgtgaaaactacaattatgaggataccttatattcagtagcattatcactctgacttcggtacataacaacactgtaaggtaaggtaggcatctcagaaatcattatcttcattgtacagatgagraacctgcaacttgttcactcattaaacagtgaacctctgctatgtgccagatgtcaggctggactctgggagacttgtggaccagccagacatttttgccagccacagtgagggttgcagaccattgggaaagatggctcctggacaagtactaagccacacaacccagacacaaagattcaaatgagacttgatgccatgctaaactcgaccccagcccttttgacgttgctctctattttggctcagcctagtccaggtttgagagtcttttctgaagaggacttatttttcaagcacagttaatgatgttgtcttatcagaactgaggtaaagagaagggtctccatggctggcacatagcagataaccagcaaggggtacggtggtcattaggtattgaccctttggccatcctggtgtc

SEQ ID NO: 895696 - DNA, 612 bp, Homo sapiens
aagggcccatcccccttgccctgatttgtgatcattcagaaggaccatctcagcttgagaacttctaatttgttaatctgaggctcttaacagccaatgcatcatagtccgatttcttctccacctcaccttgttccctgcactcttcccaaaggcagggatccaaagagcactcctcaaccaacttcctgccttctamtcttggtctcaaagactgcttcccagaaaacctgacctatgaaaatgtgaaagtgtgttttactctacatttttttcctttttttttgttattatttcttaatatgaacactgttttcaatcttttcctttcttgtttctggtattttacgtcatgcttagaaatgctttcccattccaggaatataaacatattcacccatattgtcttatagtgtctttatggtttcctttcaaaaagtttttaaatttttgattcatctgtaatttggatgaggagagacatagggacctagctttatttcttgtttttcaaatgcttaattggttccctgtgctatttatttttaaaattcctttaacgctccaaatttttctaatgtataatgtttttatcctttttccaatttctag

SEQ ID NO: 895697 - DNA, 645 bp, Homo sapiens; identical to SEQ ID NO: 882341

SEQ ID NO: 895698 - DNA, 625 bp, Homo sapiens; identical to SEQ ID NO: 882342

SEQ ID NO: 895699 - DNA, 587 bp, Homo sapiens
tggctgcttttaatgtatcctttctctgtaataaacgaatcacaagtatactaggtttcaatgagttctatgagtctttctagtgaattatggaacctgatttaggaaatacccaaccttgccattggtgccagtagtgagagtggtcttgcatgaacttatctcccctttgtagttgagtcctagcgacttacagttgggggcagaagtcttatgtagatttagtctggaggtctatgaccttaaccttgcagtttggctaactctgggtagctacattttgtattgagcaactctatatgaataaaagaagttttgttcatataatgccttaacagtgaatcaagtatatcaagaaagttttttaaaagttaaaagtaggcaagtctactggtaataaagtaggcaagtcacaaggtaattaaatgcctacgtttcaatgattacacrtgttgcttagaacatacacatatatgagatcatcacgttaaaatatttctaacacacaggctggcaacacctaacaataataataattagtaattgtctagttcttactactaactggtttctgttctgagtgttct

SEQ ID NO: 895700 - DNA, 659 bp, Homo sapiens
gagggaaatatgtcttgtttcattttcaatagttatatcaagaatacttttcaaaagtatttcatatttaccatgttttcagcaagtaactcttaacaatactctgagagtatgatcgtgatgataggtaaaaatcaggatcactcccttttcatctttacctgtgtagagcaatgtaatgtgcccttttcccaaaccctctgactccatgagggatgagacacagagggtgtggctgagggctcctaggaccgggactccttggctgatgtcctgtggcctgcagtccagggcttgcaggtgatcaaacaggaaaggagaaatgagggaggcacagtgctacgagcaggcctgtgttttcactgggaatggtggttagcagatgctcagatgtgtctcttctccctcacactcacctttggcttggctcttaactcctgcccacccctccctaaacyctctgtggaggtccggaactaagcgagtcacagacacccagcaagcagtctccagagaggcctctgtgcatgaagacttccccagaaggatgcccactcttcctacctggcctgggaactcaaaatggacacaaaaactgaagactgtgagagagggtcagcttacaggccagaaactgacaataagattgatgttcaaat

SEQ ID NO: 895701 - DNA, 617 bp, Homo sapiens
aatgtgcccttttcccaaaccctctgactccatgagggatgagacacagagggtgtggctgagggctcctaggaccgggactccttggctgatgtcctgtggcctgcagtccagggcttgcaggtgatcaaacaggaaaggagaaatgagggaggcacagtgctacgagcaggcctgtgttttcactgggaatggtggttagcagatgctcagatgtgtctcttctccctcacactcacctttggcttggctcttaactcctgcccacccctccctaaactctctgtggaggtccggaactragcgagtcacagacacccagcaagcagtctccagagaggcctctgtgcatgaagacttccccagaaggatgcccactcttcctacctggcctgggaactcaaaatggacacaaaaactgaagactgtgagagagggtcagcttacaggccagaaactgacaataagattgatgttcaaatagctgaattattgattcttatcctgagatccactcctcattttcagtcttgcgataaaccttagtgaggggtgttttgtcttgtgttctatctattggtggatggattccaacttttctgaatatggggacgtaa

SEQ ID NO: 895702 - DNA, 617 bp, Homo sapiens
aatgtgcccttttcccaaaccctctgactccatgagggatgagacacagagggtgtggctgagggctcctaggaccgggactccttggctgatgtcctgtggcctgcagtccagggcttgcaggtgatcaaacaggaaaggagaaatgagggaggcacagtgctacgagcaggcctgtgttttcactgggaatggtggttagcagatgctcagatgtgtctcttctccctcacactcacctttggcttggctcttaactcctgcccacccctccctaaactctctgtggaggtccggaactaagcgagtcacagacacccagcaagcagtctccagagaggyctctgtgcatgaagacttccccagaaggatgcccactcttcctacctggcctgggaactcaaaatggacacaaaaactgaagactgtgagagagggtcagcttacaggccagaaactgacaataagattgatgttcaaatagctgaattattgattcttatcctgagatccactcctcattttcagtcttgcgataaaccttagtgaggggtgttttgtcttgtgttctatctattggtggatggattccaacttttctgaatatggggacgtaa

SEQ ID NO: 895703 - DNA, 599 bp, Homo sapiens
ccaaacagctccaggaactctgtacatggtctgtcaagtatccaagacagaagggagacttttcaagagtggaagcccagcctgcttgctccagtctggactgtgctggtctgtattttcctagtcagggatggccccaacctgggactgtgtctcctctcaggctctgaggccttgggaatggaggaatgtcgtatctgccagtggtttaggtctgtattgtgaagaattaactttcccaaacagagatctggccttcaccctcagctgctgggtggtgattcctaggctcctggattgtcctgccagataggagwatctttgtttgcctgagggctttggccaccagtcagtctaataacgtgatatatgatggggctttggaacatgccatgtgaattctgacctctggaggaaccagagatcattagctagaacctccaggaggggctggaggttaaaggtcagccacgtgggcagcgtgtgataaagctccaggaaaaactctggacaccaaaggctcagttgagctcctatcttctgcaacactccatgagttctgtcacacaacatggctgggaggaggtaacacacccagg

SEQ ID NO: 895704 - DNA, 654 bp, Homo sapiens
tatgaaattctgggttgaaaattcttttctttaagaatgttgaatattggcccctactctcttctggcttgtagagtttctgccgagagatccactgttagtctgatgggcttccctctgtgggtaacccgacctttttctctggctgcccttaacattttttccttcatttcaactttggtgaatctgacagttatgtgtcttgtccactccagaccctgtttgcctgggtatcagcagcagaggctgcagaacagtgaatattgctgaacagcaaatgttgctgcctgatcattcctctggaagtttcatctcrgagggatacctggccgtgtgaggtgtcagtctgcccctactggggtttgcctcccagttaggctacttggggtcagggacccacttgaggaggcagtctgtccattctcagatctcaaactctgtgctgggagaaccactattctcttcaaagctgtcagacagggacatttaagtctgcagaggtttctgctgccttttgttcagctaggccctgcctcccaaggtggagtctacagaggcaggcaggcctccttgaccttcggtgggctccacccagttcgagcttcccggctactttgtttacctactcaagcctcagcaatggtgggtgccctt

SEQ ID NO: 895705 - DNA, 621 bp, Homo sapiens
agttgtaccgtgagcttttttacaacttcaaagtgggaaacatttattgcccttactcatggtgctgtctaaagaataactttttactctcctgaacatttcagggttctactcttattagagaaattgtactattatcattttatttttaaaatatttttagaaatgggggtctcactgtgttggtcaaactcttgagctccagccatcctcctgcctcagcctccaggggagctgggactccaggtacgcaccaccccacccggccactgagtcactattaaaaatcatttagcatagccaggcctggtgtggtggctcacgcctgtaatcccagcactttgggaggctgaggtgggtggatcacctgaggtcaggrgttcaagaccagcctgaccaatatggtgaaaccccgtctctacttaaaaaaaaaaaaattagcctggcatggtggcacccgcctgaaatcccagctactcaggaggctagggcaggagaatcacttgaacccaggaggcggaggttgcagtgagccaagatcacaccactgcactctagcctgggtgacagagtgagactccatctcagaaaaaaaaaaaaaaatcatttagcatacccagt

SEQ ID NO: 895706 - DNA, 632 bp, Homo sapiens
gaatgtaagctaagacatgccttttctccctgtgaatagagaggacacggagccagaagacacaaccctgcccgtctgctctcagtagtgcctcatccccttcaaaagccctagatactggcctatgcagctgtcccagggactactgaccacagcttctctatcggtgatacatgttcctggcttcctgtttttaagaagtactggacacacctgtgtcactttcctgaaagaaagagtgctgagattggagggtccaagtggaattacaggctgagacagagagaagatacaggagatgctggccctaacagagagggaaaacaaaacaaaacaaaacaagaaactattcttatgaaataaaataaaaagtctccccatctgagagtccactggtctttcctgaaagccaagtcatttttccatcgaataaatgcacragtaaaaatcaagaaaacataaacatggataaaagtttcctcatagagttgacaagattattcacagagacagacttcttggtctcaattttctcagcatcctcagagtttactgtgtggacactatgatcacagaaagaatctcaggtgccaaagctagcaattcaagttgtttctggtggaagtcagtgc

SEQ ID NO: 895707 - DNA, 568 bp, Homo sapiens
tatatatgcttgtgggtatatatataacatatatattaatgtagcataccatccacactgttctgttaccatgctttcttacttaaactatatcatgggaaaccatcattgtcagtacatgaagacagctaccttattatttttaatctaaattttcaaacacacacaaactaggaagaattgtataatgaactcytttgtatctttcattcagctttaacaaccatcaactggctatctccttctctttaaagtttcaaattttgccattgtgtgactataccacattttatttagtcaatctcttgttgatggacacagattgtgttcaaattattagttttgtttgtattgtagcatagtttagtaaggtacacagatctcaagagtacagttcaatgagttctgacaaatgtatatgccatacaaccatcactgaaactaaaatatagaacatttcccataatcctgaaaactctctcatgtttcccccccagacaacacttccactaaagtaagaattgttcttatttacataaaaccatagaatagttctgtttattctatt

SEQ ID NO: 895708 - DNA, 598 bp, Homo sapiens
tataatataactagataacatagagacatctacatttcatatttcttttcacaatcccaattttttaaacctatatatttataccagtactgaattattagtgtcatttttaatctgacacatatataacatgacacagtgaatagctgtcaaattaagtgtcactatatggctattgtgtcatatatggtcatattctaataaccagtctttatgtattatagatttgtgaatttttyttttttggaggatggagaataaggtttggtgtgctatttgaattttgctcacagatctaatctggcattttcacttttacttttagatagttttgttcaatttgttttcaaaaaaattagaagctttttgggggaacaattgcaagagtcattccatataattcctcccaataatgttatgagtaaataaaaattaatatattcacccaacaaattaagttctcaatctgtgccaaatcctatgctatacaatgagtaacatgagctttgggaactgccttcaaacatgtgaagaaccagataccacagaaaacaaaaggaatacattaattgagaaaacatcacataaataattttgg

SEQ ID NO: 895709 - DNA, 598 bp, Homo sapiens
tataatataactagataacatagagacatctacatttcatatttcttttcacaatcccaattttttaaacctatatatttataccagtactgaattattagtgtcatttttaatctgacacatatataacatgacacagtgaatagctgtcaaattaagtgtcactatatggctattgtgtcatatatggtcatattctaataaccagtctttatgtattatagatttgtgaatttttcttttttggaggatggagaataaggtttggtgtgctatttgaattttgctcacagatctaatctggcattttcacttttacttttagatagttttgttcaatttgttttcaaaaaaattagaagctttttgggggaacaattgcaagagtcattccatataattyctcccaataatgttatgagtaaataaaaattaatatattcacccaacaaattaagttctcaatctgtgccaaatcctatgctatacaatgagtaacatgagctttgggaactgccttcaaacatgtgaagaaccagataccacagaaaacaaaaggaatacattaattgagaaaacatcacataaataattttgg

SEQ ID NO: 895710 - DNA, 648 bp, Homo sapiens
tgcacaagctgtctcattttttgcctgccaccatccatgcaagatgtgacttgctcttccttgccttctgccatgattgtgagacttccccagccaggtgaaactgtaagtccaattaaacctctttcttttgtaaattgcccagtctctggtatgtctttatcagcagcatgaaaatgggctaacatagcatattggtaccagcagagtggagcattgaagaaaagatgcttgaaaatgtggaagtgaccttggaactgggtaacaggtgcaggctggaacagtttggagggctcagaagaagacaggaaaatgtgggaaagtttggagcttcctagagacttgttaaatggctttgacaaacatgctgatagtgatgtgaacaatatcatcttccaggatraggtggtctcaggtggagataaggaacttgcttggaactagagcaaaggtgactttgtcatgttttagcaaagagactgttggcattttgcccctgccctggagatttgtggaacattgaacttgagagagatgatttacagtatctggcagaagaaattcctaagcaccaaagcattcaagaggtgacctgggtgctgttaaaagcattcagttttataagggaagcagagcataaaagtttgg

SEQ ID NO: 895711 - DNA, 648 bp, Homo sapiens
tgcacaagctgtctcattttttgcctgccaccatccatgcaagatgtgacttgctcttccttgccttctgccatgattgtgagacttccccagccaggtgaaactgtaagtccaattaaacctctttcttttgtaaattgcccagtctctggtatgtctttatcagcagcatgaaaatgggctaacatagcatattggtaccagcagagtggagcattgaagaaaagatgcttgaaaatgtggaagtgaccttggaactgggtaacaggtgcaggctggaacagtttggagggctcagaagaagacaggaaaatgtgggaaagtttggagcttcctagagacttgttaaatggctttgacaaacatgctgatagtgatgtgaacaatatcatcttccaggataaggtggtctcaggtggagataagraacttgcttggaactagagcaaaggtgactttgtcatgttttagcaaagagactgttggcattttgcccctgccctggagatttgtggaacattgaacttgagagagatgatttacagtatctggcagaagaaattcctaagcaccaaagcattcaagaggtgacctgggtgctgttaaaagcattcagttttataagggaagcagagcataaaagtttgg

SEQ ID NO: 895712 - DNA, 622 bp, Homo sapiens
atctggacagtaagggagattgtgaacttagttttcttacaggacataggtattataattattattgtggtaaaaatttcctcctagcaggaagataatttttttgtgtgctttgggaatcacccaaaagttttccactgcaaaaaycaatggaataaggaactgatattttctaaaccttcagtaagtggctaaatctatcaggcttatctattcatccccatagtgagaattccttgcaatatgtgtttgtggcattcttatagataccacagtcagaaaaaaaggggatggattaaaataagcagaaaaatttgctacattctgtgctaactttaaccccatataaatgctgtcttataagtagatctattaaatagggccatccatagccacagcctttcatattttaagtaaatatcacaacataatattttcatcagaaaacttgtctccaatttctagagccttttgttactcctggcactatcttagtaggactttagtgtgccagatatgagcctgctagatttaagtcaaataatgatttattcttatgccctcttctcaactgtgttgatcaaattcataaaacaaatgttagccttaaattccttacttc

SEQ ID NO: 895713 - DNA, 622 bp, Homo sapiens
atctggacagtaagggagattgtgaacttagttttcttacaggacataggtattataattattattgtggtaaaaatttcctcctagcaggaagataatttttttgtgtgctttgggaatcacccaaaagttttccactgcaaaaatcaatggaataaggaactgatattttctaaaccttcagtaagtggctaaatctatcaggcttatctattcayccccatagtgagaattccttgcaatatgtgtttgtggcattcttatagataccacagtcagaaaaaaaggggatggattaaaataagcagaaaaatttgctacattctgtgctaactttaaccccatataaatgctgtcttataagtagatctattaaatagggccatccatagccacagcctttcatattttaagtaaatatcacaacataatattttcatcagaaaacttgtctccaatttctagagccttttgttactcctggcactatcttagtaggactttagtgtgccagatatgagcctgctagatttaagtcaaataatgatttattcttatgccctcttctcaactgtgttgatcaaattcataaaacaaatgttagccttaaattccttacttc

SEQ ID NO: 895714 - DNA, 630 bp, Homo sapiens
cttcctgacatgcggtgaggccacatctccactcacttcctgtcagtaggtgtcacttgaacaaattttctcatgtcctggccagtcacctggagcctggaggcatgtcttactttgcatacacctctgtcaaaatgcgtatcagacaattatgttataaattgaatgtcttaggtgttacagagtaggtgttgtggaatgaatatttgtgtatcctccaaagcgcactctctctttctctcwcacacacacacatacataccccaaggaaaggccatgtgatatcttgattttaaacttccagcctccagaactgtgagataacaaatttctcttcgttaagccactcagtgagtggtatattgttatggcagcccaagtagactaatacattaggttattctgctactgacccaccttactgagctagacctactttggtccccacatgtctccccagggacactgtacgaagcctggagctatgtcagtttttctgtactcaaaagtagtgccctcctatatttacctcttgtttgttttattggagttcctggcaggtatctcccttctctttgaactgtaaatagaaataatccttctttttgaagtaggattttctttctgaac

SEQ ID NO: 895715 - DNA, 753 bp, Homo sapiens
gaccactggatagccacagttggatctctacttcacatatgtacaaaagttaactcaaatggattaaagacctaaatgtaagatctagaagtacaaacacttagatgaaaacatagttgtaaatcttggccaccttggactatgcaacaatctcttatatacaacatcaaaaaaagcaactgaaggraaaatagataaattgggcattatcagaatttaaatctttgtgcatcaaaattcgcaaaatattccacaaaggaaaatgaaaagataacccacataatagaagaatatatttgcaagtcatgtttatctgataaggatctaatatcaagaatatatattttaaactcttacaatttaacactaagacaaatgccaattttaaaacggtcaaatgatttaaaccatcattgctccaaagaagacacacaaatggccaaaaagcatgaaaaaaaagatgctcaacattattattcattgggaaaatgcaaattaaaccacaatgagctgccacatcacacccactaggatgttcataatttttcaaaaaggaagaataagaaagagaaatgtaaaattctaagtgttggtaaggacgtggggaaattggaatcctcatccaccactggtaggaatgtaaaatagtacagacacattagaaaatagtttggcaatttctcaaatgactaaacacagagttaccatttgacccagcaataatagtcctaaatatctacttaagaggtcgaa

SEQ ID NO: 895716 - DNA, 587 bp, Homo sapiens
ggctgcttttaatgtatcctttctctgtaataaacgaatcacaagtatactaggtttcaatgagttctatgagtctttctagtgaattatggaacctgatttaggaaatacccaaccttgccattggtgccagtagtgagagtggtcttgcatgaacttatctcccctttgtagttgagtcctagcgacttacagttgggggcagaagtcttatgtagatttagtctggaggtctatgaccttaaccttgcagtttggctaactctgggtagctacattttgtattgagcaactctatatgaataaaagaagttttgttcatataatgccttaacagtgaatcaagtatatcaagaaagttttttaaaagttaaaagtaggcaagtctactggtaataaagtaggcaagtcacaaggtaattaaatgcctacgtttcaatgattacacrtgttgcttagaacatacacatatatgagatcatcacgttaaaatatttctaacacacaggctggcaacacctaacaataataataattagtaattgtctagttcttactactaactggtttctgttctgagtgttcta

SEQ ID NO: 895717 - DNA, 611 bp, Homo sapiens
aaagaatctccctctctaactaatgccaccaagcagtcccttcaccccagagcaaaggcataacctatcttcacccaagtgaactatgtattcttgaaatatatctccttggaactaaaccatttttctgttcacttcaaatcaaccagtgttaatatcatagatctgacagcttagaaggcctgtgttctccttcactcttctcttgaccctatgtgagtttgattcaagagcatggggattagtcccttctcttgaattacaatcaccaatcagcacaccacrtccagttgctctttttaagtctaggagagcaaaaacaatgcacaggtgaaggaaactatgcctaggcctcatccctaggttgtacaaagtaactgaatttatggcttcaaggacagaataaatcaaataaaatcaaagaagcccattttcagggaatagaaacaattcacagaaataacaccttgaatgaaattctcatttttagtgcagaaatggaacataacattcttagattacttgctttctaaaagtgaatattctttaggtattactttttcaacattgatgagtttacaacatttctttttgcatagcagacaaaactg

SEQ ID NO: 895718 - DNA, 643 bp, Homo sapiens
ccagccaaggccctgatgtggcgttgcatcttccggaaagggaaggccttttataaaccacacaaaagtgcaatctgttcgccaagcttgaacccaaggggctatctctacattcacccagcagggctgccttttctaaatcgcacaaagcaccatatgggctactggcctgaatttagcaactgggaggaggtcaatggagrggacacaattttaaatttacatgaaaaccctttgtaaactgtataacactattcaagtgtaaagcaggaagaggtgattcagaagcttagcaggtgacaggagaaattacactgaccacaagccttttctgcctaacccacagcatgtagaatctccatgagacgtttaagtacccgacaaactcctcagtgggaaaccatttgagggcagactggccagaaagcacagatgggaatggatgtgattatttctaaaagtccattctagtcacaaaccccaaggcagatctagccagtggggcagaagagccccagacagaagcacctgagccagcttggcctgacctaactgtcaggaccctttgatcttgctggagcttgacttggagaaaacatctggttctggggattctcaggggccatatagtgtgaaaccgagg

SEQ ID NO: 895719 - DNA, 659 bp, Homo sapiens; identical to SEQ ID NO: 895700

SEQ ID NO: 895720 - DNA, 617 bp, Homo sapiens; identical to SEQ ID NO: 895701

SEQ ID NO: 895721 - DNA, 617 bp, Homo sapiens; identical to SEQ ID NO: 895702

SEQ ID NO: 895722 - DNA, 599 bp, Homo sapiens; identical to SEQ ID NO: 895703

SEQ ID NO: 895723 - DNA, 605 bp, Homo sapiens
cccaaaagaaatactgtcactgaaaagagcactttcctgtatttgagggctcttcctctcttctggtacacccggggaaaaacctggcagagtccacccacagtctttgaggattaattctgtaagaacttcttacactgaagggaatcctcctccaggggatgattctgctctgtgcttctgagctctgatggcaatcacatcaacatcgcyggggactgtggcagaagaggaacatcacccactggaaaccggggcaagttgctcctctgtagttccaggaaatggccagaggcacagctctgctgttccaatttgcagttttctctaacatcaaaaataaaatgtgatttgcatttgaaattttacagaattcctcattttaggtcaagactggccttacccataggttagtgacttatgtggtaggatttaacacacacacacacatacacacacaaatattatccataaaaagaattatattcccaccaacctgctgtggcattcatcagtgaccctttgaagttcagccattgaaggggcaggttaaaatgcaaatttgtttcttggagaggtagcacatagagctattatcaactgtt

SEQ ID NO: 895724 - DNA, 639 bp, Homo sapiens
aattgaggaaaaagataaaatacatgaaaatggaatcaataggtaaaattccaagtacgtggacaaataagttttaaaggtattctcaggaggagattactgtgggacagaaaagataggagaaagtatcatggggaatagcaaatttagttaggtcttgaaggagagacacacattgaatttgttcattacacaattatttaattaaacaaataatgaggccaggtgccgtggctcatgcttgtaatcccagcactttgggaggccaaggtgggcgaatcacttgaagtcaggcattcgagaccagcctggccaacatgaagaaaccctgtctctactaaaaatacaaaaattagccaggcatggtggcatgcacctgtaatcccagctactagggaggctgaggcaggagaatatcttgaacccaggaggcggaggttgcagtgagctgtgattgcacatctgcactccagcctgggcgrtggaatgagagtctgtctcaaacaaaacaaaacgaaataaaaaacaaataataagtgacaggtgtttttgtaggtagaaggagtagggtaataaacaaaatagataaatgcagacacaaaagaccttccattacgaggcttgagtctatgtttgtct

SEQ ID NO: 895725 - DNA, 626 bp, Homo sapiens
atatttttcccaatataaattaaaatagcatcatatatgtaacaattgaaaaggctgtctgtatactgcctaataggacctcttgtatcaatcacactttaagaaatactgatccagcccatacccctcatttcataaatgaaagaattgagatccacaagtatggtatcatttactcaagcacgacttacagtaaaatgaaagctataaaaagagtctaggctttatgatcccttgtcagttgcttcttccaccaaygatgcaaagcaggatctaaagtttgaagaaaagagttgggtgttttacatttaaattaaattaaaagttttatttaattgtgtatgttcaacctaggtacattagaagatacgactacctatcaaagtagagcattctcataacttcatcgcctagaaataacaagtatttatttttcaaattttcttgtatacatatacaactacatttctctatgaatggggctgataatgtccccagtatttattaatgtgcttgcttctctcaacattatagatatttccatgccagggatcttatattgaggatataattttaaatgactgtctagttttcattatatattttttaaaaagtgaatcaccttt

SEQ ID NO: 895726 - DNA, 626 bp, Homo sapiens
atatttttcccaatataaattaaaatagcatcatatatgtaacaattgaaaaggctgtctgtatactgcctaataggacctcttgtatcaatcacactttaagaaatactgatccagcccatacccctcatttcataaatgaaagaattgagatccacaagtatggtatcatttactcaagcacgacttacagtaaaatgaaagctataaaaagagtctaggctttatgatcccttgtcagttgcttcttccaccaacgatgcaaagcaggatctaaagtttgaagaaaagagttgsgtgttttacatttaaattaaattaaaagttttatttaattgtgtatgttcaacctaggtacattagaagatacgactacctatcaaagtagagcattctcataacttcatcgcctagaaataacaagtatttatttttcaaattttcttgtatacatatacaactacatttctctatgaatggggctgataatgtccccagtatttattaatgtgcttgcttctctcaacattatagatatttccatgccagggatcttatattgaggatataattttaaatgactgtctagttttcattatatattttttaaaaagtgaatcaccttt

SEQ ID NO: 895727 - DNA, 626 bp, Homo sapiens
atatttttcccaatataaattaaaatagcatcatatatgtaacaattgaaaaggctgtctgtatactgcctaataggacctcttgtatcaatcacactttaagaaatactgatccagcccatacccctcatttcataaatgaaagaattgagatccacaagtatggtatcatttactcaagcacgacttacagtaaaatgaaagctataaaaagagtctaggctttatgatcccttgtcagttgcttcttccaccaacgatgcaaagcaggatctaaagtttgaagaaaagagttgggtgttttacatttaaattaaattaaaagttttatttaattgtgtatgttcaacctaggtamattagaagatacgactacctatcaaagtagagcattctcataacttcatcgcctagaaataacaagtatttatttttcaaattttcttgtatacatatacaactacatttctctatgaatggggctgataatgtccccagtatttattaatgtgcttgcttctctcaacattatagatatttccatgccagggatcttatattgaggatataattttaaatgactgtctagttttcattatatattttttaaaaagtgaatcaccttt

SEQ ID NO: 895728 - DNA, 623 bp, Homo sapiens
gtaaaggtagttacatagataagaataaagccaatatttttgtagtttttgtttgtaactcccattttttccctaacttatttaacaaactaatacataaacaataattataattatattgtggaaaattatacagaataatctcattgtgtataatgagaacacaatgagtcaaagtgtgtttttccatgtgtataaaaatttcctttgttcgccgttgtaatttttaacagcacaacttatgtatttcaaatagacacaaaattagtagcatttacagtagtatcttaagctaaattgcctttgaatgagatcttgctttcaatactttgatgtccacaaggcatatctagaaaattttatgctttggaagatgaagactgcttaatccarcggggaaggggactatgatttctctttgactagttgccataacactgtccttaaggcatatgaaggacttttatatgttatttagacatcagtaggcacagaagctttgcagtacaactttgacatataaattctgtcattttttttttactttaaaataaattttttttttaaatgtcactttgctagcattgataacgctcttaggtccaccacaacattatatctat

SEQ ID NO: 895729 - DNA, 659 bp, Homo sapiens
aattccaagtcatttttcattcatctaactctgttaattatccttatttttgatttctttaaaatggagggaaaagaccatgataactttaaaacaatctgaagacagaatacttctaacacccagaaagtttttgtgtgtgcctttccagtcaacccaccttctggaggcaacagatgttcatatttctagtattacagagactttaacygttttaaaacttcgaatcaatgggattattcagtaggaactctcttctgcctggtttctttcactcgtcatgttctggaggttaatccgtgttcattaccgtaattgttgagaagtttcctattatatgaataaagcacaatttatttattcatttggctgtgcacaccattggctgattacagaatcttttagggattaaagctttggtagcattcttttttttttaattagattcaggggttacatgagcaagtttgttacatgggttcactgcgtgatgttgaggtttgggcttctaatgatcttgtagtgaacgtagtaacctatagatagttttgcaacactttaccctccccccatctcctcccttttggaatccccagtgcttattgttctcatctttgtgtccttgtgtactcaatgtttaactcccacttataagtgag

SEQ ID NO: 895730 - DNA, 659 bp, Homo sapiens
aattccaagtcatttttcattcatctaactctgttaattatccttatttttgatttctttaaaatggagggaaaagaccatgataactttaaaacaatctgaagacagaatacttctaacacccagaaagtttttgtgtgtgcctttccagtcaacccaccttctggaggcaacagatgttcatatttctagtattacagagactttaaccgttttaaaacttcgaatcaaygggattattcagtaggaactctcttctgcctggtttctttcactcgtcatgttctggaggttaatccgtgttcattaccgtaattgttgagaagtttcctattatatgaataaagcacaatttatttattcatttggctgtgcacaccattggctgattacagaatcttttagggattaaagctttggtagcattcttttttttttaattagattcaggggttacatgagcaagtttgttacatgggttcactgcgtgatgttgaggtttgggcttctaatgatcttgtagtgaacgtagtaacctatagatagttttgcaacactttaccctccccccatctcctcccttttggaatccccagtgcttattgttctcatctttgtgtccttgtgtactcaatgtttaactcccacttataagtgag

SEQ ID NO: 895731 - DNA, 659 bp, Homo sapiens
aattccaagtcatttttcattcatctaactctgttaattatccttatttttgatttctttaaaatggagggaaaagaccatgataactttaaaacaatctgaagacagaatacttctaacacccagaaagtttttgtgtgtgcctttccagtcaacccaccttctggaggcaacagatgttcatatttctagtattacagagactttaaccgttttaaaacttcgaatcaatgggattattcagtaggaactctcttctgcctggtttctttcactcgtcatgttctggaggttaatccgtgttmattaccgtaattgttgagaagtttcctattatatgaataaagcacaatttatttattcatttggctgtgcacaccattggctgattacagaatcttttagggattaaagctttggtagcattcttttttttttaattagattcaggggttacatgagcaagtttgttacatgggttcactgcgtgatgttgaggtttgggcttctaatgatcttgtagtgaacgtagtaacctatagatagttttgcaacactttaccctccccccatctcctcccttttggaatccccagtgcttattgttctcatctttgtgtccttgtgtactcaatgtttaactcccacttataagtgag

SEQ ID NO: 895732 - DNA, 583 bp, Homo sapiens
ttatctgtgtctgctttcaagctatagtagtagggttgagtagctgtgtcagacaccatatggcctacaaagcttaaaatatttactatctagtcatttatgggtaatatttgcatacctctgccctataagcaaattaatgcatatcttggaaatataaagttatcaaacttgttattttttagccatatattagtgggtagcatttttgtaattaaacatagaataaaacctctactggaaatatttccctcaaaaggtaaccatctttttattcagtcatttatcttatttaaaaaaattatttttattyatttatttatttattttgaggcagtgtctcactctgttgcccaggctggagtgcggtagcgagctcggcacactgcaacctccacctcccgggttcaagtgattcttgtgcctcagcctccaagtagctgggactacaggcacatgccaccatgctcagttatttatcaaagcatctatgctaaggaatatacattcaaaagctttcaatagaggatttcatatttatttgtcttcggaaagaatttggtttttattaaaatgcagaaat

SEQ ID NO: 895733 - DNA, 684 bp, Homo sapiens
taaaatattaaacggttacatttacagccaaaatttgttttgtttttattttgttgtgttttcattaagaagacattgtgttggtatgaaatatgggttctggtcaatcaaagggaaattctagattatttgtaatatcatgtaataacttgtagcagaaattggcagaccatagcctgattgccaaccccaacccatttttataaataaagtgttttggaatacagccaagttattcatttacatattatctgtgtctgctttcaagctatagtagtagggttgagtagctgtgtcagacaccatatggcctacaaagcttaaaatatttactatctagtcatttatgggtaatatttgcatacctctgccctataagcaaattaatgcatatcttggaaatataaagttatcaaacttgttattttttagccatatattagtgggtagcatttttgtaattaaacatagaataaaacctctactggaaatatttccctcaaaaggtaaccatctttttattcagtcatttatcttatttaaaaaaattatttttattcatttatttatttattttgaggcagtgtctcactctgttgcccaggctggagtgcggtagcgakctcggcacactgcaacctccacctcccgggttcaagtgattcttgtgcctcagcctccaag

SEQ ID NO: 895734 - DNA, 637 bp, Homo sapiens
attgttagtaaaaaatgtagggatgtgtatgtggtgcgtgtgtgtgtgtgtattttcataaaggagtgttagtcaagtgcttgctacttacttgtaaccaaactaaggtttggatgcatgccacctgaaaagacaaacacataagaagtaaggtttcatrgaaggaaagcagctttattcaagtggtgacaccttgggagatggccagactcaagtctgaaaaatccatcttaaattctcagtctgtataaggggattttaagggggaaggttgcatggaaactgtacaggagtgtgcatggtgcaggtctgcttgttgttttccactgctagtttgagtaacagactatccagaggcctggttggcatcatctcagtagaggtcaggttagggattaactgcacaactgtttcatcttgaaaggaagaaaattgaaactgccatctctgcctcatgcctggattgttgtaagattagcctttggacatttcaagcaaacaggtagttacatatatgtgtatcaagaaacaaacaagggagggattatctttagagtaagctagcaaactggctatactggttacattaggagacatttctcaaggactctttttaataccagctaattctctcatt

SEQ ID NO: 895735 - DNA, 655 bp, Homo sapiens
aggtgttatttctaatatcatttccttggagagttctccctcaactattgcttaatcacagtgtattgtaactctacaggacatgtctgaccctgttcactcatcactaaaattactatatacaaccagaattgtgcttgacmcatataatgaagcattgagaaaacatttgttgaataaatgttttcttctaatactggtttatgggcataactatttctgaatgtgtcctttctcaaaggtagacacctgagctttatgatccatggtgttatcctaaaaaacagaacacaatattattatattaagtataccactgaatatagcaattggtgtcttgaggagttacaacatgtcattatttaaataggttatcatattttttccagtaatcaccccagctatattaaaatgaaacttctcccctttttctctctaggtagcatcttccttgactctttcttagacagatgctataacttttcagctacttgagttattagtttatttcattatttattgattttaaaatgccaatctcaaattatactcaaaggtttttctacatttcccatctgtgatgacagctcttatagctttaagagtactaggttgtgggtgggcttcaagacatctcttttcactcccacttcta

SEQ ID NO: 895736 - DNA, 655 bp, Homo sapiens
aggtgttatttctaatatcatttccttggagagttctccctcaactattgcttaatcacagtgtattgtaactctacaggacatgtctgaccctgttcactcatcactaaaattactatatacaaccagaattgtgcttgacacatataatgaagcattgagaaaacatttgttgaataaatgttttcttctaatactggtttatgggcataactatttctgaatgtgtcctttctcaaaggtagacacctgagctttatgatccatggtgttatcctaaaaaacagaacacaatattattatattaagtataccactgaatatagcaattggtgtcttgaggagttacaacatgtcattatttaaataggttatcatattttttccagtaatcaccccagctatattaaaatgaaacttctcccctttttctctctaggtagcatcttccttgactctttcttagacagatgctataacttttcagckacttgagttattagtttatttcattatttattgattttaaaatgccaatctcaaattatactcaaaggtttttctacatttcccatctgtgatgacagctcttatagctttaagagtactaggttgtgggtgggcttcaagacatctcttttcactcccacttcta

SEQ ID NO: 895737 - DNA, 638 bp, Homo sapiens
tctgtaggttgtctgttcattctgttaacagtttcttttgttatgcagaagctcttttcattaattatatcctagtttttgcttttgttgcaattgctttcagtgtcttcatgaaatctttgcccgtgcctatgtcctcagtggtatttatggttttacatttaagtcttttttattttttaaaaacagtctcactcttkcgccaggctagtgtgcagtggcgcgatctccgctcactgcaacctctgcctcctgggttcaagcaattcttctgcctcagcctcccgagtagctgggactgcaggtgcacaccaccacacccagctaatctttgtttttttagtagagatggggtttcactctgttgaccaggatggtctcgatctccctgacctcatgatctgccctcctcagcctcccaaagtgctgggatttcaggtctgagccaccacacctggcctacatttaagtctttatccatcttgagttaatttttgtatgtggtgtaaggtgggggtccagtttcaatcttccgcctatggctagccagttctcccagcaccatttattgaataggaaatgcttgtcttgttgcttttcttgtttttatcaggtttgttgaagttcagatagtttta

SEQ ID NO: 895738 - DNA, 638 bp, Homo sapiens
tctgtaggttgtctgttcattctgttaacagtttcttttgttatgcagaagctcttttcattaattatatcctagtttttgcttttgttgcaattgctttcagtgtcttcatgaaatctttgcccgtgcctatgtcctcagtggtatttatggttttacatttaagtcttttttattttttaaaaacagtctcactcttgcgccaggctagtgtgcagtggcgcgatctccgctcactgcaacctctgcctcctgggttcaagcaattcttctgcctcagcctcccgagtagctgggactgcaggtgcacaccaccacacccagctaatctttgtwtttttagtagagatggggtttcactctgttgaccaggatggtctcgatctccctgacctcatgatctgccctcctcagcctcccaaagtgctgggatttcaggtctgagccaccacacctggcctacatttaagtctttatccatcttgagttaatttttgtatgtggtgtaaggtgggggtccagtttcaatcttccgcctatggctagccagttctcccagcaccatttattgaataggaaatgcttgtcttgttgcttttcttgtttttatcaggtttgttgaagttcagatagtttta

SEQ ID NO: 895739 - DNA, 638 bp, Homo sapiens
tctgtaggttgtctgttcattctgttaacagtttcttttgttatgcagaagctcttttcattaattatatcctagtttttgcttttgttgcaattgctttcagtgtcttcatgaaatctttgcccgtgcctatgtcctcagtggtatttatggttttacatttaagtcttttttattttttaaaaacagtctcactcttgcgccaggctagtgtgcagtggcgcgatctccgctcactgcaacctctgcctcctgggttcaagcaattcttctgcctcagcctcccgagtagctgggactgcaggtgcacaccaccacacccagctaatctttgtttttttagtagagatggggtttcactctgttgaccaggatggtctcgatctccctgacstcatgatctgccctcctcagcctcccaaagtgctgggatttcaggtctgagccaccacacctggcctacatttaagtctttatccatcttgagttaatttttgtatgtggtgtaaggtgggggtccagtttcaatcttccgcctatggctagccagttctcccagcaccatttattgaataggaaatgcttgtcttgttgcttttcttgtttttatcaggtttgttgaagttcagatagtttta

SEQ ID NO: 895740 - DNA, 645 bp, Homo sapiens
ggtggagggttagaggagggagaggatcaggaatcacaagtaatgagtactaggcttaatacctcggtgatgaaataatctgtacaacaaacccccatgacacaagtttacctatgtaataaaactgtacctgtaaccctaaaattaaaatgttaaaaaaagagtagccactagaagataagccacctccaaggaaaaaaacacctccaagggaraaaaaggaaacagatgtactttttacaatagaatgtgttgattcttcttgaagaatactagtgtcagtaggattttagctatttttagtctgctaagaattggcatgaatagacattaacaggttaatgaagtatctgaaaataagtgaatccagttgctgtttaatgtcccaaactcaaacttttaatgctttataacagtctcagttccttttataactgcgaggaaatagtttctttcccaggggcatactgccttttaaaaaaatgtctatttttattaacatccctttgtggccgtaactactattaggaagttggagtaaattatcttactgatgacctatttctgtttctaatagttcttaatcaagaatgatatgcaattgggacacaaattttcttccttcagacttactccaaattcccg

SEQ ID NO: 895741 - DNA, 625 bp, Homo sapiens
cctggtccccaaggtggaattgcgtgtctagaattccctttaaaactgtcaatagccgaattttcttttattactctctggcactttaaacaactttggcatcatttaagaattttgatgttttattttgaagttccaaaagtggraaataaaagcatgcggagggtaggattaacaatacttgactggaccatctagaagtgactgaagaaactggttttgtttatatagagaggagaaacccaaagactgatttagtaactagctatatagagggcagaactaaattactgctttaatttccctggtgaatttgtagaatttaaccactttaaataacagtatccccatttgcaagatgaagataatatttctgctttatgactgtttggggaggattaaatgagacaatatagattaaatattgaatatagtagctgtaataataggagctcaataaaagtgtcttcctttcttttgtcttctttaataggtggtatgatcactatggatatcaaaatgggaagttacagttgcgattacttaaaacattcagaaacattatctgctatggtggttagctgtggaatatcctttctctttctctttccaaggaaaaaaattg

SEQ ID NO: 895742 - DNA, 650 bp, Homo sapiens
gaatttgtccacactggttggaaatcccaaatatatgcagaactaaaatgtttagcagggcactcatggttcttcatagactattttcctacatcatctctctctatttctccaatgtatggcctttcagccaatggatgatctccatacagtcagtagagttttatccttcatacatgtacagatgatgctttccaaacctagaatacctgctcaggctttctacatgtgacaaagtcctttttatgttttaggattcagccaaatattataatctatttttgcagaaagatttaggcatttttttcttctgtgtttctttagcatcttgtttataacacagctttataatatttcacattggatgtaattatttctgcattaatcaaacactycaagcaagaaaatgaaattaacttttgactaatcaacctgtatataccaggtatgatgctttgtgcttttacagacatgattgcctttaaccctctatgttgtgtaaggcaggaaggctcaaaaccatttttgcataagaaaatgatagttagaattatcctacaactttcttaaggtgaaacatctgataagtgatgaggaatgaattgctattaatgttctcagattttaccaaccatgtccttctcatttgc

SEQ ID NO: 895743 - DNA, 588 bp, Homo sapiens
gtttgacagagagaaacatccaaactatagcaatgtgtttgtgaaaaactgttgaaacttcaaagaaaagagtgttaacgagtaagaaaaataactgtttttaaaccatttgaaagctatcagacagaagacaagttaaatattttcttctgctaatctctctttcattgacaagtgatctgaggctctggactcagaccaacgtgatgtggtattcagatagccttgggcaggttaggatcacagcgtctctgaaaagttcatggtgggaaccctccaaaaaagcattaaatccaaatgagatcaggaaaagagagacactctggatacacagcaaattgtgcccaagaagccttgactaggaagaagatttcacgaaagaggtaagaagsagacatgccagaagtaattcatctaacaattagcagacagactcagtagtggcttttggtagactcgagctacatgtgactcgggctgggatgtgtgtcagaaggttaaaaggcacagccagtaagtaagcttagaagagaatgtgaaagataaaatttcagttgtttttcaaaaatatgtttcccataaatagac

SEQ ID NO: 895744 - DNA, 582 bp, Homo sapiens
catcagagtgggctgtggtaggtgcaccagggaagggaccatacagaggaggctggtctcaagtcctagggtgcctgggatggccctattgaaatgctgcagcagctcttgtgcaggcagggatctgtatggacagctgggtggacacaggtgcctactgacctcccagatccttcagcagagctcagccctgagtgacagcccaaggcagacctggctacctcagcctctggctcacagccctcagccagagccytgagaggcctgggatctcaaagctgcaaggtgggaggccagaggagagaagcccggagctggtagtgatgctggctgagtgaaaattgcacatttcccaacagtgtgatgctccctatccagcctgggcttttggcagacttctgtgctttgtggaggaagctggctcaaattcctcccctccctgtgcagtttgtgtgtcaaggtgtacttgtcacacccaactcaggatatcttgcatcactttgtgggtccttgtcccccagagctgggactgctgagttttagccctaagctcttgctcccatcttagcaagtcagggccca

SEQ ID NO: 895745 - DNA, 592 bp, Homo sapiens
tttaaagaatttattgctgcacatattattgctccaggttccatgctaggttctagggatacagaggtgaaaaactcctaatcctcatccacaaaaatagctcacaggtaattcataacagttggttcataagatacatgaaaaaagagaagatctgtccaratgcactaaattaggaaaaaaaaaaaaaaaagcagaaaggagaagagaagaggctatgtcacggccatgtcagtcccagaacaaaaacattgtttctgtgttatttattcttaacaacttttttttgttttgttttgtttttgagacagggtctctctctgtcgcccaggctggagtgcagtggcacaatctcggctcactgcaacctccacctccagggttcaagcgattctcctgcctcagcctcccgagtagctgggattacaggcgtccgacaccactcccggctaatttttgtatttttggtagagatgggttttcaccatgttggccaggctggtctcgaactcctgacctcaggtgaactgcccgcttcagccagcctccatagtgctgggattaaaagcatgggccgccgcgcctggcctta

SEQ ID NO: 895746 - DNA, 654 bp, Homo sapiens
tggccccggctgaatcctaatatgcatgtggaaattgataattatgttcattcaaccctttacaaagtgccttcatgtgttaagatgcaaaaacatgaagctaagtgcccaattctttattaattcggtgtggagttttgcagttaacggtgccaggtttgcatctgcaattacccctcagctttttagtggatctaaaagggcaagtgaaccaccctaaccgcagcctccctcccccartacaatgcatcattctcctgtttgaagaaatgaagggaagttgatatggagctagccactctgttgatgactgtgagtttttctctaagatttagctggagaaacctaagccccgtaagtagaaagtttagagatatttcttgtggcctggaattggaatcagactcacttaatgaggagataaaacgtggctaccttgggctaaggactctcaggacctggcaggtgtcttgagaaagacaaacaaatgctgttctccattgtcctaggagagacatacactaaacaaaatcattttagatgtaaggactgctaagaagaaaatcaaatggaattgaaatctggctagtgactcctctttgccaatttcttgtgaatctgaatgacttcgtcactatgtccgggacacatgac

SEQ ID NO: 895747 - DNA, 654 bp, Homo sapiens
tggccccggctgaatcctaatatgcatgtggaaattgataattatgttcattcaaccctttacaaagtgccttcatgtgttaagatgcaaaaacatgaagctaagtgcccaattctttattaattcggtgtggagttttgcagttaacggtgccaggtttgcatctgcaattacccctcagctttttagtggatctaaaagggcaagtgaaccaccctaaccgcagcctccctcccccagtacaatgcatcattctcctgtttgaagaaatgaagggaagttgatatggagctagccactctgttgatgactgtgagtttttctctaagatttagctggagaaacctaagccccrtaagtagaaagtttagagatatttcttgtggcctggaattggaatcagactcacttaatgaggagataaaacgtggctaccttgggctaaggactctcaggacctggcaggtgtcttgagaaagacaaacaaatgctgttctccattgtcctaggagagacatacactaaacaaaatcattttagatgtaaggactgctaagaagaaaatcaaatggaattgaaatctggctagtgactcctctttgccaatttcttgtgaatctgaatgacttcgtcactatgtccgggacacatgac

SEQ ID NO: 895748 - DNA, 633 bp, Homo sapiens
aacaatattcatcaaaaatcattgcccattggcccactggagaacagtcatctgtaactatatctgtacctaactctgtcatctgtacctatatctaggtccctctcagagacacaaagccttgtttggtaagaagaatagaggagattaatagggatttctaaagaattagctaaaycccagataaaacaagaagcaaataagtaaatccttgaacattcaagtcattctgccttaagtaactatcaatctccctggtaaatgagggagtggggaagatttgtcaagttcttttttcattccttcacccaggcatttactcgacaactatatcctgagtatctgccacatgccaggcacagttcaaggggcttggggacatcagagaacaacaaaaagacaacgactcctagagttgtgtgatttccatcccaacagaggtgtgtgggaggtgaggacaacaacaataaggatgatacagaggtaatgatatagcatattagcaggtgaaagtgcagtagaaattgaagaaaagcaggggaggagagacaaggagtgtgatgaggaggacggggttgaaatttcaaagacgacggttgcatggaaaagataacttgagcaaaagacctgatg

SEQ ID NO: 895749 - DNA, 522 bp, Homo sapiens
aattgaagacctcaacatttaaatgactcttctaagaaaagagcacacagttaaaactcatgaaatatctgattctaaatactgcgttgtttctatgaacacactcaggggtggggtcttcggggacagaatccctttcayaaggttgtggagagctgaatcacccatgaactcaactcttgttgaaaagggagagtcctcaaaagagtgagtatgattcatgggaactcatccatgtgagcagatcagtcactcaaagaggataataaactcacagaataaaggacaagaggatattcgacgtgaggtcaggacttttcattcatggggtatactgggtcgaatgctgcccctcaaattcatgtccagccaagacctcagaatgtgtccttatttgaaaatagggtttttgctaacatgattaaggtaaagagtgaggtgagatcttattggattttggaccctaaacccagtgaatatcctcataagagacagataaagacacacatgaagaaggccatg

SEQ ID NO: 895750 - DNA, 528 bp, Homo sapiens
ataattttatatgatactatgcctgaacacagtgaacaaaatctatataggtaacaatgatgcagcttaattttaagtagtgaagcaaagctgtcttctgctcagaacaaagttatttttctttaaatgcattaaacataagggaaatattagtaggacttgatgaacaacagttaatagtgataattgaaaccatccaatcacctacccatatactatgacatttattatataggaaatttcatcaaaatgttacattgtgtaaaataaaatcatggggcttgatttctttagggtctttaatctttgtggaagaatttcaacctcagctaaaatttagaaaatgaattcygatgaaacttgaaagactgaaatattttaatctccctacatcaggaactgcagatagacactgttactaactggcttcctatgggccagggctgagaggaaaggcaaagcaaacatttggtgccctatctatataatggagctttttttttacaactcagattgttacccatccca

SEQ ID NO: 895751 - DNA, 546 bp, Homo sapiens
ttcatctcatcatttcatcttttcatctcatcatttcatttaatcattttatttcatgtaatcttttcatgtcatcatttcatcatttcatttcatcgattcatcatttcatcatttgcatttcattatttcatcatttcatcatttcacttcatctcatcatttcatttcatcattktatatcatttgcgtttcatcatttcatcttttcatcatttcatttcatttcatcatttcacttcatcatttcttcatttcatttcctcatttcattgcaccatttcatcacttcatcatttcatcatttcatttcatcattccatttcatcatttcatcatttcatttcatctcatcatttcatttcatcatttcatttcctcatttcaccattacatttcatctcatcatttcattttatcatttcatttcatcatttcatttattcatttcatcatttcgtttcatcatttcatcatttcctttcatttcatcatttcatttcatcatttcatctcatcatttcatctcatcatttcatttcatca

SEQ ID NO: 895752 - DNA, 655 bp, Homo sapiens
aataattttagtaggattgatatcatttcttcttagtatgtctggtaaaactcagcagccaatctacctgtttcaggcctttttgttgttgttgttgttgttggtaggttctttagtactgactcaatgtcagaagttgatattwgtctacttagagttttgatctctttctgattccatcttgggagactgtgtgcttcctggaatttattcattttctccagattttctaatttgcgtgcagagctgttcatagtactcgctgaggatcttttgtatctctatctgatccattctaatataacctgtcatttttattgtgcttatttggatcttctctttcttttttatatttgttaatttggctaggagcttatcaattttttttgaagaaccaattttttgttttcttggactgttgtatacatttttgcatctcaacttcattaaattcttctctaattgctgttatgtcttctctcatgctagctttggggttggttggttctttttttcaagttcctttaggtgcaaagttacatcgttaatttgagacatttctaacttcttgataaaggcatttagggctataaagttttctcttaacactgctttggctgcatcttagaaattttggtaagttgtgttcctattt

SEQ ID NO: 895753 - DNA, 605 bp, Homo sapiens
gagctgaccaggcacctagaagctgtgccccactgcaggctgccggtggagctcatgacaaggccggaacaaggccggaacgtgaagcactcccttgtctgtccttttttcctgaaggctggggcttgcccggccaatgtcacccttcaggacagggaatcagagctttgcatggctgccttaccccaccagagcagygccacagagaatcatggctgaggctttcctgtgggctgcagtgcctgaccctttagggtccccacaaaaacatctttcctgcaaataatccaccgtgtcctgcttgccagcctaggcttcctcatcagttggtgatttcaatgaaaacaaactacagtggaatgaacaaattctaaatcaggaacacacaaagaatctgtggaaagtccatttgtcatctagatttttaaaagatacacattttcccttcttgttatattcagtagtgcatgaagccaatattataatagatgtgcaactcacactaaagctgactaaagggtgaattcttattctaaggtactttgtggtctcaaatttatctgttcccacccccaggaccccattaaaactgaataattgtcatt

SEQ ID NO: 895754 - DNA, 668 bp, Homo sapiens
ctattgaattttagttttgcaacataaaaacattctagagatatgttgcataacaatgtgaatatatttaatattatttaactatgtacttaaaatatttaagatggtaaattttatgtggttttgactacattaatagtgaaaaactttctaaagagatacatatttatcaatcttttcaaaaattaccttcaaatcctaaaaatatcagaaaaacaatraagaggccaggtgcagtggctcatccatgtaattgaaacacatcaggaggctgaggagggagaatagcttaagcccaaaagttggagaccagcatgggcagcgtaaaaagacctcagctgcaaatcacaagcagaaggaaactggcaaatgaaaaaatatgtgaaacttaaaacagaacactcttgacttcttgttcaagggtcagaaaatttaatattattaagatgtcaatactactcacagtgaagcacaaattcaaagtattttctatcaaaatctcaatgttacatttgtttcagaaatattaagtcttaaaattcatatggaatctcaagggacaatgagtagccaaagtagctgtggagaagaacaaagttagaggtatcacacttcctgattccaaaatatattataaagctatagcaatacaaacagaaagacaaata

SEQ ID NO: 895755 - DNA, 668 bp, Homo sapiens
ctattgaattttagttttgcaacataaaaacattctagagatatgttgcataacaatgtgaatatatttaatattatttaactatgtacttaaaatatttaagatggtaaattttatgtggttttgactacattaatagtgaaaaactttctaaagagatacatatttatcaatcttttcaaaaattaccttcaaatcctaaaaatatcagaaaaacaataaagaggccaggtgcagtggctcatccatgtaattgaaacacatcaggaggctgaggagggagaatagcttaagcccaaaagttggagaccagcatgggcagcgtaaaaagacctcagctgcaaatcacaagcagaaggaaactggcaaatgaaaaaatatgtgaaacttaaaacagaacactcttgacttcttgttcaagggtcagaaaatttaatattattaagatgtcaatactactcacagtgaagcacaaattcaaagtattttctatcaaaatcycaatgttacatttgtttcagaaatattaagtcttaaaattcatatggaatctcaagggacaatgagtagccaaagtagctgtggagaagaacaaagttagaggtatcacacttcctgattccaaaatatattataaagctatagcaatacaaacagaaagacaaata

SEQ ID NO: 895756 - DNA, 601 bp, Homo sapiens
tgaagcaattctgaccccaacaagacctactggggccttttgtttgggccagttttttggccattgataaagagctatgatcgacacgtctgcttctgtgtccaccagaccctcaaattgttttccttgaatagtaaccatacaaataggtctattgtcagagacttgatgtacccaataggtagcattgcctgctgaatttgtgttccaaatcctcctgttcttttttctgagctttctcctaacttaacatatggtaaaagcaacagttgagctattctgtcaccttgattagcactccagggaacagtggaggagataacaatttgaatttctccctggcaatcagagtccactactccagtatgtacttgaattccctttaagtttaagctggaccttcccagtataagtcccaccrtgccatttcacaatgggccataaacttccactgggaccttcctaggaggctccccaggaaggagggatatggcttcggtacagcataaatctactgccccacttttagctgtggagggggacaattcctgtacattcatacagggatagactgggctgaggacactccgtttggagttgg

SEQ ID NO: 895757 - DNA, 601 bp, Homo sapiens
tgaagcaattctgaccccaacaagacctactggggccttttgtttgggccagttttttggccattgataaagagctatgatcgacacgtctgcttctgtgtccaccagaccctcaaattgttttccttgaatagtaaccatacaaataggtctattgtcagagacttgatgtacccaataggtagcattgcctgctgaatttgtgttccaaatcctcctgttcttttttctgagctttctcctaacttaacatatggtaaaagcaacagttgagctattctgtcaccttgattagcactccagggaacagtggaggagataacaatttgaatttctccctggcaatcagagtccactactccagtatgtacttgaattccctttaagtttaagctggaccttcccagtataagtcccaccgtgccatttcacaatgggccataaactyccactgggaccttcctaggaggctccccaggaaggagggatatggcttcggtacagcataaatctactgccccacttttagctgtggagggggacaattcctgtacattcatacagggatagactgggctgaggacactccgtttggagttgg

SEQ ID NO: 895758 - DNA, 601 bp, Homo sapiens
tgaagcaattctgaccccaacaagacctactggggccttttgtttgggccagttttttggccattgataaagagctatgatcgacacgtctgcttctgtgtccaccagaccctcaaattgttttccttgaatagtaaccatacaaataggtctattgtcagagacttgatgtacccaataggtagcattgcctgctgaatttgtgttccaaatcctcctgttcttttttctgagctttctcctaacttaacatatggtaaaagcaacagttgagctattctgtcaccttgattagcactccagggaacagtggaggagataacaatttgaatttctccctggcaatcagagtccactactccagtatgtacttgaattccctttaagtttaagctggaccttcccagtataagtcccaccgtgccatttcacaatgggccataaacttccaytgggaccttcctaggaggctccccaggaaggagggatatggcttcggtacagcataaatctactgccccacttttagctgtggagggggacaattcctgtacattcatacagggatagactgggctgaggacactccgtttggagttgg

SEQ ID NO: 895759 - DNA, 541 bp, Homo sapiens
tctttttgtatgtcctatctgtccacaattatagcaagatccagggcacactcatatgttttttgttacccttagtccagccattccttgagcaaggaggctggccttatataagtgcctgccaatgccatcacaggctttaatrtatactcttaaagttttttcctcatttagatctgcctttcccttaataggtctaattgctgcctgacattctgtattaacattttcataagcaagtagctggacgatcactttcctggcatgagaatccaaaatagccttttgagccacatcttgcaaatgaatgataaaatctggataaggctcccttcgaccctgtcaaactgagttaaaagaaggataagtagtaccagggtagtgaattttttcccaggctcttaggcatatagttctgagctgatcaacagcctcatcacccattaccatctgttgatttagagtaccccatgcctgtccacttccaagcaattgatcagatgtgatattaatgaaagtttgggcttgagcatttctgcat

SEQ ID NO: 895760 - DNA, 541 bp, Homo sapiens
tctttttgtatgtcctatctgtccacaattatagcaagatccagggcacactcatatgttttttgttacccttagtccagccattccttgagcaaggaggctggccttatataagtgcctgccaatgccatcacaggctttaatgtatactcttaaagttttttcctcatttagatctgcctttcccttaataggtctaattgctgcctgacattctgtattaacattttcataagcaagtagctgracgatcactttcctggcatgagaatccaaaatagccttttgagccacatcttgcaaatgaatgataaaatctggataaggctcccttcgaccctgtcaaactgagttaaaagaaggataagtagtaccagggtagtgaattttttcccaggctcttaggcatatagttctgagctgatcaacagcctcatcacccattaccatctgttgatttagagtaccccatgcctgtccacttccaagcaattgatcagatgtgatattaatgaaagtttgggcttgagcatttctgcat

SEQ ID NO: 895761 - DNA, 553 bp, Homo sapiens
tcaaaaaaaaaaaaaaaaaaaagaagaaaagaaaaacgtgtccaggccaggtgcagtggcttacgcctgtaatctcagcagttttggagaccgagatgggtggatcacttgagctcaggagttcaagaccagcctgggcaacacgacagaaccccagctcttcaaaaaatacaaaaattagtcaggcatgatggcttgcacctgtggtcccagctrcttgggaggctgaggcaggaggatcccttgagtccaggaggcggaggttgcagtgagctgagattgtggcactgcactccagccgaggtgacagagggcaacgctgtctcaaaaaaaaaaaaaaaaaaaaaaggagccagtgcccgggggtgtctagtggagcatcacgttccattctttgttggattaatgaattcaggtagtctcttcccacaccacctcacactctagggttaaaaaaaaaacacaaaacgaatctatttacttccttatggtgtccaagaaataaaataacctctagaaaggactttgatattttcattgagctgataacaaa

SEQ ID NO: 895762 - DNA, 553 bp, Homo sapiens
tcaaaaaaaaaaaaaaaaaaaagaagaaaagaaaaacgtgtccaggccaggtgcagtggcttacgcctgtaatctcagcagttttggagaccgagatgggtggatcacttgagctcaggagttcaagaccagcctgggcaacacgacagaaccccagctcttcaaaaaatacaaaaattagtcaggcatgatggcttgcacctgtggtcccagctgcttgggaggctgaggcaggaggatcccttgagtccaggaggcggaggttgcagtgagctgagattgtggcactgcactccagccgaggtgacagagggcaacgctgtctcaaaaaaaaaaaaaaaaaaaaarggagccagtgcccgggggtgtctagtggagcatcacgttccattctttgttggattaatgaattcaggtagtctcttcccacaccacctcacactctagggttaaaaaaaaaacacaaaacgaatctatttacttccttatggtgtccaagaaataaaataacctctagaaaggactttgatattttcattgagctgataacaaa

SEQ ID NO: 895763 - DNA, 619 bp, Homo sapiens
tgagcatctatgatataccaaactctttgccaggcacttacacatctgatgtcactggttttcagaccaattctatgaattaggtcagtgttcctcaaactcttatgtgcataagagtcacctggggatcttgtgaaaatgcagattcctgttcagcaggtctggaccagggcctgagagcctgcatttctaagaagttcccaggtgatccctatgctgctggtctagggaacacattttgagtgactaggagtcatgtgttttaagacttgtttttgtaatccaggtgcagtgacactcacctgtagtcccagctactcaggaggctgaagcaggagcatcacttgagcccagaagtttgagtcgagcctaggcaacatagagagacctcatctctttaaaaaaatgtttttaataagaaaataaaaataaaactatttattgactcattcctayataacaagcaccatactcggcactcagaatgtaataatgaagccacaacttgaacgcagagctctctgatttcaaacttatgctcatacccaaagaagtgggaacaattgttctcaatacacaggaacggaaacaataggagatggcgctgggagggagggta

SEQ ID NO: 895764 - DNA, 619 bp, Homo sapiens
tgagcatctatgatataccaaactctttgccaggcacttacacatctgatgtcactggttttcagaccaattctatgaattaggtcagtgttcctcaaactcttatgtgcataagagtcacctggggatcttgtgaaaatgcagattcctgttcagcaggtctggaccagggcctgagagcctgcatttctaagaagttcccaggtgatccctatgctgctggtctagggaacacattttgagtgactaggagtcatgtgttttaagacttgtttttgtaatccaggtgcagtgacactcacctgtagtcccagctactcaggaggctgaagcaggagcatcacttgagcccagaagtttgagtcgagcctaggcaacatagagagacctcatctctttaaaaaaatgtttttaataagaaaataaaaataaaactatttattgactcattcctacataacargcaccatactcggcactcagaatgtaataatgaagccacaacttgaacgcagagctctctgatttcaaacttatgctcatacccaaagaagtgggaacaattgttctcaatacacaggaacggaaacaataggagatggcgctgggagggagggta

SEQ ID NO: 895765 - DNA, 681 bp, Homo sapiens
gatgttccttcactctccaacttgtgtgactttcttcctgtctttcctcgtctagaatagctctcttcccattactcctagtggactttgggtagtgctggccctacaacctctaattctcccttcatctggtacggtgttctgacttcctctagggaratctctctttttttcttttgtagacagtgtctcactctgtttcccaggctggaatgcagtggtgtgatcaaggttcactgcagcttcgacctcctgggctcaagtgatcctcccgccttagcctcccaagtagctggggctacaggcatgtgccactgtgcctgactaattttttaatttttttgtaaagacagcatcttgctcgtttgcccaggctgggctcaaactcctgggctcaagtgatcctcccatcttggcctgggattactggtgtgagccaccacgcctgacctggggaatctctttacccaactagagatggatttcatggtgtcttttcctggtcacatggcccaagtaaggacagttggttgctcactcttgggacttggaatcttgagtagaggacacaccactaccaacaacaaaatggtttgaactgacaagactcctgatgagttccatctaaggctatacacagatctctcctcctctcagccctcacctttaaaaaaaaataat

SEQ ID NO: 895766 - DNA, 647 bp, Homo sapiens
atcttttaaagacaccattgattaggttttctgttttatgcaatggatacagaaagtcagggctacataggtaggagaataatcagcccagaaccaatgtctgggctattgttactcagagtcatggtataataatagagaagaaaacactaaatgtaattcatgggtctggttctagtcctaattctgtcttttatrtaagaaagaacctatgtccttgctgttcaccttctaagcatcactggactctccaaaattcttttggtccccagccaagcagtggtcaccatcagtctccctcatcttgcacaacttcccatgacccaagcatcctttcccgccaggaaagttccccaagactcctccaccatcacccaaacaaaacccatctcagtgttaatatctagtgttttttgagtgtatattgtgtgccaggcattgtgctgggcactttctacttatctcatttgaatgcacccagcaacccaaccagattttctgtatgagaaaaacagagtcataagtggcagaggtagaatttgaattcaagtccacctggcctctgtaaccacaccagaccaatctggttcaacttttatgtaacaaagttgtgagttgtttttcagttggtatcaacccccaggtta

SEQ ID NO: 895767 - DNA, 647 bp, Homo sapiens
atcttttaaagacaccattgattaggttttctgttttatgcaatggatacagaaagtcagggctacataggtaggagaataatcagcccagaaccaatgtctgggctattgttactcagagtcatggtataataatagagaagaaaacactaaatgtaattcatgggtctggttctagtcctaattctgtcttttatataagaaagaacctatgtccttgctgttcaccttctaagcatcrctggactctccaaaattcttttggtccccagccaagcagtggtcaccatcagtctccctcatcttgcacaacttcccatgacccaagcatcctttcccgccaggaaagttccccaagactcctccaccatcacccaaacaaaacccatctcagtgttaatatctagtgttttttgagtgtatattgtgtgccaggcattgtgctgggcactttctacttatctcatttgaatgcacccagcaacccaaccagattttctgtatgagaaaaacagagtcataagtggcagaggtagaatttgaattcaagtccacctggcctctgtaaccacaccagaccaatctggttcaacttttatgtaacaaagttgtgagttgtttttcagttggtatcaacccccaggtta

SEQ ID NO: 895768 - DNA, 647 bp, Homo sapiens
atcttttaaagacaccattgattaggttttctgttttatgcaatggatacagaaagtcagggctacataggtaggagaataatcagcccagaaccaatgtctgggctattgttactcagagtcatggtataataatagagaagaaaacactaaatgtaattcatgggtctggttctagtcctaattctgtcttttatataagaaagaacctatgtccttgctgttcaccttctaagcatcactggactctccaaaattcttttggtccccagccaagcagtggtcaccatcagtctccctcatcttgcacaacttcccatgacccaagcatcctttcccgccaggaaagttccccaagactcctccaccatcacccaaacaaaacccatctcagtgttaatatctagtgttttttgagtgtatattgtgtgccaggcattgtgctgggcrctttctacttatctcatttgaatgcacccagcaacccaaccagattttctgtatgagaaaaacagagtcataagtggcagaggtagaatttgaattcaagtccacctggcctctgtaaccacaccagaccaatctggttcaacttttatgtaacaaagttgtgagttgtttttcagttggtatcaacccccaggtta

SEQ ID NO: 895769 - DNA, 615 bp, Homo sapiens
aaaaagaaagaaagaaaagaaaagaaaaaagattctaccaaatggacttcttttcaccaaatcctctaacaaagcaaatagcaatagagcggacatcgatttcctttttccttttccctcattgtctaaaagctgtggtggatggaattgacctaaatctcaaatccaagggtgggacttgatgggtccaagcttatcagggtatttccatcagacttgcccttgactggttcaagtaacccaggcctagcctaagcgaatcagctcagtgatccacgattaggagaattggtttaagactggtccaatcaacggagttaggatttgtattcatcaattaagggcagtgactcgccctcctcagatatgaataaagaagcttgtaaccttgtttgttgttgatagctaccttaaagccctggagaaagccagtttgtggatgaatccaacttayggagaaggcagtgccagaagaactgcagtgaaacagagctggaatcttgatcaaaccacaccagaagtgtctctgaagctggcttttattgtttgacctggtttgagttggtttcctgttacttgcaaccaaaagaatcacaattgatagactaaaccata

SEQ ID NO: 895770 - DNA, 608 bp, Homo sapiens
ccaatcaaagtccttcccttgccttttagaaacagactgggagacatttactgagcacctattttgagggacttacaaggtttccttccagctttgaaatccacgaacctataaaaataattccatttttaattccccacttggaaacaatgatttgttaagcacttattgtatgctaagcaatatgatctatgcattatctttcaacaaccttacaagatagataatatttctgtttccatttcttaaataaggaaaggtttcccagaagttaaacaatttgcttaaggtcaaacagctagaaagtgctcaagtttgaagtttcaatttctctgactccagagttcagagtcttaattaatggctaaaytgactctcattgacataattatgctctgagcccatcactagttcattacaatttctttgaaaataccatttttaatggctgtaacttcttttttatcttgtggatgctgtataatttaagtaactcccagttgttgaataattaggacattcacaatctttgccattataatcggcattttgttctaaatctcagtcagcaaactgcagcttgtgggccagattcactttgctgcctg

SEQ ID NO: 895771 - DNA, 487 bp, Homo sapiens
gtagttagggacaggaagagaaaaatcctaaccatagtgtctttatttatttatttgtttgtttgtttgttttttgagatggagtctcactctgttgcccaggctggagtgcagtggcacaatcatggctcactgcaacctctgcctcccaggttcaagccatcctcctgcctcagaccctctagttgctgggattacaggcacgtgccaccatgcccggctattttctgtatttttagtagagatggagtttygccattttggccaaggtggtctcaaactcctgacctcgggtgatccacccgcctcggcctcccaaagtgctgggattacaggcatgagccactgcgcccaccgatggtgcctttaaacagtactcttgattccaggtgacagaaattcaaattagcctaaaccatcatgtattggcccatgaatctaaaatgtccagtggcagagctggctttggtcatagtccaggagctca

SEQ ID NO: 895772 - DNA, 622 bp, Homo sapiens
tttttatagagtgtttatagccgagtctccccttcctcagctgtagaccaggcatggggagagttcagcactccgaataccctgctccccaatttgttatgaagatcaaatgaatgagtccaggtaatggacttggaacatttcctggcatagaataagcagacaataagcattagacatgacaacatttagaaattttatttctaaatttgccaatctagattttatgaaattcattttaaaaagagtgaaaatatgaattaaatacatttccctttcttcttgagtttcctaatgcatgattgayagttaaagcaaaaattgtaaggctatctcatatacttgttataaatatatgtaggaaaagacatttaagacaattatattattaatagggagggataatgggtaagatttctacacttcacttgaactgttaaaatgtcaacatcagtagcctgtgttataaatataaaatgtgatatttgagcaataactaaaaagttcatacaaagagatataatcaaaaactctataaattaatcaaaaggagatctaaaaaatgttaaagggaagagaaaaaacaagacaagaaagacaagagcaaaaaagaaacagaaaa

SEQ ID NO: 895773 - DNA, 656 bp, Homo sapiens
ataacccaaaaatggcctttaagtgtccaagcaaaagaaagagttgtacatatcttacttaaaaactagaaatgattaagcttagtgaggaaggtatgttcaaactgagataggctaaaagctaggctcttgcactaaacactttgccaagttgtgtatacaaaggaaaagtttttgaaggaaattaaaatgctactccagtgaacacacaaataataagatagcaaaacaaacttcttgctgatgtgaagaaagttttagtggtctggacrgaagatcaaaggagccacaacattcccttatgccatagcctaatccagagcaaggccctaactctcttcaatttcataaagtctgagaaaggtgaggaagctgccaaagaatagcttggagctaacagagtttagttcatgaggtttaaggaaagaagccatctccagaacataaaagttcaaggtaaagcagcaattgctgatggagaatctgcagcaagttatccagaagatctagctaagatcactggaaaaggtggctacacctaacaacagatgtttaacatagacaaaatgccttctattagaagaagatgccatttagaacttctatacctagacaagagaagtcaatgcctggcttcaaagcttcacaagataagc

SEQ ID NO: 895774 - DNA, 627 bp, Homo sapiens
agtatgtggatcacggaacagaaataacctttgacgtgtatatagagtcagaagctagactgtgggaaattcttctaattatcagtcatgtaaaattgcacagagagatcagtttccaccaatgcttatggaaaaacagaagctctctcctataagaatataatcaacaatgcagcaaatgcaatgatgcatacaccatgcatttgtttatgtaaatgcaacaaaagsaactttatctgaatagccatgtgtgcgaggcagctctggaataaacagcaaggagatccgtgtatacagttgcattttttatgcatctcaactatcaataactaaaataaatgttaatcaactatgctaaaagaagatcaaattattcttctcctttctctatgaaaatattacaaactattgttcggcccttcttccttgagcctcagactcagcttcctttccctggctgtcagcagcatggagctcttttctgaagataactatttgttatttcaaaatagaacttcaaaaatactgttgtccaatgaagaggtgtttcttaagctacgcagccaaaaacataggaatgaaagtattataaagttatgtcaagcagttatcaaaagtaatatgcta

SEQ ID NO: 895775 - DNA, 620 bp, Homo sapiens
taatagatctctgcaaatatgttgaagaaggacctagggtgttctaaacattggggaggggtgctcaggactctgcaactgtctttcctggtgtcactgttcacggcatgcacactcacaacatacacacctgccagcacatacctacatgaccttcgtgcccttcccgtacttctggtgcatcacccctgcacatcacatttcctacrtgcatttcccacatgtccccgcacacccgaatatacacaaacacatattccccacgctccgtgaagtatgtccaccacacgctcacataggcaagagcagatgcaatgccttgggttcacacactctttacacacccctgcaaacacatccacactacacacaccatgcgcagtttccatgacacacccacacaatccatatttttggccatagacatatagcacataactgcatcaaaaccttttcacccacaaaacatatatacctcacactcacctacccacccacgtcacattgacactcatatcgacaccatctcaccaaagcaaaccacagtccacattcactctatatctattaatatatctatatctatcatctatacctatgtctatattcatatgcataca

SEQ ID NO: 895776 - DNA, 620 bp, Homo sapiens
taatagatctctgcaaatatgttgaagaaggacctagggtgttctaaacattggggaggggtgctcaggactctgcaactgtctttcctggtgtcactgttcacggcatgcacactcacaacatacacacctgccagcacatacctacatgaccttcgtgcccttcccgtacttctggtgcatcacccctgcacatcacatttcctacgtgcatttcccacatgtccccgcacacccgaatatacacaaacacatattccccacgctccgtgaagtatgtccaccacacrctcacataggcaagagcagatgcaatgccttgggttcacacactctttacacacccctgcaaacacatccacactacacacaccatgcgcagtttccatgacacacccacacaatccatatttttggccatagacatatagcacataactgcatcaaaaccttttcacccacaaaacatatatacctcacactcacctacccacccacgtcacattgacactcatatcgacaccatctcaccaaagcaaaccacagtccacattcactctatatctattaatatatctatatctatcatctatacctatgtctatattcatatgcataca

SEQ ID NO: 895777 - DNA, 635 bp, Homo sapiens
ggtagctaacagtgggactatgggagctagacaaggccacatttcaaatcctggctccatcatgtatgagctgtgggaactggggaatttacctctctattttcaaccacaaaatgtgaatactgcttctaactcttggtgttgttctgatgatgaaatgagataamattattaaagtgctttgcacacaactggcactcaatgtatgactgttcccttttccatgcaccgcatcgtatcctgcagctgggaatactccccctgtgaggaaagtcctaaccggaagacacttagcctagcccttggtatacaggtgactctaatgcccccttcccatgactgaacttcaggggccctttactattaatagaaactgtgttcctaattcctctcccactgtgcagtcaatttacctcttaaagcctgacagaggcagcatgcaggaagattgacaacattgctcacactatttgaaggttccactgtgtgttgaaaattgtctaaatggggggataatgaacagtcaccaaattggagctttctgaagctgagaggaaagaaaggctttggagagaggttgccatcttaccaaacatattagccagggtagggagatggaggagggatggtgtcag

SEQ ID NO: 895778 - DNA, 600 bp, Homo sapiens
cgctgcaggaggcttgtgaggcctacttggtagggctctttgaggacacaaacctttgcgccatccatgctaagcgagtgactattatgcccaaagacatccagctcgctcgccgcattcgcggagaaagagcgtaaatgtaaagtyactttttcatcagtcttaaaacccaaaggctcttttcagagccacccacttattccaacgaaagtagctgtgataattttttgttgtcttaacagaacaaatttctaaggacccccccggaaagcattagactatggtcttaaagttgattaacagaaataacggtttggtcagtcttgcagtgtaggttatttctgaccttattaaggtgctatttggagagaagctgtgtaagtccactatcattcaggcctctagcttgctatgattagcatttgtttaaacaactttgtaagagtaagggaaaaatctggtaagtagttaactggcgcttactaggcatttttgcaaagctttgaaaagattagaaaattgtgtcttgcgagttccagtgtcttcctcaaaatgcttaggaagattttctcagctcaatacatagtcccctaggttttc

SEQ ID NO: 895779 - DNA, 600 bp, Homo sapiens
cgctgcaggaggcttgtgaggcctacttggtagggctctttgaggacacaaacctttgcgccatccatgctaagcgagtgactattatgcccaaagacatccagctcgctcgccgcattcgcggagaaagagcgtaaatgtaaagtcactttttcatcagtcttaaaacccaaaggctcttttcagagccacccacttattccaacgaaagtagctgtgataattttttgttgtcttaacagaacaaatttctaaggacccccccggaaagcattagactatggtcttaaagttgattaacagaaataacggtttggtcagtcttgcagtgtaggttatttctgaccttattaaggtgctatttggagagaagctgtgtaagtccactatcattcaggcctctagcttgctatgattagcatttgtttaaacaactttgtaagagtaagggaaaaatctgstaagtagttaactggcgcttactaggcatttttgcaaagctttgaaaagattagaaaattgtgtcttgcgagttccagtgtcttcctcaaaatgcttaggaagattttctcagctcaatacatagtcccctaggttttc

SEQ ID NO: 895780 - DNA, 681 bp, Homo sapiens
gtaggattggtattagttcttctttgaatgtttggtagcattcagcagtgaagtcatcaggtcctggaatttatttactggtagactgtttattgtgactttgatcttgttacttgttattgatctttttaggtttkgagttatttcctgttttaatcttggtaggttgcatgtgtctaggactttgtccatttcttctaggttttccaatttatagcatatagttgctcatagtagccactaatgatcctttgaatttctgcagtatcagttgtaatgtctccttttccatttatgattttatttatctggatcttctctctttttttcttagtttgtcttgctaaaggtttgtcaattttgtttaacttttcacaaaagcaaatttttgtttcatagatcttttgtatttttttcaatttcatttatttccactctgatctttactttttcttttcttcaactaatttttgctttggtttcctcttgcttttctagtttttaagatgcatcattagattgctaatttaaagtttctccttttctgatgtaggcacttatagctataaacttcctccttattactgcttttgctgtatcccatgggttttggtatgttgtgttttcattgtcatttgtttcaataaatgtttcaatttccctcttaatttcttcattgac

SEQ ID NO: 895781 - DNA, 639 bp, Homo sapiens
ttaccccaagcgctactacaggagacatccgaaaagcttcaaaagttgttcagggaaatttgagaatgatacttcacaaatttttaataataaaaaattatccattgatggaaacctcactaatttttgaggcaatcatgatggaatgacatagagacctccaggctatagtcactgaatacaatataaacagaatagcatccttagtgaacgccaamagcatagataacaaaaagagtaggttgggactctggtttcctgaaggaggaacagccataatttttaaatctcttaatactgaagggacccttaggaaatctctacaatttctctgcaaatcgctttctctcttttgcttcaatttcctctcttccagctccagagaacatccctcactcatacactcacccacaatgtcttcacctccacaggggctcatcacggtggtcagggcaagggcccccagcatcagagctttgtttaggatcatcctcttcccaaggcagccttagcagttgctgttctgagttgtagagcaattgtgaggacctcgagacaaggcaatctgaagacacccaaaccaaaccctgccaagtcaggttttggctaattagaaaaatcccctatgatgacacctca

SEQ ID NO: 895782 - DNA, 534 bp, Homo sapiens
ataaaaaggaaccctttggagggaagggagaggtagagatgggtaaagttatgtaaaaggattgaaaagtagacctgagagctcaactgggaacagaaaccttgtggctatgatcccaggggaccatgaagacctgcagaagaggaaaaaagacactacagggacagtataggcaaagttctacacaatgtccacattaaaatgttccatacaaatttccctgaacagagatttttcaaggscactcaccttagacctgcaggccctattaagactgttgggaggagaaaaatgtagtggttcttctatcatctaatcatagtcttctgagtgtcattaagatccttcctgtttttataaatataaatatcacagtatagatgcatttacagaattgtagtattagtctttgtagttttttgttttttacttaatctgtggataatttcccacagattagacaattttctacatcactaaacagtttcataaaatcttatttttagtggctgtaaaaacttcaccatatacttg

SEQ ID NO: 895783 - DNA, 632 bp, Homo sapiens
tatgaggcttacaaatgagactttgataacccaggattttaaatgttgaagaacacgggatatcagagtgaaaaaggtttagggaaaattctgacaagggaaaattctaacctgatatcaataactggaaagacaggttaaaccctgcaaggggatacattgacattttttcttcctcacttgctcttttctgctgtctgaatatgggcatgagggcaagagtcattttagaccaccaagtgaccttgaggatagaagccttrtactagaggtggtgggaaagaaaaaacagaaggactcataaagaaaaaaataataaacctcagtattaagatggaaaaattcccccaattggtctataggttgaacttcatctctattaaatttcagctatgtttttgcagaatttgatatgctgatcataaaatttatatgaaaatgcaagagacacagaatagtcaaaactttgaaaagaagaaagttggaggacttacacttgttgattttaaggctttttacaaagctataataatcaagacaatgtgttactgacataatgatagacatattgatcaatatagacaatggatgaatggagtagaattgacagtctagaaataaaaccttatata

SEQ ID NO: 895784 - DNA, 644 bp, Homo sapiens
agataccacaatgtattataaagcaatagtaattaacatgagggcagaaatgagcaagcaagtgaacaaaataagacagatagtcacaggaaactcatatatttataggtgctttgcgtataatgaagatggtccttcaaatcagttgggaaaagatgggttattcaataaatggtgttgggtaaaattggttatacattggtgagaaataaagtgaaactcctactttgtatcatatgcaaaaaatagattccagacagatgaaatatttaaatgtaaaaaataaaattctaaaactactagaaaaaaaagaagaatatttttattcctttgaaatagaaaaggtcttaytaagcaaaacacagaagtaataaatgaataaatgaagacaaatatgataaaaataagttaaaaatataagcaatctttctttgtttttttttcacctttcctagaaaaaaatatataggcaacttgttaagcaaggtagattacaagaaaatatttacaacatttgacaggccacagattattatccagcctcatctgataagaaaacttcaacataaagatatctgttttttttcttataaggttcctcaaagtgagccaatcacttcttaagctgaacaaaaaacaaaaca

SEQ ID NO: 895785 - DNA, 585 bp, Homo sapiens
aaatatatttcataaggctattaagaaatagctatatatatatatatatatagccttatatagtttatatagctaccattgatagtgattccattgatggatctgagcaaagcaaattgaaaagcttctggaaagtagtcattattctagatgccattaggaacatttgtaattcatgggaggaggtcaaaataccaacattaacaggagtgtgaaagacattgattccaacccccatagatgactttcaggggttcacgtcttcagtggaggaagtygctgtagatgtggtggaaacagcaagagaactagaactagaagtggagcctgaagttgtgactgaattgccgcactctcatgatcaaacttgaacagatgaagagttgcttcttacatatgagcagtgaaagtggtctcttgagatggaatctcctcctggtgaagatgctgtgaacacggttaaaatgacaacaatcgatttagaatattacataaatttagttaataaagcagtggcagggtttgagaggattgactccaattttgaaagaagtgggtaaaatgctatcaaatagcatcacatgg

SEQ ID NO: 895786 - DNA, 625 bp, Homo sapiens
tgtaaataacatctttattcatttgtccatcaacagactgttgagttcctcccatcttttgactattgtgaaaaatgctgctatgaacctgagtgtacagacatctggttgagtactgctttcaattcattgtttatatggatcatatggtaattttatgtttaatttttttggaactgctacattgttttccacagtgtacatcattttacatttccatcagcaatgcacaaaggttccaatttctccacattcttaccaacattttttattttctgtttcttatttatttrtttatttattctgagacagagtctcactctgtcacctaggctggagtgcagcagggtgatctcagctcactgcaacctctgcctcccatgttcaagtgattctcctccctcagcctcccaagtaaatggaattacaggtgcccaccaccacgcccaggtaatttttgcattttttttagtagtgatgaggtttcaccatgttggtcaggctggtcttgaactcctgacctcaagtgatccacccgcctcagcctcccaaagtgctgggattacaggtatgaaccactgcacccaggccattttttgctttttagataatagtcatcctagtg

SEQ ID NO: 895787 - DNA, 625 bp, Homo sapiens
tgtaaataacatctttattcatttgtccatcaacagactgttgagttcctcccatcttttgactattgtgaaaaatgctgctatgaacctgagtgtacagacatctggttgagtactgctttcaattcattgtttatatggatcatatggtaattttatgtttaatttttttggaactgctacattgttttccacagtgtacatcattttacatttccatcagcaatgcacaaaggttccaatttctccacattcttaccaacattttttattttctgtttcttatttatttgtttatttattctgagacagagtctcactctgtcacctaggctggagtgcagcagggtgatctcagctcactgcaacctctgcctcccatgttcaagtgattctcctccctcagcctcccaagtaaatggaattacaggtgcccaccaccacgcccaggtaatttttgcaytttttttagtagtgatgaggtttcaccatgttggtcaggctggtcttgaactcctgacctcaagtgatccacccgcctcagcctcccaaagtgctgggattacaggtatgaaccactgcacccaggccattttttgctttttagataatagtcatcctagtg

SEQ ID NO: 895788 - DNA, 634 bp, Homo sapiens
agtaagtgtccaagtattttgcctgttcttagaaactaggctgtttgtggttttacaaagatttgagttttgggagttctttgtatatgttagatgcaagacctttgtcgaacatgtgagttgcacatattttcttctagtcttcagcttcttttcagtgtcttttgcatgacacctttttaattttgatgaaactcactttttgtgtcccagatcatgcttttggtgtcatgtctaccaattgttagcctaaacccaggtcataaagattttctcctaggttttcctcaaagttttatagctttacattttagatctgcgattcattttgagtggacttttgtgtcaggtccaaggattgggtcaaggttaacctacttcctgtggctgacccgctccccccacccccagcctaaggtcaagtggagggaggacaggactagaggcattacggggcggccccaccctcttgggaccacagctcttatgattaaagrggaacgttatcccctgtattaatttcctattgttgccctaccaaattggcacaaagttagtggctaaaaactacagatttattctccagctgctgtggaggccagaagtccaagatccgtcttactaggctacagtc

SEQ ID NO: 895789 - DNA, 629 bp, Homo sapiens
ctactctgttccattaatccacttgtctcttcttactttgccttgattatcatacctgcatagtcttgaagtcaggtattatatgtcctccaagtttatttatttatttatttttgaaatggagtttcactctcgttgcctagactggagttcagtggcgtgatcttggctcacggcaacctctgcctcctgggttcaagagattctccttcctcagcctcccaagtagctgggattacaggtgtccaccaccatgtcgggctaattttttgtatttttaatagagacagggtttcatcatgttggccaggctggtctcgaactcccgacctcaggtgatccacccacttcggcctcccaaaatgttggaattacaggcatgcaggcatgagccaccatgcccagcctgtcctccaagttattaaygaatgttttggctagtgtagttttattgcatttatgtgtaattttagaactagcttggtgatttataccaaaaaaaaaaaaaaaatcctgcttggggttttgtgtgcatgtgtgtcaaatttattggtcacttggggtaggattgacatgttaataatattgaatcttttaatccacgaatgcaatatgtttatttatttaaa

SEQ ID NO: 895790 - DNA, 659 bp, Homo sapiens
gaggcatttattttcagctggaaaagtcctgaagaagcatgttttctcctgatgagtgcagctgatgaatagattaatgctgggcttgaaatagttggttaagaaaatgaatctaagtgacatcttcatcagatataggctgtacttaaattaatttgtgttaaactgcttaggggaagaaacaggaagaaaatccttccttggctctgtgagttgtcttccgtttgcccatttgtttttccttcccttccccaccgacaccccagtatcggaggatagggaaatgccaagggccagcatgtgatgagttggggaaaaaagtctacaattaagcagccagagagtcgagaacagaaggggcctttgtgtggcctcagaggccacagcaatgtgttcacatagctgggagtctggccggtccctctctggcatttaaaagctctgtggggttcactattgcagccccagtgctcagcacataytgcgcacaaaataggtatttgtcgaagagtgaggtagaaactcaccaaatggtagctctattgttattcatggaatcacatgagatcaagagaagatgcctaatgtcccaggcacatctagtggatgagccaaggttcagtgacccctgacccaaaggccaaagatgacccaaaggc

SEQ ID NO: 895791 - DNA, 603 bp, Homo sapiens
cctatatttttttcttctttttcttcactcttttttctgtttgtggttcagtgtgggtaactcctatcaatatatcttcatgttccctgatcctttccttagctgtttcagttctgctgaggtactctggaagccatttttcatctgagcrtgcatgttatcctttaaggtgttaatcatagttattttaaagtccctgtcatatagttccagcatcactgtgatgtctgcatctggttctgctgattcctgtgtgccttacaggcctcgtgatgtttttgttgaaagctggaccttttggctcagacagtagagactgaggaacatggtttttatgcctggaatcggacacccttcctgatgctttagtgacgggtttgagttactgcagtcaggagttgggctggatgtgagatttgttcttgttctgtttatcctcattgcaccacaagcttccaattcctgtggtgaggcctgtgttcagggtggagattgggttgccagcaccatgtctgtctgaagctgtgcatggggccatccctttaactggacctcagacattcccctccctgcagcattctgcacttgctccttgcttgaagc

SEQ ID NO: 895792 - DNA, 651 bp, Homo sapiens
ccagaaattccagcgaggggaggaaaaacctcacatgaaaagtggaatcagtgaagagaaaatagggacatgccaggaagaataatccaccactcagacatgaaagaaatatgttcaattatgttgtactgcatttcattttaatgtacacatcgtacttagctgtctgcaagcctcagattactcagaaagacagcgcaatgaaagatgagagaattacaaagagccaaaaaatattcctgaaattggaatccctaagggagagaaagaaaagccaggcttgagacaaaaraggctgcttagcaccaaggccctctcagctctgatgccgggtgccctcgcccacacagcctagcacggttatccatgtctggctgtcctgattgcccagcatcagaaaaagtccaggccagaatgacagggctcaggctgtcctcctagagctgctccctacaatctgtgtgaccgggggcatgtcactgaccctctctgagcctcattctcaagggtgaaatgagaaacttggatgccctcagacatattgggtgggaggggtaatgttacagcaagaaagagtcacaccggatcccattccagcgctaagggaacccatagacatttcatggaggttgtgattccctgttatggcct

SEQ ID NO: 895793 - DNA, 605 bp, Homo sapiens
ccccagtgtctcccaccagaagacccacttttggggtcactgacaaagagaaagggggacccagaaccagactcaactgaagccaccacgtactcccagccctatctaggtccctctctgccttcacacacttctgtcttcagccctgaaacccgcagatttcaactcaacactggaagtagaaatgggattcccacgtttttccccagaaagcagcatttctcagccatctcaacagaaatatttgctggctgagcgcagtggctcacgcctgtaattctagcactttgggaggccaaggcgggtggatcatttgaggtcaggagtttgagaccagcctgaccaatatgatgaaaccccgtctctactaaaaatacaaaaattagccaggcatagtggygtgtgcctgtggtcccagctacttgggaggctgaggcagaagaatctcttgaacccaggaggcggactttgcagtgagccgagattgggccactgcactccagcctgggtgacagagcaagattcagtctcaaaaaaaaaaaaaaaaaaaaaaaaaaaaacagaaagaaagaaagaaagatttgccaacccatcagagtggacac

SEQ ID NO: 895794 - DNA, 532 bp, Homo sapiens
gtactcctgaatttaaaataaaagttaaaaaaaaaaaaagaggccgggcgcagcggctcacacctgtaatctcagcactgtgggaggccaagtcaggtggatcacaaggtcaagagatcgagaccatccttgtcaacatggtgaaaccccgtctcaactaaaaatagaaaaattagctgrgcatggtggtgtgcgcctgtagtcccagctactcaggaggctgaggcaggagaatcgcttgaacctgggaggtggaggttgcagtgagccaagattgtgccactgtactccagcctggcagcagagtgagtctccgtcaaaaaattaaaaaacaccaggatgattaaaaaaatgaaagaaaatgcagtacttatacacaatagaggactactcaacagacattttaatctaattctaggtgttagttgtctctggtgaaacatgcttatctaagaaatggcagacatctaagttccatccacatggtttcatatacaatgaaacaggaattacaaagccacattaaattttg

SEQ ID NO: 895795 - DNA, 623 bp, Homo sapiens
acaattgctgtaatcatcatcatataattaacacctgagagtagttagatggttaggtcagcctgcttatacattatccttaagtctgcatttcatcctatccatagtccaagtaacaaagtcctttggataaattgaggggcagcggtatagagagatgtccacaagttctttgatatttctccattaaaaaagtggggcctaactccacctcttgagtgtgggctggacttagggacagaaagtggcagaagtcacagtatgtaacttctaagattaggtcatagaaarcattgtacagaaagcattcctccttgctctttcctgaatcactcactctgggaaaagtcagccaccacgttgtagcctcctctcaaatgccctatggagaggcccacacagcaaggagctgaggactcctgccaacagccatgcgagtgagccatcctgaaagtggatccctcaatcccaatcaaactttcagatgaccacatcctcagcgaacatcttgatttcaatctcatcaaagaccctgaaacagaaccgcccagctaagatgctcttgaattcctgacccaaagaaactgtgaaataataaaggttcaatatttcaaactaagttt

SEQ ID NO: 895796 - DNA, 628 bp, Homo sapiens
ggtcaacaattgctgtaatcatcatcatataattaacacctgagagtagttagatggttaggtcagcctgcttatacattatccttaagtctgcatttcatcctatccatagtccaagtaacaaagtcctttggataaattgaggggcagcggtatagagagatgtccacaagttctttgatatttctccattaaaaaagtggggcctaactccacctcttgagtgtgggctggacttagggacagaaagtggcagaagtcacagtatgtaacttctaagattaggtcatagaaarcattgtacagaaagcattcctccttgctctttcctgaatcactcactctgggaaaagtcagccaccacgttgtagcctcctctcaaatgccctatggagaggcccacacagcaaggagctgaggactcctgccaacagccatgcgagtgagccatcctgaaagtggatccctcaatcccaatcaaactttcagatgaccacatcctcagcgaacatcttgatttcaatctcatcaaagaccctgaaacagaaccgcccagctaagatgctcttgaattcctgacccaaagaaactgtgaaataataaaggttcaatatttcaaactaagttt

SEQ ID NO: 895797 - DNA, 593 bp, Homo sapiens
cgtgcctggaaaccatccaccatagctgcaagaggcctaaagagattggccaagggatgtggcatgggatactaatcatatctgctacatgggaaaaactgtatcagcaatgttttgctttatttttaagaaacatctgaagtaaataaaataaaatgttaatatttgtcaattctacccagtggttgcatgggtggctgctatattattctctgttcctttttgcattttgtctttaaattttacaaattacattcacaatgttgtaaaaccaccgccactgttttgctttatttttaagaaacatctgaagtaaataaaataaaattgttaatatttgtcaattctacccagtggttgcatgggtgactgctatattattctctgttcctttttgtattttttgtttaaattttactaattacattcacartgttgtaaaaccatcaccactgtctatttccaaaatttcaccaccctaaagagagagcaataagcaataactccttatgctcctctcccttggcctttggtaacttctaatctaccttctgtctctataaatttccctattctagatatttcatacaagt

SEQ ID NO: 895798 - DNA, 628 bp, Homo sapiens
tggaacctcttctctatttatacttattctctcaatgatcccatctagatccatgacttttaatatcatctatacaataaagactttaaaatgtgattctccagccctaacctcaattacaaacttcagactcaaagttccaattacctagttaagtctctacttgagcatccaacaggcatctcaaacttaagacggcccaaaactgttgatttcaccacctgctcccaatcctgtttcttctgcagtcaatctctagacaaataacaacaccatcattacagttgtttgagagttatcttttcctcctctctttctctcaagacccatatacaagacatcagctagtcctgtctgttctacctgcagaatgtatcttcgatcagarcacttcttcctacatccaacgcaagcactaccaagccaccattgcttcttaccccactactgacatagctgacataaactcctccacttccctgctttcacccacactccctactgcccatgctcaatactacagagagatcttttcaaaacataaatctgatcttatcacttcccttctccacactctcctctcctagctccagtgctttcccttcacacttagaaaaagaatcctaaa

SEQ ID NO: 895799 - DNA, 600 bp, Homo sapiens
caagtccatcttcttcccaggtgtcaacatcacgtggcctgaatagacactgcaggtttgggacagggttcttcacctcattttctacctggtccctgaaggccatcgactctgtgatccctgcttcccaaggggaagatcctttattcccctgtcctcatatktccaaaggagtgttttccaagatgtctaccctctggaggagctccccaaagagatagcttcaacctctaactccccttttcccttgatcctcccccagagaggaaagtaactaatctgattggtgagatgcctggggacccaccttctggtgggtggtgggctcactttgcatcaagaacaagaaaaggggcttctcccactctttcagtggcctccacggacctctgatatgcaaaagccaggcctgctctgtgctcctcaccattcagctcccccagaccaggcacaaggtcttctctgaccccatcctatgaagaccccaaggtactaaaatgaagagtgatcctctatggagccagctgggtgagaatactcagaggccactttgccacccaacgccgtcagtggatcatccaagagctagatacagggaaa

SEQ ID NO: 895800 - DNA, 612 bp, Homo sapiens
gagtgcagtggtccaatcatagctcactgtaatcgtgacttcccgggctcaagcgatcctcctgcctcagcctcctgagtagctaggactattggtacacactagcatgcccagctaattttttaaaattttttgtggagttagagtcttactgtattgcccaggctgatctcaaacttctgacgtcaagcaatccttccacactggcctccaaaagtgctgggattacaggcatgagctattgctactagctaagtgtcactaaattttagtgtcacttttctatttttttgagacaaggtcttgctctgtcacccaggctggagtgcagtggcatsatctcggctcactgtaacctccgcctcccaggctcaagtgatcctcccacatcatccttcctagtagctggaattataggcatgcaccaccacacctggctaattgtttgtgttttttgtagagatgatgtttcgccatgttgcccaggctagtctcgaattcttcagctcaagcaatcctcctgcctcagtctcccaaactgctgggattacaggcgtgagccaccacaccctgctaagtgtcacttttcatgtgcctttttacagaatacta

SEQ ID NO: 895801 - DNA, 537 bp, Homo sapiens
cacttgtactcctgaatttaaaataaaagttaaaaaaaaaaaaagaggccgggcgcagcggctcacacctgtaatctcagcactgtgggaggccaagtcaggtggatcacaaggtcaagagatcgagaccatccttgtcaacatggtgaaaccccgtctcaactaaaaatagaaaaattagctgrgcatggtggtgtgcgcctgtagtcccagctactcaggaggctgaggcaggagaatcgcttgaacctgggaggtggaggttgcagtgagccaagattgtgccactgtactccagcctggcagcagagtgagtctccgtcaaaaaattaaaaaacaccaggatgattaaaaaaatgaaagaaaatgcagtacttatacacaatagaggactactcaacagacattttaatctaattctaggtgttagttgtctctggtgaaacatgcttatctaagaaatggcagacatctaagttccatccacatggtttcatatacaatgaaacaggaattacaaagccacattaaattttg

SEQ ID NO: 895802 - DNA, 582 bp, Homo sapiens
ctccatatgcaaacaagcccacctgctgtgatgggagacatagctacaaaaagtactaatacattcttttttactgagacaaaattagcataacataatctaatcattttaaactataccattcagtggcatttagtacattcacagtgttgtgcaaccatcacatctatctggtctcaaaacattttcatcacttcaaaaagggaaaccatacccacgaaccgatccctccctttcctcccttccctcagtccctgttttctgtgtctgtagatttgcttattctgcatattgaatataagtgggmtcgtataatctatggcctgctgtctctagattagtgcacttagcagaacgttttccaggttcatccatgtcgttgcctgtatcagtacttcattccttttcgtcgtcgaataatattccattatatggagatattacattttcttcatccattcatcagttaatggacatttgaattatttcccatttgagctaatgtgaatttcactgctatgaaattcattaacaagttttgtttgaatgcctgttttcaattacttttggtatataactagg

SEQ ID NO: 895803 - DNA, 582 bp, Homo sapiens
ctccatatgcaaacaagcccacctgctgtgatgggagacatagctacaaaaagtactaatacattcttttttactgagacaaaattagcataacataatctaatcattttaaactataccattcagtggcatttagtacattcacagtgttgtgcaaccatcacatctatctggtctcaaaacattttcatcacttcaaaaagggaaaccatacccacgaaccgatccctccctttcctcccttccctcagtccctgttttctgtgtctgtagatttgcttattctgcatattgaatataagtgggctcgtataatctatggcctgctgtctctagattagtgcacttagcagaacgttttccaggttcatccatgtcgttgcctgtatcagtacttcattccttttcrtcgtcgaataatattccattatatggagatattacattttcttcatccattcatcagttaatggacatttgaattatttcccatttgagctaatgtgaatttcactgctatgaaattcattaacaagttttgtttgaatgcctgttttcaattacttttggtatataactagg

SEQ ID NO: 895804 - DNA, 618 bp, Homo sapiens
gatcatacctctgcacacattaatatggctgtgtaacctgggtaacaggtcaaaatgggactcagtaatgactatacattattctgcatgggaaaaaaatatttctaattgtgaatctggtgctatcattcaatgtattcagtgtattcaatgcccagagtgttgaatgtaagtacttgagtcagattcctgttaactgacatagttttagagaaatgtggagactgtcaaaaatgcatttgtagattatatctctggaaatcattccsatactaataaatcccatctgaggcacctccactagcagacagttctttggaggttaaaggaagaattgtccattacacttcatagttccaactgtgtgttaattaggaccagacgggaaatggcaaaataaatgaggacagcaagacatgtcttctaggtacactatatgccaagtaaaaatcctcttaaaaatgcctcctttagcacgcagtgttattttcccatctagggcacaccactccatttatcaagcatgatctaaaggatagacttcagatgtgtcttcaaaggaggaaagcctcagacagagtccctgctagtcactctgctcccatgaaaataattaat

SEQ ID NO: 895805 - DNA, 622 bp, Homo sapiens
taagggataaagatgatagtcgtgcaccgcaaaatgacatttccatcaacaacagattgcataaatgacagtggtcctataagattacaaaaccacattttattattattattattatactttaagttctgggatacatgtgcacaacgtgcaggtttgttacayatgtatacatgttccatgttggtgtgctgcacccattaactcgtcatttacattaggtatatctcctaatgctatccctcccccctccccccaccccacgacagttccccggggtgtgatgttccctgccctgtgtccaagtgttctcattgttcagttcccacctatgagtgaaaacatgcggtgtttggttttctgtccttgtgatagcaaaaccacattttgactgtaccttttctatgtttagatacaaacatacttaccattgtgttacaattgcctagaatattcagtacagtaacatgctgtacacctttgtagcccaggagccacaggctatggcatacagcctaggtgtgtagaaggctacaccatctaggtttgtgtaagtgcactctaggatgttcccacaacaaaatcacctagggacacatttcttagaatgtatccccattct

SEQ ID NO: 895806 - DNA, 622 bp, Homo sapiens
taagggataaagatgatagtcgtgcaccgcaaaatgacatttccatcaacaacagattgcataaatgacagtggtcctataagattacaaaaccacattttattattattattattatactttaagttctgggatacatgtgcacaacgtgcaggtttgttacatatgtatacatgttccatgttggtgtgctgcacccattaactcgtcatttacattaggtatatctcctaatgctatccctcccccctcsccccaccccacgacagttccccggggtgtgatgttccctgccctgtgtccaagtgttctcattgttcagttcccacctatgagtgaaaacatgcggtgtttggttttctgtccttgtgatagcaaaaccacattttgactgtaccttttctatgtttagatacaaacatacttaccattgtgttacaattgcctagaatattcagtacagtaacatgctgtacacctttgtagcccaggagccacaggctatggcatacagcctaggtgtgtagaaggctacaccatctaggtttgtgtaagtgcactctaggatgttcccacaacaaaatcacctagggacacatttcttagaatgtatccccattct

SEQ ID NO: 895807 - DNA, 611 bp, Homo sapiens
ttaatttttacttcttagatttttttctaacgatgaaatgagttcaggtggagcaagtgccttataataaacttttgttaggcatttgttttaatgcccctgaagactggcttccatggccaattgcttcaaattcagcagcaaaatttatttcttcctgtgcttgactcaagagcatatatgtgaaagtctgttgacaagagtaaaacgttatagcaatggaggtggcagtgtgtaccctatcccttccaggtaattcttctaccctgtctctcttcaaacagaagctaggtatgcttgaaaatattgaactcccttttaacaccagcaattatttaagggcccccargccccctactctcaggaggaagacagagtagagaccagcatcagcctaaagtcaggattgaacagtccgtcagagctgcctttgttgaccttgccttatggagttttgtctaactccgtaaacttggtttacttgactattccatcttgtgttgggtgacctctatgaacctgatccctggtttaagtgacctccacggcctcatttgctcactttctcattcactcactcattccttcagtgatgaactatattcaaattg

SEQ ID NO: 895808 - DNA, 598 bp, Homo sapiens
tctaaaatttacagagaaatacaaagtaactataatattgaaagcaatcttggagatgaacaaagttggaaagctgcattcatcaagaccgtatggaactggcacgaggatgaacaaagcagcataacaacaaagatggytcagaaacagagccccacttctataatgaccaccttttcaacaaagggaagggaaagtctttttaacaaatggtgctgcaatgcccatatagaagaagtatcagaaacctgaccactgccacacaccataaacactgagatggatctttaattataagagctaataccataaagcatttggtgaaaaacactgaaaatatcttcatgatgttgggtaggcacaggtttcttgggtcacagaaagtagtaacaagagaattgtatctcctcaaaattgaaaacttctgctaatcagacgacaccatacagaaaatgattaggcaagccacaaattaaaaaaataatttacaaaacatatctgacaatggactagtgtccagcgcaaaaaattcctgtaactcagcaataaaaaagactaaatacatccatacgatactattcattgagaaaagaaactg

SEQ ID NO: 895809 - DNA, 605 bp, Homo sapiens
cctatgagtgagaacatgtggtctttggttttttgtccttgcaatagtttgctgtgaatgatggtttccagcttcctccatgtccctacaaaggacatgaactcatccttttttatggctgcacagtattccatggtgtatatgtgtgcattttcttaatccagtctatcactgatggacagttgggttggttccaagtctttgctattgtgaatagtgccgcwataaacatatgtgtgcatgtgtctttatagcagcatgatttataatcctttgggtatatacccagtaatgggatggctgggtcaaatggtatttctagttctagatccttgaggaattgccacactgtcttgagataccatctcacaccagttaaaatggcgatcattaaaaagtcaggaaacaacaggtgctggagaggatgtggagaaataggaacacttttactctgttggtgggactgtaaactagttcaaccattgtactctcaggacatttctagtccaaatttacaccaacactctgagaggaaggactgcaaagtaggtaccttagttttccactgacttccacttttcctgcttacacccttcctcctagac

SEQ ID NO: 895810 - DNA, 605 bp, Homo sapiens
cctatgagtgagaacatgtggtctttggttttttgtccttgcaatagtttgctgtgaatgatggtttccagcttcctccatgtccctacaaaggacatgaactcatccttttttatggctgcacagtattccatggtgtatatgtgtgcattttcttaatccagtctatcactgatggacagttgggttggttccaagtctttgctattgtgaatagtgccgctataaacatatgtgtgcatgtgtctttatagcagcatgatttataatcctttgggtatatayccagtaatgggatggctgggtcaaatggtatttctagttctagatccttgaggaattgccacactgtcttgagataccatctcacaccagttaaaatggcgatcattaaaaagtcaggaaacaacaggtgctggagaggatgtggagaaataggaacacttttactctgttggtgggactgtaaactagttcaaccattgtactctcaggacatttctagtccaaatttacaccaacactctgagaggaaggactgcaaagtaggtaccttagttttccactgacttccacttttcctgcttacacccttcctcctagac

SEQ ID NO: 895811 - DNA, 605 bp, Homo sapiens
cctatgagtgagaacatgtggtctttggttttttgtccttgcaatagtttgctgtgaatgatggtttccagcttcctccatgtccctacaaaggacatgaactcatccttttttatggctgcacagtattccatggtgtatatgtgtgcattttcttaatccagtctatcactgatggacagttgggttggttccaagtctttgctattgtgaatagtgccgctataaacatatgtgtgcatgtgtctttatagcagcatgatttataatcctttgggtatatacccagtaatgggatggctgggtcaaatggtatttctagttctagatcyttgaggaattgccacactgtcttgagataccatctcacaccagttaaaatggcgatcattaaaaagtcaggaaacaacaggtgctggagaggatgtggagaaataggaacacttttactctgttggtgggactgtaaactagttcaaccattgtactctcaggacatttctagtccaaatttacaccaacactctgagaggaaggactgcaaagtaggtaccttagttttccactgacttccacttttcctgcttacacccttcctcctagac

SEQ ID NO: 895812 - DNA, 613 bp, Homo sapiens
gtggttttggaagatcaagtgtgaatgtccaaaggcacttctgttgaataaaacgccaagtggaggaattgaagatccctgattgtggaagtatccaactgtttagaactcaactgaaatcctgaatgatagttctctacatgtagcaggaggagcaagtgactcatggaaataacgggtttatttaaataaagatagcctttatgtggacatcaaattcatcaatgaatgtatccatttatttgtcaaataattatttagctcctactaagtgctacatgctattccagataacytagtcaaaaaggcaaatgtgtccctacctttatgagctttaattctagcaggaactaaaaaaagtcacataataaacagacataaaatgcagtgttaggttgtgattcttgctatgaagctacaaaagaggaaagctgagtaagggaataaagaaacaaagtgcttatcagtagtgaacttccatgcaggccatgacaggctcatttcaaaagaagcagaaatatttttattattgtttccttgggttattagtgtcacatgtaagaatagtgcactagatttactaccacagatttttgtacttatacgttatttt

SEQ ID NO: 895813 - DNA, 395 bp, Homo sapiens
catttagccttttatttcatttaaaatttatttttgtaatggtgtgaggtagagatctggtttcatttattccccatggtgatagcctatgttcctgcaatattaactgacttatccaacagttctcaaaatgtgatcagaggattcctggggatgttggragggagagatcccttggatccttttagagggtcaacaaggtcaaaaatattcataaaattaagatgttatttgccttttttttactctcactctcataagtgtacagaagggttcgccaaagacaacaatggcatgtgatgaatagtgatgactatttctctgatacctaacagattgtgtgcctgtgtattgtattttctagagttttcaaaggtagtgagtttacggtataa

SEQ ID NO: 895814 - DNA, 598 bp, Homo sapiens
gcagtgatgtgatgatagctcactgcaacctccagctcctgggctcaagtgatcctcctgcctcaacttcctgagtagttaggactacaggcacgtgccaccatgcctggctaattaaaaaaaaaaaaaatttgtagagatggggcttcaatatgttgccaagtctggtcttgaactcctgggctcaagtaaccctcccacaatrctgggattacaggcatgagccatagcctgttgtttctactacatcatagttatattctatgagacatgtgttttctttggaggttatctctgaagtgcactttgaagtacgttagtggcagttaaagttaagaagagttttatatctaaaacttggatggtggggaaactgggaattcagtaatagactgtttatctaatgtagtagttagaatatatatttctgtactgaaatagtattacagttagaatggtttcagttgcttgatttttgcaggcacacaaataataataatattattattataattataattattattattattatttggagacggagtctcactctgtcgcccaggctggagtgcagtggcgcaatctgggttcactg

SEQ ID NO: 895815 - DNA, 641 bp, Homo sapiens
atcttccttcctgcttttctacaaaataaaagtaaccaaccctcatacattgccattggtaaatggtgcagccactgtgaaaaacagtctggtagttcttcaaaaagttaaatacagagttaccatatgacccagcaattccactcctagtacatacccaagagaaatggaaacatatgtccacacaaaaactcgtacatgatattcatagtggtattagtcataatagcaaaaaggtggaaacacctaactgtctgtcagcagaacaagtaagcaagatatggtctatccatacagtggattgttattctgccatagacatttaatccatttacctttaaggttaatgttgatatgtgaggttttgttcctgtcatattgctaattgttttctagttgttttataaattatttgtttctttcattytctctgtttgtcattgtggtttggtgaaattctgtagtggtgctatttgattactttcacttcctcctttgtgtgattgctttaccagtgagttttatacttttgtatgtttccatgatggtgaatgtcatccttttgcttccaagtttaggactcccttgagcatttcttgaagggccggtctagtggtgacaaatacagtcatcatttactt

SEQ ID NO: 895816 - DNA, 745 bp, Homo sapiens
aacaagagctactccactgcgctggagtgttactgtttggaaatgctggcccagtactgccaaatgtgccattttctttttttttttttctttttcaaggaaagaaatttagacttttagctagccctccgggttgatttccattgttcatgttgccaattaatttattctttaaaaaatactgtgtgtgccaaacacatctgagggctgcatctggctatcagctctcctgtttgtaaactctgagttagctcaacctctctcttcatgaagcctgccctcaggcttttaatttattctgctgtgcgtgctctrtaagtattgcactgaccaaactgcagagagtggattgtgacagggaacttttcaagtaggaagatcccctatgaggcttgcctgtggtccagatgagggaggacttgtgccaggctctgggctgagatgagccaataaacctgagcaattaggagaagagaaccctggggtggtatcttagtccattttctgttgctataatacagactgtgtaatttataaagaaaataaatttatttcttagtgtcctggaggctgggaagtccaaggtcaaggggccacatctggtaaaagccttcttgctgtgtcataacatggcagagggtaagaatgtgtatatcagctcaggtctctcttcctcttctaataaagtggcccccattatgggggtcacaccctgatgaccttatctaattctgattacctcttt

SEQ ID NO: 895817 - DNA, 630 bp, Homo sapiens
ccagaggaatagtgagatgggcatctgcaagacacagggaatcacactaggagataccagttcatatttgaggaaacactaggttataggaataaaacttcttctctagcaattctgaagtgaacagggtggagagggaagaggggtgtgtgtgtgtgtgtgtgtgtgtgtgtgtgtatttgcatatgggcaactgcatatgaatgtgtacctgcatcaaaattaattcctaacactgccataatctaagcagtaattttactactaygttttgcatcttgttgcttccacttccagactctctcttttgcttgtttcatgctagactaatcaactgggaggggagaaaggatgaaagatgtggtatcatgattgactagcttgaagttgatataatcagtgagatacggtttgcaagaagctagaaataccaattagaacactctagtgggaagtgaaggagaagctcctggaaaagaaggtgctgttcccagtgtaagaactagtaatttacatccattttaggcagaaagaaaatgctttcaacagagctagtgtatttgaggcagaggggaatgataagactcctttactcataacttgctacaaactctggcacataaagggtaa

SEQ ID NO: 895818 - DNA, 651 bp, Homo sapiens
aactgactctcagttctgcaagctgtacaggaagcatggctgggaagcctcaggaaacttacaatcatggcagaaggcaaaggggaagcaagcatgccttcacatggtggaaggagaaagagagagcaaaaggggaaatgctatacacttttaaacaatcagatcttgtgagaactcattcattatcacgagaacagcaagggggaagtccacccccatgattcaatcacctcccwccaagcccctcctccaacacatggggattacaatttgacaagagatttgggtggggacacagagccaaaccatatcacttacacactcattcatgttattcctttcacctgtagacattcattgaggacctgtgctggaaccacatgacccccactctacacacgaggtttatatttaaccacaaaatggtgactccagaatttaaaaatatgaccaattataaagtccaaacattttctaataatagtagcatgtaactcataggactataatgaaaatgaaatgacttaatacaagaaaagtgtcaagagaagtactggtacacgatatggcttcaataaatgtcagtttataacactgaatataataacagctattgtccagcaacatatttttgcacagttttggggaaga

SEQ ID NO: 895819 - DNA, 651 bp, Homo sapiens
aactgactctcagttctgcaagctgtacaggaagcatggctgggaagcctcaggaaacttacaatcatggcagaaggcaaaggggaagcaagcatgccttcacatggtggaaggagaaagagagagcaaaaggggaaatgctatacacttttaaacaatcagatcttgtgagaactcattcattatcacgagaacagcaagggggaagtccacccccatgattcaatcacctccctccaagcccctcctccaacacatggggattacaatttgacaagagatttgggtggggacacagagccaaaccatatcacttacacactcattcatgttattcctttcacctgtagacattcattgaggacctgtgctggaaccacatgacccccactctacacacgaggtttatatttaaccacaaaatggtgactccagaatttwaaaatatgaccaattataaagtccaaacattttctaataatagtagcatgtaactcataggactataatgaaaatgaaatgacttaatacaagaaaagtgtcaagagaagtactggtacacgatatggcttcaataaatgtcagtttataacactgaatataataacagctattgtccagcaacatatttttgcacagttttggggaaga

SEQ ID NO: 895820 - DNA, 592 bp, Homo sapiens
ccaatgtctgtcatataatccaaaattgcttaaaatgttggccgggcacagtggctcactcctgtaatcccagcactttgggaggccaaggtgggcggatcacctgaggtcaggagtttgagaccagcccagccaacatggcaaaaccccatctctacaagaatacaaaaattagccagacatggtggtgcattcctgtaatcccagctacttgggaggctgagaccagagaatcgcttgaaccyaggaggtggaggttgcagtgaaccaagatcgtgccactgtactccagcctgggtgacagagtgagactctgtctcaaaaaaaaaaaaaaaagttaaagaaacaagaaaatactgtaatcccagcactttaggaggccaaggtgggtggaccacaaggtcaggagatcgagaccatcctggctaacacagtgaaaccccatctctactaaaaatataaaaaatcagccaggcatggtggtgcgcacctgtagtcccagctatttgggaggctgaggcaggagaattgcctaaacctgggaggcagaggttgcagtgagccgagattgcaccactccactccagcctgg

SEQ ID NO: 895821 - DNA, 612 bp, Homo sapiens
acaatccaaatgggtttgtattaggcttatcaaaagaggaaactttagacacagtttatcttttttttttaacaattatcccaccaaaaaagcaataaaggtgtgtaaaataaaatttgtaggctgaagagtaggaaaaaaaaaatacatgcaacatgactaagccacaaatgcaatgagcattttcatgaatttcaggccaaactttgggataatccattatttttgacacmaatgtgtatgataatccacattttttttttttttttgagatggagtctcactctgtcgcccaggctggagtgcaatggtgtgatctcggctcactgcaagctccacctcctgggttcacacagttctcctgcctcagcctcccgaatagctgggactacaggtgcccgccaccacgcccggctaattttttgtatttttagtagagacggggtttcaccatgttagccaggatggtcccgatctcctgaccttgtgatccgcccgccttggcctctcaaagtactgggacttacaggcgtgagccaccgcacccggccgataatgcacattttaaaacgtattctacagtactggcattgctatggttaaatttaattg

SEQ ID NO: 895822 - DNA, 626 bp, Homo sapiens
ggtcttcctcttcttcctgactctttatgcattggtatttcctagtgcacagttttatttactttcatttcctctgtgaactcacttagccccatgggatcacatttatgactctccaattttttatactctcatttcctctctgagctccagaattgtatactcagccatctattttggattgctatcttttcttttggggggggttggggggtggggacagagtctcacactgttgcctgggctggagtgcaatggcatgatcttggctcactgcaacctccgcctgccgggttcaagtgattctcctgcctcagtctcctgagtggctgggattacaggcgtgtgccagcactcctggctaattttttgtattttttggtagagtcggggtttcactatgttggccaggctggtcgcgaactcctgacctcatgatctgccctccttggcctcccaaagtgctgggattacaggcatgagccaccsagcctggcctatttggattcacccaaataggtgaatgtctaaatttcaaaagcacacatcttggttctttattcaatcctcttctcctcctcagtaagtggcaccatcatatatccagttgttcaggctcaaaccca

SEQ ID NO: 895823 - DNA, 626 bp, Homo sapiens
ggtcttcctcttcttcctgactctttatgcattggtatttcctagtgcacagttttatttactttcatttcctctgtgaactcacttagccccatgggatcacatttatgactctccaattttttatactctcatttcctctctgagctccagaattgtatactcagccatctattttggattgctatcttttcttttggggggggttggggggtggggacagagtctcacactgttgcctgggctggagtgcaatggcatgatcttggctcactgcaacctccgcctgccgggttcaagtgattctcctgcctcagtctcctgagtggctgggattacaggcgtgtgccagcactcctggctaattttttgtattttttggtagagtcggggtttcactatgttggccaggctggtcgcgaactcctgacctcatgatctgccctccttggcctcccaaagtgctgggattacaggcatgagccacccmgcctggcctatttggattcacccaaataggtgaatgtctaaatttcaaaagcacacatcttggttctttattcaatcctcttctcctcctcagtaagtggcaccatcatatatccagttgttcaggctcaaaccca

SEQ ID NO: 895824 - DNA, 599 bp, Homo sapiens
catcaacaaaaaggacatccacatgaaaacgccatctgaaggtcaccaacatcaaggaccaaacgtagataaatccacaaagacgaggaaaaaccagtgcaaaaaggctgaaatttccaaaaaccagaatgcctcttctcctccaaaggatcacaactcctcaccagcaagggaacaaaactggacagagaatgagtttgatgaactgacagaagtagacttcagaaggtgggtaataacaaactcctctgagctmaaggagcatgttctaacccaatgcaaggaggctaagaaccttgaaaaaagattagaggaattgccaactagaataaccagtgtagagaagaacataaatgatctgatggagctgaaaaacacagcatgagaacttcgtgaggcatacacaagcatcaatagccaaatcaatcaagcagaagaaaggatatatcagagattgaagatcaacttaatgaaataaagtgtaaagattaaaagaaaaaagaatgaaaaggaatgaacaaagcctccaagaaatatgggactatgtgaaaagaccaaagctacatttgattggtgtgcctgaaagtgacaggcagaat

SEQ ID NO: 895825 - DNA, 591 bp, Homo sapiens
tgtttcagcagccccaggaaacttgtacagtcacagaagtgtgggctgggtggtcagggaagaactctctgagtaagtaacatttgggttgaggcctaaaggatgaggagggtgcagctctgggaacagctagcgaaaaaatacttaaaagagaaggaagagtaagtgcagagccctgggagtggacatggcagcactggggccagtgtggcaggagtgtagaagagaaaccgcagagaggggagtgccctcggcagggcaggcagacctttagttgagactcctgggtaamaaaagttggtttgcattctattctgctatttcctcattgcatgatcttgtttcttaacttcttggaatatagattcgagtttcttcaaatataaaatgtctgtccatggaaatgctcctgaatctatcaagtgctagctcctaggtcattctggtttattatttctgtgaccttggatttcctatgaaatttgaaatttcccatcctaaacccacttggatttttactgcctttcatcatttgcaatctgttttagccataccttctaaaatgctttggtatttagaaagtccatgttc

SEQ ID NO: 895826 - DNA, 591 bp, Homo sapiens
tgtttcagcagccccaggaaacttgtacagtcacagaagtgtgggctgggtggtcagggaagaactctctgagtaagtaacatttgggttgaggcctaaaggatgaggagggtgcagctctgggaacagctagcgaaaaaatacttaaaagagaaggaagagtaagtgcagagccctgggagtggacatggcagcactggggccagtgtggcaggagtgtagaagagaaaccgcagagaggggagtgccctcggcagggcaggcagacctttagttgagactcctgggtaaaaaaagttggtttgcattctattctgctatttcctcattgcrtgatcttgtttcttaacttcttggaatatagattcgagtttcttcaaatataaaatgtctgtccatggaaatgctcctgaatctatcaagtgctagctcctaggtcattctggtttattatttctgtgaccttggatttcctatgaaatttgaaatttcccatcctaaacccacttggatttttactgcctttcatcatttgcaatctgttttagccataccttctaaaatgctttggtatttagaaagtccatgttc

SEQ ID NO: 895827 - DNA, 574 bp, Homo sapiens
tttatttagcatttaccatgcactggcaacactgtggtaggcactatggaattgatgaatgaggtatcattcctgcctcatggtgactacagtctaaaggggagacagacactataaaaaaagaataaatataaaatcaaaaattgtcaaatgcaacaaagcatcacttcscattatgaataagggtgcctcatttttgtggcctagttaagaaaggaaggggttcatatcaggatattttccattatattcactactgtttttgtcatccatttggataaaaatatttccaaaatgttcacttggtgtgtaagaggataacgttccagaaggagccccatccattcatgatcccagactcaagccacatgtggtcagttacctagtgattaaaggtgaaatgagggccttccagagggcccaactctctagtccctctgggacacaatgtgtgctgtagacaaatgctgagaaagtaaagatggacagtcagaataaaaagtattttgtacctctgtgtgccaacgtgtcttctgggcactttgatgtttactatatgtctcagattttctct

SEQ ID NO: 895828 - DNA, 632 bp, Homo sapiens
tgactgcttggctagaacattgatctacccttggtgctcctcctggttctcagaccttcggacttggactggaatctatacctaaatctgcaagctctccagctctcagactttacctaaatctgtctcagaccatacctaaatctctctctctctttctctctgtctctccctctccctctcttacagggcagttgtttatagaatatatctcaatttgagtttgatgtttttgagagacagaatatctatctgtctgtctrtctatccatccatccatctatcatctatttattatctatctatctatctatctatctatctatctatctatctatctatcctgcttttctagagaacacagactaatgtaggtgataactaggatcccttccccactaagaattgttcagggccctgcaccccagaggaagaacctatttcctttctttcccctggatccactgctcaccttttcttctgcctacaatcctagaagttcaaaatcttccaggaagaattctccaagtttgtccttgcttcatctccaccaacctgagtcagcgagtttttcaaccttgctatttgtacccatgtccaggttgttaatatatatacatgcactgtgtgct

SEQ ID NO: 895829 - DNA, 632 bp, Homo sapiens
tgactgcttggctagaacattgatctacccttggtgctcctcctggttctcagaccttcggacttggactggaatctatacctaaatctgcaagctctccagctctcagactttacctaaatctgtctcagaccatacctaaatctctctctctctttctctctgtctctccctctccctctcttacagggcagttgtttatagaatatatctcaatttgagtttgatgtttttgagagacagaatatctatctgtctgtctatctatccatccatccatctatcatctatttattatctatctatctatctatctatctatctatctatctatctatctatcctgcttttctagagaacacagactaatgtaggtgakaactaggatcccttccccactaagaattgttcagggccctgcaccccagaggaagaacctatttcctttctttcccctggatccactgctcaccttttcttctgcctacaatcctagaagttcaaaatcttccaggaagaattctccaagtttgtccttgcttcatctccaccaacctgagtcagcgagtttttcaaccttgctatttgtacccatgtccaggttgttaatatatatacatgcactgtgtgct

SEQ ID NO: 895830 - DNA, 663 bp, Homo sapiens
catgtacttaaactttattggcataaagatgttcatagtgtgcttttatcctttaaatgtcagcaacttctgtaacaatgtccttttttcccctgatatttgtaatttgtatttactctttgtcttgttatattttcatctattttattaatattttcaaatattcagcttttcattctattgaattcctcttgtatgtctattttcccytttaatttttttttttgcttttatttttgtttcctttaactttgggcttaatttggtgtttttttttttttttcaagtttatgaattggcaacctacttattaaatttcaacttttcttctttttcgatagatgcacatatttactttccctcccagtcctgttttatctcataaatttagacatttagtatttgaaatgttcagctaaaattttctaaaattcattttgatttacactttaatatatgggttagaggtatgctatttaattttcaatcatctggagattttctagttatctttcttttattgagttcttatttaatctcccagttattagagtatgcactttaaataatttccttctttggacattttttgagacttgaattttagcttatggtattgtcagttttggtacatgttccacgtgtacttgtggtagatgtgca

SEQ ID NO: 895831 - DNA, 559 bp, Homo sapiens
accattcaggtcataggcatgggcgaggacttcatgtctaaaataccaaaagcaatggcaacaaaagccaaaattgacaaatgggatctaattaaactaaagagcttctgcacagcaaaagaaactaccatcagagtgaacaggcaacctacaaaatgggagaaaatttttgcaacctactcatctgacaaagggctaatatccagaatctacaatgaactcaaacaaatttacaagaaaaaaacaaacaaccccatcaaaaagtgggcgaaggacatgaacagacagttctcaaaaggagatcataaacttgagtggtccagcaacaattctttgtaaattggtagtggtacggctgtgattgggcataggcaggtccagaaagcacagtgaaacgattggagaggggatccagacttcyaatttatcaacactgttgcatcagagcctcaggtctcagctcacatttacggccatgggagatcccttatgactagctgatggagaaggaaaatgacagagcctgattcatggaggggttggctcaatatgcgggtac

SEQ ID NO: 895832 - DNA, 606 bp, Homo sapiens
cacactttggcttctgtagagttcctaactatacttgaacttctatctatcttcttttccttgtctttccgtatcttggtcttccttgagtttcttaggcacatatacctgtgtttctcccaggtttattctattgcatgcatctaataaccatatgtcttcttcttgcaggcatggtttctgacttgatatttgcctcaacatttgatttgggtgtgatttcaggtttctagctgcttcctagcctaaaataaccatgcacttgacaccctggacccttgacttctaatccawtctttacactgtcccaaacctgtggatatctgtagcactgtggaactaaaaatcctaccaacacagagagtactctttactaagtgtagaaaaaaagaacaatgttttatttttgaataagcatagccaagttttgtgtgcataagcaatctgaatgaggctacaatgtcagggcattttcacacacatttatataaagagtttgtagccagtacacaactcacgtccttcaggtttaatggtatccttatttttcctataagagggcttaacagcacaatgtgtgtatatatattttttcatataagtcat

SEQ ID NO: 895833 - DNA, 572 bp, Homo sapiens
agaatttcaaaacatacttagtaggtaaaaccatcaaaatttgatgattaattgaatgcagagggtgaggaagatgaaacatatttgatcctcacatcaaacctgtgaagttaagtaaacattatcatctacctttagcagaagaggaaactgaagcccagagaggttaaatcatttgcttgatgtcccatagcttgaactagaacataaaattcctgacccatgatcttttcttctggttggactatgttgcttacatatcccttccccttcctcatcccctcctgagatctcatattaatggacatatgccgccacttactcttcyatctggaatgggtacccttgttcacttctattcttgtgactttatgtaactggtacagcaacatcaacaccttccatgtcagctaatatagaaaaatcaaaggagaaactaataataaaaaggcagatccaaataagccactttttagtaatcacatcaatagaacactacacataatatgatgaattgattaagatttcatttgggaggctgtgatttgtaaaggaaaaatgacctttaaggc

SEQ ID NO: 895834 - DNA, 644 bp, Homo sapiens
aaaagcaccaggactaactaatcttgtaaaatgacccatgaaaacagatgtggccataaaaactgaatccatggaaagggttaaattgaattccaatgcagaatgttaacaatcaaatcacagtcaccacttctaccagggaaagcaattaaaaactaataataagcaagagtttcaggtacaagatcaacaagcttcagagagaaggattcccaagtttagctggcwtgtaagtgccctgggaaaacaagtcttctgctctaggtctgtgtgtgtttggtttaatgtactaatcaacagggctgcatataactgactgcctatataagcaacacaagaaacttcacaaatagttgccatcagttcatcccattactggggaaacaactgaacatgcccattaatggcagtacagtaatatcatcagaaaatactatagaggatattacttatttatagttggctagctacctcttaaatgaaaactggtcatttagacctcccagttaagatattagactttaggaaatattgtccaaccaggatggtgcagcaggactgaccaaatgaattaaaacttctttgctaacataaaaatgtcaagtcaatgtaattaggagattaagacattcatctttaccatc

SEQ ID NO: 895835 - DNA, 666 bp, Homo sapiens
taaacctgaaaggcagtctaggcaataggtaccgcaattcgtaggcgagtcctagggctgaactaggcccagagacagtggactggggtgagggggcagggcacatgacatactgagacaccagctggggcagccaaggaaggactgaaatcacccctcccttaatcccaggctacatggtttgaggctccaaaagagacctcttccttctgcttgaggagaggagaggtaagagaggagaggactttgccttgcatcttggttaccagctcagccacacaaggatagagcaccagtcagagctgtgaggaccctgttccaggccatagctcccagatgacatttcaagacacaccctgagccagaaaggkattccctgacttgaaggaaaggacccaatccttacagcgttcatcatctgctaactgaagagcccttgggacctgaataaccagcagtgatacccaggaactaccttgagggccttgttgagcctctgacacttgctggcttcaggtggggctcagcaaattaccagctgtggtgctatggggcaaaactccttctcctttagaaaagcagagggaaaagtaaagaggactttgtcttaccccttaggtaccaacaccaccacagtggggtagggcatcaagcgggctcctgggg

SEQ ID NO: 895836 - DNA, 625 bp, Homo sapiens
tcctgggccgaggaggtgatggcaggaatgtgggcagccatcctggatcatgaagaaacgtgaatggcagatagaaaagctgatccttgaggactttagggctgccataccaaccacgattgcctctccatggacctcttttataaaaatatgagtaatattcttgtttaggccactgtgatgttgggatttttcaatacatgcagctaaacctaactgataccccacttccccaagttcagccttcatcccatgcacaatttcaaactataaaacacaggaagggagcctctgagcagatacaactrctccaggccttggagttggccaaggatagacccacagagaacagccattcactcagtggacaagcccatcaagtgtctaccccaagatcctgtgctgaagaaatgatggctttgggagcagcaggttttatgggggaagactgagagtgtggtttgggacacgttaaatttgagaggatctgttaggcgtccaaatggtgaagaacaggtaaacaggtctggagtttcagggttgaggctagagatataggttttgagaagtttgggagaaaatggttgtttataaaaccatgtaactgtaggaaatcccccaggga

SEQ ID NO: 895837 - DNA, 535 bp, Homo sapiens
acatttcccaatccctgggtccagggcagacccgtccttccatgtccagagaggatcctgatggccctgccaacggcctcccttcccgaaccaggactgacccacacctcggcccagttcgcgtcccctcccttgtcccyatccttgtcccttccccacccacgtcctctggaatccgggacaggtcctccgcccggcccttggggcgagcgcgcccgtggccagcagcctcggcggggcgggaggtgcggctctccagccggcgcccgcgcctctcctagcgccgcggggtcggggtccgggcggcgcgccccgtgcctcagcggctgcgccagtcgcactgcgggcgctgcgtccccgccgcccgcctggggctcgtgcccgctgcagccggagcagggccgggcgcgctcggcgcgggatgaaggcgcggcggtgttcaggatcccggcgcagggtccagggcgcatctgggcgtccgagggtggcaccctggggccggcgcagcggggaggcccgggccctgagatcttgg

SEQ ID NO: 895838 - DNA, 620 bp, Homo sapiens
gaagatttggtgtttggtaagggctcaatctctgcttccaagagggtgctttgaatgctgcatcctccaaatgggatgaacaatactcctctcacggcagaagagcagaatagagcaaacccactcccataagccctttttattttgaacataatccattcctgaggacacagccctcataacctaagcacctcctattaggccccacctcccaactctattgcattggggattaagtttcaacatgagttctggaagggacaaaaatagtcaarccatagcaacccgtttccaaacaggtcaagactacaaccctctttgtcagtcttccaggtctaccctatcctccctttgcatattctgttatacactcagatgggctgttctctctacagaaaatccatttttgctccctgtttccttgtttccgccctccctcaacacacacacacacacacacacacacacacacacacacacacacacaatggagctcctcctggaaactcttactgctcttagagtttggccacaaattatctaacctttgagcccaatcacaccaagcctcttcctacctttttccttccgttagaatggacatagtcctcttttccctt

SEQ ID NO: 895839 - DNA, 611 bp, Homo sapiens
attatatacctgataagggatgagtaatcagaatatatagtgaactcctaatagtcacaacagagctgctgctgggaagtggcagcccaatgagggacatttcccagtcccctgtggggaggggggccatctgactgtgatctggacaacagaatgtggacagaagtgtttatgccacttccacgcctggcctggaagaatctcccacacggttctccgtgctctctcgcttctttgtttcgtagatggaccgagatccacaggaggatcttgggagccatgtgctgatgactcagaacttctgccagcctggaatcctcaatgactgcacaaagcacagtctactcacccactccctccctgaccgccctcaacgtggcttttatggaaatgaaaaataaattctattcttattgctccacaaacaacagagattttaaggtttacctgttacagcagcaagtatcagtttaaytgatacagatgtcagtatctagagggaaatattaacctaataaaaaaccctgggtaaacagatggtctagcagtaggcgtagcagccggagctctgcgttattcagtagcagcaacacatttagttcagtgttgtc

SEQ ID NO: 895840 - DNA, 625 bp, Homo sapiens
tgttttcttaacaagacaggaggtaggcagtcccaagtttagttcattgtctcaacaatgtcatcaggaacccaggtccttctgccacttcctatttcgctgtccgctggacacttcccatgaatcctgttgatttatgtkaaccttctctttttccatacagatttttttaggttgaagataagcctttagtgcactggttgtaaactgatggcttcatgacatttgtgtttagctttcaatatttaaaaaaaaatttcggttagcttccaacattaacctaaaaagcttccgcacagcaaatgaaaaaatcaacagagtgaacagaaaacctgcagaatgggaaaaaatatttgcaaactatgtaaccagcaggggactaatactgggaatttataaggaattcagacaactcaacaacaacaacaaaatcaatctcattaaaaagtgagcaaaggatatgaatagatatttttcaaaagaagacatacaaatggctaaaaagcatatgaaaaactgctcaacatcactaatcatcagagagatgcaaattaaaaccacaatgagatataattttgcaccagccagaatggctattattagaaagacaaaaaataacagatgt

SEQ ID NO: 895841 - DNA, 625 bp, Homo sapiens
tgttttcttaacaagacaggaggtaggcagtcccaagtttagttcattgtctcaacaatgtcatcaggaacccaggtccttctgccacttcctatttcgctgtccgctggacacttcccatgaatcctgttgatttatgtgaaccttctctttttccatacagatttttttaggttgaagataagcctttagtgcactggttgtaaactgatggcttcatgacatktgtgtttagctttcaatatttaaaaaaaaatttcggttagcttccaacattaacctaaaaagcttccgcacagcaaatgaaaaaatcaacagagtgaacagaaaacctgcagaatgggaaaaaatatttgcaaactatgtaaccagcaggggactaatactgggaatttataaggaattcagacaactcaacaacaacaacaaaatcaatctcattaaaaagtgagcaaaggatatgaatagatatttttcaaaagaagacatacaaatggctaaaaagcatatgaaaaactgctcaacatcactaatcatcagagagatgcaaattaaaaccacaatgagatataattttgcaccagccagaatggctattattagaaagacaaaaaataacagatgt

SEQ ID NO: 895842 - DNA, 642 bp, Homo sapiens
tggccttgagagcttcaggtgctctcagccctcctgactgatttggggctgaacaacacaaaatcaatgtgcccatatactggtagccctcacatagcactccagagtgctgtgacccactggtttggaagctctggtttaccttttcataaaatgtaatatatatattttttatctaaagatgactgagtaatttaaycttgattgtcctgggaatgcaagggatatgtgggagagagttgtatctcctctatctgaactctatctgttagcaaaaggaggtgagtctgcttattggtggttgttatcttctttttacagatgaggaaactgaaataactcacagagggtcacttatccaacatgtggccaattagattcaaacgctgaaattctgacatctagtgttctcataatctcactatgattgctccactacatgaatatgttatgcacttaatcactcacatcactgatataaacagaattctctatcaaaattgttactccagaaacaaatcctgtaatgctttctaaggactctttaatgactctgagtgttgaaagggactcaaatgaggaaactgaagcccaaagaggttaagtgacttgcttaagtctaatgaaacccatgtctttctt

SEQ ID NO: 895843 - DNA, 642 bp, Homo sapiens
tggccttgagagcttcaggtgctctcagccctcctgactgatttggggctgaacaacacaaaatcaatgtgcccatatactggtagccctcacatagcactccagagtgctgtgacccactggtttggaagctctggtttaccttttcataaaatgtaatatatatattttttatctaaagatgactgagtaatttaatcttgattgtcctgggaatgcaagggatatgtgggagagagttgtatctcctctatctgaactctatctgttagcaaaaggaggtgagtctgcttattggtggttgttatcttctttttacagatgaggaaactgaaataactcacagagggtcacttatccaacatgtggccaattagattcaaacgctgaaattctgacatctagtgttctcatartctcactatgattgctccactacatgaatatgttatgcacttaatcactcacatcactgatataaacagaattctctatcaaaattgttactccagaaacaaatcctgtaatgctttctaaggactctttaatgactctgagtgttgaaagggactcaaatgaggaaactgaagcccaaagaggttaagtgacttgcttaagtctaatgaaacccatgtctttctt

SEQ ID NO: 895844 - DNA, 637 bp, Homo sapiens
aaaagcaccaggactaactaatcttgtaaaatgacccatgaaaacagatgtggccataaaaactgaatccatggaaagggttaaattgaattccaatgcagaatgttaacaatcaaatcacagtcaccacttctaccagggaaagcaataaaaactaataataagcaagagtttcaggtacaagatcaacaagcttcagagagaaggattcccaagtttagctggcwtgtaagtgccctgggaaaacaagtcttctgctctaggtctgtgtgtgtttggtttaatgtactaatcaacagggctgcatataactgactgcctatataagcaacacaagaaacttcacaaatagttgccatcagttcatcccattactggggaaacaactgaacatgcccattaatggcagtacagtaatatcatcagaaaatactatagaggatattacttatttatagttggctagctacctcttaatgaaaactggtcatttagacctcccagttaagatattagactttaggaaatattgtccaaccaggatggtgcagcaggactgaccaaatgaattaaaacttctttgctaacataaaaatgtcaagtcaatgtaattaggagattaagacattcatcttta

SEQ ID NO: 895845 - DNA, 605 bp, Homo sapiens
cataaaatgagcttaaagtaacttcatagattgttctcagcatagagtcctcagacaagacttgggcaagtaagcactccataaatgctagctgttgtcattggcatcataaccatcacactcatctggggatggcataagaacaggtgcctcctgccatgggaatggaccaccctctggaggaccatcctgattctaggactctgtgatcatatggaagttcagagtaacaactcaggagcattttctaaaagtgctgctaagtgagttaaaatttaagtcatcacacagcttttccctgggaaaagctccaatttcatttttggtctcagatgtcagaagcgcaattgctgctgtatagccaagtagaaaagggtttgagcataagcataasagtggtatttctcaagctccatcccttcattccctgagtcagaatttccaagagatgaaatggtgtattttttttttaataggaagggcctcactttttacagaagggctctaggtaatgaataactttttaaaaaaattttgttctagggtcagtgaaagtaccaagacatatcagacattccccattgctttagcattctgaatcattc

SEQ ID NO: 895846 - DNA, 583 bp, Homo sapiens
aaagacagagtgccagggcctgcaggtctgggctttaaggtttctttcctcactgtgtggctttggcaagttcacttggacctgctgaacctcagtgtcttattctgtcaagtgaaggaaggcattagcccacattcttaaagtgtgatcccagaacatcagcatcagcatcacccgggagcttgggagaaatgcaatcctctatatccaccccagaccttctgcattagacacttcggtagtggagccaacagtttgtgtttgwgtaagtcctccaggtggctctcaccacgctaaagctgaagaacccctggtatgctatggactccaccaggcagggattctggcaggtgtggacatcagggtggtaccagctctaaagacctggttggggctgaaaactgagaaaataatcaaatcagttccttaaggcaggaggcctgtcaacgagtcaaagactgtgcgtaaaatgtcctgcctccgagtttagcctctaccacttatttggtgttttaacttcatatttcttgacctcttctgacctcattttcacatctgcaaaaggcaggataggtaaataagt

SEQ ID NO: 895847 - DNA, 667 bp, Homo sapiens
cccagtcctacgtctaaattcctgggaaagggactctaattggctaacttaagtcaggtgcctcccatccccagcaaatctcctgtggccagagacccaggatcacctgacaaatgagagggtgagaaggggcattgaagaaggctcaccagcatttgggcagaccatcatgacgttcattttgacaggaatgaatgmgaaaactcttgaatcctcctcaagaaccacggctgctccttacaagcaggtgcagggtatgagcaggatcctcctgctttgtctccctatcaaatggttagtgtttgtaatgctagatgcccttttaagcttcacagacaagaaaggctggctgaacagacgtagaatatgaaaaatgaattttctattctataaacataccaaactccagtgcaaacaagaaaatatggcacaacataaattactattatcttcagtgcatgttatgcttaatagcagcttattgaatctcttggttatgtaaggcagttctgtgatgatgaatttttttttttttttttttttttttagttttctggaggtaattgaatacagaaaagctattacttttacttaaggcaaaaaatagcgtgatgtggaaaatactctgggataaaagtcttttcttatttagccacaagttagcagt

SEQ ID NO: 895848 - DNA, 667 bp, Homo sapiens
cccagtcctacgtctaaattcctgggaaagggactctaattggctaacttaagtcaggtgcctcccatccccagcaaatctcctgtggccagagacccaggatcacctgacaaatgagagggtgagaaggggcattgaagaaggctcaccagcatttgggcagaccatcatgacgttcattttgacaggaatgaatgagaaaactcttgaatcctcctcaagaaccacggctgctccttacaagcaggtgcagggtatgagcaggatcctcctgctttgtctccctatcaaatggttagtgtttgtaatgctagatgcccttttaagcttcacagacaagaaaggctggctgaacagacgtagaatatgaaaaatgaattttctattytataaacataccaaactccagtgcaaacaagaaaatatggcacaacataaattactattatcttcagtgcatgttatgcttaatagcagcttattgaatctcttggttatgtaaggcagttctgtgatgatgaatttttttttttttttttttttttttagttttctggaggtaattgaatacagaaaagctattacttttacttaaggcaaaaaatagcgtgatgtggaaaatactctgggataaaagtcttttcttatttagccacaagttagcagt

SEQ ID NO: 895849 - DNA, 614 bp, Homo sapiens
aaccaaatggggaatacaaatttgttcaggagctgaggatggttaacgaggcagcagtcccagtctacccaaatagttcctaatcctcacacaatattgacccaagtttctgaagatgctaattggttcatggtattagacttaaaggaaactttcttctctacacctttacacctggaccccccagtatatttttgcatttgaatagactaatccagatgctgttgctacatttcagtttacctggactgtcctccctcaaggttttagggatagtccccatcccattgggaatgcgttggcaaaataattaagggaactacagttaacaaatggatctctcctacaatatgtggatggcctattaatttccagccctactagggaagattctggaaaaaaaatacaatttaggcccttaatttkttgggaaaacaagggtatcagctgtctccccatgagacccagacttctgttcaaaagattaaatacttggtatacatgctcactcctggaacaagaaccctagcccagaaatgaaaatagaccatcctggcactccagccccctcagactaagaaagagttaagaacatttctgggaatgactgcatt

SEQ ID NO: 895850 - DNA, 620 bp, Homo sapiens
tcttgatggaattggtattttcagttatatagaagatatccattctaataggtatgtagttctacctcctttttgctttaatttatagctccctaatgaaaaaaaatcttgagtttttttaagagatttattttatttcaatagtttttgggaaacaggtgtttttcsgttgcatggataagttctttagtggtgatttgtgaaattttggtgcacccgtaatcacatatacacccatagcaagcagtgtacatgctacctgatgtgtagccttttatccctcacccccctcccatccttccccacgagtccctaaagtccattatatctttcttatgccttcgcatcctcatagcttagctcctacttataagtgagagcatactatatttggttttccattcctgagttacttcacttataataatggtctccaactctatccaggttgctgcaaatgccattatttcatccctttttatggctcagtagttttccatggtgtatatatatcatattttctttatccactcattgattgatggtcatttaggttcgtcccatattttttcaattacaaaatgtcctgctaaaaatatgtgtgtgtaagtgtctttttt

SEQ ID NO: 895851 - DNA, 643 bp, Homo sapiens
actttgttatagcagccatggcaaactgattcagatttttttcagctgtgcataaattaccagaaattccctattttcaaatattttgttataagggataatcatatttaggtaaaattaagaaatatgaccgaacaggaactgacacatacctgtagattattttttaccaccctttttgctacactcatcctgatctccttctctgtccagactcacagatgctcgtgtactcacaatagacttggaaacattggtgagagttaaggcaaaaagttgctaaaacctacaaaagaggcctcccagaaattaaaaagaatgaattagctgtgtacatagcaagacacaagaattttcaagacagtgtttagtaaaaaattaaaaaaatacagtgatattgcatagcaagagacagtttgactagtgattaaaagtgtggattccaaagccagatgtaygggtttttatctcagctttttcacattctagctgtgcggcacaggccaatttgtgctttagtttcctcttctaaagtttcagttatcaaatgagttagtcctgaaaatctaatgaacaccatgataactatagttattaataatatatacttaaaatttgctaagagagtatatcttaaatgtcc

SEQ ID NO: 895852 - DNA, 661 bp, Homo sapiens
agtgccttagcttttggcctatcttggcttttgatgggcctttgtgactaaacttaattatttctaggttttgatttaaagtgagtgttgtacagattatttctttcacttgaacacttagagcccattgtatatttattaattggcctaacttcaatattgttgcctctgatggaatagggagccccaagaaaacaragagacagggaaagggccaattggtgaggcagtgaggacatacataacattcattaagttcaccatcttatatgggtgtggttcgtggtgccctaaaacaattacaagagtaacatcaaagattactgtttacagatcactattacagacataatagtaataaaaattttgaaatactgtgagaattaccaaaatgtgacacagaaacacgaaatgaacacatactgatgaaaaaaaatggtgctgatagacttgctggatgcagagctgccacaaaccttcaatttaaaaacaaaacaaaacaataaacaacccccccaaaaaaacactgcaatatctgcaaaacacaaagacaaagcacaataaaacaaggtatgcctgtattcaaaaatgtactaaagtaaaatgattgttaataatggatttttgttgtcaaaggaatggaattacttgtgtagatttt

SEQ ID NO: 895853 - DNA, 661 bp, Homo sapiens
agtgccttagcttttggcctatcttggcttttgatgggcctttgtgactaaacttaattatttctaggttttgatttaaagtgagtgttgtacagattatttctttcacttgaacacttagagcccattgtatatttattaattggcctaacttcaatattgttgcctctgatggaatagggagccccaagaaaacagagagacagggaaagggccaattggtgaggcagtgaggacatayataacattcattaagttcaccatcttatatgggtgtggttcgtggtgccctaaaacaattacaagagtaacatcaaagattactgtttacagatcactattacagacataatagtaataaaaattttgaaatactgtgagaattaccaaaatgtgacacagaaacacgaaatgaacacatactgatgaaaaaaaatggtgctgatagacttgctggatgcagagctgccacaaaccttcaatttaaaaacaaaacaaaacaataaacaacccccccaaaaaaacactgcaatatctgcaaaacacaaagacaaagcacaataaaacaaggtatgcctgtattcaaaaatgtactaaagtaaaatgattgttaataatggatttttgttgtcaaaggaatggaattacttgtgtagatttt

SEQ ID NO: 895854 - DNA, 661 bp, Homo sapiens
agtgccttagcttttggcctatcttggcttttgatgggcctttgtgactaaacttaattatttctaggttttgatttaaagtgagtgttgtacagattatttctttcacttgaacacttagagcccattgtatatttattaattggcctaacttcaatattgttgcctctgatggaatagggagccccaagaaaacagagagacagggaaagggccaattggtgaggcagtgaggacatacataacattcattaagttcaccatcttatatgggtgtggttcgtggtgycctaaaacaattacaagagtaacatcaaagattactgtttacagatcactattacagacataatagtaataaaaattttgaaatactgtgagaattaccaaaatgtgacacagaaacacgaaatgaacacatactgatgaaaaaaaatggtgctgatagacttgctggatgcagagctgccacaaaccttcaatttaaaaacaaaacaaaacaataaacaacccccccaaaaaaacactgcaatatctgcaaaacacaaagacaaagcacaataaaacaaggtatgcctgtattcaaaaatgtactaaagtaaaatgattgttaataatggatttttgttgtcaaaggaatggaattacttgtgtagatttt

SEQ ID NO: 895855 - DNA, 666 bp, Homo sapiens
cattcatacagagataacaactgaaaccttacactaaaattaaattgctaaaaggcaagatagagagatataacagaagaatcaaagtcagaggttaggaaaacacacttagggggttgaggagaaaaggagccagggaagaggacagatagatagcaaagaactgaaaaataaagaacaaggagaaagrgatgcctaatggtgatgaataaggcagaaacatcaagaaagagaaatgcacaaataatgaatatctgttgaatgaatgaaataatgaagaaggaatgaacaagtgaaagaagtcatgaatggagaggccattggatttatcggataggaggtctttggtggggaaagagtgttgacttggagaaattttgagggtagaagaaaatatagagaattagaatctgaacatatagactagactcctgggtcttctactgtgtagctttaagcaaataacctctatgaaactctttttctgttctaaaaatgagagaaacacctacaattacctccttcacctatatcctggggataagaatacaagcaaaagaccctagcaaaaataaagtgctatacaaatgtaaaatagtataattagcaacatttaaaagagctccacaaatgagaaggcattcaatcatcagtccaaagaaatat

SEQ ID NO: 895856 - DNA, 628 bp, Homo sapiens
aaaacacttcctttgaaatacaatcaatataagattatgcagtaaagttatcccaagaaatacatgtgcatcttgccacccaatttcagcatgaaattccattgtaaatcaaacctaacttatagtgactaaaacagggattatattaggcaaggttcctaggaattattggcagctgggggagggagtaactcagtaaatagagcagggttagaacttgggtgttcaggcaatattaaagtatcaaccagagtttggctgttacagggttaactccttcaaaatctttccaaaactggccagatmttgttggaacggttcaaatacaactgtccatccttgccaagaaaggttcccattaaatgcaagaggataaaatttgctggttgtagcatgttttcttctgagcagattaagagctgttcaatagaagtataatagaatgtgtaaatctagtatgacttgggagcagtgtacctgacattgaagatacagagctgtcaaagtggagataacctgtacactgagcagtggaaattccggtagaaataatgcatctgctgacaatatttgagcaataaaaacagatttaagccaaaataaaataccaaatacctcatacaaacag

SEQ ID NO: 895857 - DNA, 719 bp, Homo sapiens
tttacaggatgtgccacaagcctggctcactcctcttacttagaagggcattacctgctgagaccatttggatttgttgagtccagtgcaaactgaaacagtgacctatgtgaatgacagccaggtaaatgtcagaggacaatgccaaaaagacatattaagttcaggagttgaaattgtggtaagcattagtgcccatcctcaaagaagtcttctctgactttcctgtgcaaggcagtttcctckctccccaatttatgatgctatatcaaactcaacaaaccttggtaatggattgaatgatgtgggtgaaggaacagaaggaagaatcaagaatgtcttggccctaggattattatctggctcacggtaagctctaaataaatatctgttgaaagaaaaaatagctgggaataatacacattttgtcaccctcagccacactatgcagactataaaattgatgcttgtttacatcattaggtggccatatttacattaaaaccacagttttaagagccaaaaaatcctgggttcaaatcctgacttcaccatttgagctatgagacattaggagagttacttaactgagtctttctttctcttcttataaaaaggaaatcatctcataccaccctcacaagatgatggtgaagattagatgagataatacatttatcgtacttagaagaatacctggcagaaagtattcgtagagg

SEQ ID NO: 895858 - DNA, 577 bp, Homo sapiens
tcaatttgaataagggttggaattcaagctgggttctcttgccttctgaaagtctttttcagcttagtgggagttaacatccaagactgaagttggatggagaaaggggcaggaggcacttgctaccaaacaccatattaagcacatcacatcttctaatgacctgtagcactgaacttctggtacggtttttctactgaacagaatttgctgttttatgaactaaacatttctggtgttcatggtgagcataaatgttatggtctgaattttgtcacctgtgacctcctgattaatatgytgaagccctaatccctagcatgattgtatctggagataggttgtttcagaagtaatttacgttatgaagtgataacagtcagggcctaatctaataggactgtggccttataaggagagagagaccagtctctaacatgcgaggacacagcaagaaggtgcctgtctacaagccaggaagagagcccccaccagaatctgaccctgctggacgtcgacttgagatttcttgaatctagaactgtgagcaagtaaatttatgttgtttaagtcattc

SEQ ID NO: 895859 - DNA, 644 bp, Homo sapiens
gaggatcatcctatagcagaaggtggaagggtgagagggtgaaagaacataatacagaggaaaagggagccaaacttctgtgctaactacactcactcccacaataatggtattaattcatgcatgaggatgatgaagatggagccttcatggcccagtcacctcccacatcttaacattgccatgatggcaacccagctttaacatgagtttttaagtgaacattcaaactataacacaactctttcaaagtgacgagtatactttctaatcaaaaagagaatttttttttcagtttcwtataccataggctatttttcaatgtatatgtcattatacaaaaacaagaaatggggaaaggatttcctatttaataaatggtgctgggaaaactggctagccatatgtagaaagctgaaactggatcccttccttacaccttatacaaaaattaattcaagatggattaaagacttacatgttagacctaaaaccataaaaaccctagaggaaaacctaggcaataccattcaggatataggcatgggcaaggacttcatgtctaaaacaccaaaagtaatggcaacaaaagccaaaatagacaaatgggatctatttaaactaaagagcttctgcacagcaaa

SEQ ID NO: 895860 - DNA, 670 bp, Homo sapiens
gtatctcattgtggttttgatttgcatttccctaatgaccagtgataatgagctttttttaatatgtttcttggttacataaatgtcatcttttgagaagtgtctgttcatatcttttgcctactttttgatggggttttttttttcttgtaaatttgtttaagttatttgtgggttctagatattasccctttgtcagatggatagattgcaaaaattttctcccattctgtaggttgcctgttcaatctgatgatagtatcttttgctgtgcaggagctctttagtttaattagatcccgtttgtgaattttggcttttgttgccatactgctttcggtgttttagtcatgaagtctttgcctatgcctgtgtcctgaatggtattgcctaggttttcttctagggtttttatggttttaggtcttacatttaagtcttcaatccatcttgagttaatttttgtataaggcgtaaagaagagaactagtttcagctttgtgcctatggctagccagttttcccaacaccatttattaaataaggaatcctttccccattgcttatttttgtcaggtttgtcaaagatcagatggttgtagatgtgtggtattatttctgagggctctgttctgttccatttgtctgtatatctgttttggtaccagta

SEQ ID NO: 895861 - DNA, 588 bp, Homo sapiens
actctagtgtttaataaaactataagataactatagataatactttattatgaatttcaaaagagctagaaaaaaagatttgaaatagtttcaaaacaaagaattagtcaatgtttgaggtcacagatatcctaattaccctcatatgattaatatacattgtatgtgtatatcagaatataacaaatacctgacagatatgtaaaagtattaagtattaataaaaatatttaaaaatttaagaagagaaagtacaataaggactttgccatattaaaaataaaagactgagcatattttgccagcaaaactgccttactagaaacactaaatgagggacaggcagtcacactagatggtaccttgatccacacaaagaaatagtgscagtaaaagtattataaaaatatagataacttttgaaaatgtgtaaatattttcctttattctgattttaaaatatgtaaaagataaccacataaaagataattataaagtgcattattagagttgtaaaatattggcatagtatgtataaaaacaattacatacatgagggaatgttatcaaactctattagggaatatt

SEQ ID NO: 895862 - DNA, 582 bp, Homo sapiens
aagaataaggttttagaaagtgtattagaaaataagaaaagtgggactcaaacgccttaattttctagtcgctgtcacctaaagtaaaggtcaccccgcaagtaagcatctcccatggcaaaagaagcagcaaacgatggggcggcgggataacaggaaggaggagtactctcaggaagccacccgacrttgcactttttgacctctgttggaacgagcgggctaggacaggtactggagctccgctagacaaggcgggtcacatatttaaaatgccccgctgtttagggtccgcagcaccccactgccatctctttctctgtctctccttcccaccgccccgtgcctttgcctttcgttggagtttggtgcggtcccggtgcccagggggcgccttttccgcatgccggctcccaggatccccttccgcgcccgggggacccgtcgaagtcctggtctagcccgttttgagggcgtccgctccctccctctggtacgcagaacccgccaaaagagagcatttcggggggcgacgggcgtcctctactcaccggcaggtggcccagatccgtgacctccctg

SEQ ID NO: 895863 - DNA, 607 bp, Homo sapiens
taataatagtctctaccttctccatccaatcatataccacctgaccaatactccctcgaccaaaatactcaaattttgaaacaggaagaaaagattccagacagtgtatatcagcaaatttratgttgcttttaggggaaattgtagcacaatattatacagatggctcctgaaatatgcttcccaggagcaagtagttgttcactaataatgagccatggcaaactagctcatttcctagtttgattttgttttgtttcattttgttttgtttttgtttgtttgttttcggtttttgagacagagtctcactctgttgcccaggctggagtgtagtggagtgatctcgactcactgcaaccactgtctcccgggtttaagcaattctcctgcctcagcctcccaagtagctgggatttcaggtgcccatcaccatgcctggctatcatttcctattttgggtggtgatagcaaattcaatgtaacctcctcgatgcaacccccaatgaaccagtcatcatgttattcactttgtgtggtctccccccacattgaatcaggactgaccctttgtggccaatagaatatggaggaagtgatagtgttg

SEQ ID NO: 895864 - DNA, 615 bp, Homo sapiens
ctgggctccacagtgaaggtggtgcctccaggtggccttcacagcacatgaacttcgcctttagctaccccatccctttttattgtgatcatttaatatgctgttttctactaacacattaaatttaatacataacaaattaacacataacagtaaaataggtccttcataaaactataaccacagtcataayatagggagtgctgcaagaacctaggcatggtatttggtacagattaagtactgttgatttaatgcaggcttaaaggaaattaaagcaaaccaattaagtctgttttaattattatgttgataaaaagtataatgattaaaatgttccaggtactttaaaaggttagcacatttaattgtcataactttatgacatttgtgctattattattccaattttacagatgaggacagttgaagcacagaggtcacttggctaagtggtcaccgagcttgtatatagtgaaacgatgatttgtctttggtcagtctcactccacattctgtgtcctaatcactcaggaggtactcaaaagtaaattgatattaattcagacttactaattcaaacttaccggaaagccagtcccagtcactgaaaat

SEQ ID NO: 895865 - DNA, 652 bp, Homo sapiens
tggagtagtattcaatcataaaatagaatgagatgctgtcatttgcaacaacatggatggaactggaagacattatgttgagtaaaataagccaggcacagaaaaccaaactttgcatgttctcactcatttgtgagagtgaaaattaaaaaacttgaactcacagagatagagtagaatgatggttaccagaggttgggaaagatagtcgtataggggggaagtaggatggttaacaggtacaaaataatagttagaaacaatgaatatatctagcatttgatagcacaccagggtgactacagtcaacaataatttattgtatattttaaaatatctaaaattgtgtaattggattatttgcaacataaagaaaggaaaaatgcttgaggtgatggataccccattttccctgatgtaattattatgcattgaatgactatatcaataaatctcatgtaacgaattaatatgcacacttgctatgtactcacaaacttwaaaaaaagcctcctttatcacgacaggcacattttaaatgttcaaatgccaactatgtctagtgcttactagactgtattggacaacacaaatttagtatattttcattatcacaagatttgtatttgaccacacaattctaaaccatacc

SEQ ID NO: 895866 - DNA, 646 bp, Homo sapiens
gcatagagcttacttgagcctgaagcttgaggatagtcaaacaggagcataaattaaagaagttgtcctgaatatacactcttgagtagcagcagttacaaatgggtttttaagaaaaaaagaagaggcagttactaagttctttaccaagaatttacaatgayataacataaggtgctgattggccatacattgttctttgcctcacacattccaggaacatgaagataatggaccaggcaataagacaggaacaaaaatacctgcaaacaattgtcccagggtatggggaggcagaggtgggcatgactgaagtcccatactcatgtattcctgggcctgataaattttgcatagcttacatagctcacactgccctgagcaatttttcttttctcattccccccttttcataaatatcttttgaagaaagcatcatagataaactcaaatgcttttggctctttttatgttgagaatcttagtcctgcattgctagtaaagctcattcccagatggctctatctcacatggttggggggacaggacatgtctcattgaggaattctaagagcttcaaaatacaaattggaatggcctcataggttcacaaaaataagaccagtcaagtcactgatttacatag

SEQ ID NO: 895867 - DNA, 573 bp, Homo sapiens
gttctctttctgtaaattaggggtaaggtaagcaagacaatgatacttgatttaaagaaacatgatatagtgggtttgtatgcttaaaatgttagacaatttggtgctaaacatgaaatgaattaaagaaagaaataaaaatcaaaggttggaggcaaaaaatcatttaaaattagatttctttaggataatccttaatctctgaaaatgcactttaaaattgcatagaaatgtgaagtgttaatagaggcactgaaaaattaatttaaggactgccaacttacttaataaaacatcagagaacatcattgaaatttrcaatgtcattttccctcacatatatttgcatatctgtgactataaatacgtccctttaagactgctcaagtctgcctattcagatgtgatttagggcactgtataaagagaggtcagcatttatttcaagttccaggatacccctgtcacattgttttgcttttataaatataaggacttttatcattaacaatacatatgtggccattatcaaatattttaaaaagatatcacaattagattccatgtcacaca

SEQ ID NO: 895868 - DNA, 596 bp, Homo sapiens
taaggaaagggaagtcttttcaataaattgtgtcaaggaaactgaatatccacatggggaaaaaagaaataagacccttatctcccacaagaacaaaaatcaacttaaagctattaaaaacttaaaacttgaaaacgtaaaactactagaaaaaaatatagaaaaaagcatcttgacattggcctaggcaataaattttttgaatataatactaaaagtacaggcaacaaaaacaaaaataaacaaatgggattttatcaaactaaaatgtttctgcacagcaaaggaaacaatcaacagagtgaagaaacaaccwacaaaatgggataaaatttgcagaccatatatctgcaggggttaatattcaaaacattaagaaactcaactcaatcgcaagaaaacaaataacccaattttttaaaaaatgagtgaatgatctgaatagacttttctcaaaagaaaacatatgaattaccaacaggcattagaaaaaaatgctcaacattactaatcatcatggtaatgcaaatcaaagccacaatgagatattacctcacacctgttagagtcactattatcacaatgacaaaagatag

SEQ ID NO: 895869 - DNA, 594 bp, Homo sapiens
atcatggctaattgaaccagatgggaaagcttgatcacaattacttaaataagaatatttccccagggaatttggaattaggatttaacattagtcagtctccagttggaaatataaaatgtacattaggagctgaagggcagccatagcttcctgaataggacaagcagaaaatgcctaactgaagagaaaaaagagaacaaaatagatgagcagatataagcaaagatgagagagttggattaacacttactgaagscttttccagctttggatccagtctccttctgagtcctgggtaaacccttgcccttcagctcagtaaggcaattacttatcctcacattctatttctacgttttttcttgcctaatccagttagatttggtttttgctacttacaaccaaaggatcttagttaatggaataattgatatcagggatgaggatgcaatttccagcatgtggaattacttgaagcaagatgaggtgaagcatagtgagaactcctgcttctctagctgggaagtgagccatttatgtaaagagctaggaaagaagcattttagacaattgtctctttcttcttgatac

SEQ ID NO: 895870 - DNA, 632 bp, Homo sapiens
acaaatgagacttaattaaactaaaaagcttctgcaaagaaaaggaaataatcaacaaagtgaacagacaacatgcagaattgaaaaatatatttgtaaattattcatctaaccagatactaatattcagaatatgcaaataactcaacaaaaaataataattccattaaaagttggcaaaggacatgaatagattttttttaaaataagaacatacatatgacmaataagtatgtgaaaaaaatgctcaccatcactaatcgtctgggaaatgccaatgaaattcacaaagagatatcatcccaccctgctctaatggctgctataaaaaaacagaaaagatgtttgtgaggatgtagagaaaagggtaagcttttacaccgttggtgggaatgtatattagtacaacatttatggtaaatagtacggagatttctcaaaggaaccaaaaatagaactaccatttgctccagcaatctcattactgcctatctactcatgggaaatcataacatcaaaaagatactgcacccatatgtttactgcagcactatttgcaatagcaaaaaaacggaatcaacctaagtgtctgatataattgggctctgtgtccctactcattcatgttgaat

SEQ ID NO: 895871 - DNA, 632 bp, Homo sapiens
acaaatgagacttaattaaactaaaaagcttctgcaaagaaaaggaaataatcaacaaagtgaacagacaacatgcagaattgaaaaatatatttgtaaattattcatctaaccagatactaatattcagaatatgcaaataactcaacaaaaaataataattccattaaaagttggcaaaggacatgaatagattttttttaaaataagaacatacatatgaccaataagtatgtgaaaaaaatgctcaccatcactaatcgtctgggaaatgcmaatgaaattcacaaagagatatcatcccaccctgctctaatggctgctataaaaaaacagaaaagatgtttgtgaggatgtagagaaaagggtaagcttttacaccgttggtgggaatgtatattagtacaacatttatggtaaatagtacggagatttctcaaaggaaccaaaaatagaactaccatttgctccagcaatctcattactgcctatctactcatgggaaatcataacatcaaaaagatactgcacccatatgtttactgcagcactatttgcaatagcaaaaaaacggaatcaacctaagtgtctgatataattgggctctgtgtccctactcattcatgttgaat

SEQ ID NO: 895872 - DNA, 651 bp, Homo sapiens
aacacctgatctgagatgtaaaagtcaacttatgaagacaaataggacagaatatttaaagggaaccatggtagaaagtctagacaaattaaactttatatagtactaagtatataccccatgattaattatttgcattacttccatttacagattagctgtcactgttttttttttcattttgttcctctaattatttgcatgctaacatttattgtgcaatttatagtataccacagcaactacagcaccggacacccagtgcagattgcaaatactaatgctaatctcagctgccaggcacagatgacagcagttacatgccccccaggaaccaggacagcctcaaayggctaacatgaccaccaacatccagcataagtcaaagtagctgttgtggttctcagcagaaggcaaggaatctcagcagacagtgcaaatcttggcagagggtgcacttctcaaatgctaccccagttctgcgggactgagagaaggcacacaattctgggatttctccttcaagaggaggaaagagaaatggaacttactcgcaatgttctgtcacccaatgcacttctctcgttaaaatgaaagagcagctcttagtattcaacacagctcaatgggattggaagaaggttcacaata

SEQ ID NO: 895873 - DNA, 572 bp, Homo sapiens; identical to SEQ ID NO: 882417

SEQ ID NO: 895874 - DNA, 665 bp, Homo sapiens; identical to SEQ ID NO: 882418

SEQ ID NO: 895875 - DNA, 632 bp, Homo sapiens; identical to SEQ ID NO: 882419

SEQ ID NO: 895876 - DNA, 600 bp, Homo sapiens; identical to SEQ ID NO: 882420

SEQ ID NO: 895877 - DNA, 576 bp, Homo sapiens
taccaccttactttagcaagaatggccataatttaaaaatcaaaaaataatagatgctggcatggatgtggtgaaaagggaacacttttacactgctggtgggaatataaactagtacaaccattatgaaaaacagtataaagtttccttaaagaactaaaggtagaactacgattcgatttaggaatcccactactgggtatgtacccaaaggtaaagaagtcattatatgaaaaagacacttacacacacacggttatagcatyacaattcacaattggaaagataaggaaccaacctaaatgtccatcacccaataagtagataaagaaaatgtagtatatatatacaccatggactactactcagccataaaaaggaatgaaataatggcattcactgcaacctggatggagttggagaccattattctaagtaattcaggattggaaaaccgaatgttgtgtgttctcacttgtaattgggagctaagctgtgaggatgcataggcataagaatgatataatggactttgggaattcaggggataagggtgggagggtggcaagggataaa

SEQ ID NO: 895878 - DNA, 738 bp, Homo sapiens
tgccaaatccagttagcccctacttttgttaagatctctggccacataaatcagaagattgccataggcttagaacttctgggtttcagcaatgcatttgataaagtatctcaagactttcctgtggacaaggttgttagccatatccataggtggttgaacaactatatccaaagagattaattaatgagtcaatcaaattggagggctccctaaaggccagggctctctgaacttgatcacatcttaatgttatcattgatttgggtaaaggcacagaagaccacttatcagatttacaggatacatgaggctgggagagcaagttaatacaaggacacactggaatcaagatataaaaagataattgacagcttgaaacagggttaagaagggtaaatgtaaaatcccatacttttctaggggaaacaacatggataaacagagcttgggagagataatgagtcaaaagcagtcatttatgtgtaaagaaacatgcaaatttaagttgtgtctggttgccaaaggagcccacayctaggttgtgagctgcctggctggcttctggctcagatgcaaagctggagcagatctctctgctgtagctttggatttcgtgattttgagatttgtgttcaaagtcaccaacatctcccaaagtctccaggaagaagaggcacctgtccagatgagcccaggtggcttctgcctttgctcgccttctgacacctgcatggt

SEQ ID NO: 895879 - DNA, 530 bp, Homo sapiens
tttgcatcttttgcaacaggacccaattggagaaagtcgttattttatcaagactttgactggaagggtatgtttccctttaaggagacaatcttgacatgaagagccaataaaagccccgtgggaagactggtctcacgcccttgcctatgcagtccctgtacagggttcctgacctgtggtaagtaaagaatgtcactttctgacaggtccaggagcttcaagtttattatgggccctcaagaggaaagaatcacccaactcacaagtatttgaggatacaagcccatggctgggctcagcyttaaaaggtcttatctgagattccttgtggaacagagttccatcaaagccagtctaaaaggcctatgtagaaatagttattcttgctgcactttgtgcaaataatcaggctaagactaaagtatattttgcaaacaactcagtcctatcatgttttttttcttttttttttttttaacaaaaatgaggactggagagagaaattatgtttcaaaagttatcatgca

SEQ ID NO: 895880 - DNA, 567 bp, Homo sapiens
tgtgaggctaagggtagtggacacagaactgtaacagacctgccacaaatgttgtcatagatcaagagctacaaatgggctacttttgttgttgttctattttaaaaataaagaaaatcaaaatctttgaaagcttaaacatatcaatcarttgaatgctttgtctattttagagcatatatctagacattaagacagcctccttttaaataggtaatactgtggtttgagattaagtgtttatatctacaccaactggaattctttgttgcacatattgattaagtttccaactttattcacatagctagaaatcaatactccaaagacagaaaagtgaagactaatttacatattttaaatgaactgcatatttcaaattgtaacaactatgttaaaccatgctaacatcaacaattaatgattatacaatcgttctgcaagtcatagaaataatgttttaatactactaaagtaaacaaaatgttgaagcactaagttgaagatgatgaaaaatcaattacacaaatattttcactgatgcttaaaaggaattagatattttct

SEQ ID NO: 895881 - DNA, 615 bp, Homo sapiens
ctggacatgtatctcggttcccaatctttgctattacagataatgccctaacaaatatttccataggctacatttccaagagtaaaataagtggtcaaaattttgtgtctcttgatatatattgccaaattgctttacttgttataacagtttacactgtgccagggcattagtgtactaatttaatcacaggcttaccttccttgagtacagtcaatttttctaatttaataggtataaatggcatctcattattgtttcaagttacattgctttatttttagtgaggctgaatatttttcttatgttctctttgtttactattttctattttactgtctgttcatttcctttattcattggcatctgaattatatgcctatgaattagtatcctctttttgttcattactartgttaatctttgatctgtcatacttgataccagtatatagttttctgttttattttcatttcatgttctgttgaatagctgtctcacattttataaaattgaatatgtcaatcttcccttgtaaatttttctcattgcttcgaattgtagaaggtttttagacatctaaggagtttatatataacttattctgtcttctgc

SEQ ID NO: 895882 - DNA, 597 bp, Homo sapiens
tggaaacaaatggaaaggaagaaagtcttcacaaggaaaaataagttataatgaagaataaaataaaaatcttaggaccaaagaatataataactgaaattttaaatattcaaatgaatttgatagcagattggagatgacaaagaggaaaccggaagataagttaatataaagtatcaattctgaatcagaaagaaaacatattaagaaaatgtatggaaccccagggacctgtgaaagaaaaacaaagttctaacatttatgtaattagagtcccagagaagtaagaataagatacaggaaaaaaaaaatacttgaaaaaaaaagtactggtttaaaasttcccaaatttggggaaagacataaacttacagattcaagaacaagttaaactcaaagaaattcttcaccagaaaaataataatcaaactgctgaaaactaaaaaaaaaaaaaggtatccagagaaagacactgaatagaatgtaaggtagtaatcattcaaataactgcagatttctcatgacaaaacaggaagactagaaggaacgaagtgacatcacattgttaagtactgagaaaaagaagtattgacccag

SEQ ID NO: 895883 - DNA, 570 bp, Homo sapiens
atagaatcatttttgaaattctgaaggaaaaaaatattgtacattatatacataatttacgtatgtatttaaagagagagtagcataagagtttgctgagtcatgtaacataagtttagatgtcagccctctggagatggtatggcctcttcatgacgctgctggagatgatatccctgcttctctgtcctggcttcacagtcacttactgatcccttagcctttaccctcacagggtcctggagtccaagatgactgtgggaactggagggcagcaggggaaagaagggaacacaatgatgccctgctagtggatgmccttccctaggtcccattcaacaacttcttctgtctccttggccagaaagccacatgactatccctgcttaagggtagatggagctattgagctggacaccctgatgtcttacatataagtgtttttgtttttcaccaaggatgaaagagagaatggtatctgtggtcacctacccatttctgccattgaggggcaataatagatcaggcaaaagattcacagtcattccaatattaatatcaaagaagaat

SEQ ID NO: 895884 - DNA, 679 bp, Homo sapiens
cattctatgaagtcagaataaaagggaaaaactacatgacacagcagataaagcaaagtatttgataaaattcaacaccaaagtaatacaacaattttagaagactagaagtaagtcaattatttaatatgtaaaagaatatttactggaaagaaacaacaaaaagcatcatacttatcaaaaacttttctcttgagatctagaaggagaaaagaatgcctattattaccatttgcgatcagtattttacttgactttttaaccagaaaaaagggcaataaagaaactgaatgtagaattggaaagcaataaataaaactgtcatttcttgaagatgaaatgattatatacttaatccaaaagaaaatacaaatacactattagaattaacaggtgaatttggcagggttttggaaatgagtcaatatgcaaaratcaactatatttctttgggatggtcccaatatctggaaacatatattcttttctcctgtattgtaatataatatcaataaatcatttaccaagtatttgtctatcttttcgtacttggtggtctcatgtatatatcacacaaattagaaaataaaatttaaaaataacacttaaaataacatttgcaagagcatcccaaaactcaggtaaacatggagctctctacataggaaaggacaaaaca

SEQ ID NO: 895885 - DNA, 689 bp, Homo sapiens
gtaacttacccttctctggcttggttaatttacctggaaaattgacccaacattagtacctacaactcttcagatcatgaggaggattacatgagatcatacctataaaatgcttagcaaacacatccctggcacacagtacatagaccaaatacatgctgggtaaaattctttgtgataagcactgtaaatgttggctattatcaaacggagatgttctctgacagcagcgtagctttaagttgtaagagctggttttggttcatcaaaagcaaagtcattagaaatttaayggaaaattggcatcgatgcattggctgtgatgaaatcaactttgaaatatcacatatttttaactcaaaatcctagtctgataggatcctagtctaatagttcttctattctcgactttgacaacatcacctaaaaatgccttctcaaaagccactctcaccatgagtcctttcttaagacgtttcgtaccttctctaccacgtacgagagttcacaatcttgtcctggccttctcaccaccctcacaaaactacaaagcttctttcaaacaggattcacgtctgaatcatgttagcaacccaccacatcagtcatttgttgcataataatgctacctaatgagccatcccaaaaccagtgtcttgaggcaacgatcacttatttctagtcatgca

SEQ ID NO: 895886 - DNA, 674 bp, Homo sapiens
ctgtgtctatggttcatgaatctcataaggctacacagccaaggtgtccccagggagctctggggccgaatccacctgcaagctccctcctgtgctggcagaattcatttccttgtgcctgaggtccttgccttcttgctggctgtgggcaggggtcacyctctgctcctcaaagccacccacagttccttgccacatgggctcccccaacatgccaacttcatcaagccaagaaggaaatccttcagggcaagtttgctatgaagatggggtcttacataaggaaatgtaatcacagaagtgacatccttcgcctctgctctggtcttattagaagcaagtcacaagtcccctgcacaccccaagtgaaagggaccacacaagagcagatcaggagatgaggatcatgagggccaacttagagtctgcctgccagagataccttattttcaccgtagtaaaatacacatcacataaaacttacaattttacccatttttaagggaacagtttggtagaatcacacacattcctatttttgtgcaaccattaccaacacccacctccagcactgtttcatcttcccaaactgaaactgtctcccccttaaaagctcactcccaattctctccttcccctagtccctggaaaccaccattttactttctgtctct

SEQ ID NO: 895887 - DNA, 674 bp, Homo sapiens
ctgtgtctatggttcatgaatctcataaggctacacagccaaggtgtccccagggagctctggggccgaatccacctgcaagctccctcctgtgctggcagaattcatttccttgtgcctgaggtccttgccttcttgctggctgtgggcaggggtcaccctctgctcctcaaagccacccacagttccttgccacatgggctcccccaacatgccaacttcatcaagccaagaaggaaatccttcagggcaagtttgctatgaagatggggtcttacataaggaaatgtaatcacrgaagtgacatccttcgcctctgctctggtcttattagaagcaagtcacaagtcccctgcacaccccaagtgaaagggaccacacaagagcagatcaggagatgaggatcatgagggccaacttagagtctgcctgccagagataccttattttcaccgtagtaaaatacacatcacataaaacttacaattttacccatttttaagggaacagtttggtagaatcacacacattcctatttttgtgcaaccattaccaacacccacctccagcactgtttcatcttcccaaactgaaactgtctcccccttaaaagctcactcccaattctctccttcccctagtccctggaaaccaccattttactttctgtctct

SEQ ID NO: 895888 - DNA, 629 bp, Homo sapiens
tcctcatctcgtgatccacccgcctcagactcccaaagtgctgggattacaggcgtgagccaccgcgtttggcctactttacatattttagctaccagttccttgtcagatacatgattttcaaatattttctcccattctttgtgttgtcttaactttcttgatggtggctttgaagcaaaaaagtatttaacttagatgaagtcaaatttatctattttttcttttgtcgctcttgtttttgctatcatatctaagaaatcattgcctaatctaaggtcacacagatttttacctatgttttcttctaagagttttayagttttaacacttacctttacatctataattcattttgagttaatttttgtttatactgtgaggcaggagtccaatttcattgttttccatgtggatattcaggcatcccagcacatttgttgaaaagattattctttcccccattaaattatcctggcagtctttttgaaaatagattcatcataaatgtaagggtttatttcttggttctcaattctatcccattgacctatgtgtctattattatgtcattattacactgtcttgattactgtagttttgtagtaagttttgaaatcaacaaatgt

SEQ ID NO: 895889 - DNA, 661 bp, Homo sapiens
catcagatcttgtgatacttattcagtatcatgagaacaacatggaatagacttgcccccattatttaattacctcacaccaggtccctccgacaacacatgggaattgaagatgagatttgggtggggacacagccaaaccatatcattcctcccctggcccctcccaaatttcatgtccgcatattacaaaatgaatsgtgccttcccaacagtcccccaaagtcttaactcatttcagcattaactcaaaagtccatagtccaaagtctcatccaagacaaggcaagtcccttctgcctatgagcttgtaaaatcaaaagcaagttagttacttcctagatacaatgggggtataggcattgggtaaatacagccattccaaatgggagaaattggccaaaacaaagggactacaggcccaaagcaagtccaaaatccagcagggcagtaaaatcttaaagctccaaaatgattttctttgactccatgtctcacatccaggccagactgatgcaagaggtgggctcccacagccttgggcagctccaccactgtggctttgcagggtatagcccctctcctggctgctttcatgggctggcattgagtgtctatggcttttccaggcacatggtgcaagctgttggtggatctacca

SEQ ID NO: 895890 - DNA, 604 bp, Homo sapiens
ccaaatttcatgtccgcatattacaaaatgaatcgtgccttcccaacagtcccccaaagtcttaactcatttcagcattaactcaaaagtccatagtccaaagtctcatccaagacaaggcaagtcccttctgcctatgagcttgtaaaatcaaaagcaagttagttacttcctagatacaatgggggtataggcattgggtaaatacagccattccaaatgggagaaattggccaaaacaaagggactacaggcccaaagcaagtccaaaatccagcagggcagtaaaatcttaaagctccaaaatgattttctttgactccatgtctcacatccaggccagrctgatgcaagaggtgggctcccacagccttgggcagctccaccactgtggctttgcagggtatagcccctctcctggctgctttcatgggctggcattgagtgtctatggcttttccaggcacatggtgcaagctgttggtggatctaccattctgagttctggaggacaatggccttcttctcatagttccagtagcgctgccccagtagggactctgtggttgtgctccacccctacatttcccttccacactgcctt

SEQ ID NO: 895891 - DNA, 586 bp, Homo sapiens
gatattagacctgtcagatgggtagattgcaaaaattttctcccattcttttggttgcctgttcactctgatgatagtttcattttttgtgcggaagctctttagtttgattagatcccgtttgtcaattttggcttttgttgcaattgcttttggtrttgtagtcatgaattctttgctcaggcctacgtcctgaatggtactgcctaggttttcttctaagatttttatggtttttgggttttacatttaagtatttaatccatcttgagttaatttttgtataaggtgtaaggaaggggtccagtttctgttttctgtatacggctagccaggtttcccagcaccatttattaaatagggaattctttccctattgcttgtttttgtcagatttgttgaagatcagatggttgtagatgtgtggtgttatttctgaagtctctgttctgttgtgttggtctgtatatctgttttgctacctgtaccatgctgttttggttactgtagctttgtagtatagtttgaagtcaggtagcatgataccttcagctcttttatttttattttttttattttttatttt

SEQ ID NO: 895892 - DNA, 586 bp, Homo sapiens
gatattagacctgtcagatgggtagattgcaaaaattttctcccattcttttggttgcctgttcactctgatgatagtttcattttttgtgcggaagctctttagtttgattagatcccgtttgtcaattttggcttttgttgcaattgcttttggtgttgtagtcatgaattctttgctcaggccwacgtcctgaatggtactgcctaggttttcttctaagatttttatggtttttgggttttacatttaagtatttaatccatcttgagttaatttttgtataaggtgtaaggaaggggtccagtttctgttttctgtatacggctagccaggtttcccagcaccatttattaaatagggaattctttccctattgcttgtttttgtcagatttgttgaagatcagatggttgtagatgtgtggtgttatttctgaagtctctgttctgttgtgttggtctgtatatctgttttgctacctgtaccatgctgttttggttactgtagctttgtagtatagtttgaagtcaggtagcatgataccttcagctcttttatttttattttttttattttttatttt

SEQ ID NO: 895893 - DNA, 597 bp, Homo sapiens
gctaagaacacccagacgccatttctccccactttattttattttggtgggggtgagggacagtatctaaccttgcatgacctaggtttgaggtttctgctcttggatgtggccattgaaggggagaagggttcacatccaaccagtggctttctccagcacaggggtgacaggagggtgggatcataaggagtcccgcatagaggggaattctgagatcattaatggaatgatgccattaaagactcatgagcagataactaggatgaatggaatccatatttgcaaagatcagcagcagctatgcactaaggctgagggcaggagatataggcaggaaccccaggggtaaggggatcagttggaggcaagttccgggacgaactattaggagkgcagagtaacacacaggtgccagagatattctgaaggaaggcataaaagttagttggagatgagggatagaaaagggcctctttgaggccactcaccctggagttcctgcagttgcttctggactccttccacactgaggttcctaggctccaatgaggacagggagggatccaccacccacccacaccagcaacccttgta

SEQ ID NO: 895894 - DNA, 538 bp, Homo sapiens
ttaaatttgtttctacatattttacttgttttgatgctactgtaaatggacttgttttcttaatttcatttttttgtattgtccattgcaactacatagaagtacaagtgatttttgtgcattatatcttgcaaccwcgctcaattggtttattagtagtttcttgtggtggattctttcagattttacatatggaaggcaatgtcatttgagccatttacatgaccatataaaaattatctacaatatatcagtataaaagtatgatacctttttgatgggcccactttttttggaagcaaaacatccagattactgggggaacccacccccaatatttcaatgtaggttctttctattttccataagcgttggccagctgagaaataaagagagacagtataaagagaggaattttacagctgggccaccgggggtgacatcacatatcagtaggaccatgatgcccgcctgagtctcagaccagcaagtttttattaagggtttcaaaaggggacggggtgtaagaacagggagt

SEQ ID NO: 895895 - DNA, 538 bp, Homo sapiens
ttaaatttgtttctacatattttacttgttttgatgctactgtaaatggacttgttttcttaatttcatttttttgtattgtccattgcaactacatagaagtacaagtgatttttgtgcattatatcttgcaaccaygctcaattggtttattagtagtttcttgtggtggattctttcagattttacatatggaaggcaatgtcatttgagccatttacatgaccatataaaaattatctacaatatatcagtataaaagtatgatacctttttgatgggcccactttttttggaagcaaaacatccagattactgggggaacccacccccaatatttcaatgtaggttctttctattttccataagcgttggccagctgagaaataaagagagacagtataaagagaggaattttacagctgggccaccgggggtgacatcacatatcagtaggaccatgatgcccgcctgagtctcagaccagcaagtttttattaagggtttcaaaaggggacggggtgtaagaacagggagt

SEQ ID NO: 895896 - DNA, 629 bp, Homo sapiens
aaatgttatagcttgtgtagcttgcatctattacatgaaaaaattgaggttggagtctatttccttctggtatcagatgttatgctgttgccataatttaggaccacagtggtaaattagacttgtaccaatcaggtaatgccctcttctcttattgtcctattgkgttttttatatttattgtgtgttttatatttatttatatacaaacaaaaataatgtatacatacaaatataatgtatatacacaaatatttatattcatttctgatagccaggtgttagtttttccctcctgtgtagtggttgtgtgaccttgggcaagtcactgcatatctatgtgccacattatctccagctttattaggatggactccaacattaggatcactttaagccattcacattttgtaatttaaaatttccacttgcctgacatttagccttctgtcgctgtgcgtccttcctgtcgggggttgattggggtcaagtgggatggtggagggtgttctctttgaaagatgcctgcagtagcattgctaagtaatgggacataccccttcatttttcatcttaatagaatccacattgccataaggaattctcttaatgcagaacgcatacatacc

SEQ ID NO: 895897 - DNA, 629 bp, Homo sapiens
aaatgttatagcttgtgtagcttgcatctattacatgaaaaaattgaggttggagtctatttccttctggtatcagatgttatgctgttgccataatttaggaccacagtggtaaattagacttgtaccaatcaggtaatgccctcttctcttattgtcctattgggttttttatatttattgtgtgttttatatttatttatatacaaacaaaaataatgtatacatacaaatataatgtatatacacaaatatttatattcatttctgatagccaggtgttagtttttccctcctgtgtagtggttgtgtgaccttgggcaagtcactgcatatctatgtgccacattatctccagctttattaggatggactccaacattaggatcactttaagccattcacattttgtaatttaaaatttccacttgcctgacatttagccttctgtcgctgtgcgtccttcctgtckggggttgattggggtcaagtgggatggtggagggtgttctctttgaaagatgcctgcagtagcattgctaagtaatgggacataccccttcatttttcatcttaatagaatccacattgccataaggaattctcttaatgcagaacgcatacatacc

SEQ ID NO: 895898 - DNA, 586 bp, Homo sapiens
cccactgcctaccatcatttgacccctgagcctaccctccctaggttactcataatgattttgccctctagtggacattcggcaatatctggagagatttttcgttgtcacaatttgggtggggtgggaaatgtacactactactgggcatccagttagttgaggctaggrattttgctaaacaacctacaatgcacaggatggcccccagaaataaaaaagcatatggccccaaatgtcaagcatgccaatattgggaaaccctgccctagaaggatatagacaagcccgagaacatttttgacgagtacaaactctttaataactagttagggaactggccccaagtcctgaatgactgtcatagattcaacaggaaacaaactaatgtcacatctagctgctgcagagatgtcccagggccatgacagcttcttagtcactaggtccacatgccccaggtgatgtccaaggctcctccatttgtgtctcaatctggttcaggtctaactcctctccatccttccacctgttagctaaaacatacatgtacccccgatcaacacagcttacagtcatcaaaggg

SEQ ID NO: 895899 - DNA, 548 bp, Homo sapiens
agggacttactctcaaatttgtcacttaatcagaagaactgaaatcataacgaacactatcccagaccacagcacaatcaaattaaaacccaacaataaaaaactcactcaaaatcacaaaactacatgaaaattgaacaacttcctcctgaatgactccttagcacatactgaaattaaggcagaaattaagaagttcttygagactaatgagaacaaagagacaacgtaccagaatctctgacatacaactaaaggagtgttgagaaggaaatttattgcactaaatgcccacatcaaaaagctagaaagacctcaaattaaaaacctaacatcacaactaaaagaactagagatccaagcacaagcaaaccccaaagctagcagaagacacgaaataacaaagatcagaatggaactaaaggagatagagatatgaaaaaactcttcaaaaaaatcaacaaatccaggagtgaaaaaaataaataaaataggtcactagatagactaataaagaagaaaagagggaagaatcaaatagatcgaca

SEQ ID NO: 895900 - DNA, 650 bp, Homo sapiens
atgtgagacttggctttgttccttccttcttcacctcctgccgtgattgtgagttctccccagccatgtggaactgtcagtccattaaaccttttttttctgtataaattacccagtctcaggtatgtcttcaaagtagtatgaaaatagactaatacaccatattataccatctgaaagtaaaaatagttttatgtcttcttttcatatctgtatgttttcattaatttttcctgtctaattaccttggatagaaactcagtgtaatgttgaatagatatagtgagagtaaacacctttttttgtgatcttagtaaaaaaaaatcaatctttccccattacttataatgttagctgttggttttttatgcatctactttatcaaatcaagcaaggatctttctattcatagtctattgagtgtcttttatgtttactttgtatttttaaaaataatgtataacatttatagcattctttgaatattataactttgatttttattatacctaataaaggctaaatgatatctgcagtgttttgatatctattaggtttacatgtttaytctcagcgaatttttgatgcatagtgtaacaatgtactgtagttcccacatatccatggggatatgttccaaaatctccagt

SEQ ID NO: 895901 - DNA, 653 bp, Homo sapiens
atctcctgacctcgtgatccacccaccttggcctcccaaagtgctgggattacaggcatgagccactgcacccggccagtcatacaggggacatttaaagccgtgagactggatgaggtcactgtgggcatgggagtagatagagacgggaagagatccaagacctgattgaagccttttatacttagaagcagggaaatataaatgtaaatataggaatcagtaaaagaaacagaggaatggccagagaggttggaggaatactggagtgaggtatgctgaaagccaagagaaaaaaagaattgtcgagtagtgagagtgattaagtctgccaaatgctatttcatagaattgataatgaagtgaggaccaagaattgatcattggctttaacaccgtggaggagcactttcagtggactgaagtggggcaaaggaaatggaggraaaggaggaatgatagtgaatataggcatttcaaggatttttgctttaagagaagaagagaaatgaatcagtagccagaaggggaatcaggatcaagagaacatttgctttttcagttgaaagtgctaatagcatactgatgagatactgtatgctgatgagaaagatccaataaagaaggtaaaatgcaagatggaagcaaaacag

SEQ ID NO: 895902 - DNA, 643 bp, Homo sapiens
ggggaggagctagcagagatgtcagctgaggagtggccaatggggcagatggaaaatcaggcaactgctgagcctcagaagccaagaaaaggcttccaggaggaggtggggtgatcgatcatgtcaaggtcttaggaaagatagggttgccattcaaactgggatgcttttgagagttgctagagataattaaaataatacattttctgaaatattatgtattgcctgacaaattagattgttggccaggcacgatggctcacgcctgtaatcctagcactttgggaggctgaggcaggmggatcacaaggtcaggagttcgagaccagcctggccaatatggtgaaacctcatctctataaaaaatccaaaaattagacagacatggtggtgggcgcctgtaatcccagctactcaggaggctgaggcaggagaatcgcttgaacccgagaggcggaggttgctgtgaaccaagatcgtgccactgcactccagcctgggtgacagagcgagactctatttcaaaaaaacaaacaaacaacaaaaaaattagtttgttatagtgatggacctataaatgccagcatttttctaaaaactttttttcttaagtttggtcttactattcttacttctttgataa

SEQ ID NO: 895903 - DNA, 606 bp, Homo sapiens
atccaatactttttatgactatataagtatatttacagctgaaccatacagtattctatgattacttttcctttcttatatttttttcctgaattcatgattgtcttgttttttatttgctttgttttcaattacatattgctaatttagtctcacatttaccactgattgtctaaatggcctctcaatatatttataygcaacagaattctaacacttttacgttattggtgataattctcctagagaactttaatatgccccaatatgaactggtaatcctctacatcctgggatctgccttcatgaatcccttctaaggattctcttcatttctccttcaagttgaattccctacttctttttcttctgccttctttcttttggtttatgtcattgtttagtggtgaaaacgccttagtagctttctcagaaaaggtgtgttaaaagtttttggttttggttttgtttaaaatctaatgtcacatttcagctggttttagaatttaaattctaaaattgaaatgccttcagaattttgaaggcattcttctattatcatctaactagcaatattgctgctgggagggcaaaaatcattctgcc

SEQ ID NO: 895904 - DNA, 583 bp, Homo sapiens
aaatttaggtagacaaatgcaactctattttttttaaaggtggaagaaattgcattctgcaatgagtcactgagtttgatgttacctacaaaaaatatggcagcgtatatagataaaataatggtttgtaagtatttaatacaataaaaactctgtattagaagtcaattatgccattaaaacaacatccacatatatctggataccagtagaaaaccatcagagagaaggtaaggtggaccgatttactctctaggtctgatctctaagggaggtgttgcayattctgttcagaaaagaatctggagaattcaagtgtattctgaactggcataaataccagaaattttcacaatgataataaattaaggagtccagtccctcgataaaaacctgtgtgtgatttttcagatttgatcacagacaatttcaaaggctttacctggcaggcctcacgggggaaagctgccctccctacgccagacttgctaaacagccagtgcatgggcatctctaaaagaacttaagacaaggactcagagcttttcctcaggcacctctattgagtccttattatgagatg

SEQ ID NO: 895905 - DNA, 610 bp, Homo sapiens
acaactggagtaaccatacctgatattaaaagagcctgtaaaggcaatatacttaaaatattttagattgttattaataaacagaatgatgtaacagaaggaaaatttaagaaatcccctcccaactcccacccttcctagtctgtaatttctattatttcacactctatgtctatatgtacacatagtttttctcctacttataagtgaaaatatacagtacttgtctttctgtgtgtgacttggtgcacttaaattaatggctttcagttccatccatgttactgcaagagacatgactgcattcttttttatggctaagtaatattctgttatgcatatacaccacattttctctatccagtctttcattgatggacacttcggttgattccatatctttactaytgtgaatagtgaaaaacacacaggtgtaggtatcttgttgataaatgatttcttttcctttgagtagatacccagttgttggactgatggatcaaatggtagttctatttttagttctctgagaatctccatatttcttacagatttggaggctgtgatgtctaagatcaaggtgtggtaggtttcgtctcttgtgagggct

SEQ ID NO: 895906 - DNA, 639 bp, Homo sapiens
taatcctccatgtatgcctgtgcttcaggctttggctctatggctgctccatgggtatgactcataggatagtggcgtaaatcattagacacaagtgtcactgccactgtaagcatgctcataagccagaggcggtagtaagggagatacccttagccacagcttcccatgtggagaaaaagaattcaggaggatcatagcagacatcaccactaaagacttcaacagctctcacagcttctgaggacattcacagcattgggaactgaggatttctgcaatcaaaattgaactcagcaggaagagctccacagagaatacatggctgcacctttacaagtgagagacccacttccccactgagccagcaccctcatacagttccatagaggaaggctttttacctactgaagccaccctataaagtctagaggaggtgatattacaccaaatgcacagacatcctrtaaggcaacaagaagcaagaaaaactaaggacaaatatcaccaccaaaagaatataatcatttcccagtagttggccacaaagagatctataaaatgcctgtcaaattattcaaaataattgttttaaggaagtttagttaactttaagcaacacagagaaatgattcaata

SEQ ID NO: 895907 - DNA, 626 bp, Homo sapiens
aaataaaatttaaataaaaaatacaaaatgtgaaaaagttaaaagttgtgttttgacaagatatacataatccgcacattattagcctgactaacttagaaaaaaagagagaagtcagaaataaaataaaatcagtgatcaaaggaagacattacaactgataccacagaaattcaaaggatcagcagagactaataggagcaactatatgccaataaattgaaaatcctagaagaaatagataaactcctagacacacacaatctgccaagatttaatcatgaagagatccaaaacctgaatagactagtggcaagtaatgagattgaaggcataayataaaatttctcagcaaagaaaagcatggaaacgaatggactcactgctgaattctaccaaacatttaaagaaataataccaatacttctcaaatcattccaaaaaaaaaaaaaaaaaacagaggaggagggaatacttacaaatgtattctatgaagccagtcagtattaccttgataccaaaatgagaccaagacacatcaaataaagaaaactataggccaatatatctgtgaacaatgatgcatatatagtttttttaattttactttaagttctgggatacat

SEQ ID NO: 895908 - DNA, 676 bp, Homo sapiens
taacaccacacatctacaatcatctgatcattgacaaacctgatgcaaacaagcaatggggaaaagattccctatttaataaatggtgttgggaaaactgcctagccacatgcagaaaactgaaactggactccttccttacaccttatacaaaaatcaactcaagatggatcaaagacttaaatgtaagacctaggaccataaaagtcctagaagcaaacatgggcaataccattcaggacatagacatgggcaaagacttcatgtctaaaacaccaaaagcaattgcaacaaaagccaaaatagacaaatggaatctaattaaactaaagagcttctgcacagcaaaagaagctatcatcagagtgaacaggcaacctacggaatgggagaaaatttttgcaatctatccatctgacaaagggctaatatccagaatctacaaataacttaaacaaatttacaagaaaaaaaaamcgcatcaaaaagttggcaaaggatatgaacagacacttctcaaaagaagacacttatgcagccaacagacatatgaagaaatgttcatcgtcactggtcattagagaaatgcaaatcaaaaccacaatgagataccatctcacaccagttagaatggtgatcattaaaaagtcaggaaacaacagatgctggagaggat

SEQ ID NO: 895909 - DNA, 632 bp, Homo sapiens
tggttattttacagtggcggtcacatgtctggtgcagggtactgttatacattgtaaatattttaaacaatagattcttacattttagaatatctcgtatgaaagtgtgagtgtaccagtcaataactgatgttttacattcttgttaaatatgtaaggggaaagaacagattgggtgaaaggcaacttattgaakctatttccagaagtataaataaatgcatactttaaagatgtacctgaagtaaattattgaaaatgagcacacttttttggtttttgttattttattttctttgaaagatgtagtaagtacagtgtagtgattgaaaactactggactctggagcctggatttcaaattctggttccaccacttactagtcaggtgaacttcagtaagttgctttaacttcttggtccctcagtttccttacccacggaagtaggaggtaataattatgtgtacctggctcatctagctgttatgatataactaaataagttagtatacctaaagcatttaaaacactacttagcacataataattagaagcattgatgataatggtggttattatgtcagtgttagttaaaatttaacgtttgtcctctgtgtaaaccaagtgcca

SEQ ID NO: 895910 - DNA, 630 bp, Homo sapiens
tttttaattcatgacaaattacatctaaattttcttgctcatgttcatttatgggacatttttatcttgtcatcttttttcatgtaccgtgcaagcaagaagaaaatatccagcacaacatacccttcagaaacaagctaatagcacaatttggtgtcaatttcacagctcagtgaagtgaaagtgatctagctggccatccacatacacctagaaggaggtctactgcaagtgcccagccttcatgttgcttgtgtcatgcctacaagcaagataagttcaagtagaaacattatgtattcagaaagaaagcagttatcattcaaatgcccttagagccagctagaacagaatgtggagagataaagcagagccagactttcatttttatattgtggagagttgtttttcagaagtcatgcttatattcacmaatggtagggaacagtagcttccctttgggattctgataatgtttagaagcagaaattttatttaacggatgcatgaaaattgaataactatcttaacagtttctcatgctttataatggaggcaaaatcatagactttcaactaatataaaaccaaaatgccgcaggaagagtatgcagctcctattattaacaat

SEQ ID NO: 895911 - DNA, 638 bp, Homo sapiens
gtaaggagcagtttggaagttagtggtttagagcaggagtcagccaaatcatactcacccctatttttgtaaataaagttttattagaacacagctgtagctatttatttattatctatggctgttttcatactacaatggcaaagttggttagttgtgtccactgggcctgaaaaacctaaagtatttatcatctggccctttacagaagaagtttgccaacaccaggttcagaagtacagctacaaaactggaaatgtgagaactggagtctatacctggctctatcactgttaggagaaacaaaaataggatatgtatgaattactaactgaagtgtaaagtgattcacaaatayagggtggcatatgattagtaattaatctgtgaccttaagcgatttatttaacctttttgagccacgtaccacaatctaatgtgtggaatgttaatatttatcctaagcaatcatatgaaaacatgagaaaatgtatgttttgaaacattaaaagggctatgagatagggaagtttcatttcactctccattaaaaaggatcctgaatcagaaattctctctctctctcagtattccatattccatgtgattaaaaacaaaatatacaggactacaaacat

SEQ ID NO: 895912 - DNA, 623 bp, Homo sapiens
aaactggaaagagcaccactctaccgtacaagaagaaaaaaagctggacaaagtacaaatcaatgacttttcttaaatccatcagagaagtgaagtcacagggtagataactaacctaaaatatatagagaagcaagcaactacagacagaatgagcatttgcttacctgagataggtgctgctaaatatcataaaagccactaggaagattaaacaaaacagttttaccaaatgccaaaggcttaacatagtctagcatgagagcatgaagcctatggagaacacagacacagagaggttattgctctcatgtaggttttttgggttttttycccctaggaactctaccaggctctcacaggaaacattgattagaaaggaatggggcttgaaaaaagggatggagacatatgggcatattctgatgaagatgaggaccttgagcccccaagggttggtctctacttgcctaagaatctgtaacagcctttcctgaaggaactgccctgaaggagatctaatcttctttagacttacctctcattccctcatcatctctcattgcttctagaccagggtttctcaacaatgtcactactgacatttgggaataaataattgt

SEQ ID NO: 895913 - DNA, 582 bp, Homo sapiens
tagatgtttagctccttcccatgactttgaatgtggaggaagtggatacaggggcaattggaaatttctctctagccatagtttcaccatccttcacaggctatagcatggtttagtattaatagttggagaacttcagtgtgcaactgaaactccttggcatgatgtacgtatgtgggtgtgggggggcgggggagtgtttttgttaaaatacagcttcctctgccctacattgacctgctaaatcaggatccttgggagagggacataaaaatctttatttttcacagactcctaagggccttgatgatgctgatacccamtaaagtttgaaaatcacagctctaggagatctgtagataatatgtataatatgttattcgggccatactcattctttctttctttccccatagctgtccagtatctctcattatttggttctacagaagactagatctattttctcttcagagtcttttgctttattttgaatattctttatataaccaccacccaacatacattaaatacccagcccccacacacacatcctgctctgacatgttgagagataaacag

SEQ ID NO: 895914 - DNA, 699 bp, Homo sapiens
acagagcctaggtcattctccgtctacgtccatcagagcaggtgttagtacacactgctgggagattcgaagaaaggtcacatcactgaatcctttgcagacattctccagaaccatccaagaatctggaagccctacaggctggatagwcccagaagagcaatagcaatcactgaagtctgaatctcaggagtcctatttctaggggaaggaggagaacaccatatcaagggaacaccccatgggacaaaataatttgaacagcaggtcttgagtcccagatccttctgctggtggaaagttactcatagcagaaacacaattgcactgatgggtgcagtagggaaagtctgcacctttaccccaacaggcaggcagcctgtatgatgatgaagcgtcttggagaaggcatccttattccccactggtgtatcccctggtagaccactgcagacacagctggggcttctcccacaggaacacagcatggctgcatgtatagacagcattcctggaacaattcagggtgattgcagccccacaggaggagcactctccagactcaggccttcatgagaggcaaagtcacaatttctccctacttggaacatcaatattgctctagatgaaaagaggtgcctgtctgatgtaaatagccagaacactgggacagtggtcagactgtgaggtggacatatt

SEQ ID NO: 895915 - DNA, 593 bp, Homo sapiens
agataaagaattcagatggttgcttattaaggttgctactcaaggagatactggagaaacgtaaaagtgaatttataaaaaaattttaaaaattagaatatgaataaaatttccagaaatatagatatcataaagaaaaamcaatcagagcttctggaaatgaaagacacacgtaggaacatacaaaattcagtggaaagtttcaacaatagtcaagaacaagtagaagaaagaatctgagatctcaaaagtaaggctttcaaattgacaaaatcagataaagacaaagaaaaaagattttaaaatgaataaagtctccaagaaatatgggattatataaaatgtccaaacctaaaaataattgttgctcctgaggaagaaaatctatgtaaaagtttggaaaatttttttgagagaataattgaggaaaactgtggccttgctaaagatctatacaatgaaatataagaaggttaaagtactcctgggaaattcatcacaaaaagatcatcacaaaggcatacagtcttcaggctatctaaaatcaagatgaaggaaataattttaagtgttgtgagacaaaatcatcaggt

SEQ ID NO: 895916 - DNA, 631 bp, Homo sapiens
taaatacccctcaagtggaaattctctagagcaaagtcccaaaagttgttattgcaaggtgctcacaggcatttgccataagcccctgtaaatgcttcacaaagcctgttagatggacaattcatcccaactcgtactccagtttctgcactacagtctgtgggcttgggcaatcttacttgttctcatttagcatgtccaattaatattgctcaagggcagattttcaagccttctgttttatagtrgtaggtagagagaacatcctttagttatatataatattcattttcagaaagcatttaggtaatggagacacaactattttatattagtctgtttaaacatttcaaatttcataagtatatcaacccttacatttttatgttctggtcccagtaacttccatttccactcgcagaccattttaccctttcttgtgtaaaagaatttgagttcccaggagggggttgggtcaaaggatttggatccttttgtcaatcttatcttgaggcaattgttagtgttctcattataacctttttcttctaattttattttttctccaatctgcagtaaataaaaaaaaaaattggtttggttgagatcctttaatgttagcagaccagca

SEQ ID NO: 895917 - DNA, 578 bp, Homo sapiens
catgcaaggctttattagccatcttctatattttatgtggtttatgtgtcaacaacgttcagtgagctgagaattaaaaatttgactgagaataaactttactgattgaagagctgtcatccacaaattttatcattttagaaactgcttaataatttgctgactcagttyactcatctttaaaaagagaataaatgatatttctgtatctgaaagattttctctggaaaaatgactaataaaattaatcattgcaggcagtatgtgatattataaatgctttgtggactaaagcaaaatgggtttgtgattttaatcattctgcaaatggacataaataaaaagaaatacattctttttttttaataaatggactgattttgagcagctcagccttttcttttctctttgaagatttctcttcacatttctgttcctacaaagctagattttctactttgtgaatgaagaatttctctatgtatcatagcttaggagtagtttttccttgtctgatcttctaatggctcagctttgatgaaagcatcttgaagcaccatgtgttcacttttctacca

SEQ ID NO: 895918 - DNA, 592 bp, Homo sapiens
aaaatgttaaagtttttgctgagcctgaggtgtaaagcaacatcttctgggcagatttgggaatttcactgggggtgacaacaggcactcccaggaaaaatatgcagtgggctgactggtccattgggagaaatgatcatgttgtatcactcagttgcccaatcaccytcaaggattggggccacaggtgcatccctggcatggatgacctggcggtgcccacccttagcactgtgtcatttgtaccattaaagttgtaccctctctgttgggctcatttgaggctctcttaagatctggtgattaatataaaggtgaagatccaaagagctgacttttgcttttatctgcactgccctccccccaaagaaacaagatttgccttaagtagcccccaagttcatggtttcagccacataaaaggctccagacccatttatgtgtctcagttgtgattgatgaatagccgtccatcctcctgtgactggagttgctgcttgttgtcgtactacataaagcaattgtataaattacctctcatccaagtcacaaaatatgtttgccaaaatgatttcttctaaaattgtaaaag

SEQ ID NO: 895919 - DNA, 592 bp, Homo sapiens
aaaatgttaaagtttttgctgagcctgaggtgtaaagcaacatcttctgggcagatttgggaatttcactgggggtgacaacaggcactcccaggaaaaatatgcagtgggctgactggtccattgggagaaatgatcatgttgtatcactcagttgcccaatcaccctcaaggattggggccacaggtgcatccctggcatggatgacctggcggtgcccaccyttagcactgtgtcatttgtaccattaaagttgtaccctctctgttgggctcatttgaggctctcttaagatctggtgattaatataaaggtgaagatccaaagagctgacttttgcttttatctgcactgccctccccccaaagaaacaagatttgccttaagtagcccccaagttcatggtttcagccacataaaaggctccagacccatttatgtgtctcagttgtgattgatgaatagccgtccatcctcctgtgactggagttgctgcttgttgtcgtactacataaagcaattgtataaattacctctcatccaagtcacaaaatatgtttgccaaaatgatttcttctaaaattgtaaaag

SEQ ID NO: 895920 - DNA, 613 bp, Homo sapiens
aaaaatgttaaagtttttgctgagcctgaggtgtaaagcaacatcttctgggcagatttgggaatttcactgggggtgacaacaggcactcccaggaaaaatatgcagtgggctgactggtccattgggagaaatgatcatgttgtatcactcagttgcccaatcaccctcaaggattggggccacaggtgcatccctggcatggatgacctggcggtgcccacccttagcactgtgtcatttgtaccattaaagttgtaccctctctgttgggctcatttgaggctctcttaagatctggtgattaatataaaggtgaagatccaaagagctgacttttgcttttatctgcactgccctccccccaaagaaacaagatttgcyttaagtagcccccaagttcatggtttcagccacataaaaggctccagacccatttatgtgtctcagttgtgattgatgaatagccgtccatcctcctgtgactggagttgctgcttgttgtcgtactacataaagcaattgtataaattacctctcatccaagtcacaaaatatgtttgccaaaatgatttcttctaaaattgtaaaagtgaaaatagagtacacagag

SEQ ID NO: 895921 - DNA, 579 bp, Homo sapiens
aaatgtgatctccagtgttagaggtggggcctaatgggaggtgtttgggtcatggaggctgttccctcatgagtagattcatgtcctctctggcaggtggctggggtgagtgagttctcactctattgattcccacaaaagctggttgtgataaacagcttggcacctctcttctccctctctcttgcttcctctcttaccatgtgatctctgtacacactgactcccccttgccttccaccataagtggaagtagcctggagccctcaccagaagcagacattggtgcaatgcttcttgtacagcctacagaactgtgggtcaaataaacctcttttcattataaatcaccsagcttcaggtattcctttacagcaacacaaatggaataggacaagacgaatagttagagcagtggtgtccaatcttttggcttccttgggccacagtggaagaagaagaattgtcttgggccacacataaaatacattaacactaatgatagctgatgagctacaaaaagcaattgcaaaaaaatctcttaatgttttaaggaagcttacaaatttgtgttgggcc

SEQ ID NO: 895922 - DNA, 601 bp, Homo sapiens
actatgtaccttaattcttggttggaaataagttatcttgggcttcaaggtccttgctaagcctcaatgtgctttaatcccatgtattcaggccatctgggagagggaatattttaccagtggccttttaaagatatcgtgcaggtagtgagagctccccaaacctttttattgatctccttggattattttctatatcacactgccaggccaactcttctatcctcttctgaaatgttcaatcttttccttaatcaaatagattatrttacctccatctttcattcaattcactctttggatatatatttattgagggcctactatgtgtcaggcattatgctaagtactattgatataataattaaataaaaatgacaaactggttgggcacagaggctcatgcatgtaatcccagcactttgggaggctgagacaggaagactacctgagtccagaagttctgacactgtctcttcaaaacaaaacaaaacaaaacaaaactattccatgactttatggaatttttgttctaggaatgtaatcaagagaaaccaataatctcataaatgaaacaattacaaaatgagagaagcatatg

SEQ ID NO: 895923 - DNA, 643 bp, Homo sapiens
cactgggatcctttttatattagagtccctgatgtaaaatctatactaaagccaagattcttcctgtgcagcatatgcttctgttcaacatatgctgacttcagatatgtgtgtttccatttatccagtctttgggaggcagygctggggctggatgtgtacaggattcatgaatgcagccagggatgagagaacagaaaacagaccaatgaataggagaactaggtttgaatcctggttctgctatgatcttgagcaagccattctacttataagcctcaggtttgtcatatcgaaaatgggaatgattcatgatgcctacctttcagaattctggtaagaatcaaaagacataaatcaggtgacagttcttggcattccaaatgagttttcttcccagtttaatgtactgataactgatattaaaacaggcttgctgattttcctggagtttgacatacagtaggtacagggacactaaatcaccacagaagcaggcagggtaaggattttctggtggacactcagacacttcagacaactgagaacagtgactgctttccatattgctttctacacagtcgccagcctgttatggcctgaagctatttgtgactcagtgctgtgcttcagcctgttattt

SEQ ID NO: 895924 - DNA, 602 bp, Homo sapiens
gaactgatagactgaatagagatcactttcaccaatacagtgggctcatccaatccattgaaagcctgactggaacaaaaaggcaaagtaagtgtgaatttacttcctgtttgatctgggacatccatcttctcctgccctcagacatcagtgctcctagttctcaggccttcagactcagactgacttgcatcactgactttcctggttctccagcttgcagrtggtagattatgagacttccagtctccacaattgagtgagccaatttctactctcactctctctctaggtggttttttcctctggagaatcctgactaattaatacatggtaaaatatatgtaacataaaatttaccattggtgaattttagtaaattcacaatgttatgtcatcatcaccaccatctagttccagaacattttcattgccctaaaaggaaaatcgattcccattaagcaatcactccccattccccattctacccagaacctgacattcactaatctttctgcctccatggatttgcctattctaaacatttcatataaatggaactacatgatatgtagccttttgtgactggttcctttcattta

SEQ ID NO: 895925 - DNA, 602 bp, Homo sapiens
gaactgatagactgaatagagatcactttcaccaatacagtgggctcatccaatccattgaaagcctgactggaacaaaaaggcaaagtaagtgtgaatttacttcctgtttgatctgggacatccatcttctcctgccctcagacatcagtgctcctagttctcaggccttcagactcagactgacttgcatcactgactttcctggttctccagcttgcaggtggtagattatgagacttccagtctccacaattgagtgagccaatttctactctcactctctctctaggtggttttttcctctggagaatcctgactaattaatacatggtaaaatayatgtaacataaaatttaccattggtgaattttagtaaattcacaatgttatgtcatcatcaccaccatctagttccagaacattttcattgccctaaaaggaaaatcgattcccattaagcaatcactccccattccccattctacccagaacctgacattcactaatctttctgcctccatggatttgcctattctaaacatttcatataaatggaactacatgatatgtagccttttgtgactggttcctttcattta

SEQ ID NO: 895926 - DNA, 633 bp, Homo sapiens
actagacccagaactaaggcttggagatgtattttgcaaggagtgagggaggagcagctgtcttcctggggaagtagagccagtccctgctgccctcccaaggaggaagccctagtatcaccctgctgggtgggcttcccctaggagaaagctgctactcagattttggtcggctcagttcccccaaccccagccatccaagaatatggtgttactgaacctmtcagtgcatgggttggtgggaccctttattgcggaaaagggaaactgaagcccagtgaagagcaagctttgtacaagatcgtagagcctggtagggctggcttgccagggtgggaactggagtgtggattaggtccctgcccttggtgggagctcatactgacaggaggtgagacttgccagtgcctttagaggccactgtccaccccagaccctccactgggagaagcagaggccaggataggctgacttgtatgggtaggggattatttcagtctctaagtcctggccagtgtggacctaggtccctctgagagacactcctatccatggggaggtagcgtgtgacctcaggcagcctaccataatcctggggcttctctggaggaccccacacagatctatcatagg

SEQ ID NO: 895927 - DNA, 617 bp, Homo sapiens
tggagaaaaattaaactctaaaatacaggtacacatgataaatttctatatatcaatattgataaaacacatatgaggaataattttcttaaaatgtaaagacagttatcaaatcattttaaaaatttatagagttaaaaaatatacataaaggtttcatgaaaagaggaaatataaatgccacttaaacaaatacaatttytcagttgtgtaccaagaatcataaaaattaaaaccccaataacatattgttttaaactagtcagattgggaggccaaaaaaaaaaaaaagaaacaaaaactaaaaagcaaacaccacgggcatctcaccaggttgactctgggttggtaaacagttactcttgtaaattacagaggagaatgtagttttatgaccagtttgaatgacaatttggcaatacgttcaaaattactggtaagtgtctaacctttgactcagcaattctgattctaggaatgtattccgcaaacattctaatacttgtgtcaaatatatgatctgtgatgttcattgcagcacagtttataacagcaaaaattggaaaaaaaaatgaatgtctgtacatggtggggagactggttacataaattacaat

SEQ ID NO: 895928 - DNA, 609 bp, Homo sapiens
atacagtctaagctaattccaattggctattttaaagagagtgggggtaagagccagagtggtggggtgagtgttttcagcgggaaggatggttacagagcaggtgactaaggatgactagggacagagcaggtgatagaggataggaggggattgtttactgaaactaggggcaaggagacataaagaatgaggaagttaaactttaaaatasagaacaaagaacaggggagctgaacatactgatacattggttttttggagaggatctcagaactcattgtacttaacaattttctccctcttgaattttaaaggaagttaacaggctaaaacctttgaggaggaatttattatatcctgcaccagctttccagactggaccaatatatatcttaaatatatttgactgatgtctcatgtctccctaaaatatataaaaccaagcttcaccctgaccaccttgggcataagttctcaggatctcctgatggctatgtcatggaccatggtcactcatatttggcccagaataaatttcttcaaatattttacagagtttgactatttttgaggcctctgcagtattttctacagttcaatgcttta

SEQ ID NO: 895929 - DNA, 609 bp, Homo sapiens
atacagtctaagctaattccaattggctattttaaagagagtgggggtaagagccagagtggtggggtgagtgttttcagcgggaaggatggttacagagcaggtgactaaggatgactagggacagagcaggtgatagaggataggaggggattgtttactgaaactaggggcaaggagacataaagaatgaggaagttaaactttaaaatagagaacaaagaacaggggagctgamcatactgatacattggttttttggagaggatctcagaactcattgtacttaacaattttctccctcttgaattttaaaggaagttaacaggctaaaacctttgaggaggaatttattatatcctgcaccagctttccagactggaccaatatatatcttaaatatatttgactgatgtctcatgtctccctaaaatatataaaaccaagcttcaccctgaccaccttgggcataagttctcaggatctcctgatggctatgtcatggaccatggtcactcatatttggcccagaataaatttcttcaaatattttacagagtttgactatttttgaggcctctgcagtattttctacagttcaatgcttta

SEQ ID NO: 895930 - DNA, 656 bp, Homo sapiens
atgttgctataataagtacctgaaactgtggaagtagctttggaacttagtaatgaagagaggctgtaggagtttggaggtgcatgctagaaaaagcctagattgctgtgagtggagtgttaaggctaaatctggagagggctcagaagaagacagctgtagagggagcctaaattttcttagagattatgtaagtggtcctgatcagaaatatggacagcaagagccattccaatgaagtcttagacaggaatgaggagcattttattggaaactggaggaaaggccattcttattccaaagggtcaaakaacttggctgaattgtgtctatatcctagtactttgtagaaggcagaacttaagtgtgatgaactaggatatttggtaaaataaatctctaagcaaagtaatcaaggtactagatggcttctcttgactgcttatgctaaaatgtgagaagggagaaataatttaaagacagaatttaatatcaaaagggaagcagaacttagagttgaaaaattctcagccattaaaaaatgagaaaacatgttcaggagagaacaccagggatgtggccaagtaaccccttaatgaggaggttagtatggatagtaggaaggcagaagttatccatcaagacaatggaggaat

SEQ ID NO: 895931 - DNA, 656 bp, Homo sapiens
atgttgctataataagtacctgaaactgtggaagtagctttggaacttagtaatgaagagaggctgtaggagtttggaggtgcatgctagaaaaagcctagattgctgtgagtggagtgttaaggctaaatctggagagggctcagaagaagacagctgtagagggagcctaaattttcttagagattatgtaagtggtcctgatcagaaatatggacagcaagagccattccaatgaagtcttagacaggaatgaggagcattttattggaaactggaggaaaggccattcttattccaaagggtcaaagaacttggctgaattgtgtctatatcctagtactttgtagaaggcagaacttaagtgtgatgaactaggatatttggtaaaataaatctctaagcaaagtawtcaaggtactagatggcttctcttgactgcttatgctaaaatgtgagaagggagaaataatttaaagacagaatttaatatcaaaagggaagcagaacttagagttgaaaaattctcagccattaaaaaatgagaaaacatgttcaggagagaacaccagggatgtggccaagtaaccccttaatgaggaggttagtatggatagtaggaaggcagaagttatccatcaagacaatggaggaat

SEQ ID NO: 895932 - DNA, 616 bp, Homo sapiens
tcagactggctttgcagagtcgagagagaaaatataatctcaagaatcacctcctccttggagcagaaacaagagctgtcgagtgggtacaaccatggaaaagggctgagagagctttataatccttagctaggctgtttggtgaaggtgcttctctctgaaaacagccactaaagatggaagaaagtgactgatatggtttggctctgtgtctttacccaaatctcatgtcaaattgtaattcccagtgtcgaaggagggtcctggtgggagatggttgaatcatgggggcggacttcccccttgctgttctcatgatagatttctcagaagatctagttgtttgaaactgcgtaccactcccctcttcactstcttcttcctgccagccatgtaagacatgcttgcttccccttcactttccaccatgattgtaagttttctgatgcctccccagccatgcttcctgtacagttccacaaaaaggaggttcttttaaacctcctttcttcataaattacccagtctctggtagttctttatagcagtgtgagaagggactaatacagtgactatttcttcaaatgtgaaaacagcaatacaagattttaagaaa

SEQ ID NO: 895933 - DNA, 671 bp, Homo sapiens
ctcacagatcccaccaaaactcgagcaggtgcagaacactacctttttgagaggccagctcccaccaggacacaaccttccctggggtccaacagctcctgcatcccacatccctgaagccctgctgatatctccccatgtccatccagagagcttaagtattgtgacactggctggatccagtggtggtggtgtggctgggtccccaggactctagaccatgcagtgtcttataccccagggaatagcagtgcagcacacaaatgaggctgctcccctgggacaaaggtatctaagtaggcgctccctagagcctgagagctgtctctctgtggctgctaacatagacagcaaccctaaaccttccagttacaggactgcatgcaccttcaagggacttgggcagtggtctatttgggtgatgtcccaaggcctaagaaaaggcctgccctacctgtcaccaccaggacacacacaagscatctaggagcctgagaagagacactacctaccactagcacccaagtgtgttctctaagaatgtgaggattaacctgtcccacctgctattactggtatccacacaaccatagaaaaacctgacaacaggttcaccttgcccatcactgctggtgcccacatgcacaatccatgggcccaaggaaaaaccc

SEQ ID NO: 895934 - DNA, 639 bp, Homo sapiens
ggaatgtcatgaagcatacacaagtatcaacagccaaatcaaccaagtggaagaaaggatatcagtttgaaaaccaccttgctgaaataaggcatgcagacaagatcagagaaaaaagaatgaaaaggaacaaacaaaacctcggagaaatatgggactatgtaaaaagactgaaactacaattgattgaagtatctgaaggagacagggagaatggaaccaagttggaaaacacacttcaggatgttatccaagagaacttccccaacctagcaagacaggccaacattcaaattcaggaaatacagagaacaccacaaagatattcctcgagaagagcaaccccaagacacatgatcattacattctccaaggtcgaatgaaggaaaaaatgttaagggcagccagagagaagggccaagtcagctacaaaggcaaacccatcagactaactgtgtacctctcagcagaaatgctacaagccagaaaagactggggrccaatattcaacattaaaaaaaattcaacccagaatttcatatccagccaaactgagcttcatgagcaaaggagaaataaactccttttcagacaagcaaatgttgaaggatttcgtgaccactgagcccgccttgtaag

SEQ ID NO: 895935 - DNA, 639 bp, Homo sapiens
ggaatgtcatgaagcatacacaagtatcaacagccaaatcaaccaagtggaagaaaggatatcagtttgaaaaccaccttgctgaaataaggcatgcagacaagatcagagaaaaaagaatgaaaaggaacaaacaaaacctcggagaaatatgggactatgtaaaaagactgaaactacaattgattgaagtatctgaaggagacagggagaatggaaccaagttggaaaacacacttcaggatgttatccaagagaacttccccaacctagcaagacaggccaacattcaaattcaggaaatacagagaacaccacaaagatattcctcgagaagagcaaccccaagacacatgatcattacattctccaaggtcgaatgaaggaaaaaatgttaagggcagccagagagaagggccaagtcagctacaaaggcaaacccatcagactaactgtgtacctctcagcagaaatgctacaagccagaaaagactggggaccratattcaacattaaaaaaaattcaacccagaatttcatatccagccaaactgagcttcatgagcaaaggagaaataaactccttttcagacaagcaaatgttgaaggatttcgtgaccactgagcccgccttgtaag

SEQ ID NO: 895936 - DNA, 571 bp, Homo sapiens
ggcaggattaggggagcagagacaagataggttttagtgataaatatatgttgccacattcccacagggaatttgacatcctcatcctaaggaaaatattgaagatgaagaaaatagaagagtgagtaattaagatttgagaattcttatgggacgtatgaaaattttatgctttagtcacaggaaatattctgaacaattatgtagcactgtgcttacaaaggtgaagattcatttaccacagtacagggtacattattgcctgaatgaatatgctttgtgcttccagttttcatctttttcagaggcaactattgccaattgcctagtttagctaataagttagagtttttgtactacaarctgttgtccaagacccaaagtcaatttaccaattagtattcttcctctttcccaatagcttcccacctgcagcttatccatccagaaaacgggcagagtatggcaagagattatatttattgaacacagtttagggcatgagatccattcagtctggagaaaatgttaatgaatcaagttacaaacccacaagtaccagaaacatatt

SEQ ID NO: 895937 - DNA, 517 bp, Homo sapiens
taaaacaaggtactgagtgctcatctgatttttccttcttatgaagttgcttttttttgtgtgtagagagttgttaaattgttgtccttgggggagggatgatcagtggagccttctattccagcatcttgctctgcccccaccatcaatgtcactaagattttaggaagccttaactagctaaactccatatgtttttcaaatatatgcaaacagggtggcatgtacatgattattactgggggagaagggtttaattttcagcttatggaatgggaagtttggtaagrgagattatttcttgatgatgaggtgtgtgtaaatgctggaatttagctgtcaagcattctcaatgcagtcaaaaaacagcaaaattttccattaatctggaattctttaaatttggttctctctgaaatcagattagtaaattgtaagaaattagatttttttgtactctgtaaagttaccattcagtttttgttcttattgaaataagaaacaaaacagctgaaga

SEQ ID NO: 895938 - DNA, 644 bp, Homo sapiens
tcttgtaaatttaatcttcagtcgtctataatttaaacatccacagttgaatgcttttgtaatttatttttcaggaaacttatactaatttaagacatttaataattataggtttattttgttatattactttatatttttagaattgtatatttatggagatgagaaaggaagaggaagcagaacatgaaagaagcctgccctttttggtgcaacctgtcctgagccatgtatagttcaattaagatccttttccactattcacaataatgtgataaaaatattacttacatgaaattctcagagtytgttgacagacaccaagacagttgggagaatgtatacataagaaattgaaaaaagaaagaaactgcaaagggggatttgataaatattgatttatttaagtgaaaagaaaggtcagcagttcaagcaaggcctacatatagtcaaagagggaagtgtttgagtaagccacggcaacacataagacagataataaaatatatctcagattttagggtactgagggatagactttaaaaaatggaatccagaaaagcagataatttgatgttccaataaattatgaaactggaacaaaccattctaaaagaatgacatattggaagtcaaagagtcag

SEQ ID NO: 895939 - DNA, 566 bp, Homo sapiens
atttcagagacttttagtactttcactaattctgctactgctatctagaaggcagagccaggtgtacagggtggaacatgaaagcggaccaggaacgtgaccgctgaagcatagcatcacagggagactgttaggcctccggataacggcgggcgggcctgactratgtcaggccctccacaagaggtggtggagcagaggcttctctaactccccccggggaaagggagactccctttcccggtctgctaagtaacgggtgctttttctaggtactgatgctaccgctagaccaaggtccgctaggcaacgggcgtcttcccaggtgctggcgttaccgctagaccaagtagccctctagtggccctgtctgggcatcacagaaggctcacacttgtcttctggtcacttctcaccatatcccttcagctcctatctctgtatggcctggtttttcctagattatgattgtagagcgaagattattataatattggaatgaagagtaattgctacaaactaatgattaatgatattcatatataatcatatatatgatctatatc

SEQ ID NO: 895940 - DNA, 566 bp, Homo sapiens
atttcagagacttttagtactttcactaattctgctactgctatctagaaggcagagccaggtgtacagggtggaacatgaaagcggaccaggaacgtgaccgctgaagcatagcatcacagggagactgttaggcctccggataacggcgggcgggcctgactgatgtcaggccctccacaagaggtggtggagcagagkcttctctaactccccccggggaaagggagactccctttcccggtctgctaagtaacgggtgctttttctaggtactgatgctaccgctagaccaaggtccgctaggcaacgggcgtcttcccaggtgctggcgttaccgctagaccaagtagccctctagtggccctgtctgggcatcacagaaggctcacacttgtcttctggtcacttctcaccatatcccttcagctcctatctctgtatggcctggtttttcctagattatgattgtagagcgaagattattataatattggaatgaagagtaattgctacaaactaatgattaatgatattcatatataatcatatatatgatctatatc

SEQ ID NO: 895941 - DNA, 566 bp, Homo sapiens
atttcagagacttttagtactttcactaattctgctactgctatctagaaggcagagccaggtgtacagggtggaacatgaaagcggaccaggaacgtgaccgctgaagcatagcatcacagggagactgttaggcctccggataacggcgggcgggcctgactgatgtcaggccctccacaagaggtggtggagcagaggcttctctaactccccccggggaaagggagactccctttcccggtctgctaagtaacgggtgctttttctaggtactgatgctaccgctagascaaggtccgctaggcaacgggcgtcttcccaggtgctggcgttaccgctagaccaagtagccctctagtggccctgtctgggcatcacagaaggctcacacttgtcttctggtcacttctcaccatatcccttcagctcctatctctgtatggcctggtttttcctagattatgattgtagagcgaagattattataatattggaatgaagagtaattgctacaaactaatgattaatgatattcatatataatcatatatatgatctatatc

SEQ ID NO: 895942 - DNA, 632 bp, Homo sapiens
ttatgatcacagttacagtttattacagtgaaatttcagtaaaatagctttgaatatgcaatgggaaaagttaagtcaggtgaagtctaggaggaaccaggctctagcttctaggggtccccgcccagtgaactttcccagggacacacttaaatccccaagcaacagtgtgtggcaacacaggtgatgtgttaccaacttaggaagctcctctgagagttgacatccagagtttttggggtgatctgtcacatagagatgcaaggcttgtatgacctcaccaatttagaccacagcccccggtccactcttagaaccaaaaacaggcattcaccatgcatgataaaaagtatcttgtctaactggtgcagcagggcccaaggtttcaggaatwccgaaaaaaaaaaaaaaaaaaaaaaaaaaactaaacaaaaacctaaacaaaacgaaacctttttgagggagaatattccaatgtacagcggttatctcccaggagtgtgttaaggactagttctgaaaacagtactttctttggaatgtcttgtgtttgaggaaaccaggtaagtggacgtaactctttcctgcccagttggctcccctggcctttggcctaggatatcttacagcaa

SEQ ID NO: 895943 - DNA, 654 bp, Homo sapiens
ccactgtctatctctacatcttcattccccacttgcccctcaacccactttctttaggttttactccctaccattctcctgagactgatttggccaaggtcccttttagtccactctttggcaaatcccatagaatgcctctggtccttgccctgygttgaccctctgtagcacctgaaattagtgaactttgggaaatatgatttctgtaccactgttttcccagttctcacccttctttctggcaacttcttcacagtctatgttgccacctcttcttccaatgcccctttgattatcctggggtttcatctcagccagtattcagggtcaggtggagagaatcggaattgccaaaatgaaagaatcgggtgagcgtttgcagggacggcttgtttaactcacatttctgtccttggtggccttggaaagaaccagaatttctttggcaccttggtttcctagacagccctgagcacagagtgggctacctcggaagtgtctagctgtccacagcatcattttcctgctttacagtcatgatgcaccctgatatggggggcatgtgtccatccagggtacactttacactctctcctctccctggcatcttcataccgctgtgtggccacattttggccaacaagatgtgag

SEQ ID NO: 895944 - DNA, 654 bp, Homo sapiens
ccactgtctatctctacatcttcattccccacttgcccctcaacccactttctttaggttttactccctaccattctcctgagactgatttggccaaggtcccttttagtccactctttggcaaatcccatagaatgcctctggtccttgccctgcgttgaccctctgtagcacctgaaattagtgaactttgggaaatatgatttctgtaccactgttttcccagttctcacccttctttctggcaacttcttcacagtctatgttgccacctcttcytccaatgcccctttgattatcctggggtttcatctcagccagtattcagggtcaggtggagagaatcggaattgccaaaatgaaagaatcgggtgagcgtttgcagggacggcttgtttaactcacatttctgtccttggtggccttggaaagaaccagaatttctttggcaccttggtttcctagacagccctgagcacagagtgggctacctcggaagtgtctagctgtccacagcatcattttcctgctttacagtcatgatgcaccctgatatggggggcatgtgtccatccagggtacactttacactctctcctctccctggcatcttcataccgctgtgtggccacattttggccaacaagatgtgag

SEQ ID NO: 895945 - DNA, 684 bp, Homo sapiens
acagaccccaggtgtggtttcaccagcagagatcagataagactgtcccctccctctatccagaatccacctggcatattcctgcctcagggcctttgcacttgctgttccgagcctgcatggggtttcaccatgttggccaggacggtcttgaactcctgagttcaagccatctgcccaccttggcctggcaaagtgctgggattactggctgagccatggtgcctagcctcaggttattttattttattatttattattatttttttgagacggaatcttgctctgtcgtcaggctggagtgcagtggcacgatctcagctcactgcaacctctgcctcctgggttcaaacgattctcctgcctcagcctcctgagtagctgggactacaggcgcccaccaccatrcccggctaattttttgtatttttagtagagacgtggtttcaccatgttagccaggatggtctcaatctcctgatcttgtgatccgcccgcctcggcctcccaaagtgctgggattacaggcgtgagccaccgtgcctggcctaaaatatttatatttttatgccacctgttctagaaagaatttatggcaaatttcaaagatatataacatacaacatgagacgtaattaaaagccggatgatagtaattccactattaaacatccatcctaaaga

SEQ ID NO: 895946 - DNA, 620 bp, Homo sapiens
accttcctggggctactctgtatctgaatgtttctgaaattgataattgagttgggagatatttttgtttgcttttttaaagtttctgataacccatggttttctagtaaattccctttaaaaacccattaagttaatgagatgtggtttctgttgcttgcaggcagagaaatctggtgtaacctcctaactggtcttattggcttcagagaaaccgttctgcacctcccagcctcatggtcacctttttataaacacagatcagaccctttgctcagaagagaagagaaaaatactccaaaaccctcagcaaggtattcaaagccctccttgatttgtccccaaatttctctctcaaagacatatatcctgtgtgtatgtgcagttccctagacatgccaagcacctttcttgctctggaggaaacagcccttgcttgggtagacagatctctgcccagggataagcagtgactggacrtcagcccctcagccacactggacagagaagaagggcagtaaggagacaggaaggaggataatgatgcacccttgggtgcaggagacagcggctggacatgcacctctgggctgccttcctcccacactcccccagcccct

SEQ ID NO: 895947 - DNA, 527 bp, Homo sapiens
ccaactccaaatcagcaacagggaggtatccaggacaacatatcaattgtctaaagaaagggctggataaatacataacataaccacggaagcaataattatgaacaagggctcttcagcagatactaaatgagagtcacgtgtccagaacaattaccgcttgtaaattagaaaagtctccaatagcaaaatgtagccattaaatgacaataagcccttaataacaacaaaaggtgtgattgcttttcattaagcaaagagacaaaacaygcaatctgcaatagtaaaaatgatgcggcaagtgtagtcaggagccctaggccctgtccctggctctgcgctcatttaaggaacacagcagcagttgtgctttcaatatattttgattgagaaaacaacaaactgcaagcagctaccatgtcttgggtagttcttttaatttgtatattagtagtaataaaggttaatatatacagcacttactttgtaccagggactgttctaaggatttttaaaaaaatatttaa

SEQ ID NO: 895948 - DNA, 612 bp, Homo sapiens
cctttctatgaattagaaaaaggtaatccctctggaagagtgcagctcctcatcagctgccaaaagcactgtctgaatatcagcctcactgaccccgagggccagacatccctgtacaatggccctgtctccagctccccttgcttatctctggcctaggcacctcttttatcccctgcttgcttgcttgtattttttaaagagacaggatcttgctctgttgcccaagctggrgtacagaggtgcaatcacagcttgaactcctggtctcaagggatcctcctgcctcagcctcccaaagagctaggattacaggcataagccactgcgtctggccctgctttctacctagaacccagaaattcctttcatgaattcggcctgattggactacaaacgattgttcaaaatgccttgggaactacaatgtccctaggtatcaaagaatactccagatgcctcatcagtgagccaccaggatcagtgagagcctctaaaagagatcaagttcattgtccctagataagcctgcctttttcggtgcccaaccatgacagcaagaggccagtttccctctcccagcagcatggagggcaaaggcctgggtttttg

SEQ ID NO: 895949 - DNA, 612 bp, Homo sapiens
cctttctatgaattagaaaaaggtaatccctctggaagagtgcagctcctcatcagctgccaaaagcactgtctgaatatcagcctcactgaccccgagggccagacatccctgtacaatggccctgtctccagctccccttgcttatctctggcctaggcacctcttttatcccctgcttgcttgcttgtattttttaaagagacaggatcttgctctgttgcccaagctggggtacagwggtgcaatcacagcttgaactcctggtctcaagggatcctcctgcctcagcctcccaaagagctaggattacaggcataagccactgcgtctggccctgctttctacctagaacccagaaattcctttcatgaattcggcctgattggactacaaacgattgttcaaaatgccttgggaactacaatgtccctaggtatcaaagaatactccagatgcctcatcagtgagccaccaggatcagtgagagcctctaaaagagatcaagttcattgtccctagataagcctgcctttttcggtgcccaaccatgacagcaagaggccagtttccctctcccagcagcatggagggcaaaggcctgggtttttg

SEQ ID NO: 895950 - DNA, 612 bp, Homo sapiens
cctttctatgaattagaaaaaggtaatccctctggaagagtgcagctcctcatcagctgccaaaagcactgtctgaatatcagcctcactgaccccgagggccagacatccctgtacaatggccctgtctccagctccccttgcttatctctggcctaggcacctcttttatcccctgcttgcttgcttgtattttttaaagagacaggatcttgctctgttgcccaagctggggtacagaggtgcaatcacagcttgaactcctggtctcaagggatcctcctgcctcagcctcccaaagagctaggattacaggcataagccactgcgtctggccctgctttctacctagaacccagaaattcctttcatgaattcggcctgattggactacaaaygattgttcaaaatgccttgggaactacaatgtccctaggtatcaaagaatactccagatgcctcatcagtgagccaccaggatcagtgagagcctctaaaagagatcaagttcattgtccctagataagcctgcctttttcggtgcccaaccatgacagcaagaggccagtttccctctcccagcagcatggagggcaaaggcctgggtttttg

SEQ ID NO: 895951 - DNA, 571 bp, Homo sapiens
aacataaatttcctggttacactctctcataatgctcagcattctcccatcataacctttattacaatttgtgtttgtgtgtgtgtgtgtgtgtttgtgtgtgtgtgtgtgttatttgttttacttttatatttgttcttcccacttgaatataacctccactggggggagggatgctgtcttgttcaacctcatatccccagtgccccacaaactgcctgtcaacaagaggtacccatgaaatattgcatatttgttgaatgaccgaacaaagaaatgaataccaacagaggatcagggtgatcccttagccttgcctatataatggaatggtgggtctgcccagagagaggagggcagtgcccaggtacacaaaggcactcacaaatgttatacatgagccagtatatcacyctgcctttgatggcaatataggttatccatgttggcttttatgcagctaggcttggacaaagcagccagaaaaaaatctcataatatcaggttttactgtacggaacctcttggcaaaagtgttgcatagctgtctcactcctggattcttttaatt

SEQ ID NO: 895952 - DNA, 649 bp, Homo sapiens
agtaagtaacaggacatgtcttgaaaagcttttgtttctttgtgatacagatttgtgtctattgtatagcaatgaaatgtctgagtttagattgaacttgaaaacaaaaatatctttattgttcagccaatcagacttatttagaacrtaagttattaccaactactgtggtgtatccaaataacttctgaaagcagtttagtgtagtggttaaaagtgtgggctccagcatcaggctgtgtgggttcaaatccctgttctactgcctggtggttgtaaaaccctagacaaagtgttaagcctcagtcccctcatgtgtagagtgaggttaataacagtacctctaacatagagctgttctgaggactcaggaaaataattcatttgcatcattcagcacagtgcttagtatctaaaattcccgataaatgtttgcagtggctgctactattgtaattattgcttaatgccaacaggcctgcatgtttaaattgcatcatgaggtcttgataactacagtgcaactgctatatgtttaaatgacatgcttagtatatcagtttcctagagctatcataacaaattaccccaaaccaggtgactttaagcaactgaaatttattctctctcagttctggaggctagaagt

SEQ ID NO: 895953 - DNA, 649 bp, Homo sapiens
agtaagtaacaggacatgtcttgaaaagcttttgtttctttgtgatacagatttgtgtctattgtatagcaatgaaatgtctgagtttagattgaacttgaaaacaaaaatatctttattgttcagccaatcagacttatttagaacataagttattaccaactactgtggtgtatccaaataacttctgaaagcagtttagtgtagtggttaaaagtgtgggctccagcatcaggctgtgtgggttcaaatccctgttctactgcctggtggttgtaaaaccctagacaaagtgttaagcctcagtcccctcatgtgtagagtgaggttaataacagtacctctaacatagagctgttctgaggactcaggaaaataattcatttgcatcattcagcacagtgcttagtatctaaaattcccgataaatgtttgcagtggctgctactattgtaattattgcttaatgccaacaggcctgcatgtttarattgcatcatgaggtcttgataactacagtgcaactgctatatgtttaaatgacatgcttagtatatcagtttcctagagctatcataacaaattaccccaaaccaggtgactttaagcaactgaaatttattctctctcagttctggaggctagaagt

SEQ ID NO: 895954 - DNA, 649 bp, Homo sapiens
agtaagtaacaggacatgtcttgaaaagcttttgtttctttgtgatacagatttgtgtctattgtatagcaatgaaatgtctgagtttagattgaacttgaaaacaaaaatatctttattgttcagccaatcagacttatttagaacataagttattaccaactactgtggtgtatccaaataacttctgaaagcagtttagtgtagtggttaaaagtgtgggctccagcatcaggctgtgtgggttcaaatccctgttctactgcctggtggttgtaaaaccctagacaaagtgttaagcctcagtcccctcatgtgtagagtgaggttaataacagtacctctaacatagagctgttctgaggactcaggaaaataattcatttgcatcattcagcacagtgcttagtatctaaaattcccgataaatgtttgcagtggctgctactattgtaattattgcttaatgccaacaggcctgcatgtttaaawtgcatcatgaggtcttgataactacagtgcaactgctatatgtttaaatgacatgcttagtatatcagtttcctagagctatcataacaaattaccccaaaccaggtgactttaagcaactgaaatttattctctctcagttctggaggctagaagt
